United States Patent Application Publication US 2012/0227134 A1 - sequence listing, part 3

SEQ ID NO: 7511 - protein, 18 aa, Artificial sequence
  protein pattern
  Variant (2)..(2): Xaa in position 2 is any or no amino acid
  Variant (5)..(5): Xaa in position 5 is any amino acid
  Variant (6)..(6): Xaa in position 6 is Phe or Tyr
  Variant (7)..(8): Xaa in position 7 to 8 is any amino acid
  Variant (10)..(10): Xaa in position 10 is any amino acid
  Variant (13)..(15): Xaa in position 13 to 15 is any amino acid
  Variant (16)..(16): Xaa in position 16 is Ile or Leu
  Variant (17)..(17): Xaa in position 17 is any amino acid
  Variant (18)..(18): Xaa in position 18 is Ala, Asp, Gly or Ser
LXVYXXXXNXSLXXXXXX

SEQ ID NO: 7512 - protein, 9 aa, Artificial sequence
  protein pattern
  Variant (2)..(2): Xaa in position 2 is Glu, Gln or Arg
  Variant (7)..(7): Xaa in position 7 is any amino acid
  Variant (9)..(9): Xaa in position 9 is Phe or Tyr
GXGGFGXVX

SEQ ID NO: 7513 - DNA, 792 bp, Arabidopsis thaliana
  CDS (1)..(792)
atggcgaattcaggaaattatggaaagaggccctttcgaggcgatgaatcggatgaaaagaaagaagccgatgatgatgagaacatattccctttcttctctgcccgatcccaatatgacatgcgtgccatggtctcagccttgactcaagtcattggaaaccaaagcagctctcatgataataaccaacatcaacctgttgtgtataatcaacaagatcctaacccaccggctcctccaactcaagatcaagggctattgaggaagaggcactatagaggggtaagacaacgaccatggggaaagtgggcagctgaaattcgggatccgcaaaaggcagcacgggtgtggctcgggacatttgagactgctgaagctgcggctttagcttatgataacgcagctcttaagttcaaaggaagcaaagccaaactcaatttccctgagagagctcaactagcaagtaacactagtacaactaccggtccaccaaactattattcttctaataatcaaatttactactcaaatccgcagactaatccgcaaaccataccttattttaaccaatactactataaccaatatcttcatcaaggggggaatagtaacgatgcattaagttatagcttggccggtggagaaaccggaggctcaatgtataatcatcagacgttatctactacaaattcttcatcttctggtggatcttcaaggcaacaagatgatgaacaagattacgccagatatttgcgttttggggattcttcacctcctaattctggtttttga

SEQ ID NO: 7514 - protein, 263 aa, Arabidopsis thaliana
MANSGNYGKRPFRGDESDEKKEADDDENIFPFFSARSQYDMRAMVSALTQVIGNQSSSHDNNQHQPVVYNQQDPNPPAPPTQDQGLLRKRHYRGVRQRPWGKWAAEIRDPQKAARVWLGTFETAEAAALAYDNAALKFKGSKAKLNFPERAQLASNTSTTTGPPNYYSSNNQIYYSNPQTNPQTIPYFNQYYYNQYLHQGGNSNDALSYSLAGGETGGSMYNHQTLSTTNSSSSGGSSRQQDDEQDYARYLRFGDSSPPNSGF

SEQ ID NO: 7515 - DNA, 789 bp, Glycine max
  CDS (1)..(789)
atggagggaagatcaatatcacattcttctgaaagagaagaggaatatggtttgttcccaatatattctgaaaggtcccagcaagacatgtcagccatggtttctgctctcacacaagtcattggtggctccaatagtgattctcttcatatgcatgaaggccttttaacttcctcacacaacaacacctcaacccagaatactaacgaacaatcccaagtacaacaacaagaacaagggagtgtaagaagaagacactacagaggagtgaggcagcgtccatggggaaagtgggctgcagagattcgcgatccaaagaaagcagcgagggtatggcttggaacattcgaaactgctgaagctgcagctcttgcttatgatgaagctgcactcagattcaaaggaagcaaagcaaagctcaatttccctgaaagggttcaaggcacagctagcgaatttggttacctcacaaatcagcacatgtcatcaagcagcactaattctaaccctgttgctccacacttgactactcaagaaacttattcaccaagtcactttcaatatgcacagcaacaattcatgagtggtgagagtaacagcttcagtaaccaagatatgcttcgtttctatgggggagacaacatgtttgtttcttctcagcaatctgcatcttcgtcttcttctactgcactgtctcagcagcagcaagaagagttgctgaaattttcgatgcaatttggaggttcttctcattctaatcattctgggaattggaggggtggacattga

SEQ ID NO: 7516 - protein, 262 aa, Glycine max
MEGRSISHSSEREEEYGLFPIYSERSQQDMSAMVSALTQVIGGSNSDSLHMHEGLLTSSHNNTSTQNTNEQSQVQQQEQGSVRRRHYRGVRQRPWGKWAAEIRDPKKAARVWLGTFETAEAAALAYDEAALRFKGSKAKLNFPERVQGTASEFGYLTNQHMSSSSTNSNPVAPHLTTQETYSPSHFQYAQQQFMSGESNSFSNQDMLRFYGGDNMFVSSQQSASSSSSTALSQQQQEELLKFSMQFGGSSHSNHSGNWRGGH

SEQ ID NO: 7517 - DNA, 720 bp, Glycine max
  CDS (1)..(720)
atggaaggaagatcaatatcacattcttctgaaagagaagaggaatatgatttgttcccaatatattctgaaaggtctcagcaagacatgtcagccatggtttctgctctcacacaagtcattggtggctccaatagtgattctcttcagcagcatgaaggccttttaacttcttcacataacaacacctcaacccagaataataatgaacaatcccaagcaccacaacaagaacaagggagtgtaagaagaagacactacagaggagtgaggcagcgtccatggggaaagtgggctgcagagattcgcgatccgaagaaagcagcgagggtatggcttggaacctttgaaacagctgaagctgcagctcttgcttatgatgaagctgctcttagattcaaaggaagcaaagcaaaactcaatttccctgaaagggttcaaggcacagctagcgaatttgaaacttattcaccaagtcatcactttcaatatgcacaacaacaactcatgggtggtgggagtaacagcttcaataacaaccaagatatgcttcgtttctatgggggacataacatgtttgtttcttctcagcaatctgcatcatcgtcttcttccactgcactgtctcagaatcagcaggatgagttgctgagattttcgatgcaatttggagcttcttctcattctgaccattcagggaattggaggggtggacaatga

SEQ ID NO: 7518 - protein, 239 aa, Glycine max
MEGRSISHSSEREEEYDLFPIYSERSQQDMSAMVSALTQVIGGSNSDSLQQHEGLLTSSHNNTSTQNNNEQSQAPQQEQGSVRRRHYRGVRQRPWGKWAAEIRDPKKAARVWLGTFETAEAAALAYDEAALRFKGSKAKLNFPERVQGTASEFETYSPSHHFQYAQQQLMGGGSNSFNNNQDMLRFYGGHNMFVSSQQSASSSSSTALSQNQQDELLRFSMQFGASSHSDHSGNWRGGQ

SEQ ID NO: 7519 - DNA, 750 bp, Arabidopsis thaliana
  CDS (1)..(750)
atggcttatgggaagaggccttttggaggtgatgaatctgaagaaagggaagaagatgagaacttgttcccggtcttctcggcccgatctcaacacgacatgcgtgttatggtctcggccttgactcaagtaatcggaaaccaacaaagcaaatctcatgataacatcagctctattgatgataactatccttctgtgtataatccacaagaccctaatcaacaagttgcgcctactcatcaagaccaaggggacttgaggaggagacattatagaggtgtaaggcaaaggccatggggaaagtgggcagctgaaatccgagacccaaaaaaggcggcacgtgtgtggctcgggacatttgaaaccgctgaatctgcggccttagcttatgatgaagcagccctaaagttcaaaggaagcaaagcaaaactcaatttcccggagagggttcagcttggaagtaactctacatattactcctccaaccaaattccacaaatggaaccacaaagtataccgaactataatcaatactatcatgatgcgagtagtggtgatatgctaagttttaatttgggcggtgggtatgggagtggtaccggatattcaatgtctcatgataatagtactacgactgctgctacaacttcttcgtcttctggtggctcttctaggcaacaagaagagcaagattatgccagattctggcgctttggggattcttcttcctctcctcattcgggatattag

SEQ ID NO: 7520 - protein, 249 aa, Arabidopsis thaliana
MAYGKRPFGGDESEEREEDENLFPVFSARSQHDMRVMVSALTQVIGNQQSKSHDNISSIDDNYPSVYNPQDPNQQVAPTHQDQGDLRRRHYRGVRQRPWGKWAAEIRDPKKAARVWLGTFETAESAALAYDEAALKFKGSKAKLNFPERVQLGSNSTYYSSNQIPQMEPQSIPNYNQYYHDASSGDMLSFNLGGGYGSGTGYSMSHDNSTTTAATTSSSSGGSSRQQEEQDYARFWRFGDSSSSPHSGY

SEQ ID NO: 7521 - DNA, 747 bp, Arabidopsis thaliana
  CDS (1)..(747)
atgtatgggaagaggccttttggaggtgatgaatctgaagaaagggaagaagatgagaacttgttcccggtcttctcggcccgatctcaacacgacatgcgtgttatggtctcggccttgactcaagtaatcggaaaccaacaaagcaaatctcatgataacatcagctctattgatgataactatccttctgtgtataatccacaagaccctaatcaacaagttgcgcctactcatcaagaccaaggggacttgaggaggagacattatagaggtgtaaggcaaaggccatggggaaagtgggcagctgaaatccgagacccaaaaaaggcggcacgtgtgtggctcgggacatttgaaaccgctgaatctgcggccttagcttatgatgaagcagccctaaagttcaaaggaagcaaagcaaaactcaatttcccggagagggttcagcttggaagtaactctacatattactcctccaaccaaattccacaaatggaaccacaaagtataccgaactataatcaatactatcatgatgcgagtagtggtgatatgctaagttttaatttgggcggtgggtatgggagtggtaccggatattcaatgtctcatgataatagtactacgactgctgctacaacttcttcgtcttctggtggctcttctaggcaacaagaagagcaagattatgccagattctggcgctttggggattcttcttcctctcctcattcgggatattaa

SEQ ID NO: 7522 - protein, 248 aa, Arabidopsis thaliana
MYGKRPFGGDESEEREEDENLFPVFSARSQHDMRVMVSALTQVIGNQQSKSHDNISSIDDNYPSVYNPQDPNQQVAPTHQDQGDLRRRHYRGVRQRPWGKWAAEIRDPKKAARVWLGTFETAESAALAYDEAALKFKGSKAKLNFPERVQLGSNSTYYSSNQIPQMEPQSIPNYNQYYHDASSGDMLSFNLGGGYGSGTGYSMSHDNSTTTAATTSSSSGGSSRQQEEQDYARFWRFGDSSSSPHSGY

SEQ ID NO: 7523 - DNA, 948 bp, Vitis vinifera
  CDS (1)..(948)
atggagtacaccctattggacgggttggagcaagcacttgataaagattcggtgcatgaatttgatagcaataaattaagggtggtttcagaggcttataaggtggatcggagacatgggaagaggcctcttccttccgatgaagcggaggagaaagaggatcaagatcatatcttccctgtctactcagcccgctcccaacaagacatgtccgctatggtttcagctctcactcaagtcattggaaacactgacaaaaacccacttcatgatcttggaaacccatcaccaatctcccaccactccgccacaaccccacatgatcaaccttctcagcttcttcaagatcaagggaaccagctgaggagaagacactataggggagtaaggcaaagaccttgggggaagtgggcagctgagatacgtgatccaaataaggcagctcgagtatggctgggcactttcgacactgctgaggatgctgcacttgcctatgatgaagctgctcttaggttcaaaggaaacaaagccaagcttaacttccctgaaagagttcaaggccgaagcgaattaggttacctcacaaatcgtcaagacttccttcttcctcagcaacaacagcttcccaaccctgctgttcctcctcttcctcatccatccctccctcgaccgtcatatcccaatcttcatcactatgctcagctccttccaggtggaggtggtgatttaaatcatgctatgtccagtctttatggtagagaagcttctactacgcagtctttgtcaactacatcttcatcttcttctacaacctctcatccacaacaccatcagcgaagacgacaacgagaagaagaagaattacaacaaccacaacttctacaattttcatcactgtttggaagttcttctagcaacgaccctcacaataacaggagagatgactga

SEQ ID NO: 7524 - protein, 315 aa, Vitis vinifera
MEYTLLDGLEQALDKDSVHEFDSNKLRVVSEAYKVDRRHGKRPLPSDEAEEKEDQDHIFPVYSARSQQDMSAMVSALTQVIGNTDKNPLHDLGNPSPISHHSATTPHDQPSQLLQDQGNQLRRRHYRGVRQRPWGKWAAEIRDPNKAARVWLGTFDTAEDAALAYDEAALRFKGNKAKLNFPERVQGRSELGYLTNRQDFLLPQQQQLPNPAVPPLPHPSLPRPSYPNLHHYAQLLPGGGGDLNHAMSSLYGREASTTQSLSTTSSSSSTTSHPQHHQRRRQREEEELQQPQLLQFSSLFGSSSSNDPHNNRRDD

SEQ ID NO: 7525 - DNA, 696 bp, Populus trichocarpa
  CDS (1)..(696)
atgtcttctatggtttcagctctcactcaagctatgggtactaccgacaataacgtcccaacggtgcaatcaaccccatttgctctccatcaatccgtcgtcaaaggcgaacctgaccagtctcaaccagtgcaagatcaagaaaatacaaggagaaggcattacagaggagtgagacaaagaccttggggtaagtgggcagccgaaatacgtgaccctaaaaaggcagctcgagtctggcttggtacttttgatactgctgaggatgcagctgttgcgtatgacaaggcagcgcttaagttcaaaggcagcaaggctaagcttaattttcctgaaagagttcacgagttcggctacttcatgagttctggggcttcaagcaatgtcatgactgaacaaaatcctaggccagttgctccccctccccctcccccctcatcatttgcaccagacacttacccagacttgcttcaatatgcacaaatcctttctagcaatgatgccaatttcccgtactacacttcaaacctctttaatcaacaacctttccccggccatttttcacaaagctttctatcacagcaacaactaaatcaacaacaagaagatctaatgagattctcgtcaaggtttgatggctcctctagctcagatcaacaggaacatgggaagggctccagtaatcctagcgagtaa

SEQ ID NO: 7526 - protein, 231 aa, Populus trichocarpa
MSSMVSALTQAMGTTDNNVPTVQSTPFALHQSVVKGEPDQSQPVQDQENTRRRHYRGVRQRPWGKWAAEIRDPKKAARVWLGTFDTAEDAAVAYDKAALKFKGSKAKLNFPERVHEFGYFMSSGASSNVMTEQNPRPVAPPPPPPSSFAPDTYPDLLQYAQILSSNDANFPYYTSNLFNQQPFPGHFSQSFLSQQQLNQQQEDLMRFSSRFDGSSSSDQQEHGKGSSNPSE

SEQ ID NO: 7527 - DNA, 723 bp, Populus trichocarpa
  CDS (1)..(723)
atggatgtgatggtttcagctctagctcaagtaattggaagcagccacaatagctcagctcaagtgcaggaaaatccattgacctcaacacaatccagcacagaaaatgatcaaacccaaccagctgttcaagaccaagggaatgcaaggagacgacattatagaggagttaggcaaaggccttgggggaaatgggctgctgagatccgagatcccaagaaggcagctcgagtgtggctaggcactttcgaaacggctgaggctgccgcccttgcttacgatgaagcagctcttaggttcaaaggaagcaaggctaagctcaactttcctgaaagggttccatctggcgggaccgaattaggtttctttactagaggccaaggtttgcatacggttactgaacctgtccctaatcacattatggctcctctagctcgttcccaacgatcacaggaagcatataatccaaataattttcaatatccacaatttcttggaaccacatcaggctatggcttaagccatgtcatgccgcctgcagttccatttggtggagaaacatttctttcaccgacttcctccagtgcatcttctaattcgtggccgatatcttctcaacagcagcagcagcaacaagaggaacttttaagattatcaatgcagtttggaagttcttacaactctcgttatgatccttctaaatacaaagacgaggggctttga

SEQ ID NO: 7528 - protein, 240 aa, Populus trichocarpa
MDVMVSALAQVIGSSHNSSAQVQENPLTSTQSSTENDQTQPAVQDQGNARRRHYRGVRQRPWGKWAAEIRDPKKAARVWLGTFETAEAAALAYDEAALRFKGSKAKLNFPERVPSGGTELGFFTRGQGLHTVTEPVPNHIMAPLARSQRSQEAYNPNNFQYPQFLGTTSGYGLSHVMPPAVPFGGETFLSPTSSSASSNSWPISSQQQQQQQEELLRLSMQFGSSYNSRYDPSKYKDEGL

SEQ ID NO: 7529 - DNA, 693 bp, Ricinus communis
  CDS (1)..(693)
atggatgcaatgatttcagccctagctcaagtcatcgggagtagccaaagtaatccagttcaagtgcatgcaaacccagtatcattagcacaatcaaacgcacaacacaatgatcaaccacaaccgattcaagatcaagggaatgttaggagaagacactatagaggagtgaggcaaagaccatggggaaagtgggcagctgagatcagggacccaaacaaggcagctagggtatggcttggtacttttgatacagctgaagcagcagcacttgcctatgacgaagcagctcttaggtttaaaggaagcaaagctaaacttaacttcccggaaagagttcaaggcagaagtgaattaggttacttgactaatcgcgaacaggtttctaaccgagttgctgctgctcctcctcctcctcctcgccctccacaattactacaacaacaataccaacaaggttacttccaatacccagagtatcttttaggaggttcgagttatggcttaaactatgctatggctccgggtacttacggtagagactcatcttcatcatcatcatccgtatcttctcaacaacagccacaggaagagcttgtaatgagcgatccaatgcagtttggaagtccttattctcgttttgctcatccttcaaatagaagggacttcgattctagtgacgcaagagactag

SEQ ID NO: 7530 - protein, 230 aa, Ricinus communis
MDAMISALAQVIGSSQSNPVQVHANPVSLAQSNAQHNDQPQPIQDQGNVRRRHYRGVRQRPWGKWAAEIRDPNKAARVWLGTFDTAEAAALAYDEAALRFKGSKAKLNFPERVQGRSELGYLTNREQVSNRVAAAPPPPPRPPQLLQQQYQQGYFQYPEYLLGGSSYGLNYAMAPGTYGRDSSSSSSSVSSQQQPQEELVMSDPMQFGSPYSRFAHPSNRRDFDSSDARD

SEQ ID NO: 7531 - DNA, 750 bp, Ricinus communis
  CDS (1)..(750)
atgtctgctatggtttcagctctctctcaagtcatcgctacttctgccgatgataataagcctactgtggtgcaatcagccccacttgcagtagagcaatcccttgtcaaagaagaacttgaccagtcccaacctacccaagatcaagaaaatacaaggagaagacactataggggagtaagacaaaggccatggggaaaatgggcagctgaaatacgtgatcctaagaaggcggctagagtgtggcttggcacttttgacacggctgaggatgcagcccttgcatatgacaaagcagctctaaagttcaaaggcacaaaggctaagcttaattttcccgaaagagttcaagggaaacctgagtttagctacttcatgactacttccggtgactcaagtagtagcatctctcctggacaaaatccaatgctaatggcccctcccgcttcttcttatcttcctccacctcctcctccatccttcccacaagaaacttacccagacttgcttcaatatgcacaaattctttctagtactgacgcgagtttcccatattacacttcaaatctgtttaatcaacagccttatactccccattactcatccaatgaaccatcatcaacatttttatcgcagcaacaacaacagcatcagcagcaagatctgatgagattctctccatggttcgacagctcctctggttctgattaccaagaacatgggaaggactctagtaaccctagcgagtag

SEQ ID NO: 7532 - protein, 249 aa, Ricinus communis
MSAMVSALSQVIATSADDNKPTVVQSAPLAVEQSLVKEELDQSQPTQDQENTRRRHYRGVRQRPWGKWAAEIRDPKKAARVWLGTFDTAEDAALAYDKAALKFKGTKAKLNFPERVQGKPEFSYFMTTSGDSSSSISPGQNPMLMAPPASSYLPPPPPPSFPQETYPDLLQYAQILSSTDASFPYYTSNLFNQQPYTPHYSSNEPSSTFLSQQQQQHQQQDLMRFSPWFDSSSGSDYQEHGKDSSNPSE

SEQ ID NO: 7533 - DNA, 651 bp, Brassica napus
  CDS (1)..(651)
atgcatagtgggaagagacctctttcaccggaatcaatggccggaaaaagagaagagaaagaagagttgggttcttgctcaactttgtcagagtctgatgtgtctgcttttgtctctgaactcacagatcaacctaccccaccatcagtaaatcaaccttcatctcttacccttcaagaacaaagtaatacgagacaacgaaactatagaggtgtgaggcaaagaccctggggaaaatgggcagccgagatccgtgacccaaacaaggcagctcgtgtgtggcttggtacgttcgacactgctgaggaagcagcattagcttatgataaagctgcttttgagtttaggggtcaaaaggccaagctaaacttcccggagcacattcttaccaactctagtggtccatatggaccatatccatcaaccgctacttcccatgatcgcatcaccgtaatgtcacctccagctattgctcctgacatacttcttgatcaatatggacagtttcattccgcaaatagtgattcagttgccaacttttctttgactatgtcgtcttcttcgtcttcattgaatcaacaagagcatataccaaaactagaggatggtaaaaacgtgaagaatattaatatcaataaacgaaggaaatag

SEQ ID NO: 7534 - protein, 216 aa, Brassica napus
MHSGKRPLSPESMAGKREEKEELGSCSTLSESDVSAFVSELTDQPTPPSVNQPSSLTLQEQSNTRQRNYRGVRQRPWGKWAAEIRDPNKAARVWLGTFDTAEEAALAYDKAAFEFRGQKAKLNFPEHILTNSSGPYGPYPSTATSHDRITVMSPPAIAPDILLDQYGQFHSANSDSVANFSLTMSSSSSSLNQQEHIPKLEDGKNVKNININKRRK

SEQ ID NO: 7535 - DNA, 681 bp, Brassica napus
  CDS (1)..(681)
atgatatcatctctcaaccgtgccatcgagtatccagcagccgacgggcaagaaaggtcagactctccggtcaaacaagagcttaataagtcggatcaactacaacaagaccaagatcaaccaagaagaaaacactatagggtcaggcagcgaccatggggaaaatgggcggccgagatccgtgacccaaagaaagcagcccgtgtatggctcgggactttcgagacagcagaagacgccgctttagcctacgaccgagccgccctcaaattcaaaggcaccaaggctaaactcaacttccctgaacgtgttcaaggcccatcaaccacaagctatgttgcatctcaatctggcactgatcatgccccaagaggaggtagtgagttaatgaactcacctcctcagcttggtccatcatctactactaccactactacctcgtggccagtgaattataaccaggacatacttcagtacgctcagttgcttacaagtaatagtgacgttgatttgtcgtactacacatcaagtctcttcagtcagcagcagcagcctttctcaacgccatcttcatcttcttcttcctcgttagctttccaacaaacgcagcagcaacaacagcagcagcgcgaagacgagaagagctatggttaccactattataagtacccaagagaataa

SEQ ID NO: 7536 - protein, 226 aa, Brassica napus
MISSLNRAIEYPAADGQERSDSPVKQELNKSDQLQQDQDQPRRKHYRVRQRPWGKWAAEIRDPKKAARVWLGTFETAEDAALAYDRAALKFKGTKAKLNFPERVQGPSTTSYVASQSGTDHAPRGGSELMNSPPQLGPSSTTTTTTSWPVNYNQDILQYAQLLTSNSDVDLSYYTSSLFSQQQQPFSTPSSSSSSSLAFQQTQQQQQQQREDEKSYGYHYYKYPRE

SEQ ID NO: 7537 - DNA, 723 bp, Glycine max
  CDS (1)..(723)
atgtctgaaatggtttctgctcttgctcaagttatgggaactaccaatcggaacccatacatgccacaatcaacctcctttcctttctcaacttccgtggtcaaagatcaacctcaaccgtacccatctcaacctcctccaaatcaagaggtggcaaataagccacactacagaggagtgaggcagagaccatgggggaaatgggcagcagaaatccgtgacccaaaaaaagcagcaagagtgtggctaggaacctttgaaacagcagaggatgcagcccttgcatatgacaaagcagcactcaagttcaaaggcacaaaagctaagctcaatttccctgaaagacttcatcaaaatgttccctatatgcaacaacaccaacaaggttcctcaaacagaaacgtttttcccttccatgctacttcctccacttcttctagtgcaactgggtctgtttcttctcttgatgctgttgcccctccttcattgtccacacatgaccaccaagttttcccaaatctgtatcaatatgcacagattctttcaagtggtgatgaagagttcccttattacacatcccatcttttcaaccaacaacaacaacaccaacctttcagttctcaattctctaccactttttcttcctcctcatctccctcatcctacttttacaatcagcaacaacaatatgatcaacaaggacatgatcactcaaaccactag

SEQ ID NO: 7538 - protein, 240 aa, Glycine max
MSEMVSALAQVMGTTNRNPYMPQSTSFPFSTSVVKDQPQPYPSQPPPNQEVANKPHYRGVRQRPWGKWAAEIRDPKKAARVWLGTFETAEDAALAYDKAALKFKGTKAKLNFPERLHQNVPYMQQHQQGSSNRNVFPFHATSSTSSSATGSVSSLDAVAPPSLSTHDHQVFPNLYQYAQILSSGDEEFPYYTSHLFNQQQQHQPFSSQFSTTFSSSSSPSSYFYNQQQQYDQQGHDHSNH

SEQ ID NO: 7539 - DNA, 22 bp, Artificial sequence
  primer
atggcgaattcaggaaattatg

SEQ ID NO: 7540 - DNA, 20 bp, Artificial sequence
  primer
tcaaaaaccagaattaggag

SEQ ID NO: 7541 - protein, 119 aa, Artificial sequence
  consensus sequence
  Variant (2)..(3): Xaa in position 2 to 3 is any amino acid
  Variant (5)..(5): Xaa in position 5 is any amino acid
  Variant (9)..(9): Xaa in position 9 is any amino acid
  Variant (11)..(38): Xaa in position 11 to 38 is any amino acid
  Variant (39)..(49): Xaa in position 39 to 49 is any or no amino acid
  Variant (51)..(51): Xaa in position 51 is any amino acid
  Variant (53)..(55): Xaa in position 53 to 55 is any amino acid
  Variant (56)..(56): Xaa in position 56 is any or no amino acid
  Variant (58)..(58): Xaa in position 58 is any amino acid
  Variant (80)..(80): Xaa in position 80 is any amino acid
  Variant (91)..(91): Xaa in position 91 is any amino acid
  Variant (95)..(95): Xaa in position 95 is any amino acid
  Variant (102)..(102): Xaa in position 102 is any amino acid
  Variant (106)..(106): Xaa in position 106 is any amino acid
  Variant (110)..(110): Xaa in position 110 is any amino acid
MXXMXSALXQXXXXXXXXXXXXXXXXXXXXXXXXXXXXXXXXXXXXXXXQXQXXXXRXRHYRGVRQRPWGKWAAEIRDPXKAARVWLGTFXTAEXAALAYDXAALXFKGXKAKLNFPER

SEQ ID NO: 7542 - protein, 56 aa, Artificial sequence
  protein pattern
  Variant (17)..(17): Xaa in position 17 is any or no amino acid
  Variant (28)..(28): Xaa in position 28 is Asp or Glu
  Variant (32)..(32): Xaa in position 32 is Ala, Asp or Ser
  Variant (39)..(39): Xaa in position 39 is any amino acid
  Variant (43)..(43): Xaa in position 43 is Lys or Arg
  Variant (47)..(47): Xaa in position 47 is Asn, Ser or Thr
VRQRPWGKWAAEIRDPXKAARVWLGTFXTAEXAALAYDXAALXFKGXKAKLNFPER

SEQ ID NO: 7543 - protein, 14 aa, Artificial sequence
  protein pattern
  Variant (2)..(2): Xaa in position 2 is Asp, Arg or Ser
  Variant (3)..(3): Xaa in position 3 is any amino acid
  Variant (5)..(5): Xaa in position 5 is Ile or Val
  Variant (9)..(9): Xaa in position 9 is Ala, Ser or Thr
  Variant (11)..(11): Xaa in position 11 is Ala or Val
  Variant (12)..(12): Xaa in position 12 is Ile or Met
  Variant (13)..(13): Xaa in position 13 is Ala or Gly
  Variant (14)..(14): Xaa in position 14 is Gly, Asn, Ser or Thr
MXXMXSALXQXXXX

SEQ ID NO: 7544 - protein, 10 aa, Artificial sequence
  protein pattern
  Variant (2)..(2): Xaa in position 2 is Asp, Glu or Gly
  Variant (3)..(4): Xaa in position 3 to 4 is any amino acid
  Variant (5)..(5): Xaa in position 5 is Asn or Arg
  Variant (6)..(6): Xaa in position 6 is Lys or Arg
  Variant (7)..(7): Xaa in position 7 is any amino acid
QXXXXXXHYR

SEQ ID NO: 7545 - DNA, 1320 bp, Populus trichocarpa
  CDS (1)..(1320)
atggcgagaagcaatttctcggtattaacaattctatcagtcacactcctccttcccgttctctccctctctttctcccctgactcgccctcagatcgtcgcctcttagtcctcctcgacgacttgtcactcaaatcttccctctcaatcttcttcaattctctcaaatctcgcggttttgatctcgatttcaagcttgctgatgacccaaaactcgcccttcaacgttatggccagtacttgtatgatggcttgattctcttctctccttcaatcgaaagatttggtggtgcattggatttagctgctgtgcttgactttgttgactcgggtcatgatctgcttattgcggccgatagttctgcttctgatttgatgaagagtgtagctactgaatgcggggttgattttgatgaggatccatcggctctggttattgatcataaaagttatgcagtcgctgggactgagggtgatcatacattgattgctgcagatgattttattgaatctgatgtgctgcttggaaaaaataagattgaggctcctgtgctctttaaagggattgcacattctttaaatgcagcaaataccctggtattgaaggtcctttctgcatctccttctgcttattcagctaatccaagttccaaattgtcaagtcctccatcattaaccggatcttccatctcattagtttcagtaattcaggctagaaacaatgctcggattatgattacaggctcattagatatgtttagtaaccgatttttcagatcaagcgtacagaaagctgggagcccaaaaaaatatgataaatctggtaatgagcaatttgtgactgaacttagcaaatgggtcttccatgaaagaggtcatctgaaggctgtgaatcttagacacaataaagctggggaaacagacgagcctgcaatgtacaggatcaaggatgatctggatttttctgttgagatatatgaatggtctggaaagagctgggagccatatgtggccgatgatgttcaggtccagttctatatgatgagcccctatgtgttgaaaaccctatcaaatgacaagaagggcttgtatcatacatcattcaaggtgcctgatgtttatggggttttccagtttaaggttgagtataacaggcttggatatactagcctgttgctctccaaacagattccagttcggcccttcagacacaatgaatatgagagatttataacagctgcttttccctactatggagcttcttttacaatgatggctggcttctttgtcttcagctttgtttacctgtaccacaagtga

SEQ ID NO: 7546 - protein, 439 aa, Populus trichocarpa
MARSNFSVLTILSVTLLLPVLSLSFSPDSPSDRRLLVLLDDLSLKSSLSIFFNSLKSRGFDLDFKLADDPKLALQRYGQYLYDGLILFSPSIERFGGALDLAAVLDFVDSGHDLLIAADSSASDLMKSVATECGVDFDEDPSALVIDHKSYAVAGTEGDHTLIAADDFIESDVLLGKNKIEAPVLFKGIAHSLNAANTLVLKVLSASPSAYSANPSSKLSSPPSLTGSSISLVSVIQARNNARIMITGSLDMFSNRFFRSSVQKAGSPKKYDKSGNEQFVTELSKWVFHERGHLKAVNLRHNKAGETDEPAMYRIKDDLDFSVEIYEWSGKSWEPYVADDVQVQFYMMSPYVLKTLSNDKKGLYHTSFKVPDVYGVFQFKVEYNRLGYTSLLLSKQIPVRPFRHNEYERFITAAFPYYGASFTMMAGFFVFSFVYLYHK

SEQ ID NO: 7547 - DNA, 1590 bp, Triticum aestivum
  CDS (89)..(1405)
ggcgagatctagagtagccccgttaaagcccaaacaaaaaccccgctgcgagatctgcgcatctcgctacaccaccaccacgacggccatggcggcgccgcgcgtcctcctcctcctcgccgccgcggcccttctcgccgtcgcctccctcggggacgcttcgggcgagggcccccgcgggcgcaagctgctggtgctcgtcgacgatctggccgtccgctcatcccactcggccttcttcggctcgctccaggcccgcgggctagatctggagttccgcctcgccgacgaccccaagctctcgctccaccgctacggtcagtacctctacgacggcctcgtgctcttcgccccatcgaccccgcgcttcggcggatcggtggaccagaatgctgttctggagtttatcgatgccgggcatgatatgattctggcagcagatcattcggcttcagatctgatccgcggcatcgcgacggagtgtggggttgactttgatgaggacccggaagcaatggttattgaccacatcaattatgcctccagtgaggttgaaggtgaccacaccttgattgctggcgatgacctgattcagtcagatgtgatattggggtccaaaaagattgaggctcctgtgctgtttcgagggattgggcatgcggccaatccatccaacagcttggttttaaaggttctatctgcctcgccatcagcgtattcagcaaacccggaggctaagttggcatctgttccatctctcactgggtcggccatatcgctggtttctgttatgcaggctaggaataatgctcgtgtgttgatatctggatcactggatttgtttagcaacaggttcctaaagtctggtgtgcagaaggctggcagcaaaatgagccatgacaaagctggaaatgaacaatttgtgacagagacgagcaaatgggtcttccatgagaggggtcatctgaaggcagtgaatgtcaagcaccataaggttggggagacaaatgagcctagcatgtaccgcatcaatgatgacttggaatactcagttgagatatatgaatggtctggtacaagctggaagccatatgttgctgatgatgttcagattcagtttttcatgatgagcccttatgttctgaaaaatatgtcaactgacaaaactgctgtatattcagcatccttcaaagttccagatgtttatggagttttccagttcaaggttgagtaccaaaggcttggatacactggcctctctcttgcaaagcagattccagtgcgtccatacaggcatgacgagtatgagaggttcataacttcagcgtttccgtactatgctgcctcattttcaacaatgggagccttcttcatattctcggttgcgtacctgtatcacaaatagatagctcatcgagtagtggaagtaaatcaaggtggcgatggaattgtgatgtcacaagcctggtgatcttaggtgcaattttatggaaccatatttttgtagcgccaatctgtagtacctttatttttaagaaatgggcttctccctgcccccaacctttattaacaaaaaaaaaaaaaaaacga

SEQ ID NO: 7548 - protein, 438 aa, Triticum aestivum
MAAPRVLLLLAAAALLAVASLGDASGEGPRGRKLLVLVDDLAVRSSHSAFFGSLQARGLDLEFRLADDPKLSLHRYGQYLYDGLVLFAPSTPRFGGSVDQNAVLEFIDAGHDMILAADHSASDLIRGIATECGVDFDEDPEAMVIDHINYASSEVEGDHTLIAGDDLIQSDVILGSKKIEAPVLFRGIGHAANPSNSLVLKVLSASPSAYSANPEAKLASVPSLTGSAISLVSVMQARNNARVLISGSLDLFSNRFLKSGVQKAGSKMSHDKAGNEQFVTETSKWVFHERGHLKAVNVKHHKVGETNEPSMYRINDDLEYSVEIYEWSGTSWKPYVADDVQIQFFMMSPYVLKNMSTDKTAVYSASFKVPDVYGVFQFKVEYQRLGYTGLSLAKQIPVRPYRHDEYERFITSAFPYYAASFSTMGAFFIFSVAYLYHK

SEQ ID NO: 7549 - DNA, 1320 bp, Oryza sativa
  CDS (1)..(1320)
atggcggcgccgcgccaccaccacctcgccctcgccgtcgccctcgccctcctcgtcgtcaccgccgcggcggcggacgaggggggaccgcgggggaggcgggtgctggtgctcgtggacgacctggcggtgcggtcgtcgcactcggccttcttcgcgtcgctccaggggcgagggttcgatctcgacttccgcctcgccgacgaccccaagctctcactccaccgctacggccagtacctctacgacggcctcgtcctcttcgccccctccaccccgcgttttggaggatcagtggaccaaaattcaattctggaattcatcgatgctggtcatgatatgatcctggcagcagactcttcggcctctgatcttatccgaggcattgcaacagagtgtggggttgattttgatgaggatccagaggcaatggttattgatcacattaattatgctgccactgatgctgaaggtgatcatactttgattgctggtgatgacctcatccagtcagatgtgatactggggtcaaagaaaattgaggcccctgtattatttcggggaattggacatgcggttaatccatctaacagcttggtcctgaaagtcttatccgcctctccgtcagcatactcagcaaacccaaagtctaagttggcttcccctccatctctcacagggtcggctatatcactggtttctgttatgcaggcaagaaacaatgctcgggtcttgatatctggatcactcgatctgtttagcaacaggttcctaaaatctggtgttcagaaggccggtagcaagataaggcatgagaaagctggaaatgaacaatttgtgacagaaacaagcaaatgggtcttccatgagaggggccatctaaaggcagtgaatgtcaagcataacaaggttggggagacaaatgagcctggcatgtaccgcatcaatgatgacttggaatactctgttgagatctacgaatggtctgggaccagctggaagccgtatgttgctgatgatgttcaagttcagttttacatgatgagcccttatgttctgaagacactgtcgactgacaagaagggtgtattttcaacatccttcaaagttccagatgtttatggagttttccagttcaaagttgagtaccagaggcttggatatactggtctctctctttctaagcagattccagtgcgcccttacaggcataatgagtatgaaagattcataacttcggcatatccgtactatgctgcgtcgttttcaacaatgggagccttcttcatcttctcatttgtgtacctgtaccacaaatag

SEQ ID NO: 7550 - protein, 439 aa, Oryza sativa
MAAPRHHHLALAVALALLVVTAAAADEGGPRGRRVLVLVDDLAVRSSHSAFFASLQGRGFDLDFRLADDPKLSLHRYGQYLYDGLVLFAPSTPRFGGSVDQNSILEFIDAGHDMILAADSSASDLIRGIATECGVDFDEDPEAMVIDHINYAATDAEGDHTLIAGDDLIQSDVILGSKKIEAPVLFRGIGHAVNPSNSLVLKVLSASPSAYSANPKSKLASPPSLTGSAISLVSVMQARNNARVLISGSLDLFSNRFLKSGVQKAGSKIRHEKAGNEQFVTETSKWVFHERGHLKAVNVKHNKVGETNEPGMYRINDDLEYSVEIYEWSGTSWKPYVADDVQVQFYMMSPYVLKTLSTDKKGVFSTSFKVPDVYGVFQFKVEYQRLGYTGLSLSKQIPVRPYRHNEYERFITSAYPYYAASFSTMGAFFIFSFVYLYHK

SEQ ID NO: 7551 - DNA, 1287 bp, Glycine max
  CDS (1)..(1287)
atgtcgaagttaatcttcgtgttccttgcactaattcctcttctctgcacctccttctcgccagagaaaccctcagatcggcgcatcctcgttttgctcgatgacttcgccatcaaatcctctcactctctcttcttcaactccctcaaatctcgcggcttcgatctccaattccacctcgccgacgaccccaaaattgcgctccagagatacggccagtacctctacgacgccctaattctcttttcccccaccattgaacgttttggaggatccattgacgcggctgcaattttggattttgttgattcgggtcatgatttgatcgttgctgctgatagcaatgcatctgatttaatcagggaaatagccaccgagtgtggagtggactttgatgaggatcctgctgctgtggttgtggatcattcggcatatgcagtctctgctactgaaggagatcatacattgattgctagtgatgattttatcaagtctgacgtcatatttggaagcaaaaaaattgaggctccagtacttttccaggggattgggcattcactaaatcctaccaatagcctggtgttgaaagttctctctgcatctccttcagccttttctgctaacccaaaatctaaagtgacaagtcctccatcactcactggaacttcaatctcattagtttcaattatacaggcaagaaataatgcccggatattgatctctggctcattgagcttgttcagcaaccgatttttcaggtcaggtgtgcagaaggctgggagtccaaccaaacatgagaagtcaggtaatgagcagttcttgaatgaacttagcaaatggattttccatgaacgaggtcacctcaaggcggtgaatgtgcaacaccacaaagttggggaagctaatgaaccagccatctatcggatcaatgataatttggaatactctgttgaagtttatgagtggtctgggacagcatgggaaccttacgtagctgatgatgttcaagtgcaattttacatgatgagcccctatgtcttgaagactttatcaactgatggcaagggccgttatttcacatcatttaaggttccagatgtctatggggttttccaattcaaagttgagtacgaaaaacttggatatacaagcttatctttatcaaagcagattcctgttcgtccctttagacacaatgaatatgaaagatttataccagcagcctatccctattatggagcatcattttcaatggtaaggatctctttcccattgtcatttggttga

SEQ ID NO: 7552 - protein, 428 aa, Glycine max
MSKLIFVFLALIPLLCTSFSPEKPSDRRILVLLDDFAIKSSHSLFFNSLKSRGFDLQFHLADDPKIALQRYGQYLYDALILFSPTIERFGGSIDAAAILDFVDSGHDLIVAADSNASDLIREIATECGVDFDEDPAAVVVDHSAYAVSATEGDHTLIASDDFIKSDVIFGSKKIEAPVLFQGIGHSLNPTNSLVLKVLSASPSAFSANPKSKVTSPPSLTGTSISLVSIIQARNNARILISGSLSLFSNRFFRSGVQKAGSPTKHEKSGNEQFLNELSKWIFHERGHLKAVNVQHHKVGEANEPAIYRINDNLEYSVEVYEWSGTAWEPYVADDVQVQFYMMSPYVLKTLSTDGKGRYFTSFKVPDVYGVFQFKVEYEKLGYTSLSLSKQIPVRPFRHNEYERFIPAAYPYYGASFSMVRISFPLSFG

SEQ ID NO: 7553 - DNA, 1302 bp, Glycine max
  CDS (1)..(1302)
atgtcgaagttaatcttcgtgttccttgcactaattcctcttctctgcacctccttctcgccagagaaaccctcagatcggcgcatcctcgttttgctcgatgacttcgccatcaaatcctctcactctctcttcttcaactccctcaaatctcgcggcttcgatctccaattccacctcgccgacgaccccaaaattgcgctccagagatacggccagtacctctacgacgccctaattctcttttcccccaccattgaacgttttggaggatccattgacgcggctgcaattttggattttgttgattcgggtcatgatttgatcgttgctgctgatagcaatgcatctgatttaatcagggaaatagccaccgagtgtggagtggactttgatgaggatcctgctgctgtggttgtggatcattcggcatatgcagtctctgctactgaaggagatcatacattgattgctagtgatgattttatcaagtctgacgtcatatttggaagcaaaaaaattgaggctccagtacttttccaggggattgggcattcactaaatcctaccaatagcctggtgttgaaagttctctctgcatctccttcagccttttctgctaacccaaaatctaaagtgacaagtcctccatcactcactggaacttcaatctcattagtttcaattatacaggcaagaaataatgcccggatattgatctctggctcattgagcttgttcagcaaccgatttttcaggtcaggtgtgcagaaggctgggagtccaaccaaacatgagaagtcaggtaatgagcagttcttgaatgaacttagcaaatggattttccatgaacgaggtcacctcaaggcggtgaatgtgcaacaccacaaagttggggaagctaatgaaccagccatctatcggatcaatgataatttggaatactctgttgaagtttatgagtggtctgggacagcatgggaaccttacgtagctgatgatgttcaagtgcaattttacatgatgagcccctatgtcttgaagactttatcaactgatggcaagggccgttatttcacatcatttaaggttccagatgtctatggggttttccaattcaaagttgagtacgaaaaacttggatatacaagcttatctttatcaaagcagattcctgttcgtccctttagacacaatgaatatgaaagatttataccagcagcctatccctattatggagcatcattttcaatgatggtgggtttcttcatcttcactgcagttcatctatacagcaagtag

SEQ ID NO: 7554 - protein, 433 aa, Glycine max
MSKLIFVFLALIPLLCTSFSPEKPSDRRILVLLDDFAIKSSHSLFFNSLKSRGFDLQFHLADDPKIALQRYGQYLYDALILFSPTIERFGGSIDAAAILDFVDSGHDLIVAADSNASDLIREIATECGVDFDEDPAAVVVDHSAYAVSATEGDHTLIASDDFIKSDVIFGSKKIEAPVLFQGIGHSLNPTNSLVLKVLSASPSAFSANPKSKVTSPPSLTGTSISLVSIIQARNNARILISGSLSLFSNRFFRSGVQKAGSPTKHEKSGNEQFLNELSKWIFHERGHLKAVNVQHHKVGEANEPAIYRINDNLEYSVEVYEWSGTAWEPYVADDVQVQFYMMSPYVLKTLSTDGKGRYFTSFKVPDVYGVFQFKVEYEKLGYTSLSLSKQIPVRPFRHNEYERFIPAAYPYYGASFSMMVGFFIFTAVHLYSK

SEQ ID NO: 7555 - DNA, 1864 bp, Sorghum bicolor
  CDS (66)..(1382)
gcacgagggctctgcgccacttccaaacccaaaacccccctcctcacgagatctgcgcagcagcaatggcgacgcggcgccacgtcctcctcctcgccttcgcgaccctcctcgcgctcgccgcggccgcggagggggccgaagaggggccccgcgggcggcggctgctggtcctgctggacgacctggccgtgcggtcgtcgcactcggccttcttcggctcgctccaggcgcgcgggttcgatctcgacttccgcctcgccgacgaccccaagctctcgctccaccgctacggccagtacctctacgacggcctcgtgctcttcgccccctccaccccacgttttggtggatcagtggaccagaacgcagtcctcgaatttattgatgctgggcatgacatgatcctggcggcagattcctctgcctctgatcttattcgtggcattgcaacagagtgcggggttgattttgatgaggatccagaggcaatggttattgaccacattaactatgccgtcacggatgttgaaggtgatcacaccttgattgctggtgatgatcttatccagtcagatgtgatactggggtctaaaaagattgaggctcctgtattgtttcgaggaattggacacacggctaatccatcaaacagtttggttctgaaagtcctatctgcctctccatcagcatattcagctaacccaaagactaagttgtcatctcctccatcgctcactgggtcagctatatcattggtttcggttatgcaggcaagaaataatgctcgggtgctgatatctggatcactcgacctgtttagcaaccggttcctgaagtctggtgttcaaaaggctggtagcaaaacgagatacgagagggctggaaatgagcaatttgtgaccgagacaagcaaatgggttttccatgagagggggcatctaaaggctgttaatgttaagcatcacaaggttggggaggccaatgaaccaggcatgtaccgcattaatgatgacctggaatactctgttgagatctatgaatggtccggaacaagctggaagccatatgttgctgatgatgtgcaacttcaattttttatgatgagtccttatgttctgaaaactatgtcgactgacaacaagggtttatattcaacatccttcaaagttcctgatgtttatggagttttccagttcaaagttgagtaccaaagattgggatatactggtctgtcttttacaaagcagattccagtacgcccttacaggcataacgagtatgagagattcataacatcagcttacccatactacactgcctcattttcaacaatgggtgctttcttcatattctcgcttgtgtacctgtaccacaaataagggactcatgggagcacacaagtttctggaggctgatgcgacctagatctgtggcactgaatgtgtgctataagccaagtgttacctggtgcaattttatggaaccatatttttgtagtgccaacttagataacatttgacgaccgtgaccgcactcatgagaatttacttgtgctaggatgttcgatctgcctcactttttcttggatcctttctgatcaacacttgtgaaaacgtctacagtatagcattgaaatgatgagcatgtagtgattttgaaagtactacactcttgagcttgcattctgatttccggtcctgaatgtggacttccaagtttgtgattgttatatttccgcacttgttggtgcttattccttggatgtgcttgattttttacctgggtgtgttgaaaaatgaatactcgaagacagtagagcttcatgttcaaaattccaaatttggaatgctatctggctcct

SEQ ID NO: 7556 - protein, 438 aa, Sorghum bicolor
MATRRHVLLLAFATLLALAAAAEGAEEGPRGRRLLVLLDDLAVRSSHSAFFGSLQARGFDLDFRLADDPKLSLHRYGQYLYDGLVLFAPSTPRFGGSVDQNAVLEFIDAGHDMILAADSSASDLIRGIATECGVDFDEDPEAMVIDHINYAVTDVEGDHTLIAGDDLIQSDVILGSKKIEAPVLFRGIGHTANPSNSLVLKVLSASPSAYSANPKTKLSSPPSLTGSAISLVSVMQARNNARVLISGSLDLFSNRFLKSGVQKAGSKTRYERAGNEQFVTETSKWVFHERGHLKAVNVKHHKVGEANEPGMYRINDDLEYSVEIYEWSGTSWKPYVADDVQLQFFMMSPYVLKTMSTDNKGLYSTSFKVPDVYGVFQFKVEYQRLGYTGLSFTKQIPVRPYRHNEYERFITSAYPYYTASFSTMGAFFIFSLVYLYHK

SEQ ID NO: 7557 - DNA, 1570 bp, Oryza sativa
  CDS (43)..(1362)
gacgcgaaacaaaacctccccacgccgcgagatctcgcagcaatggcggcgccgcgccaccaccacctcgccctcgccgtcgccctcgccctcctcgtcgtcaccgccgcggcggcggacgaggggggaccgcgggggaggcgggtgctggtgctcgtggacgacctggcggtgcggtcgtcgcactcggccttcttcgcgtcgctccaggggcgagggttcgatctcgacttccgcctcgccgacgaccccaagctctcactccaccgctacggccagtacctctacgacggcctcgtcctcttcgccccctccaccccgcgttttggaggatcagtggaccaaagttcaattctggaattcatcgatgctggtcatgatatgatcctggcagcagactcttcggcctctgatcttatccgaggcattgcaacagagtgtggggttgattttgatgaggatccagaggcaatggttattgatcacattaattatgctgccactgatgctgaaggtgatcatactttgattgctggtgatgacctcatccagtcagatgtgatactggggtcaaagaaaattgaggcccctgtattatttcggggaattggacatgcggttaatccatctaacagcttggtcctgaaagtcttatccgcctctccgtcagcatactcagcaaacccaaagtctaagttggcttcccctccatctctcacagggtcggctatatcactggtttctgttatgcaggcaagaaacaatgctcgggtcttgatatctggatcactcgatctgtttagcaacaggttcctaaaatctggtgttcagaaggccggtagcaagataaggcatgagaaagctggaaatgaacaatttgtgacagaaacaagcaaatgggtcttccatgagaggggccatctaaaggcagtgaatgtcaagcataacaaggttggggagacaaatgagcctggcatgcaccgcatcaatgatgacttggaatactctgttgagatctacgaatggtctgggaccagctggaagccgtatgttgctgatgatgttcaagttcagttttacatgatgagcccttatgttctgaagacactgtcgactgacaagaagggtgtattttcaacatccttcaaagttccagatgtttatggagttttccagttcaaagttgagtaccagaggcttggatatactggtctctctctttctaagcagattccagtgcgcccttacaggcataatgagtatgaaagattcataacttcggcatatccgtactatgctgcgtcgttttcaacaatgggagccttcttcatcttctcatttgtgtacctgtaccacaaatagataactcatgagagagcacgagttacctgaggctgatgtgtgctagatccatgcactgattgtgctgtaaacccagtgttgggggttccaagttcatagaaccatatttttgtagcgcaatctagagcacctttgacgaccactatcattgataacaagaaattgtactcctgctgctagaatcttccaaccatcccccttttctttc

SEQ ID NO: 7558 - protein, 439 aa, Oryza sativa
MAAPRHHHLALAVALALLVVTAAAADEGGPRGRRVLVLVDDLAVRSSHSAFFASLQGRGFDLDFRLADDPKLSLHRYGQYLYDGLVLFAPSTPRFGGSVDQSSILEFIDAGHDMILAADSSASDLIRGIATECGVDFDEDPEAMVIDHINYAATDAEGDHTLIAGDDLIQSDVILGSKKIEAPVLFRGIGHAVNPSNSLVLKVLSASPSAYSANPKSKLASPPSLTGSAISLVSVMQARNNARVLISGSLDLFSNRFLKSGVQKAGSKIRHEKAGNEQFVTETSKWVFHERGHLKAVNVKHNKVGETNEPGMHRINDDLEYSVEIYEWSGTSWKPYVADDVQVQFYMMSPYVLKTLSTDKKGVFSTSFKVPDVYGVFQFKVEYQRLGYTGLSLSKQIPVRPYRHNEYERFITSAYPYYAASFSTMGAFFIFSFVYLYHK

SEQ ID NO: 7559 - DNA, 1596 bp, Gossypium hirsutum
  CDS (63)..(1376)
gttaccttggcgctcccggctcctcgccccgtgccgccccgaaaaaaatccctaatcaaaaaatggggaaattgtggctgatttgcattgcttcgatctcgatccttctcccatttctctgcaatgctttctctcccgaaacgcctacggatcgccgagtccttgttctcctcgacgacttcgccatcaagtcgtcacactccctctacttcaatgccctcaaatcacgtggcttcgacctggaattcaaactcgccgatgatccaaagatcgccttgcaacgctacggccagtatctttacgatgccttgatcctcttctgcccctccgtcgaacgatttggaggatctattgatgttgccgccattgtcaattttgttgattctggtcatgatttaattgttgcggcggatgttaatgcttctgatttgatccgggaagttgccaccgaatgtggagttgatttcgatgaggatccttcggctatggttatcgatcacactggctatgcagtttcggaaacagaaggagatcatactttgattgcatctgatgattttattaaatctgatgtgattataggaagcaagaaaattgaggctcctgtacttttccagggcattggccattcactgaatcctgtcaatagcttggtgttaaaggttctctcagcttctccatctgcctattcagctaatcccttatccaagctgtcaactccaccatcattgacgggttctgcaatctccttggtttcagttgtccaggcaaggaacaatgcacgaattctgattactggctcactaagtatgttcagcaatcggtttttcagatctggtgtccagaaagctgggagcccaaccaaatatgagaaatcaggtaatgagcaatttttgaccgaacttagcaaatggattttccatgaaagaggtcatcttaaggctgtgaatgtgaaacaccacaaagtcgtggaaacagatgaacctgctttgtacaggattaatgatgagttggaatactcagttgagatctatgagtggtctggaacaagctgggagccatatgttgctaatgatgtccaagtgcagttttacatgatgagcccctatgttttgaaaactttatcatctgacaaaaagggtctatattccgcatcatttaaggttcccgatgtttatggtgttttccaattcaaggtcgagcaccaaaagcttgggtatactagtttatccctttcaaagcagattcctgtcagaccatatagacacaatgaatatgaaagattcatacctgctgcttacccctattatggagctgcattttctatgatggctggattcttcatcttctcgttcgttcatctctacagcaagtaaaactgtagcatctctagcttgcaggccgtggaccgttggattcgaaatttttgagtggcacaaatgatgcaatagaaatgtttagggttttgaaatttatgcgttatgttatttaccggttagaggaaaaaaaaatgccgtagagttatccgttcagtttcccctactttctcttttacgctgttataatatttcagaaatactattattatttttcatt

SEQ ID NO: 7560 - protein, 437 aa, Gossypium hirsutum
MGKLWLICIASISILLPFLCNAFSPETPTDRRVLVLLDDFAIKSSHSLYFNALKSRGFDLEFKLADDPKIALQRYGQYLYDALILFCPSVERFGGSIDVAAIVNFVDSGHDLIVAADVNASDLIREVATECGVDFDEDPSAMVIDHTGYAVSETEGDHTLIASDDFIKSDVIIGSKKIEAPVLFQGIGHSLNPVNSLVLKVLSASPSAYSANPLSKLSTPPSLTGSAISLVSVVQARNNARILITGSLSMFSNRFFRSGVQKAGSPTKYEKSGNEQFLTELSKWIFHERGHLKAVNVKHHKVVETDEPALYRINDELEYSVEIYEWSGTSWEPYVANDVQVQFYMMSPYVLKTLSSDKKGLYSASFKVPDVYGVFQFKVEHQKLGYTSLSLSKQIPVRPYRHNEYERFIPAAYPYYGAAFSMMAGFFIFSFVHLYSK

SEQ ID NO: 7561 - DNA, 1311 bp, Bombyx mori
  CDS (1)..(1311)
atgaaaaccacgataattttagggacattgatcacttttttaacgctcgtttgcgcggatcatgaaactttagttctaatagataacttaaatatcaaagaaacgcattcacaattcttcaaatcattacaagaacgcggctatggcttaacattcaaacttgcggatgatgcaaatcttgtcctgtcaaaatacggagaatatttatacaagaatctcatagtattcgctccttccgtgctcgagtttggtggacaggtagacagtgaggccataaccaaattcatagacgatggcggaaaccttcttatggctggtaacgccgcggccggagacgtatatagagaaatcgcttcagaatgtggatttcagatggacgaggaatctgcagcagtcatagaccacttcaactatgatgtgactgatgagggagaccacactcgcattgtagtatcacctaagaacctaatcaaggctcccacaattgtaggagaacagaatacacagcctctgctatttgaaggcactggacttattgtggacaaggataacagcttggttttgcctattctatcagctgattcgactgcctacagttacaaccctaagagtcaggtgaaagagtacccccatgcagttggccgtaagacagtactgattgcagctctgcaagcaagaaacaatgctcgtattgttttcagtggatcgttattcttcttctctgatgaggccttcaattctcctgttacaaaagtacagggtgacaaaacaaagtcagatgtatcaggcaacaagattctcgcgattcgccttactgaatgggtgtttggtgagcgtgggcgtttacgcgtgcgcaatgtcgaccatcacagacaaggagagaaggaaccgtccagtgcctataccattacagacactgttgtatacagaattgaaattgaagagctaaagaatggcaaatggcagcctttcgaagcaaacgatgtgcagctagagtttgtgcgaatcgacccttttatacgcacaactttacaaaagaaacccaatggcgtctatgaggctgtcttcaaagttccagatgtctggggtgtttatcagttcaaagtggattacgacagggtcgggtatacaagactttatcactcaacacaggtgtcagtccgcccactacaacacacacaatatgagcgcttcataccgagcgcctacccatactacgttagttcgttctcaatgatgatcggagtgttcttattttcatttgttttcctgtattacaaagaggatcaacctaaaacgaagagcgagtaa

SEQ ID NO: 7562 - protein, 436 aa, Bombyx mori
MKTTIILGTLITFLTLVCADHETLVLIDNLNIKETHSQFFKSLQERGYGLTFKLADDANLVLSKYGEYLYKNLIVFAPSVLEFGGQVDSEAITKFIDDGGNLLMAGNAAAGDVYREIASECGFQMDEESAAVIDHFNYDVTDEGDHTRIVVSPKNLIKAPTIVGEQNTQPLLFEGTGLIVDKDNSLVLPILSADSTAYSYNPKSQVKEYPHAVGRKTVLIAALQARNNARIVFSGSLFFFSDEAFNSPVTKVQGDKTKSDVSGNKILAIRLTEWVFGERGRLRVRNVDHHRQGEKEPSSAYTITDTVVYRIEIEELKNGKWQPFEANDVQLEFVRIDPFIRTTLQKKPNGVYEAVFKVPDVWGVYQFKVDYDRVGYTRLYHSTQVSVRPLQHTQYERFIPSAYPYYVSSFSMMIGVFLFSFVFLYYKEDQPKTKSE

SEQ ID NO: 7563 - DNA, 1320 bp, Zea mays
  CDS (1)..(1320)
atggcgacgcggcgccacatcctcctcctcgccgctgccttcgtgtcccttctcgcgctcgaggctgtggagggcctcgaagaggggccccgcgggcgccggctgctggtcctgctggacgacctggccgtgcggtcgtcgcactcggccttcttcggctcgctccaggcgcgcgggttcgatctcgaattccgcctcgccgacgaccccaagctctcgctgcaccgctacggccagtacctctacgatggcctcgtgctgttcgccccctccaccccacgttttggtggatcagtggaccagaacgcagtccttgaatttattgatgctgggcttgatatgatcctggcggcagattcctctgcctctgatcttattcgtggcattgcgacagagtgtggggttgattttgatgaggatccagaggcaatggttattgaccacattaactatgccgctatggatgttgaaggcgatcacaccttgattgttggtgatgatcttattcagtcagatgtcatactggggtctaaaaagattgaggctcctgtattatttcgtggaattggacacacggctaatccatcaaacagtttggttctgaaagtcctatctgcctctccatcagcatactcagctaacccaaagactaagttatcgttgcctccatcgcttactgggtcagctatatcactggtttcggttatgcaggcaagaaataatgctcgggtgctgctatctggatcacttgatctttttagcaaccggttcctgaagtctggtgttcaaaaggctggtagcaaaacgagatacgagagagctggaaatgagcaatttgtgacagagacaagcaaatgggtcttccatgagagggggcaccttaaggctgttaatgttaagcaccacaaggttggggagaccaatgaaccaggcatgtaccgcattaacgatgacctggaatactctgttgagatctatgaatggtctggaacaagctggaagccatatgttgctgatgatgtgcaactccagtttttcatgatgagtccttatgttctgaaaactatgtcgaatgacaacaagggtttatactcaacatccttcaaagttcctgatgtctacggagttttccagttcaaagttgagtaccagaggctgggatatactggtttgtcttttacaaagcagattccagtgcgcccttacaggcataacgagtatgagaggttcataacatcagcgtacccatactacactgcctcattttcaacgatgtgtgctttcttcatattctcgcttgtgtacctgtaccacaaataa

SEQ ID NO: 7564 - protein, 439 aa, Zea mays
MATRRHILLLAAAFVSLLALEAVEGLEEGPRGRRLLVLLDDLAVRSSHSAFFGSLQARGFDLEFRLADDPKLSLHRYGQYLYDGLVLFAPSTPRFGGSVDQNAVLEFIDAGLDMILAADSSASDLIRGIATECGVDFDEDPEAMVIDHINYAAMDVEGDHTLIVGDDLIQSDVILGSKKIEAPVLFRGIGHTANPSNSLVLKVLSASPSAYSANPKTKLSLPPSLTGSAISLVSVMQARNNARVLLSGSLDLFSNRFLKSGVQKAGSKTRYERAGNEQFVTETSKWVFHERGHLKAVNVKHHKVGETNEPGMYRINDDLEYSVEIYEWSGTSWKPYVADDVQLQFFMMSPYVLKTMSNDNKGLYSTSFKVPDVYGVFQFKVEYQRLGYTGLSFTKQIPVRPYRHNEYERFITSAYPYYTASFSTMCAFFIFSLVYLYHK

SEQ ID NO: 7565 - DNA, 1323 bp, Zea mays
  CDS (1)..(1323)
atggcgacgcggtgccacgtcctgctcctcctcgccgccgccttcgcgtccctcctcgcgctcgtggccgcggaagggggcgaagaggggccccgcgggcgccggctgctcgtcctcctggacgacctggccgtgcggtcgtcgcactcggccttcttcggctcgctccaggcgcgtgggttcgatctcgacttccgcctcgctgacgatccaaagctctcgctccaccgctacggccagtacctctacgacggcctcgtgctcttcgccccctccacaccacgttttggtggatcagtggaccagaacgcagtcctcgaatttattgatgctgggcatgacatgatcctggcggcagattcctctgcctctgatctcattcgtggcattgcaacagagtgtggggttgattttgatgaggatccagaggcaatggttattgaccatatgaactatgccgtcacagatgttgaaggtgatcacaccttgattgctggtgacgatcttatccattcggatgtgatactagggtctgaaaagattgaggctcctgtattgtttcgaggaattggacacatggctaatccatcaaacagtttggttctgaaggttctatcagcctctccatcagcatattcagctaatccaaagactaagttagcgtctcctccatcgctcactgggtcagctatatcattggtttcggttatgcaggcaagaaataatgctcgggtgctgttatctggatcactcgatctgtttagcaaccggttcctgaagtctggtgttcaaaaggctgatagcaaaacaagatatgagagagctggaaacgagcaatttgtggcagagataagcaaatgggttttccatgagaggggacatctaaaggctgttaatgttaggcatcacaaggttggggagaccaatgaaccaggcatgtaccgcattaatgatgacctggaatactctgttgagatctatgaatggtccggaacaagctggaagccgtatgttgctgatgatgtgcagcttcaatttttcatgatgagcccttacgttctgaaaactatgtcgactgacaacaagggtttgtattcaacaaccttcaaagttccagatgtttatggagttttccagttcaaagttgagtaccaaagactgggatatactggtctgtcttttacaaagcagattccagtacgtccttacagacataatgagtatgagagattcataacatcagcgtacccatactacaccgcctcattttcaacaatgggtgctttcttcgtattctcgtttgtgtacctgtaccacaaataa

SEQ ID NO: 7566 - protein, 440 aa, Zea mays
MATRCHVLLLLAAAFASLLALVAAEGGEEGPRGRRLLVLLDDLAVRSSHSAFFGSLQARGFDLDFRLADDPKLSLHRYGQYLYDGLVLFAPSTPRFGGSVDQNAVLEFIDAGHDMILAADSSASDLIRGIATECGVDFDEDPEAMVIDHMNYAVTDVEGDHTLIAGDDLIHSDVILGSEKIEAPVLFRGIGHMANPSNSLVLKVLSASPSAYSANPKTKLASPPSLTGSAISLVSVMQARNNARVLLSGSLDLFSNRFLKSGVQKADSKTRYERAGNEQFVAEISKWVFHERGHLKAVNVRHHKVGETNEPGMYRINDDLEYSVEIYEWSGTSWKPYVADDVQLQFFMMSPYVLKTMSTDNKGLYSTTFKVPDVYGVFQFKVEYQRLGYTGLSFTKQIPVRPYRHNEYERFITSAYPYYTASFSTMGAFFVFSFVYLYHK

SEQ ID NO: 7567 - DNA, 1338 bp, Caenorhabditis elegans
  CDS (1)..(1338)
atgaggtggttgccgggactcctgctcatcgcttctatcggttttcatcaatcattggccgatagagttctcgttttaggagaaactgctgctgtgaaagacactcattcagtttttctcaactctgttaaagagcgaggacatgagctaaccgttcgtgcagccgacgactctcaacttgccctattcaagcatggtcagctgatctttgaccatctcttcattcttgccccaggggttcaagtcttcggaggatccctttctccatctgaaatctcgaagtttgtggatgctggagggaatgttctggtcgctgctgggtctaacattggtgatgctcttcgtgaaattgctgctgaacatggattcgaattcgaagaagctggaacttctgttattgaccatcacaactacgatcaaactctcgattctggggatcacacaactctcgtagtcggaaaagatcagctcattagtgcggaactgatcgttggaaactcggcaaagctgcacccagttcttttcaagggaattggattagttgctggaaagacaaataatcttgcactgagcattgtcagagcatctggaaccgcttactcatatgatccgaaagctgttcgagctacgaatccatctatcgccggatctcgtacattgctggtcggtggacttcaatctcgaaacaatgccagaattgttttcactggaagttccgaacttttctccaataccttcttctccgcaaaaaccaactccgtcaatccttccgtacaaggagctcaatctggaaacgccgattttgctacagccatcactagatgggtgatgaaggagagtggagttcttcgtgtcaagactgtcaatcaccacaagaaaggtgaaactgtaccaccagttgagggttatttcattaccgaagatgttgtttacaccattgaaatcgaagagttgaagaatggaaaatgggttccattccaaggaaaggacgttcaacttgagtttgttcgcatcgatccattcgtcagagcaacattgaagaacagcaatggtcgtcttagcgttgctttcaagcttccagatgtgctcggagttttcaaattcctggttgattacagacgcgttggatacactcatctctatgatgtgcaacaggtgtcggttcgtccattgtggcacacccagtatgaacgtttcattcgctccgcatatccatactacgcctcttcgttctcaatgatggcgggactcgtgttgttctccatcgtctatctttatcataaagatacgccagtcaaaggagccaaggttctggattccgaaaagaagaaaaactaa

SEQ ID NO: 7568 - protein, 445 aa, Caenorhabditis elegans
MRWLPGLLLIASIGFHQSLADRVLVLGETAAVKDTHSVFLNSVKERGHELTVRAADDSQLALFKHGQLIFDHLFILAPGVQVFGGSLSPSEISKFVDAGGNVLVAAGSNIGDALREIAAEHGFEFEEAGTSVIDHHNYDQTLDSGDHTTLVVGKDQLISAELIVGNSAKLHPVLFKGIGLVAGKTNNLALSIVRASGTAYSYDPKAVRATNPSIAGSRTLLVGGLQSRNNARIVFTGSSELFSNTFFSAKTNSVNPSVQGAQSGNADFATAITRWVMKESGVLRVKTVNHHKKGETVPPVEGYFITEDVVYTIEIEELKNGKWVPFQGKDVQLEFVRIDPFVRATLKNSNGRLSVAFKLPDVLGVFKFLVDYRRVGYTHLYDVQQVSVRPLWHTQYERFIRSAYPYYASSFSMMAGLVLFSIVYLYHKDTPVKGAKVLDSEKKKN

SEQ ID NO: 7569 - DNA, 1350 bp, Drosophila melanogaster
  CDS (1)..(1350)
atgatgtggaaggctctcctgatcgccgttttggcgattgcccactgccaggcggtactggaaacggacgccaacaccttggttctgctggacaacctggccatccgggaaacccactcgatcttcttcaaatcgctgcaggatcgcggatttaagctcacctacaaactggcggatgactccagcctgctgctgtccaaatacggtgaatatctgtacaagaacgtcatcatattcgcaccaagtgtcgaggaattcggcggcgatgtgagcgtggagcgtttggcccagttcgtcgacgatggcggcaatgttctggtggcgggcagcgagaaatccggcgacgcgctaagggaattcgcctccgagtgcggcttcgagctggacgaggagaatgcggcggtcattgaccatctgcactacgatgttagcgatgctggcgagcacacaaccatcctgacctccgccaagaatcttatacaggccgacaccattgtgggcaaggccaacaggcaggcggatgccgcaccgctgctctatcgcggtacaggactgattgccgacaaggagaacccgctggtactcaagctgctgaccgccgagagcaccgcctatagctacaatcccgaggcaagtgtctccgactatccgcatgccgttggccgaggcacgctgctaatcgccgccctgcaggcgaggaacaatgcccgcgtagtgttctccggctcgctgctcttcttctctgacgagagcttcacaacggccgtgcagtacgcacagagcggtgtgttccacaagctggccggtaatcgcgacgtggccgagtccattagcaagtgggtatttggagagactggccgcttgcgcgtggcatccgtgcaacatcacaaggagggcgagctgctgccaccggatcaggcgtacaccatcaccgatccggtcgtctacaccatcggcatcgaggagctggtgcagggcgagtggcgcgcctttaaggccagcgacattcaactggagttcgtgcgcatcgatcccttcgtccgcacctatctgaagcaaacgaacacgggcgcctaccaggccaaattcaagatacccgacgtctacggcgtttatcagttcaaggtggactacaatcgcgtgggctacacgcatctgtacagcaccacccaggtgtcggtgcgtccgctggagcacacacagtacgagcgctttatcccgagcgcattcccctactacaccagcgccttctcaatgatgatcggcgtgtttgtcttctcattcgtgttccttcacttcaaggatgagcccgtgggcagggccgccaaggaggacaagaagtcgcagtag

SEQ ID NO: 7570 - protein, 449 aa, Drosophila melanogaster
MMWKALLIAVLAIAHCQAVLETDANTLVLLDNLAIRETHSIFFKSLQDRGFKLTYKLADDSSLLLSKYGEYLYKNVIIFAPSVEEFGGDVSVERLAQFVDDGGNVLVAGSEKSGDALREFASECGFELDEENAAVIDHLHYDVSDAGEHTTILTSAKNLIQADTIVGKANRQADAAPLLYRGTGLIADKENPLVLKLLTAESTAYSYNPEASVSDYPHAVGRGTLLIAALQARNNARVVFSGSLLFFSDESFTTAVQYAQSGVFHKLAGNRDVAESISKWVFGETGRLRVASVQHHKEGELLPPDQAYTITDPVVYTIGIEELVQGEWRAFKASDIQLEFVRIDPFVRTYLKQTNTGAYQAKFKIPDVYGVYQFKVDYNRVGYTHLYSTTQVSVRPLEHTQYERFIPSAFPYYTSAFSMMIGVFVFSFVFLHFKDEPVGRAAKEDKKSQ

SEQ ID NO: 7571 - DNA, 1314 bp, Arabidopsis thaliana
  CDS (1)..(1314)
atggtgaacctctcgagatccgtcgcgttgatctctgtattcctccttcctttacttagcttctctttctccgtcgataatccgacggatcggcgtgttcttgttcttctcgatgatttatcactcaaatcctctcattctatcttcttcaacactctcaagtctcgtggattcgatctcgatttcaagttagctgaagattcgaagcttgcgcttcaacgatacggccagtacttgtacgatgggttgatcatcttcgccccatcaacagaacggtttggaggatccttggattcgaaatccattgctgattttgttgattccggtcgtgacttgatcttatcggcggatactgctgcatctgatttgattaggggtattgccacagagtgtggggttgatttcgatgaggattcttcagctatggttattgatcatactagcttctccgtctctgatgttgacggcgaccacaccttgattgctgccgacgatttagtgaaatccgatgtcattttgggaaaaaccaagattgaggctcccgtgctcttcagaggagttgcacattcgttgaaccctactaacaatctggttttgaaagttctttcagcctctccatcagcttattctgctaacccaagctcgaagttgtctagtcccccccagctcactgggtcttcaatttcgctagtctcggtcatgcaggccaggaacaatgctagggttgtgatctcaggctcagtgcagttgtttagcgataggttaatcagatctggtgtccagaaagcagggagtccgaaccaatacgaaaaatctggcaacgaacagtttgtgactgaactaagcaaatgggtcttccacgaaaggggccatctgaaggctggtaatcttgtacaccatagggttggagaaacagatgagccagctatatataggataaaggatgacctggaattttctgtagagatatatgagtggtcaggaaagagctgggagccgtatgttgctaacgatgtgcaggttcagttttacatgatgagcccgtatgtgttgaaaaccctgtcaacagacaagaagggtctgtttcatacatctttcaaggttcctgatgtctacggtgtattccagtttaaggttgaatatgaaaagctaggctacactacattatctctttcgaagcagattccggtgcggccttacagacacaatgagtatgagagatttatcccaactgcgtatccttattatggagcctgctttacgacgatggctggtttcttcgtcttcagcttcgtctacctctaccataagtag

SEQ ID NO: 7572 - protein, 437 aa, Arabidopsis thaliana
MVNLSRSVALISVFLLPLLSFSFSVDNPTDRRVLVLLDDLSLKSSHSIFFNTLKSRGFDLDFKLAEDSKLALQRYGQYLYDGLIIFAPSTERFGGSLDSKSIADFVDSGRDLILSADTAASDLIRGIATECGVDFDEDSSAMVIDHTSFSVSDVDGDHTLIAADDLVKSDVILGKTKIEAPVLFRGVAHSLNPTNNLVLKVLSASPSAYSANPSSKLSSPPQLTGSSISLVSVMQARNNARVVISGSVQLFSDRLIRSGVQKAGSPNQYEKSGNEQFVTELSKWVFHERGHLKAGNLVHHRVGETDEPAIYRIKDDLEFSVEIYEWSGKSWEPYVANDVQVQFYMMSPYVLKTLSTDKKGLFHTSFKVPDVYGVFQFKVEYEKLGYTTLSLSKQIPVRPYRHNEYERFIPTAYPYYGACFTTMAGFFVFSFVYLYHK

SEQ ID NO: 7573 - DNA, 1314 bp, Schizosaccharomyces pombe
  CDS (1)..(1314)
atgaagagcgcattgtgtattgctttggcccttacatggtcgcttttagtacaagcagctcgtcagacggttttggctgttgccgaccatgatatcggtggatatagcacatttttacaatcacttacggacagagattttgatgtgaaaacttcttacatcaaagatgaaagtgcaaagctatttgaatatggtgaacgtctttacgacaacttgatcttattgtcatctcaaagtaaaagtttgggccctgttttctcccctaaatctcttctagaatttgttcaaagcggtggtaacttgtttgttgttgcaggctctcaacttcccgaaggaataagggagcttggaagacaactggatatgtttctggccgaacgtcaatctgtcgttgttgatcattttaatcacgctgaaggttctgacgatatcattctcttggatggaatatcggaaaacccatatatcatttctgatgagacccgggctgctggccctattttatataaagggattggccattatttaggtccaaatccacagacacaacctattcttcgtggtaatccaacctcttatatttataacaccaaaactgaggctgaggtctcaaagaatccttgggctgctggcactcaactgtttttggtcagtgttttgcaaagtagcaccggcgaacgtgttggtcttagtggcagtatcgatatgttaaaagatgaatatttgtctccccaaagcccctcgttttccaaatctaattttctttttgctcgtgatttgacaaattgggttttccagcgcaagggtgtgttgcaggccactaacatgacttatggaaaggtcgctgagccattagagtctcgcaatgcttcttgttatcgtattaaagatgaaatgattttctcaatcgacatatctcttttagaagacggtcagcaaactccatacgttgcagatgatgttcaattggaacttatcatgttggacccttactatcgtgtcaatctcgttccagttccatcggatagtcaaacatctcaacattatgaagctgtgttagttgcgcctgaccactacggcgactttacatttaaaatcgaatacaagcgtcctggccttactcctattgaagagaaatctacctttacacttcgtcaattctttcataatgagttccctcgattcctccctcacgcctatccttactatgcctcttgtttctctgtattgggtgcctttttattattttgtggaatttggcttctccaaaaacccgctaaacctgtcgttccttctgccaaaaaacaaaattag

SEQ ID NO: 7574 - protein, 437 aa, Schizosaccharomyces pombe
MKSALCIALALTWSLLVQAARQTVLAVADHDIGGYSTFLQSLTDRDFDVKTSYIKDESAKLFEYGERLYDNLILLSSQSKSLGPVFSPKSLLEFVQSGGNLFVVAGSQLPEGIRELGRQLDMFLAERQSVVVDHFNHAEGSDDIILLDGISENPYIISDETRAAGPILYKGIGHYLGPNPQTQPILRGNPTSYIYNTKTEAEVSKNPWAAGTQLFLVSVLQSSTGERVGLSGSIDMLKDEYLSPQSPSFSKSNFLFARDLTNWVFQRKGVLQATNMTYGKVAEPLESRNASCYRIKDEMIFSIDISLLEDGQQTPYVADDVQLELIMLDPYYRVNLVPVPSDSQTSQHYEAVLVAPDHYGDFTFKIEYKRPGLTPIEEKSTFTLRQFFHNEFPRFLPHAYPYYASCFSVLGAFLLFCGIWLLQKPAKPVVPSAKKQN

SEQ ID NO: 7575 - DNA, 1389 bp, Neosartorya fischeri NRRL 181
  CDS (1)..(1389)
atgcggtggtgcctcactcttctggcattctgcttcttggcagttgtacatgcattaagtagctcgggcagtcgtctgctggttgttttggaagatgccacagaaaaggaattatactcgaaattatgggctgacctagaagctcgaggatataacctcaacttcgaatcccccaagaatgacaagctcaacctgttcgagctcggagaccgagtctacgaccatatgcttctcctgcctcccaagtcaaagggctatggaccctcccttacccccaagaatatcattgaattcatgaacaaggacggcaacgtcctcctcgccttgtcgggcaagtccacaaccgccaacgctatcagctcgttgctattggagctcgatctccatctccctgtcgatcgttcctctgtcaccgtcgatcacttcaactacgatacactttctgcttcagataagcatgatgtcctgctactccaccgaccaggcaagttgaggtctgacaccaaggctttctttgatggtgagggcgttgtagcatttcccagagccgtcccccacaccctgggcgacgcgaaccctctcattgcgcctattctgcgagcgcccgccactgcgtacagttacaaccccaaggaggacgcgtcgtcagttgaggatgttgcagctacaggttcgcagttggctctgatctcggcaatgcaggctagaaactccgctcggttcactctactgggctccgtggagagtctgcaggatcagtggttttctgcgactgtcaaggctcccggcgatgggaagcagacgaagacggtcaaccaggagttcgccaagcagcttaccgcgtggacattcaaggaaaccggagtgctcaaggtcggaaagatcgagcatcatctggctgaagatggtgaaatcacccccgagaagctgaaccctaagatctatcgagtgaagaatgaaactgtctttaccattgaactttccgagtacaactatgatcgttacgtgcccttcgaggttccaactggcgatgccgtccagcttgagtttaccatgctgtctcccttccatcgcctgaacttggaacccgtccgtcgaacggataacagtacagtttacagcacacgattcaccactcccgatcagcatggaatcttctccttccgagtgaactacaagcgcccgttcctcaccaacatcgaagaaaaacttgaggtgaccgttcgtcatttcgctcataacgagtacccccgaagctggaagatcagcggtggatgggtctggattgcgggtctgtggtccgtcatcgctggcttcttggtgttcgttgttgcatggctttactcagcgccttctgccgctgcactgaacacaaagaagacgcaataa

SEQ ID NO: 7576 - protein, 462 aa, Neosartorya fischeri NRRL 181
MRWCLTLLAFCFLAVVHALSSSGSRLLVVLEDATEKELYSKLWADLEARGYNLNFESPKNDKLNLFELGDRVYDHMLLLPPKSKGYGPSLTPKNIIEFMNKDGNVLLALSGKSTTANAISSLLLELDLHLPVDRSSVTVDHFNYDTLSASDKHDVLLLHRPGKLRSDTKAFFDGEGVVAFPRAVPHTLGDANPLIAPILRAPATAYSYNPKEDASSVEDVAATGSQLALISAMQARNSARFTLLGSVESLQDQWFSATVKAPGDGKQTKTVNQEFAKQLTAWTFKETGVLKVGKIEHHLAEDGEITPEKLNPKIYRVKNETVFTIELSEYNYDRYVPFEVPTGDAVQLEFTMLSPFHRLNLEPVRRTDNSTVYSTRFTTPDQHGIFSFRVNYKRPFLTNIEEKLEVTVRHFAHNEYPRSWKISGGWVWIAGLWSVIAGFLVFVVAWLYSAPSAAALNTKKTQ

SEQ ID NO: 7577 - DNA, 1389 bp, Aspergillus clavatus NRRL 1
  CDS (1)..(1389)
atgcggtggtgcctcactatcctctcgttctgcttcttggcagttgtacatgctctaagtagttcgggcaatcgccttctggtaattctggaagatgccgcagaaaaggagctttacacgacattctggggggatctagaaactcggggatatcagcttaccttcgaatcgcccaagaatgacaagctctctttgtttgagcttggagaccgggtttacgatcacctactcctcctccctcccaagtcaaagggctacggaccctctctaagcccgaagaacatcatcgaattcctaaacaaggatggcaatgtcctcctcgccctgtctggcaagtcgacaaccgccagcgccatcaactcgttgcttctggagctggatttccatatccccaccgatcgctcctccgtcgtcgtcgatcacttcaattatgataccctctctgcgcccgagaagcatgatgtcttgttgctccagcggccaggtcaattgagacctgacctcaaggcttacttcgatggcccgggtgtcgtggctttccccaagactgttcctcacaccctgggtgacgcaaaccctcttatcgcgcctattttgcgagctcctgcgacggcttacacttacaacacgaaggatgacgcaccctcggtggaggatgtggaggctacaggttcgcagttggcacttgtctctgctatgcaggctagaaattctgcccgcttcactttgctgggttcggcggagagtctgcaggataagtggttcaccacgactgtcaaggctcccggtgatgggaaggagacgaagactgtcaaccaggactttgctaaacagctgacggcgtggactttcaaggagactggtgtcctcaaggtgggaaaggttcagcattaccttgctgaagctggcgaggttgcgctcgaggacctgaaccccaagatttaccggatcaagaatgacactgtcttcagtattgagatttccgagtacgattacgatcgttacgtgccattccaggtgccagccgaggatgctgttcagctggagttcactatgctctctcccttccatcgcctgaacttggagccttcccacaaaactcaaaacagtacagtgtacagcacacgcttcatgaccccggaccagcatggaatcttctccttccgggtaaattacaagcgccccttcctcaccaacatcgaggagaaacacgaggtgactgtccgtcatttcgctcataacgaatacccccgcagctggaagatcagcggcggatgggtctggatcgccggtctatggtccgttattgccggcttccttgcttttgtcgtcgcgtggctctactcagcacctcctgctgctgctttgaacaccaagaagacacaataa

SEQ ID NO: 7578 - protein, 462 aa, Aspergillus clavatus NRRL 1
MRWCLTILSFCFLAVVHALSSSGNRLLVILEDAAEKELYTTFWGDLETRGYQLTFESPKNDKLSLFELGDRVYDHLLLLPPKSKGYGPSLSPKNIIEFLNKDGNVLLALSGKSTTASAINSLLLELDFHIPTDRSSVVVDHFNYDTLSAPEKHDVLLLQRPGQLRPDLKAYFDGPGVVAFPKTVPHTLGDANPLIAPILRAPATAYTYNTKDDAPSVEDVEATGSQLALVSAMQARNSARFTLLGSAESLQDKWFTTTVKAPGDGKETKTVNQDFAKQLTAWTFKETGVLKVGKVQHYLAEAGEVALEDLNPKIYRIKNDTVFSIEISEYDYDRYVPFQVPAEDAVQLEFTMLSPFHRLNLEPSHKTQNSTVYSTRFMTPDQHGIFSFRVNYKRPFLTNIEEKHEVTVRHFAHNEYPRSWKISGGWVWIAGLWSVIAGFLAFVVAWLYSAPPAAALNTKKTQ

SEQ ID NO: 7579 - DNA, 1347 bp, Drosophila pseudoobscura pseudoobscura
  CDS (1)..(1347)
atgtggaaatatgcactaatcgccctcctggctatttatagttgcaatgcagttttgcagacagatgccaatacactggtgctgctcgacaatctggccatacgcgagactcactcgattttcttcaaatcgctgcaggatcgcgggtttaagctaacctacaagctagcggacgactccagcctgctgctgtcgcgctatggcgagtatctctacaagaatgtgatcatctttgcgcccagtgtggaggagttcggcggcgacatcagtgtggagcgtctggccaagtttgtggacgacggtggaaatgttctggtggccggcagtgaaaagtccggtgatgcgctgcgggagttcgcctcggagtgcggcttcgagctggacgaggagaacgctgcagtcatcgatcatctcaactacgatgtcagcgatgctggcgagcacaccaccatcctgacttcggccaagaacctgatccaggccgacaccattgttggcaaggaaaacagcaaggctgactcggcaccactggtgtaccgaggaacgggcctgattgccgacaaggagaacccactggtcctaaagcttctcaccgccgagagcagcgcgtacagttacaatcctcagtccagtgtcaccgattacccccatgctgtgggtcgcggtactctgctgattgccgccctccaggcgcgcaacaatgcccgcgtcgtcttctctggatccctgctcttcttttcggacgagagcttcaccacggctgtccagtatgctcagagcggtgtgttccacaagctctccggcaatcgcgtcgtcgctgagtccatcagccagtgggtctttggcgagaccggccgcctacgcgttgcctctgtgcagcaccacaaggagggcgagctgctgcccccaggggaggcgtacaccattactgatcccgtgatctacaccattgccattgaggagctggtggctggcaagtggcaggcgtacaaggcgagtgacatccagctggagtttgtgcgcatcgatccgttcgtgaggaccttcctgaagcagaccaagacgggcagctatgaggccaggttcgagatacccgatgtctacggcgtctaccagttcaaggtggactacaatcgtgtcggctacacccatctgtatagcaccacccaggtgtcggtgcgtccgttagaacacacacagtacgagcgcttcattcccagcgccttcccgtactacacgagtgccttctccatgatgattggcgtctttatcttttcgtttgtgttccttcacttcaaggacgagcccctcggcaaaccgctcagggaggacaagaagtcgcaataa

SEQ ID NO: 7580 - protein, 448 aa, Drosophila pseudoobscura pseudoobscura
MWKYALIALLAIYSCNAVLQTDANTLVLLDNLAIRETHSIFFKSLQDRGFKLTYKLADDSSLLLSRYGEYLYKNVIIFAPSVEEFGGDISVERLAKFVDDGGNVLVAGSEKSGDALREFASECGFELDEENAAVIDHLNYDVSDAGEHTTILTSAKNLIQADTIVGKENSKADSAPLVYRGTGLIADKENPLVLKLLTAESSAYSYNPQSSVTDYPHAVGRGTLLIAALQARNNARVVFSGSLLFFSDESFTTAVQYAQSGVFHKLSGNRVVAESISQWVFGETGRLRVASVQHHKEGELLPPGEAYTITDPVIYTIAIEELVAGKWQAYKASDIQLEFVRIDPFVRTFLKQTKTGSYEARFEIPDVYGVYQFKVDYNRVGYTHLYSTTQVSVRPLEHTQYERFIPSAFPYYTSAFSMMIGVFIFSFVFLHFKDEPLGKPLREDKKSQ

SEQ ID NO: 7581 - DNA, 1377 bp, Aspergillus niger CBS 513.88
  CDS (1)..(1377)
atgcggtggtctctttccctctttctgtttggcttctcggctgttgtacatgcgctcagtagttcggggaaccgcctgctggttgtgttggaggatggatcggagaaggatctgtattctacgttttggagtgatctagaagctcgcggttatgacctcgtctttgaatctcccaagagtgacaagctttccctcttcgatctgggtgagagggcttacgaccaccttcttctcctgcctcctaggtccaaaggatttggaccttctttgagccccaagaacatcgtcgactttatgaacaaggacggtaacgtcctcctcgcgctctcgggcaagtccaccactcccagcgccgtcagctcgctgcttctggaactcgatcttcacctggctaccgaccgttcgtctgtcgttgtcgaccacttcaactacgataccctgtctgcggccgaaaagcacgatgtccttctcctccagcgccccggcccattgagacccgataccaaggctttcttcgacggggagggtgtcctggctttgccaagggccgctcctcacacgctcggcgaccacgctctcattgcgcctatcctgcgcgctcctgcgactgcctacagctataaccctaaggaagacttgtctgcgggagaggatgtctgggccaccggctctcagctggctctcgtctccgccatgcagacccgtgcatcctctcgcttcaccctgctcggctccgtcgagagtctccaggacaagtggttctccgcgaccgtcaaggcgcccggcaacggaaaggagaccggcacggccaaccaggaattcgccaagcagttgactgcctggaccttcaaggagaccggtgtccttaaggttggcaagatcgagcaccacctggctaaggacgaccttactgccgaggacctcaacccctcgatctaccgcatcaagaacgagaccgttttcagcattgagatctccgagtacagccacgaccggtacattcctttcgaggtgcccgccaacgatgctctgcagctcgagttcaccatgctctctcccttccaccgcctgaagttggagcctaccgcccgcaccgagaacagcaccatttacagcacgcaatttaccgtccctgaccagcacggtatcttctccttccgggtcaactacaagcgcccgttcctcaccaacattgaggaaaagcacgaggtgactgtccgccacttcgcccacaacgagtacccccgcagctggaagatcagcggaggatgggtctggatcgctggcctgtggtctgtgatcggcgggttcctggcctttgtgttcgtgtggctctactcggagcccgcctcggccaaggtcaagaagacccagtaa

SEQ ID NO: 7582 - protein, 458 aa, Aspergillus niger CBS 513.88
MRWSLSLFLFGFSAVVHALSSSGNRLLVVLEDGSEKDLYSTFWSDLEARGYDLVFESPKSDKLSLFDLGERAYDHLLLLPPRSKGFGPSLSPKNIVDFMNKDGNVLLALSGKSTTPSAVSSLLLELDLHLATDRSSVVVDHFNYDTLSAAEKHDVLLLQRPGPLRPDTKAFFDGEGVLALPRAAPHTLGDHALIAPILRAPATAYSYNPKEDLSAGEDVWATGSQLALVSAMQTRASSRFTLLGSVESLQDKWFSATVKAPGNGKETGTANQEFAKQLTAWTFKETGVLKVGKIEHHLAKDDLTAEDLNPSIYRIKNETVFSIEISEYSHDRYIPFEVPANDALQLEFTMLSPFHRLKLEPTARTENSTIYSTQFTVPDQHGIFSFRVNYKRPFLTNIEEKHEVTVRHFAHNEYPRSWKISGGWVWIAGLWSVIGGFLAFVFVWLYSEPASAKVKKTQ

SEQ ID NO: 7583 - DNA, 1422 bp, Ajellomyces capsulatus NAm1
  CDS (1)..(1422)
atgcggtggctcctttcactacttcttgtggggctctggggagctgttgtccatgcgctcagcagtgctggcaaccggttactagccatcctagacgacgttgcagataaggacttgttttcgacgttctggaaggatttagaagatactataggtcggggatactccatatcattccaatcgcccaaagatgaaagcctttcgctctttaaacatggagagagagcatatgaccacatcgccctcttccctctaaagtcaaaaggactggggcccgcattaactcccaaaacgctccttgattttatcaacagtgaaggaaacatcctcctcgctctctcaggtggttcagcgatcgccaactctgttagttccgtcctacttgagctagagatcagcctctctcaagaccgccatgcgcttgttgtcgaccacttcaactacgacaccctctcctctcccgaaaaccacgatgttattctccttccacgaccgcaagcactccgtgcggatctcaaatcatatttctctggcgaaggagtggtcgctttccccaaagctgcgggccaatcattgggggctgccagttcgttactagttccaatacttcgagctcctgagactgcatatagctatgatgtgatagaggaggagcaaacggtagacgcgtctttcgcgtttgggtctcagatttcattggtctcagcaatgcaggcgaggaattcggcccgattcacagtagtagggtctgcggagagtcttaaggacaaatggttctcggccagcgttaagggcctgaaggatgggaagaaaacgcagacggtaaacagggagtttgcaaagcaaattagtgcttggacttttaaagagactggagtgattaaagtgggtaaagtgcaacattatttgaatgccgatggctatgcggaatctcccccttcgaatgaatctggatcattaaacccttcgatataccggataaagaatgatgtgacatttaacatcgagctttccgagtacaacgacgaccactatatcccttttgaaacccctgaagaagatgccgtccaacttgaatttaccatgctatcgcctttccaccgtctgactctcaaaccagtaaccaggacagcaaatagcaccatgtatagcacctcattcaccttacctgatcagcacggtatcttctccttccgtgtcaactataaacgacctttcctcaccaacgttgatgtgaaagaggaagtcactgttcgacatttcgctcatgacgaatggccccgtagctggaagatcacaggcggctgggtctggattgcggggttgtggtccgttattggtggtttcctaattttcgtcgctgtatggttgtactcggcgcctccagagacggagaatagcaggtctaaaaaagtcaagtga

SEQ ID NO: 7584 - protein, 473 aa, Ajellomyces capsulatus NAm1
MRWLLSLLLVGLWGAVVHALSSAGNRLLAILDDVADKDLFSTFWKDLEDTIGRGYSISFQSPKDESLSLFKHGERAYDHIALFPLKSKGLGPALTPKTLLDFINSEGNILLALSGGSAIANSVSSVLLELEISLSQDRHALVVDHFNYDTLSSPENHDVILLPRPQALRADLKSYFSGEGVVAFPKAAGQSLGAASSLLVPILRAPETAYSYDVIEEEQTVDASFAFGSQISLVSAMQARNSARFTVVGSAESLKDKWFSASVKGLKDGKKTQTVNREFAKQISAWTFKETGVIKVGKVQHYLNADGYAESPPSNESGSLNPSIYRIKNDVTFNIELSEYNDDHYIPFETPEEDAVQLEFTMLSPFHRLTLKPVTRTANSTMYSTSFTLPDQHGIFSFRVNYKRPFLTNVDVKEEVTVRHFAHDEWPRSWKITGGWVWIAGLWSVIGGFLIFVAVWLYSAPPETENSRSKKVK

SEQ ID NO: 7585 - DNA, 1425 bp, Sclerotinia sclerotiorum 1980
  CDS (1)..(1425)
atgaggtggattctttcttttctactactgggactgctcagtgctgtctcagctttgagttctgccggaggcaaattgttagttgtattggaggaattgtcagagaaatcgaaatacacgaagtactttggggatcttgaagcacggggatatgaattaactttcgagtcaccaaaaaatgagaaactaggacttttcgaattgggggaacgatccttcgaccatctactcgtcttaccatccaagtcgaaaggtctgggaccagcattgacacctaaacttctcctcgagttcatcaacaagggcggaaatatcttgttaactctttcatcatctcaccctacccccactgcccttgtatcgctactcttggagctcgacatccaccttccaacagaccgcacttctctagttgttgaccacttcaactatgatactttgagtgccgcagagaaacatgatgttgttcttctgccacgaccagacgctgtcagaccagatgttaaaaactacttccgtggagatggcaaaggcggggaagttattgctttcccaagaggtgttggacaaactttggggaacaccagtccattattgacacctctcctccgagcttctagaaccgcatactcgtataacgcgaaggaggatatcgagggtgtggaagacccatttgcggttggacaacaattatcacttattaccaccatgcaggctagaaacaatgctagatttacagtgattggatcatcggagctcctcgaggacacatggtttgatgctaaggtcaagcgcagcattgggatgggtggtgttggatctgatgccaaggagattaagacttcaaatcaagaattctcgaaagaagtcaccggctggactttcaaggaaatcggggttctcaaggttggaagcatcaagcactatcttcatgagaatggagtgaagagcagtgacaccaacccaaagatctacagaattaaaaacgatgtgacatacgaaatcgagctttccgagtactcatgggacaagtgggttccatttaccccgccatccggagactccctgcaactcgaattttctatgctttcgcctttccatcgtcttatacttgaaccatccactaccacttccgattcacaaacctacacggcgagcttcaagctcccagatcaacatggtatctttaactttatggtcaactacaagcgaccattcctcaccagcatcgaacaaaagaacaccgtcacggtcagacattttgcccacgacgagtatactaggagttgggctatcagcaatgcctggccatggattgccggaatcggcgccacagttacaggatgggttgcattcgttgctctttggttatggagcaagcctgtaccattgaagttaacgaagagtggaaagaaagttcagtga

SEQ ID NO: 7586 - protein, 474 aa, Sclerotinia sclerotiorum 1980
MRWILSFLLLGLLSAVSALSSAGGKLLVVLEELSEKSKYTKYFGDLEARGYELTFESPKNEKLGLFELGERSFDHLLVLPSKSKGLGPALTPKLLLEFINKGGNILLTLSSSHPTPTALVSLLLELDIHLPTDRTSLVVDHFNYDTLSAAEKHDVVLLPRPDAVRPDVKNYFRGDGKGGEVIAFPRGVGQTLGNTSPLLTPLLRASRTAYSYNAKEDIEGVEDPFAVGQQLSLITTMQARNNARFTVIGSSELLEDTWFDAKVKRSIGMGGVGSDAKEIKTSNQEFSKEVTGWTFKEIGVLKVGSIKHYLHENGVKSSDTNPKIYRIKNDVTYEIELSEYSWDKWVPFTPPSGDSLQLEFSMLSPFHRLILEPSTTTSDSQTYTASFKLPDQHGIFNFMVNYKRPFLTSIEQKNTVTVRHFAHDEYTRSWAISNAWPWIAGIGATVTGWVAFVALWLWSKPVPLKLTKSGKKVQ

SEQ ID NO: 7587 - DNA, 1308 bp, Nasonia vitripennis
  CDS (1)..(1308)
atgaaacttgcgagcggtgtctgcctccttttggcggccctcgtcgccggggtcaatgccggcgggccgaccctcgtgctcctcgacaacctggccatcaaggaaacacactcgatattcttcaagatactgcaagatagtggatacactctgtcattcaagcttgcagatgatgcaaatctgctgctctccaaatatggagagtacctgtacaagcacttgatcatctttgcaccaactgtagaggagtttggaggttctatgagtgtggaggccatcaccgactttattgatggaggaggcaatgttctggtggctggttcttctcagtctggtgatgctcttagggacttggcatctgagtgtggatttgagattgacgaagagggtgccacggtcattgatcatatgaactatgacatttctgataccgggcgccataccaagattgttgctgatccttcaaacttgattgatgcttctgtaattgttggaagcagaaatgtaccacctctactctatcaaggaactggattgatcgctgattcagacaatccattggtactcaagctgctgactgcttcaagctctgcttacacttacaatactgaacagcctgtcaaggagtacccacatgctgttggaaagaacactttgctcattgctgctttgcaggcaaggaacaatgctagggtactgttttctggatcattatacttcttcagtgatgaagctttcactagtcctgtgcggaaagctcaagatggaaagaaacacgaagtttcaggaaataaagctgttgctgaagcaatggctcgctgggtcttcaaagagaatggtgtcatccgagtttcttttgtccatcaccacaaggagggagaagcacagcctcctgcagcttacacaatcatggagaatgttgtttactccattaatgttgaaaagctctctggtgacaaatgggttccgttcgttgctgacgatttgcagttggaattcgtcagaatcgatccttttgtcagaactaccatgaaacatgtatcgaacggccgctacgaggcaagattcaagattcccgacgtgtacggagtctaccaattcaaggttgattatactcgcatcggcctcacgcacctttacagcacgactcaggtgtcggtccgacccttggagcatactcagtacgaacgctttattccaagtgcttatccttactacgtcagtgccttctcgatgatgggtggtgttttcctattctccattgtcttcttgcacttcaaggatgacacgaaagcaaaggctgaatga

SEQ ID NO: 7588 - protein, 435 aa, Nasonia vitripennis
MKLASGVCLLLAALVAGVNAGGPTLVLLDNLAIKETHSIFFKILQDSGYTLSFKLADDANLLLSKYGEYLYKHLIIFAPTVEEFGGSMSVEAITDFIDGGGNVLVAGSSQSGDALRDLASECGFEIDEEGATVIDHMNYDISDTGRHTKIVADPSNLIDASVIVGSRNVPPLLYQGTGLIADSDNPLVLKLLTASSSAYTYNTEQPVKEYPHAVGKNTLLIAALQARNNARVLFSGSLYFFSDEAFTSPVRKAQDGKKHEVSGNKAVAEAMARWVFKENGVIRVSFVHHHKEGEAQPPAAYTIMENVVYSINVEKLSGDKWVPFVADDLQLEFVRIDPFVRTTMKHVSNGRYEARFKIPDVYGVYQFKVDYTRIGLTHLYSTTQVSVRPLEHTQYERFIPSAYPYYVSAFSMMGGVFLFSIVFLHFKDDTKAKAE

SEQ ID NO: 7589 - DNA, 1329 bp, Nematostella vectensis
  CDS (1)..(1329)
atggctgcattgcacacgtgtcgttttgccggcttttgccttcttttcctgctttctttcctccattcctcctttgcaggtcaacgaacgcttgttcttttagataatgctaacaccaaagagactcattctatatttttcagctctctaaaagccaaaggttatgagctcaccttcaggactgcagatgacgcaagcctagccctcgtcaagtatggagaatttctatacgacaaccttgtcattttctccccatctgtggaagagtttggaggttccttaaacgtcagggcaattactgactttattgatggaggaggaaatgtccttgtagctgctagctcagccattggtgatcctctgcgtgagctgggcagtgagtgtggtgtggagtttgatgaggaaaagactgcagtcatcgaccacataagtcatgatgtcagtgacttggatcagcacactctggttgttgcagaaccaagcaacgtcatcaaggcagatactgtcactggcaaaacagtcaccagccctcttctcttcaagggtgtaggtatgactactgacgttgacaatccacttgtgctagaggtggtcactgcctcctctacagcttactcctactacccagatgtcaaaatcactgagtaccctcatgccgttggcaagagtacagttctggttgcagcactccaggccaggaacaatgctagagtagtgttctctggctctctagacttcttcagtgatgaattcttccagcgttctgtgcagagctctaaggctggctccaagaagtttgacaagtcaggcaatcaggatctagcccttgcggtgactgactgggtgtttaaacagcgtggggtgctgcgtgtgggtgaagtcaagcaccacaaggtgggagaagacaaccctcctgctgcctacaccattgaagacaatgtgttttacagcatccagattgaggagatgattggcaacaagtggcagccataccaggcctctgatgtgcagatggaattcttcaggattgatccttttatcaggaccacactcaaccgaaccagagatggactgtttactgcccactttaagctgcctgatgtgtatggagtgttccagttcaaggttgagtacaaccgcgttggctactcctacctgtctagcaagacacaggtgtctgtgcgacccaagcaacacacccagtatgagaggttcatcccctcggcctacccatattacgccagcgctttctccatgatgctaggagtgtttgtatttgctattgtgttccttcatcacagagatgacggcaaagttaaggcagagtag

SEQ ID NO: 7590 - protein, 442 aa, Nematostella vectensis
MAALHTCRFAGFCLLFLLSFLHSSFAGQRTLVLLDNANTKETHSIFFSSLKAKGYELTFRTADDASLALVKYGEFLYDNLVIFSPSVEEFGGSLNVRAITDFIDGGGNVLVAASSAIGDPLRELGSECGVEFDEEKTAVIDHISHDVSDLDQHTLVVAEPSNVIKADTVTGKTVTSPLLFKGVGMTTDVDNPLVLEVVTASSTAYSYYPDVKITEYPHAVGKSTVLVAALQARNNARVVFSGSLDFFSDEFFQRSVQSSKAGSKKFDKSGNQDLALAVTDWVFKQRGVLRVGEVKHHKVGEDNPPAAYTIEDNVFYSIQIEEMIGNKWQPYQASDVQMEFFRIDPFIRTTLNRTRDGLFTAHFKLPDVYGVFQFKVEYNRVGYSYLSSKTQVSVRPKQHTQYERFIPSAYPYYASAFSMMLGVFVFAIVFLHHRDDGKVKAE

SEQ ID NO: 7591 - DNA, 1347 bp, Aedes aegypti
  CDS (1)..(1347)
atgtcccgtgctttgtactggctcgttgccggccttgccgtgtttgcattggcaacggttcctgcccgtgccgaagccggagaaaccctggtgctgctggacaatttggccatccgcgagacgcactccattttcttcaagaacctgcaagaacgtggctacaaactcaccttcaagctggcggacgatgccagtctggtcctgtcgaaatacggagaatttctgtacaagcatctgatcctgtttgcgccttcggtggaggaattcggcggatcgttgagcgtcgaggccatcaccgatttcgtggacaacggaggaaacgttttggttgcgggaagctcgaactccggtgatgccctgagggaattggcatccgagtgtggatttgaggtggatgaggaaaatgctgctgtgattgatcatctgaactacgacatctcggacagtggagaccatactctggtggtggcttccccggagaatttgatcgattcggaaattgtcgtgggtaagaaatccgtgggcccactattgtacaagggaactggtctgttggccgataaggaaaatcccttggtgttgcaactgttgactgcggacagcaccgcctacagctatgttccggatgcccctatcaaagaataccctcacgccgttggaaagggaacacttctgatcgcagccctccaggcccggaacaacgcccgagtggtatactccggatcgctctatttcttctccgatgaagccttcctgtcgtcggttcagcgcgcccaggatgaaaagctgcatagcaagtcgggtaaccaggacgtggccacgtccatcagcaaatgggtcttcggagaaaacggagttattcgcgtccgttccgtaaaacacttcaaagagggagaaagccaaccaccagctgcctacacaatcaccgaaccggtcgtgtacaccattgaaatcgaaaccctggctgccgatggcaagtggcaaccattccaggccaacgatgttcagctggaattcgtccggatcgatccgtttgttcggaccactttgaaccacatcggtggcggacgctaccaggccaaattcaagatccctgatgtatatggcgtgtatcagtttaaggtcgattacgatcgcattggatatacccatctgtattcgacaactcaggtttcggtccgtccactcacccacacccaatacgaacggttcattcccagcgcttacccgtactatgtgagcgccttctcgatgatggtcggaatgttcctgttctcaatcatcttcctgcacttcaaggatgatggtccgagtgggaaagtagccactgataagaagtctcagtag

SEQ ID NO: 7592 - protein, 448 aa, Aedes aegypti
MSRALYWLVAGLAVFALATVPARAEAGETLVLLDNLAIRETHSIFFKNLQERGYKLTFKLADDASLVLSKYGEFLYKHLILFAPSVEEFGGSLSVEAITDFVDNGGNVLVAGSSNSGDALRELASECGFEVDEENAAVIDHLNYDISDSGDHTLVVASPENLIDSEIVVGKKSVGPLLYKGTGLLADKENPLVLQLLTADSTAYSYVPDAPIKEYPHAVGKGTLLIAALQARNNARVVYSGSLYFFSDEAFLSSVQRAQDEKLHSKSGNQDVATSISKWVFGENGVIRVRSVKHFKEGESQPPAAYTITEPVVYTIEIETLAADGKWQPFQANDVQLEFVRIDPFVRTTLNHIGGGRYQAKFKIPDVYGVYQFKVDYDRIGYTHLYSTTQVSVRPLTHTQYERFIPSAYPYYVSAFSMMVGMFLFSIIFLHFKDDGPSGKVATDKKSQ

SEQ ID NO: 7593 - DNA, 1338 bp, Caenorhabditis briggsae AF16
  CDS (1)..(1338)
atgaggtggttacctacagtcctgttacttgtgtctgtcataatcgaccagtcctgcgccgatcgggttctcgttttaggagaaactgcggcaatcaaggattcgcactctcaatttctgaattccatcaaagaacgaggtcatgaattgactatccgtaccgccgatgactctcaacttgctctgttcaaacatggacagctgattttcgatcatctttttgttcttgctcccggagttcaagtttttggaggttctcttaccccatcagagatttccaaatttgtcgatgaaggaggaaacgtgcttgtagccgccgattccaacattggcgacgctcttcgtgaactcgcggtggaacatggattcgaattcgatgaggctggaacttcagtgatcgatcatcacaattacgatcaatctctcgatcctggagatcacaccaccgtcgttgttggcaaagatcaacttatcagcgctgagttgattgttggaaactctgcaaagcttggaccagttattttcaagggaattggtttggtggctggaaaaaccaacaatctcgctttgagcatcgtgaaagcttcaggaactgcatactcgtttgatccaaaagctactcgggtggtgaatccatcaattgctggatcacgaactcttcttgtcggaggtctccaatctcgtaacaatgctagaattgtcttctctggaagtactgacttgttctctaatgctttcttctctgcccaaaccaactctgtgaatcctgctgtcggcgcagctgcttctggaaacgctgaactagctagtgccatcgctaaatgggttatgaaggagagcggagtacttcgtgtcaaatcggtgaaccatcataagaaaggagagactatgccacccgcagaagactacttcatcgctgaagacgttgtttacactatcgagattgaggagctcaaaaatggaaagtgggtgccattccacggaaaagatgtgcagctagagtttgttcgtgtcgatcccttcgtgagagctacgcttaaaaacaacaacggacgtctatccgccgccttcaaacttccggacgttctcggagtcttcaaattccttgtagactacagaagagtcggatacactcatgtttatgacgtcctacaggtctccgtgcgccctctttggcatacgcagtacgaacgcttcatccgttctgcctacccatattatgcttcttcgttctctatgatggctggtctcgtgttgttctcgattgtctacctctaccacaaggacactccagtaaagggagccaaagttctggattctgagaagaagaagaattag

SEQ ID NO: 7594 - protein, 445 aa, Caenorhabditis briggsae AF16
MRWLPTVLLLVSVIIDQSCADRVLVLGETAAIKDSHSQFLNSIKERGHELTIRTADDSQLALFKHGQLIFDHLFVLAPGVQVFGGSLTPSEISKFVDEGGNVLVAADSNIGDALRELAVEHGFEFDEAGTSVIDHHNYDQSLDPGDHTTVVVGKDQLISAELIVGNSAKLGPVIFKGIGLVAGKTNNLALSIVKASGTAYSFDPKATRVVNPSIAGSRTLLVGGLQSRNNARIVFSGSTDLFSNAFFSAQTNSVNPAVGAAASGNAELASAIAKWVMKESGVLRVKSVNHHKKGETMPPAEDYFIAEDVVYTIEIEELKNGKWVPFHGKDVQLEFVRVDPFVRATLKNNNGRLSAAFKLPDVLGVFKFLVDYRRVGYTHVYDVLQVSVRPLWHTQYERFIRSAYPYYASSFSMMAGLVLFSIVYLYHKDTPVKGAKVLDSEKKKN

SEQ ID NO: 7595 - DNA, 1275 bp, Chlamydomonas reinhardtii
  CDS (1)..(1275)
atgacgcgaccactactgtttgggcttgctctgcttgccattctgtccaatgcggcagcgggaaagagcgtgcttatgcttctgcaaaatgccaacacggccgagcgcttcactagctttgttgacggcctgtcggcagcagggttcactgtcgacatcaaggggtacaaggactctggtctgaagctccgggagtatgggacctggctctacgatcacctcattctgttcgcgcccaaagcggaaggcttcggcggcagcatcgaccagcagaccatcctcgactttgtggactctggccacaatgtgctgctgggcgtcaactctgacgtttcggaaaccatgcgcagcctggctgccgagtttggtgtggacctggacgaccgtggcaccaaggtgtatgaccacttccagtctgccaccctcgacggcaaggaggaccccacgctcattgccgcgtccgacctggttgacgctcctgtgattgtcggggggccttacaaggagcccatcctgttccgcggtgttgcggcggtggtcagccccgactcagaactggctacggtggtgctgtccgcccccgccaccgcctacagccacgaccccaagaagtccatgctggagccgccctcgctcatggcgggagccgcggcctcgctcattaccgccgtgcaggcccgtaacaacgcgcgcatggtggtgtcgggctctgttgagatgttctccaacagcttcctggcggccaccgtgaccgcgggcggcaagagtttgcgccatggaagtgacgactttgtcaacaccctgacgcgctggaccttccaggaccgcggcgtgctggtggcgtccaacatgcgccaccacctgctgggtagcgaggaccagccctggggctaccgcgtcaacgacgacgtggaattcctcgttgatgtgatggaggtggagggcggcgagtccaagccctacaaggccgacgacgtgcaggtggagttcatcatgctcaacccctacgtccgccagccgctggcgcacgacggcgccggtaccttctcgctgcgattcaaggtgcccgacgtgtacggcgtgttcaagtacgtcgtcgactactcgcaccgcggctactcctacatcaagctgacgcaccaggtgcctgtgcgccccttcaagcacaatgagtacgagcgcttcctggtgtgcgcctacccctactacgcctccgcgctgtccatgatggccggattcttcgtgctgggcttctatttcctttacaccaagtaa

SEQ ID NO: 7596 - protein, 424 aa, Chlamydomonas reinhardtii
MTRPLLFGLALLAILSNAAAGKSVLMLLQNANTAERFTSFVDGLSAAGFTVDIKGYKDSGLKLREYGTWLYDHLILFAPKAEGFGGSIDQQTILDFVDSGHNVLLGVNSDVSETMRSLAAEFGVDLDDRGTKVYDHFQSATLDGKEDPTLIAASDLVDAPVIVGGPYKEPILFRGVAAVVSPDSELATVVLSAPATAYSHDPKKSMLEPPSLMAGAAASLITAVQARNNARMVVSGSVEMFSNSFLAATVTAGGKSLRHGSDDFVNTLTRWTFQDRGVLVASNMRHHLLGSEDQPWGYRVNDDVEFLVDVMEVEGGESKPYKADDVQVEFIMLNPYVRQPLAHDGAGTFSLRFKVPDVYGVFKYVVDYSHRGYSYIKLTHQVPVRPFKHNEYERFLVCAYPYYASALSMMAGFFVLGFYFLYTK

SEQ ID NO: 7597 - DNA, 1326 bp, Physcomitrella patens subsp. patens
  CDS (1)..(1326)
atggcgtcgtcgtcgtcgagctggacgcagacgcttctcgttttcttcttcttcgcgctgccgatgctctgcaccagcttcaacccagacagtccctccgaccgtcgcgtgctcgtcctcgtcgacgaccttgcgatcaagtcttcgcactccacctacttgcagtcgctcactgacagaggttatgagcttgacgtcaagttggcgactgacccaaagttgactcttcagtcatatggatcgtaccattacgatgctctcattttgtttgctcccaaagtcgaaagtttgggtggaaatctcgacgccgccgcaatttctgactttgtggactccggtcacgacttaatcctagcagctgatgaaacaacctcagatacgattagggaaatcgcttccgactgtggtgttgattttgatgagttcgaaaaggccgttgtgatcgatcatgtcaagtacgcaatcaccccgcttggggatgatcactcccttattgcagctgacaatctgatagactctacagtgattctgggatcacaggggatcaaggaacccattttataccgcggtcttggacacattgtaaacccaacaagcgagctgggtataaaagttctttctgcgtctccatctgcttattctgggagagttggtgctgagattacagacttacctaacgtcagtggcgcttctatggccctagtctctgtagttcaggctaggaacaatgcccgcattatgatctctggctctttggagctcttcagcaatcagttttttgaatcctctgtacaacagtccggaagcgacgataagtttgagaagtctggtaaccagcagtttgcagtagaacttacgaagtggacattacatgagagaggccatcttaagacttcgaatgtgcatcaccacaagattggagagaccaatgagcctgctatgtatcggattgctgataatgctaggtactcccttgggatccaggaatggaatggcaaggactggcagccatatcaagctgatgacgtgcaactgcaattttacatgatgagtccatatgttctaaaaactctttctcacgacggcaaggggttgtatttcacagaattccaagttccagacgtgtatggcgttttccagttcaaggttgagtacaatcggctgggttacacaaccctcaacttggcaaaacagattccagtaagaccgtttcggcatgatgagtatgagcgattcattccagctgcttttccttactatggagcttccttctcgacgatgattgctttctttgtatttgggattgtctttttgtaccacaagtaa

SEQ ID NO: 7598 - protein, 441 aa, Physcomitrella patens subsp. patens
MASSSSSWTQTLLVFFFFALPMLCTSFNPDSPSDRRVLVLVDDLAIKSSHSTYLQSLTDRGYELDVKLATDPKLTLQSYGSYHYDALILFAPKVESLGGNLDAAAISDFVDSGHDLILAADETTSDTIREIASDCGVDFDEFEKAVVIDHVKYAITPLGDDHSLIAADNLIDSTVILGSQGIKEPILYRGLGHIVNPTSELGIKVLSASPSAYSGRVGAEITDLPNVSGASMALVSVVQARNNARIMISGSLELFSNQFFESSVQQSGSDDKFEKSGNQQFAVELTKWTLHERGHLKTSNVHHHKIGETNEPAMYRIADNARYSLGIQEWNGKDWQPYQADDVQLQFYMMSPYVLKTLSHDGKGLYFTEFQVPDVYGVFQFKVEYNRLGYTTLNLAKQIPVRPFRHDEYERFIPAAFPYYGASFSTMIAFFVFGIVFLYHK

SEQ ID NO: 7599 - DNA, 1398 bp, Phaeosphaeria nodorum SN15
  CDS (1)..(1398)
atgaggtggttattctcttcggcggctgtgttggcgtggactgcggttgtggcggcgaaaagcttcacgggcgaccggttgctggttgtcctggaggagcaaagtgagagggagaagtacagtgtgtttttggaggacttgagctctcgaggattctccgcgacagtcgaatcaccaaaagccgacaagctctcgctcttccgccacggcgagcgcgcatacgaccacgtcctcgtcctccccggcaagtcgaaaggtctcggccctgctttgaccgcgaacaacttcctcgagttcttgaagaaggagggaaacattctcgtcgcgctttctagcgaagctgtgacacctactgcgattcagtcggcgctacttgagctggacattagcattccggcagacaagggcgcggttgtggtcgaccatttcaactacgacacatcgtctgcagcggaaaagcatgacgttctgctccttcagacacccggtgcgctgagaccagatgttaagaactactttggaggcgatggttatgttgcggtgccacgcgccgtcgctcaggtcctcggaaacgactcgccgcttctttcgcccatcctacgcgccccgagcaccgcctacagctacagccccaaggacgaggctgaggctgtcgaggatcccttcgcggtcggtcagcagttgaacctcatttcagcgatgcaggccaacaacgccgcgcgtctcactgttctgggttctgccgagcttctgcagaatcagtggttcgccgagagcgcgaaactcgctggcaagtcgattaagaccgccaaccgcgaattcgccagcaaactgtccgcatgggctttcaaggagactggtgttttgaaggttggcaagatcgtccactaccaagacgagggcaagagcaagaagatgaacaccagcctcgcgatccccgagaacaacccgggcatctaccgcgtcaagagcgacgttcacttccaagtcgaaatctccgaatacaccaacgaccacctctcgcccttcaccccagcccccacggacaacatccagctcgaattcagcatgctctcgcccttccagcgcctgaacctttcacccatcgcccaaaccgcaaattccactgtcttcggcgtctctttccgcacgcccgaccagcacggcatcttcaacttccgcatcaactaccgccgcccgttcctcaccaacatcgacgagaagcgccaggtcaccgtgcgccactttgcgcacgacgagtggccgcgcagctggcagattagcggcgcgtgggtgtggattggcggcgtgtgggtcacggtcgctgggtggctggcgtttgtggccgtgtggttgtacagcaagcccacggagaggagtgttaagaagacgcagtag

SEQ ID NO: 7600 - protein, 465 aa, Phaeosphaeria nodorum SN15
MRWLFSSAAVLAWTAVVAAKSFTGDRLLVVLEEQSEREKYSVFLEDLSSRGFSATVESPKADKLSLFRHGERAYDHVLVLPGKSKGLGPALTANNFLEFLKKEGNILVALSSEAVTPTAIQSALLELDISIPADKGAVVVDHFNYDTSSAAEKHDVLLLQTPGALRPDVKNYFGGDGYVAVPRAVAQVLGNDSPLLSPILRAPSTAYSYSPKDEAEAVEDPFAVGQQLNLISAMQANNAARLTVLGSAELLQNQWFAESAKLAGKSIKTANREFASKLSAWAFKETGVLKVGKIVHYQDEGKSKKMNTSLAIPENNPGIYRVKSDVHFQVEISEYTNDHLSPFTPAPTDNIQLEFSMLSPFQRLNLSPIAQTANSTVFGVSFRTPDQHGIFNFRINYRRPFLTNIDEKRQVTVRHFAHDEWPRSWQISGAWVWIGGVWVTVAGWLAFVAVWLYSKPTERSVKKTQ

SEQ ID NO: 7601 - DNA, 1374 bp, Aspergillus oryzae RIB40
  CDS (1)..(1374)
atgcggtggtgtctttccttactgctgttcggcttcttggctgttgtacatgcgttgagtagttcggggaaccgtctactggttgttctggaggatgaggctgagaaggatgcttactctacgttctggggggatctagaagcccgcggatacaacctcgctttcgaatcgcccaagagtgacaagctttccttgttcgagctcggagaaagagcttacgaccatgtcctcctccttcctcctcggtcgaaaggcttcggaccttctttgaaccccaagaacatcatcgaattcatgaacaaagacggcaacgtccttctcgccctttccgggaagtccactacccccagcgctatcagctcgctcctcttagaactcgaccttcatctgtctaccgaccgttcctccgttgtcgttgatcactttgattatgacactctttctgcagatgagaagcatgatgtcctcgttctccagcgccccggccagttgaggcgcgacaccaaggcattcttcggtggtgagggcgttctggctttcccaaggaccgcccctcacactctgggtgactccaacccacttctcgctcccattctgcgcgccccggcaactgcttacagctacaaccccaaggaggatgtgggctcggttgaggatgttgtggcttcgggctcccagctggctcttgtttcggccatgcaggctcggaattctgcccgcttcactcttctgggctcggttgagagtctccaggacaagtggttctccgctactgtcaaggctcctggtgatggaaaagagtctgagactgctaaccgtgagtttgccaaacagctgaccgcctggaccttcaaggagactggagtcctcaaggttggcaagattgaacatcatctggccgagggtggtgaactgaaccctaagatctaccggatcaagaacgagacagtcttcagcattgaggtctccgagtacagctacgacaagtatttgcctttcgaggttcccgagaatgatgcccttcagctcgagttcaccatgctgtcccccttccatcgtcttgacctccagccttccgccaagacggaaaacagcaccatctacagcactaagttcaccgtccccgaccaacacggtatcttctccttccgtgtcaactacaagcgtcccttcctcaccaacattgaggagaagcacgaggtgactgtccgccattatgctcacaacgaatatcctcgcagctggaagatcagcggaggatgggtctggatcgctggcctctggtccgttatcggcggtttcctggccttcgtcattgtgtggctctactctgcgcccacatctactgcttcgacgacgaagaaaacgcagtga

SEQ ID NO: 7602 - protein, 457 aa, Aspergillus oryzae RIB40
MRWCLSLLLFGFLAVVHALSSSGNRLLVVLEDEAEKDAYSTFWGDLEARGYNLAFESPKSDKLSLFELGERAYDHVLLLPPRSKGFGPSLNPKNIIEFMNKDGNVLLALSGKSTTPSAISSLLLELDLHLSTDRSSVVVDHFDYDTLSADEKHDVLVLQRPGQLRRDTKAFFGGEGVLAFPRTAPHTLGDSNPLLAPILRAPATAYSYNPKEDVGSVEDVVASGSQLALVSAMQARNSARFTLLGSVESLQDKWFSATVKAPGDGKESETANREFAKQLTAWTFKETGVLKVGKIEHHLAEGGELNPKIYRIKNETVFSIEVSEYSYDKYLPFEVPENDALQLEFTMLSPFHRLDLQPSAKTENSTIYSTKFTVPDQHGIFSFRVNYKRPFLTNIEEKHEVTVRHYAHNEYPRSWKISGGWVWIAGLWSVIGGFLAFVIVWLYSAPTSTASTTKKTQ

SEQ ID NO: 7603 - DNA, 1362 bp, Culex quinquefasciatus
  CDS (1)..(1362)
atgtcgcccgtaggcctgctggtggccacgttctgcgtgctgtccgcgctggtgcccgttccggtgcgcgccgatcccggcgaaacgctcgtgctgctggacaacctggccatccgcgagacgcactccattttcttcaagagcttgcaagaacgcggctacaagctgacctacaagctcgccgacgatgccagcctggttctgtccaagtacggtgagttcctgtacaagcacctgatcctgttcgctccgtcggtggaggagtttggcggatcgctcagcgtcgaggccatcacggactttgtggacaacggggggaacgtgctggtggcgggaagttccagcgccggtgacgctctgcgggaactcgcgtccgagtgtggcttcgaggttgacgaggagaatgcggccgtgattgaccacttgaactacgacattgcggacggtggggatcatacgctggtcgtggcttcgccggagaacctcatcgattcggagattgtcgtgggcaagaagagcgttgggccgttgttgtaccgcggaacgggtctgttggcggacaaggagaatccgctggtgctgcagctgttgacggccgatagcagcgcgtactcgtacattccggacgccccgatcaaggagtacccgcacgccgtcggaaaaggaactctgctgattgcggcactgcaggcccgcaacaatgcccgcgtcgtcttctccggctcgttgcacttcttctccgatgaggcgttcctggcgccggttcagcgcgcccaggacaacaaactgcacgccaagtccggcaaccaggaggtggccaccgccatcagcaagtgggtctttggcgagaacggcgtgctccgggtgcgttcggttaagcatcacaaggagggcgagtccaacccaccggcttcgtacaccgtcacggaaccggccgtgtacacgatcgaaatcgaaacgctcgccgaaaatggcaagtggcaaccgttcgtggccaacgacgtccagctggagtttgtgcgcatcgatccgttcgtgcggaccacgctgaaggcgatcggcggcggacggtaccaggccaagttcaagattccggacgtgtacggcgtgtaccagtttaaggtggactacgaccgcatcggttacacgcagctgtactcgacgacgcaggtctcggttcggccgttgacccacacccagtacgagcggttcatcccgagtgcctatccgtactacgtgagcgcgttctcgatgatggtcggagtgtttgtcttttcgttcatcttcctgcactacaaggaagagggaaagccggctgccggtggaaaggcaacatccggtggagacaagaagactcagtag

SEQ ID NO: 7604 - protein, 453 aa, Culex quinquefasciatus
MSPVGLLVATFCVLSALVPVPVRADPGETLVLLDNLAIRETHSIFFKSLQERGYKLTYKLADDASLVLSKYGEFLYKHLILFAPSVEEFGGSLSVEAITDFVDNGGNVLVAGSSSAGDALRELASECGFEVDEENAAVIDHLNYDIADGGDHTLVVASPENLIDSEIVVGKKSVGPLLYRGTGLLADKENPLVLQLLTADSSAYSYIPDAPIKEYPHAVGKGTLLIAALQARNNARVVFSGSLHFFSDEAFLAPVQRAQDNKLHAKSGNQEVATAISKWVFGENGVLRVRSVKHHKEGESNPPASYTVTEPAVYTIEIETLAENGKWQPFVANDVQLEFVRIDPFVRTTLKAIGGGRYQAKFKIPDVYGVYQFKVDYDRIGYTQLYSTTQVSVRPLTHTQYERFIPSAYPYYVSAFSMMVGVFVFSFIFLHYKEEGKPAAGGKATSGGDKKTQ

SEQ ID NO: 7605 - DNA, 1350 bp, Brugia malayi
  CDS (1)..(1350)
atggcaatatcttggaattatctactgctggcttcgttagttttgctagaaattgtaccagggatcaactctggcaaaatattagttttggtggataatttcggtattagggaaacacattctattttcttgaaatccttaagagaaaggggacaccagttgattataaaagcagcagatgatcagacattaaccctcacaaagtatggcgaacatctctacgatcatcttataatttttgctcctggagttgacgaatttggaggattgattaatgtcaaagctataacatcttttattgataatggtggcaatgtactagtgacagcaggaacacgcgttggtgatgctttgcatgatttggctgcagagaatggtttcgaatttgatgagaatcaaacttctgttattgatcatttgaattacgatactgttcttgatgaaggcgatcatacaacgattgtagctgatccatcaaaccttttgtctgctccaatgattgtaggaaaaacacgacagattaatcctattctattccgaggagttgctttaattgctgataaggcaaatccgcttcgtctggaaatactttctgcttcaacaaccgcttattcattcaatccccgtgaaaaaattgaagaatatccaggtgctgtgggacgatcgacattgttgattggtgctattcaggctcggaataatgcacgtgttctattgagtggttcgattgccatgtttagcgatgcttttatgagtgctaatgtcagcaaatatgcatcggaaactaagcttcaaaaaagtggtaatctcgagttactaacggaattgagcaaatgggtatttatggagaaaggtgttctgagagttaagagtgtttcgcatcataaggcatgtctgttatcattatttttccgggttggtgaaaagagtcctccacgagagtatactattatggataatgttgagtataccattgaaattgaagagctcagtaatggaaaatgggaaccgttcaagggcgatgatgttcaactagaatttacccgtattgatccatttattcggacaactctcaaaaattacaatggcaaattgaaagcacagtttaaacttcctgatgtttatggtgtgtttaaattcatggtcgattatcgtcgtatcgggtatacacatttgttgaatgtgcaacaggtatctgttcgaccattgcaacatacccaatatgagcgttttatctacagtgcatatccttactatgtttcagcattttcaatgatgataggagttgttctattctcatgcgtctttctctatcacaaagaaccatcaaaagatgtaaaaaaggactga

SEQ ID NO: 7606 - protein, 449 aa, Brugia malayi
MAISWNYLLLASLVLLEIVPGINSGKILVLVDNFGIRETHSIFLKSLRERGHQLIIKAADDQTLTLTKYGEHLYDHLIIFAPGVDEFGGLINVKAITSFIDNGGNVLVTAGTRVGDALHDLAAENGFEFDENQTSVIDHLNYDTVLDEGDHTTIVADPSNLLSAPMIVGKTRQINPILFRGVALIADKANPLRLEILSASTTAYSFNPREKIEEYPGAVGRSTLLIGAIQARNNARVLLSGSIAMFSDAFMSANVSKYASETKLQKSGNLELLTELSKWVFMEKGVLRVKSVSHHKACLLSLFFRVGEKSPPREYTIMDNVEYTIEIEELSNGKWEPFKGDDVQLEFTRIDPFIRTTLKNYNGKLKAQFKLPDVYGVFKFMVDYRRIGYTHLLNVQQVSVRPLQHTQYERFIYSAYPYYVSAFSMMIGVVLFSCVFLYHKEPSKDVKKD

SEQ ID NO: 7607 - DNA, 1398 bp, Pyrenophora tritici-repentis Pt-1C-BFP
  CDS (1)..(1398)
atgaggtggttactttctattactgtcgcctttgtttggtcggtggtggtgcaggccaagagcttcacgggcaaccggttgctggttgtgctggaggagcaggctgagagggagaagtatagtgtgtttctcgaggacttgacgtcccggggatttacaacaacaatcgaatcgccaaaagagagcaaactatcccttctgaagcacggcgagcgagcatacgaccatgtcctcctcctacccgcaaagtccaaaggcctcggccctgccctcaccgcgaacaacctgctcgaattcatgaagcacgagggaaacatcatggttgccctttccagcgaacacgccactcctactgccgtcactgcaatgctcctcgagctcgacatcagcatcccatccgacaagggcgcattggtagtcgaccacttcaactacgattcggcatcagcagaggaagagcataatgtgctcttgcttccattccctaaggcactcagacccgacgtcaagaactacttcgctggtgatggatacattgcggtaccaagcgccgtcggtcaggctctcggaaacgagtcgcccctcgttgcgcccattctccgcgctccccgcaccgcatacagctacaaccccaaggacgaggctgatggcgtagaagacccatttgcggtcggtgagcaactgaacctcgtctcctcaatgcaggcgaacaacgcagcgcgcttgacggttgttggttcagctgagatgttgcagaacaagtggttcgctgagaaggccaagttgggcgacaaggccattactactggcaaccgcgaatttgcgcacaagctgtctgcttggaccttcaaggaggcgggtgtgctcaagattggcaaattcctccactaccaagacgagggtgagagcaagaagctgaacactagcactgctatcccggagaacaaccccaccatctatcgcatcaagacagatgttcacttccaagtcgaaatctccgaatacgaaaacgaccgcctcgtccccttcgagcccgtcgagaaggacaacatccagctcgagttcagcatgctctcgccgttccaacgcctcaacctctctcctgttgcgcaaaccgcaaacgcgactatctatggcgtcgcgttcaggacacccgaccagcacggaatcttcaacttccgcgtcaactaccgccgcccctttgtcaccaacattgatgagaagagacaggtcactgtcaggcactttgcgcacgatgaatacccaaggagtttcgagattagcggtgcgtgggtctggatcggcggtatttgggtcacagtgctgggttggttggcgtttgtagcgctctggttgtacagcgcgcctagtgtcaagtctgtcaagaagacacagtaa

SEQ ID NO: 7608 - protein, 465 aa, Pyrenophora tritici-repentis Pt-1C-BFP
MRWLLSITVAFVWSVVVQAKSFTGNRLLVVLEEQAEREKYSVFLEDLTSRGFTTTIESPKESKLSLLKHGERAYDHVLLLPAKSKGLGPALTANNLLEFMKHEGNIMVALSSEHATPTAVTAMLLELDISIPSDKGALVVDHFNYDSASAEEEHNVLLLPFPKALRPDVKNYFAGDGYIAVPSAVGQALGNESPLVAPILRAPRTAYSYNPKDEADGVEDPFAVGEQLNLVSSMQANNAARLTVVGSAEMLQNKWFAEKAKLGDKAITTGNREFAHKLSAWTFKEAGVLKIGKFLHYQDEGESKKLNTSTAIPENNPTIYRIKTDVHFQVEISEYENDRLVPFEPVEKDNIQLEFSMLSPFQRLNLSPVAQTANATIYGVAFRTPDQHGIFNFRVNYRRPFVTNIDEKRQVTVRHFAHDEYPRSFEISGAWVWIGGIWVTVLGWLAFVALWLYSAPSVKSVKKTQ

SEQ ID NO: 7609 - DNA, 1305 bp, Acyrthosiphon pisum
  CDS (1)..(1305)
atgttaattaaatattacgtgtgttcaatattaacgttaagccttgctgcgttcgccagtgcgtccaaagagactctggtactactcaacaatttagtcatcaaagagacacattccattttatttaacactcttaaagaaagaggatatcatctgactttcaaatcagctgatgaccctacattggtgctttctaagtatggaaaatacttttatgaaaatttaattatttttgcaccaaccgtccaagaatttggtggatctctcaacattgaaacaattactcaattcattgatgacggaggcaatgttttgtttactggtggtgtgtctactggttctgctttgagagagttggctgccgaatgtggttttgaagttaccgaagaaaattcttccttaattgaccatttgaattatgatgctagtgactcaggaaaacatactttggtagtaaccagttcgtcaaacctaattaaatctgaagaaatagttggaaaaagtaatgataaaccactgttatatgaaggaactacagtaattacggatccaaaaaatcctttagtacttcctattcttcatgctgaatctaccgcatattcttacaagccagaccttcctgttaaagattattcattaggaacaggcaaagatctattactaattgcagctttacaagcaagaaataatgccagagttgtattttctggttccttgtacttcttttctgatgttgcctttaggacttctgtacaaaaatttgatggaaaaacatataatatttccggaaaccaagaagttgcttcaaacattgttttgtggacattaaaagatagaggtatgataagagtaaagtctgtagaccatcataaagtgggcgagtcgtcacctccaccatcttacacaattatggatatggctatatttttggtggagttggaacgttgggaaaacggaaaatggatccctcataacgctgatgatgttcaagtagaatttgtgcgcatagatccgttctggcgtggtaatcttaaaaatttaaaaaatggcaagtacgagtttacatttaaaataccagatacatatggagtgtatcaatttaaagtggaatacaaccgaattggatttactgcaatcagaagctcaaccatggtgtctgtaattccactggaacatactcagtatgaaagatttatcttaagtgcatatccatattattcaagtgctttttcaatgatgtttggtgtgtttatattcagttttgtcttcttgcattatcgagaagataaagcaaagggagagtaa

SEQ ID NO: 7610 - protein, 434 aa, Acyrthosiphon pisum
MLIKYYVCSILTLSLAAFASASKETLVLLNNLVIKETHSILFNTLKERGYHLTFKSADDPTLVLSKYGKYFYENLIIFAPTVQEFGGSLNIETITQFIDDGGNVLFTGGVSTGSALRELAAECGFEVTEENSSLIDHLNYDASDSGKHTLVVTSSSNLIKSEEIVGKSNDKPLLYEGTTVITDPKNPLVLPILHAESTAYSYKPDLPVKDYSLGTGKDLLLIAALQARNNARVVFSGSLYFFSDVAFRTSVQKFDGKTYNISGNQEVASNIVLWTLKDRGMIRVKSVDHHKVGESSPPPSYTIMDMAIFLVELERWENGKWIPHNADDVQVEFVRIDPFWRGNLKNLKNGKYEFTFKIPDTYGVYQFKVEYNRIGFTAIRSSTMVSVIPLEHTQYERFILSAYPYYSSAFSMMFGVFIFSFVFLHYREDKAKGE

SEQ ID NO: 7611 - DNA, 1350 bp, Drosophila ananassae
  CDS (1)..(1350)
atgatgtggaaggctctactaattgccgtcctggcatttacccactgccaggcggtcctggaaacggatgctaacaccttggttctactggacaacctggccatccgtgaaacccactcgattttcttcaaatcgttgcaagatcgtggtttcaaattgacatacaagttggcggatgactccagtctgctgctttcgcggtatggcgagtatctgtacaagaacgtgatcatctttgccccaagtgtcgaggaattcggcggagacatcagcgtggaaagactggctcagtttgtggacgatggcggtaatgttctggtggcgggtagcgagaaatccggcgatgctctgcgtgaattcgcctccgaatgtggcttcgaactggacgaggagaacgcggcggtgattgaccatctgaattatgatgccagcgatgctggagaccacaccaccattcttacttcagccaagaaccttatccaggcggacaccatagtgggcaaagcaaacaggaaatcggatgcagctcctctgatttatcgcggcactggtcttattgccgacaaagagaatccattagtcctgaaagttctcactgccgaaagcagcgcctacagctacaaccccgattccagtgtcacagattatccacatgccgtgggccgcggtaccctgctgattgctgcccttcaggcaaggaacaacgcccgtgtggtcttctccggttcactggtcttcttttccgacgagagcttcaccacggcggtgcagtacgcacagagtggtgtcttccacaagcaggccggaaatcgggctgtagccgagtccatcagccagtgggtgtttggtgaaaccggacgtcttcgcgtcggctccgtgcagcacaacaaggaaggtgaacgcttgccacctgagcaggcctacaccatcaccgatcccgtcgtctacaccatcgccattgaggagctagtggatggacagtggcgtgccttcaaagccaacgatattcagctggagttcgtccgcatcgatcctttcgtgcgcacctatctgaagcaaacaaagaccggagcctacgaagccaagtttaagatccccgacgtctatggagtgtaccaattcaaggtggactacgatcgtgttggctacacgcatctgtacagtactacccaggtgtcagtgcgtcccttggagcacacccagtatgagcgattcattccaagcgcttttccctactacaccagcgccttctcgatgatgatcggggtgtttgttttctccttcgttttcctgcacttcaaggacgagcccactggcaagagctccaaggacgataagaagacgcagtag

SEQ ID NO: 7612 - protein, 449 aa, Drosophila ananassae
MMWKALLIAVLAFTHCQAVLETDANTLVLLDNLAIRETHSIFFKSLQDRGFKLTYKLADDSSLLLSRYGEYLYKNVIIFAPSVEEFGGDISVERLAQFVDDGGNVLVAGSEKSGDALREFASECGFELDEENAAVIDHLNYDASDAGDHTTILTSAKNLIQADTIVGKANRKSDAAPLIYRGTGLIADKENPLVLKVLTAESSAYSYNPDSSVTDYPHAVGRGTLLIAALQARNNARVVFSGSLVFFSDESFTTAVQYAQSGVFHKQAGNRAVAESISQWVFGETGRLRVGSVQHNKEGERLPPEQAYTITDPVVYTIAIEELVDGQWRAFKANDIQLEFVRIDPFVRTYLKQTKTGAYEAKFKIPDVYGVYQFKVDYDRVGYTHLYSTTQVSVRPLEHTQYERFIPSAFPYYTSAFSMMIGVFVFSFVFLHFKDEPTGKSSKDDKKTQ

SEQ ID NO: 7613 - DNA, 1350 bp, Drosophila erecta
  CDS (1)..(1350)
atgatgtggaagactctcctgctcgctgttttggcgattggccactgccaggcggtactggacacggacgccaacaccttagttctcctggacaacctggccatccgcgagacgcactcgatcttcttcaaatcgctacaggatcgcggatttaagctcacctacaaactggctgatgactccagcctgctgctgtccaaatacggcgaatatctgtacaagaacgtgatcattttcgcaccaagtgtcgaggaattcggcggcgatgtgagcgtggagcgtttggcccagttcgtcgatgatggcggcaatgttctggtggcgggcagcgagaaatccggcgacgctctaagggaattcgcctccgagtgcggcttcgagctggacgaggagaatgcggcggtcattgatcatctgcactacgatgtcagcgatgccggcgagcacacaaccatcctgacctccgccaagaatcttatccaggccgacaccattgtaggcaaggccaacaggctggcggatgctgctccgctgctttatcgcggcacaggactaattgccgacaaggagaacccgctggtactcaaactgctcaccgccgagagcaccgcctacagctacaatcccgaggccagtgtctccgactatccgcatgccgttggccgtggcaccctgcttatcgccgccctgcaggcgaggaacaatgcccgcgtggtcttctccggctcgctgctcttcttctccgacgagagcttcaccacggccgtgcagtacgcccagagcggtgtattccacaagttggccggcaaccgcgacgtggccgagtccataagcaagtgggtatttggtgagactggccgcctgcgcgtggcttccgtgcagcatcacaaggagggtgagctgctgccaccggatcaggcgtacaccatcaccgatcccgttgtctacactatcggcatcgaggagctggtgcaaggcgagtggcgcgccttcaaggccagcgacattcagctggagttcgtccgcatcgatccattcgtgcgcacctatctgaagcaaacgaactcgggcgcctaccaggccaagttcaagatacccgacgtctatggcgtctaccagttcaaggtggactacgatcgcgtgggttacacgcacctatacagcaccacccaggtgtcggtgcgtccgctggagcacacgcagtacgagcggttcatcccgagcgccttcccctactacaccagcgccttctccatgatgatcggcgtgttcgtcttctcgttcgtgttccttcacttcaaggatgagcccgtgggaagggccgccaatcaggacaagaagtcgcagtag

SEQ ID NO: 7614 - protein, 449 aa, Drosophila erecta
MMWKTLLLAVLAIGHCQAVLDTDANTLVLLDNLAIRETHSIFFKSLQDRGFKLTYKLADDSSLLLSKYGEYLYKNVIIFAPSVEEFGGDVSVERLAQFVDDGGNVLVAGSEKSGDALREFASECGFELDEENAAVIDHLHYDVSDAGEHTTILTSAKNLIQADTIVGKANRLADAAPLLYRGTGLIADKENPLVLKLLTAESTAYSYNPEASVSDYPHAVGRGTLLIAALQARNNARVVFSGSLLFFSDESFTTAVQYAQSGVFHKLAGNRDVAESISKWVFGETGRLRVASVQHHKEGELLPPDQAYTITDPVVYTIGIEELVQGEWRAFKASDIQLEFVRIDPFVRTYLKQTNSGAYQAKFKIPDVYGVYQFKVDYDRVGYTHLYSTTQVSVRPLEHTQYERFIPSAFPYYTSAFSMMIGVFVFSFVFLHFKDEPVGRAANQDKKSQ

SEQ ID NO: 7615 - DNA, 1350 bp, Drosophila grimshawi
  CDS (1)..(1350)
atgtggaaacttcttctatttaccattttggcaataaatcattgcaatgctgtgctggaggccgatgccaatactctggtgttgctggacaacttggctatccgcgagacacattcaattttcttcaaatcattgcaagatcgcggatttaagctgacatacaagcttgctgatgactcgggtctattgttgtcacgctatggcgaatacttgtacaagaatctaatcatatttgcgcccagtgtggaggaatttggcggcgatatcagcgtggagcgtctggcccaattcgttgatgatggcggcaatgtactggtcgctggaagtgaaagatccggcgatgcactccgtgaattcgcctccgagtgcggcttcgaactggacgaggacaatgcggcggtgattgatcatctgcactacgatgtcagcgatgccggcatgcatacaagcatattgacatccgcaaagaatctaatcaaggcggagagcgttgtgggcaaacacaatcggcaagcggatgcggcaccattgctctatcgcggcaccggcatcatagccgacaaggagaatccattggtgctgcaggtgctgacggcagagaatagcgcctacagctacaatcccgagacgagtgtcaaggattatccgcacgccgttggccgcaacacgttgctaattgccgccctgcaggcccgcaataatgcacgagtcgttttctccgggtcgctgcaattcttcgccgatgagacattcacgatggccgtgcagtatgcccagagcggtgttttccacaaggtggcgggcaatcgtgccgtcgccgagtccatcggccagtgggtgttcggggagagtggccgactgcgtgtctcggccgtccatcacaataaggtgggggaacgtgatccgcctgagcaggcatacaccatcaccgatcctgttgtctatacgattgccatcgaggagctcgtccagggcgaatggcagccattcaaggctgacgatatacaattggaatttgtgcgtatcgatccgtttgtgcggacattcctcaaacagacggccggcggcagttacgaggcccgcttcaagatacccgatgtctatggcgtctatcaattcaaggtggactacgatcgggtcggatttacgcatttgtacaatacgacccaggtgtcggtgcgcccgctggagcacacgcaatatgaacgcttcatacctagcgctttcccctattatactagtgccttctccatgatgatcggcgtctttgtgttctcgtttgtcttcctgcactttaaggaagaagctaccggcaagtcagccggcaaagatgacaagaagacccaatag

SEQ ID NO: 7616 - protein, 449 aa, Drosophila grimshawi
MWKLLLFTILAINHCNAVLEADANTLVLLDNLAIRETHSIFFKSLQDRGFKLTYKLADDSGLLLSRYGEYLYKNLIIFAPSVEEFGGDISVERLAQFVDDGGNVLVAGSERSGDALREFASECGFELDEDNAAVIDHLHYDVSDAGMHTSILTSAKNLIKAESVVGKHNRQADAAPLLYRGTGIIADKENPLVLQVLTAENSAYSYNPETSVKDYPHAVGRNTLLIAALQARNNARVVFSGSLQFFADETFTMAVQYAQSGVFHKVAGNRAVAESIGQWVFGESGRLRVSAVHHNKVGERDPPEQAYTITDPVVYTIAIEELVQGEWQPFKADDIQLEFVRIDPFVRTFLKQTAGGSYEARFKIPDVYGVYQFKVDYDRVGFTHLYNTTQVSVRPLEHTQYERFIPSAFPYYTSAFSMMIGVFVFSFVFLHFKEEATGKSAGKDDKKTQ

SEQ ID NO: 7617 - DNA, 1341 bp, Drosophila mojavensis
  CDS (1)..(1341)
atgtggaaacttctattagtggcaattttagcaataaatcattgcaatgctgtgttggaaaccgatgccaatacgctggtacttctagacaatttggccatacgcgaaactcattccattttctttaaatcactgcaagatcgtggctttaagctgacctataagctagctgatgactctggcttactgttatcgcgctacggcgaatacctatacaagaatctgatcatctttgcgcccagtgtagaggaattcggcggcgacatcagcgtcgagcgactcgcccagtttgttgacgacggcggcaacgttttggttgcgggcagcgagaagtctggcgatgccctgcgtgagtttgcctccgagtgcggattcgagctggacgaggagaaggcggcggtcatcgatcatctgcactacgatgtgagcgatacgggcgaccacaccacgatcttgacctcggctctcaatctgatcgatgcggccagtgtggtgggcagcgagaatcgaaaggcagatgcagctccgctactttatcgcggcaccggactcattgccgacaaggagaatccgctggtgctaaagctcctgacggccgagagcagcgcttacagctacaatcctgagcagagcgtttccgactatcctcatgctgtgggccgtaacactctgctaattgctgccctgcaggcacgcaacaatgcacgcgtcgtcttctccggctcgttgcagttcttcgccgacgaatcctttaccatggccgtgcagtatgcacaaaacggcgccttcttcaagcaggcgggcaaccgtgccgtcgccgagtccattagcaagtgggtgtttggggagagcggccgactgcgcgtcgcctccgtacgccaccacaaggtgggcgagaaaaatcccccagagcaagcgtacacgatcaccgatcccgttgtctacacgattgccatcgaggagctggtccagggcaagtggcagccattcaaagccaacgatattcagctggaattcgtacgcatcgatccgtttgtgcgcaccttcctcaagcaaacgaagagcggcagctatgaggcccgcttcaaaataccggacgtctatggtgtctatcagtttaaggtagactacaatcgggtgggctacacgcacctgtacaacaccacccaggtgtcggtgcgtccattggagcacacacaatacgagcgattcataccgagcgcgttcccctactacactagcgccttctccatgatgattggcgtctttgtgttctcgttcgtcttcctgcacttcaaggaggagaccagaactggcaaggacgacaagaaaacccaatag

SEQ ID NO: 7618 - protein, 446 aa, Drosophila mojavensis
MWKLLLVAILAINHCNAVLETDANTLVLLDNLAIRETHSIFFKSLQDRGFKLTYKLADDSGLLLSRYGEYLYKNLIIFAPSVEEFGGDISVERLAQFVDDGGNVLVAGSEKSGDALREFASECGFELDEEKAAVIDHLHYDVSDTGDHTTILTSALNLIDAASVVGSENRKADAAPLLYRGTGLIADKENPLVLKLLTAESSAYSYNPEQSVSDYPHAVGRNTLLIAALQARNNARVVFSGSLQFFADESFTMAVQYAQNGAFFKQAGNRAVAESISKWVFGESGRLRVASVRHHKVGEKNPPEQAYTITDPVVYTIAIEELVQGKWQPFKANDIQLEFVRIDPFVRTFLKQTKSGSYEARFKIPDVYGVYQFKVDYNRVGYTHLYNTTQVSVRPLEHTQYERFIPSAFPYYTSAFSMMIGVFVFSFVFLHFKEETRTGKDDKKTQ

SEQ ID NO: 7619 - DNA, 1347 bp, Drosophila persimilis
  CDS (1)..(1347)
atgtggaaatatgcactaatcgccctcctgggcatttatagtagcaatgcagttttgcagacagatgccaatacactggtgctactcgacaatctggccattcgcgagacccactcgattttcttcaaatcgctgcaggatcgcgggtttaagctaacctacaagctagcggacgactccagcctgctgctgtcgcgctatggcgagtatctctacaagaatgtgatcatctttgcgcccagtgtggaggagttcggcggcgacatcagtgtggagcgtctggccaagtttgtggacgacggtggcaatgttctggtggccggcagtgaaaagtccggtgatgcgctgcgggagttcgcctcggagtgcggcttcgagctggacgaggagaacgctgcagtcatcgatcatctcaactacgatgtcagcgatgctggcgagcacaccaccatcctgacttcggccaagaacctgatccaggccgacaccattgttggcaaggagaacagcaaggctgactcggcaccactggtgtaccgaggaacgggcctgattgccgacaaggagaacccactggtcctaaagctcctcaccgccgagagcagcgcgtacagttacaatcctcagtccagtgtcaccgattacccgcatgctgtgggtcgcggtactctgctgattgccgccctccaggcgcgcaacaatgcccgcgtcgtcttctctggatccctgctcttcttttcggacgagagcttcaccacggctgtccagtatgctcagagcggtgtgttccacaagctctccggcaatcgcgtcgtcgctgagtccatcagccagtgggtctttggcgagaccggccgcctacgcgttgcctctgtgcagcaccacaaggagggcgagttgctgcccccaggggaggcgtacactattaccgatcccgtgatctacaccattgccattgaggagctggtggctggcaagtggcaggcgtacaaggcgagtgacatccagctggagtttgtgcgcatcgatccgttcgtgaggaccttcctgaagcagaccaagacgggcagctatgaggccaggttcgagatacccgatgtctacggcgtctaccagttcaaggtggactacaatcgtgtcggctacacccatctgtatagcaccacccaggtgtcggtgcgtccgttagaacacacacagtacgagcgcttcattcccagcgccttcccgtactacacgagtgccttctctatgatgattggcgtctttatcttttcgtttgtgttccttcacttcaaggacgaacccctcggcaaaccgctcagggaggacaagaagtcgcaataa

SEQ ID NO: 7620 - protein, 448 aa, Drosophila persimilis
MWKYALIALLGIYSSNAVLQTDANTLVLLDNLAIRETHSIFFKSLQDRGFKLTYKLADDSSLLLSRYGEYLYKNVIIFAPSVEEFGGDISVERLAKFVDDGGNVLVAGSEKSGDALREFASECGFELDEENAAVIDHLNYDVSDAGEHTTILTSAKNLIQADTIVGKENSKADSAPLVYRGTGLIADKENPLVLKLLTAESSAYSYNPQSSVTDYPHAVGRGTLLIAALQARNNARVVFSGSLLFFSDESFTTAVQYAQSGVFHKLSGNRVVAESISQWVFGETGRLRVASVQHHKEGELLPPGEAYTITDPVIYTIAIEELVAGKWQAYKASDIQLEFVRIDPFVRTFLKQTKTGSYEARFEIPDVYGVYQFKVDYNRVGYTHLYSTTQVSVRPLEHTQYERFIPSAFPYYTSAFSMMIGVFIFSFVFLHFKDEPLGKPLREDKKSQ

SEQ ID NO: 7621 - DNA, 1350 bp, Drosophila sechellia
  CDS (1)..(1350)
atgatgtggaaggctctactgatcgccgttttggcgattgcccactgccaggcggtactggaaacggacgccaacaccttggtcctgctggacaacctgtccatccgggaaacccactcgatcttcttcaaatcgctgcaggatcgcggattcaggctcacctacaaactggcggatgactccagcctgctgctgtccaaatacggtgaatatctgtacaagaacgtcatcatattcgcaccaagtgtcgaggaattcggcggcgatgtgagcgtggagcgtttggcccagttcgtcgacgatggcggcaatgttctggtggcgggcagcgagaaatccggcgacgcgcttagggaattcgcctccgagtgcggcttcgagctggacgaggagaatgcggcggtcattgaccatctgcactacgatgtcagcgatgctggcgagcacacaaccatcctgacatccgccaagaatctaatccaggccgacaccatcgtgggcaaggccaacagacaggcggatgccgcaccgctgctttatcgcggcacaggactgattgccgacaaggagaacccgctggtactcaagctgctgaccgccgagagcaccgcctatagctacaatcctgaggccagtgtctccgactatccgcatgccgttggccgaggcaccctgctaatcgccgccctgcaggcgaggaacaatgcccgcgtagtcttctccggctcgctgctcttcttctccgacgagagcttcaccacggtcgtgcagtacgcgcagagcggtgtgttccacaagcttgccggcaatcgcgacgtggccgagtccattagcaagtgggtatttggggagactggccgcctgcgcgtggcatccgtgcagcatcacaaggagggcgagctgctgccaccggatcaggcgtacaccatcaccgacccggtcgtctacaccatcggcatcgaggagctggtgcagggcgagtggcgcgccttcaaggccagcgacattcaactggagttcgtgcgcatcgatcccttcgtgcgcacctatctgaagcaaacgaactcgggcgcctatcaggccaaattcaagatacccgacgtctacggcgtttatcagttcaaggtggactacgatcgcgtgggctacacgcatctgtacagcaccacccaggtttcggtgcgtccgctggagcacacgcagtacgagcgcttcatcccgagcgcattcccctactacaccagcgccttctccatgatgatcggcgtgtttgtcttctcgttcgtgttccttcacttcaaggatgagcccgtgggcagggccgccaaggacgacaagaagtcgcagtag

SEQ ID NO: 7622 - protein, 449 aa, Drosophila sechellia
MMWKALLIAVLAIAHCQAVLETDANTLVLLDNLSIRETHSIFFKSLQDRGFRLTYKLADDSSLLLSKYGEYLYKNVIIFAPSVEEFGGDVSVERLAQFVDDGGNVLVAGSEKSGDALREFASECGFELDEENAAVIDHLHYDVSDAGEHTTILTSAKNLIQADTIVGKANRQADAAPLLYRGTGLIADKENPLVLKLLTAESTAYSYNPEASVSDYPHAVGRGTLLIAALQARNNARVVFSGSLLFFSDESFTTVVQYAQSGVFHKLAGNRDVAESISKWVFGETGRLRVASVQHHKEGELLPPDQAYTITDPVVYTIGIEELVQGEWRAFKASDIQLEFVRIDPFVRTYLKQTNSGAYQAKFKIPDVYGVYQFKVDYDRVGYTHLYSTTQVSVRPLEHTQYERFIPSAFPYYTSAFSMMIGVFVFSFVFLHFKDEPVGRAAKDDKKSQ

SEQ ID NO: 7623 - DNA, 1350 bp, Drosophila virilis
  CDS (1)..(1350)
atgtggaaacttctaataattgcgattttcgcaataaataattgcaatgctgtgcttgaaagcgatgccaatactctggtgctgttggacaatttagctattcgtgaaacgcattcaattttcttcaaaacattgcaagatcgcggatttaagctgacctataagctagcggacgactccggtctgttgctctctcgctatggcgaatatctatacaagaatctaattatcttcgcgcccagcgtcgaggaattcggcggtgacatcagcgtggagcgtctggcacaattcgtggacgacggcggcaatgttctggttgcgggcagcgagaaatccggtgatgcactgcgtgaattcgcctctgagtgcggcttcgagctggacgaggaaaatgctgccgtcatcgatcacttgcactacgatgtgagcgatgcgggcgaccatacaactattctcacttcggcccggaatctggttgatgcggcgagcgtggtgggtagcgagaatcgtcaggcgaatgcggcgccgctgctatatcgcggcacgggacttattgcggacaaggagaatcctttggtcttgaagctgctgacggcggaaagcagcgcctacagctacaatcccgactccagcgtttcagactatccgcatgctgtgggccgcggcacgctgctaattgccgctctgcaggcacgcaacaatgcacgcgtcgtcttctccggctcgctgcacttctttgccgatgagaccttcaccatggccgtgcagtatgcgcagaccggcgccttccacaaacaggctggcaatcgggcggtcgccgaagccattagcaaatgggtgtttggcgaaagcggcagactgcgtgtggcttctgtgcggcaccacaaggagggtgaaagtcagccgccagagcaggcatacaccattacagatcccgtggtctatacgattgacattgaggagctggtgctgggcaattggcagccgttcaaagccaacgatattcagctggagtttgtgcgcatcgatccgtttgtgcgcgcattcctcaagcagacgagcagcggcagctacgaggccagattcaagatacccgacgtctatggtgtctatcagttcaaggtcgactacaatcgcatcggctatacgcatctgtacaacacgacccaagtgtcggtgcgtccactggagcacacacaatacgaacgattcatacccagcgcattcccctactacaccagcgccttctccatgatgattggcgtctttgtcttctcgtttgtctttttgcacttcaaggaggatgccaccgccggcaaatccgccaaggacgacaaaaagactcaatag

SEQ ID NO: 7624 - protein, 449 aa, Drosophila virilis
MWKLLIIAIFAINNCNAVLESDANTLVLLDNLAIRETHSIFFKTLQDRGFKLTYKLADDSGLLLSRYGEYLYKNLIIFAPSVEEFGGDISVERLAQFVDDGGNVLVAGSEKSGDALREFASECGFELDEENAAVIDHLHYDVSDAGDHTTILTSARNLVDAASVVGSENRQANAAPLLYRGTGLIADKENPLVLKLLTAESSAYSYNPDSSVSDYPHAVGRGTLLIAALQARNNARVVFSGSLHFFADETFTMAVQYAQTGAFHKQAGNRAVAEAISKWVFGESGRLRVASVRHHKEGESQPPEQAYTITDPVVYTIDIEELVLGNWQPFKANDIQLEFVRIDPFVRAFLKQTSSGSYEARFKIPDVYGVYQFKVDYNRIGYTHLYNTTQVSVRPLEHTQYERFIPSAFPYYTSAFSMMIGVFVFSFVFLHFKEDATAGKSAKDDKKTQ

SEQ ID NO: 7625 - DNA, 1353 bp, Drosophila willistoni
  CDS (1)..(1353)
atgtggaaagttttatttattatagcgctagcaatttataattgcaatgctgtgcttgaaacagatgccaacactctggtccttcttgataatctggcaataagggagactcactccatattctttaaatcacttcaagatcgcggtttcaagctgacttacaaattggccgatgattcgagtttactactctctcgttatggtgaatatttgtacaaaaatgtaataatatttgcgcctagtgtggaagaattcggcggagatatcagcgttgaacgcttagcccaatttgtcgatgacggaggcaatgtattggtagccggtagtgagaaatctggtgatgctttgcgggaatttgcctctgaatgtggttttgagctggacgaagagaacgcggccgtaattgatcacctacattatgatcacaacgatgaaggcgaccatacaaccattttgacatcagcccgtaatttgattgactccgatgtcatagttgggaaggggaatcgacagaaggatgctgcacctttgatatacagaggcacgggcttgatagccgacaaagagaatccccttgtactgaagctgctgacagcggagagcaccgcctacagttacaacccagaagcctccagtgtcagtgattaccctcatgctgtgggtcgcggtaccctgcttattgctgcacttcaggcacgcaataatgctcgtgttgtattttctggttcgctgcactttttctcggacgcaacgtttactacagctgtgcaatatgcccagagtggtgtctttcataagcaaactggcaatcgagctgtatccgaatctataagccagtgggtcttcggtgagagcgggcgcttgcgtgtggcctctgttaatcatcataaagcgggagaattgttgccaccagagcaggcttacactatcacagatcctgttgtctacaccattgccatcgaagagttggtcgagggcaagtggcaagcattcaaggccagcgatattcaactcgaattcgtgcgtatcgatcctttcgtacggacgttccttaagcaaacctccacgggaagttatgaggccaaatttaaaattccggatgtatatggcgtctatcagttcaaagtggattacgatcgcattggttacactcatctatatagcaccactcaggtgtcggtacgtccattagagcacacacagtatgaacgattcataccaagcgctttcccatactacaccagtgcattttccatgatgattggggtatttgtgttttcctttgtatttttgcatttcaaagaggaaaccactgtaggaaagtccgcaaaagaagacaagaagtcacagtaa

SEQ ID NO: 7626 - protein, 450 aa, Drosophila willistoni
MWKVLFIIALAIYNCNAVLETDANTLVLLDNLAIRETHSIFFKSLQDRGFKLTYKLADDSSLLLSRYGEYLYKNVIIFAPSVEEFGGDISVERLAQFVDDGGNVLVAGSEKSGDALREFASECGFELDEENAAVIDHLHYDHNDEGDHTTILTSARNLIDSDVIVGKGNRQKDAAPLIYRGTGLIADKENPLVLKLLTAESTAYSYNPEASSVSDYPHAVGRGTLLIAALQARNNARVVFSGSLHFFSDATFTTAVQYAQSGVFHKQTGNRAVSESISQWVFGESGRLRVASVNHHKAGELLPPEQAYTITDPVVYTIAIEELVEGKWQAFKASDIQLEFVRIDPFVRTFLKQTSTGSYEAKFKIPDVYGVYQFKVDYDRIGYTHLYSTTQVSVRPLEHTQYERFIPSAFPYYTSAFSMMIGVFVFSFVFLHFKEETTVGKSAKEDKKSQ

SEQ ID NO: 7627 - DNA, 1350 bp, Drosophila yakuba
  CDS (1)..(1350)
atgatgtggaaggctctactgctcgccgttttggcgattggccactgccaagcggtgctggaaacggacgccaacaccttagttcttctggacaacctggccatccgcgagacgcactcgatcttcttcaaatcgctacaggatcgcggattcaagctcacctacaaactggcggatgactccagcctgctgctgtccaaatacggcgagtatctgtacaagaacgtcatcattttcgcaccaagtgtcgaggaattcggcggcgatgtgagcgtggaacgtttggcccaattcgtcgatgatggcggcaatgttctggtggcgggcagcgagaaatccggtgacgctctgagggaattcgcctccgagtgcggcttcgagcttgatgaggagaatgcggcggtcattgatcatctgcactacgatgtcagcgatgccggcgagcacacaaccatcctgacctccgccaagaatcttatccaggccgacaccattgtgggcaaggctaacaggcaggcagatgctgctcctctgctttatcgcggcactggactgattgccgacaaggagaacccactggtactcaaactgctgaccgccgagagcaccgcctacagctacaatcccgaggccagtgtctccgactatccgcatgccgttggccgtggcaccctactcatcgccgccctgcaggcgaggaacaatgcccgcgtggtcttctccggctcgctgctcttcttctccgacgagagcttcaccacggccgtgcagtacgcccagagcggtgtgttccacaagctggccggcaaccgcgacgtggccgactccattagcaagtgggtatttggggagactggccgcctgcgcgtggcttccgtgcagcatcacaaggagggcgagctgctgccaccggatcaggcgtacaccatcaccgaacccgttgtctacaccatcggcatcgaggagctggtgcagggcgagtggcgcgcctttaaggccagcgacatccagctggagttcgtccgcatcgatcccttcgtgcgcacctatctgaagcaaacgaactcgggcgcctaccaggccaaattcaagatacccgacgtctacggcgtgtaccagttcaaggtggactacgatcgcgttggttacacccacctgtacagcaccacccaggtgtcggtgcgcccgctggagcacacgcagtacgagcgtttcatcccaagcgccttcccctactacaccagcgccttctccatgatgatcggcgtgttcgtcttctcgttcgtgttccttcacttcaaggatgagcccgtgggcagggccgccaaggaagacaagaagtcgcagtag

SEQ ID NO: 7628 - protein, 449 aa, Drosophila yakuba
MMWKALLLAVLAIGHCQAVLETDANTLVLLDNLAIRETHSIFFKSLQDRGFKLTYKLADDSSLLLSKYGEYLYKNVIIFAPSVEEFGGDVSVERLAQFVDDGGNVLVAGSEKSGDALREFASECGFELDEENAAVIDHLHYDVSDAGEHTTILTSAKNLIQADTIVGKANRQADAAPLLYRGTGLIADKENPLVLKLLTAESTAYSYNPEASVSDYPHAVGRGTLLIAALQARNNARVVFSGSLLFFSDESFTTAVQYAQSGVFHKLAGNRDVADSISKWVFGETGRLRVASVQHHKEGELLPPDQAYTITEPVVYTIGIEELVQGEWRAFKASDIQLEFVRIDPFVRTYLKQTNSGAYQAKFKIPDVYGVYQFKVDYDRVGYTHLYSTTQVSVRPLEHTQYERFIPSAFPYYTSAFSMMIGVFVFSFVFLHFKDEPVGRAAKEDKKSQ

SEQ ID NO: 7629 - DNA, 1350 bp, Drosophila simulans
  CDS (1)..(1350)
atgatgtggaaggctctactgatcgccgttttggcgattgcccactgtcaggcggtactggaaacggacgccaacactttggtcctgctggacaacctggccatccgggaaacccactcgatcttcttcaaatcgctgcaggatcgcggattcaagctcacctacaaactggcggatgactccagcctgctgctgtccaaatacggcgaatatctgtacaagaacgtcatcatattcgcaccaagtgtcgaggaattcggcggcgatgtgagcgtggagcgtttggcccagttcgtcgacgatggcggcaatgttctggtggcgggcagcgagaaatccggcgacgcgcttagggaattcgcctccgagtgcggcttcgagctggacgaggagaatgcggcggtcattgaccatctgcactacgatgtcagcgatgctggcgagcacacaaccatcctgacatccgccaagaatctaatccaggccgacaccatcgtgggcaaggccaaccgacaggcggatgccgcaccgctgctctatcgcggcacaggactgattgccgacaaggagaacccgctggtactcaagctgctgaccgccgagagcaccgcctatagctacaatcccgaggccagtgtctccgactatccgcatgccgttggccgaggcaccctgctaatcgccgccctgcaggcgaggaacaatgcccgcgtagtcttctccggctcgctgctcttcttctccgacgagagcttcaccacggccgtgcagtacgcgcagagcggtgtgttccacaagctggccggcaatcgcgacgtggccgagtccattagcaagtgggtatttggggagactggccgcctgcgcgtggcatccgtgcagcatcacaaggagggcgagctgctgccaccggatcaggcgtacaccatcaccgacccggtcgtctacaccatcggcatcgaggagctggtgcagggcgagtggcgcgccttcaaggccagcgacattcaactggagttcgtgcgcatcgatcccttcgtgcgcacctatctgaagcaaacgaacacgggcgcctaccaggccaaattcaagatacccgacgtctacggcgtttatcagttcaaggtggactacgatcgcgtgggctacacgcatctgtacagcaccacccaggtgtcggtgcgtccgctggagcacacgcagtacgagcgcttcatcccgagcgcattcccctactacaccagcgccttctccatgatgatcggcgtgtttgtcttctcgttcgtgttccttcacttcaaggatgagcccgtgggcagggccgccaaggaggacaagaagtcgcagtag

SEQ ID NO: 7630 - protein, 449 aa, Drosophila simulans
MMWKALLIAVLAIAHCQAVLETDANTLVLLDNLAIRETHSIFFKSLQDRGFKLTYKLADDSSLLLSKYGEYLYKNVIIFAPSVEEFGGDVSVERLAQFVDDGGNVLVAGSEKSGDALREFASECGFELDEENAAVIDHLHYDVSDAGEHTTILTSAKNLIQADTIVGKANRQADAAPLLYRGTGLIADKENPLVLKLLTAESTAYSYNPEASVSDYPHAVGRGTLLIAALQARNNARVVFSGSLLFFSDESFTTAVQYAQSGVFHKLAGNRDVAESISKWVFGETGRLRVASVQHHKEGELLPPDQAYTITDPVVYTIGIEELVQGEWRAFKASDIQLEFVRIDPFVRTYLKQTNTGAYQAKFKIPDVYGVYQFKVDYDRVGYTHLYSTTQVSVRPLEHTQYERFIPSAFPYYTSAFSMMIGVFVFSFVFLHFKDEPVGRAAKEDKKSQ

SEQ ID NO: 7631 - DNA, 1338 bp, Trichoplax adhaerens
  CDS (1)..(1338)
atggggctgcgattaaccgatattattattattttctcggtgttgggaagcttagtagtatgtgatactcaaagtaacaatcaagacagaacgttggttctcttggataacttcaataccaaagaaacgcactcatcgttcttgaagatattgcaaggaattggattgtcattagatttcaaaacagctgatgatcctagtttagcactctctaaatacggtgaattcttatacgaacatctcgtaatcctctctcctagtgttgaagaattcggcggtaatatcaacgttgctgccattaccgaattcattgacagtggaagaaatgtcctggtagctggtagctcggatataggtgagcctattcgtgacttggcagcagaatgtggcttagaaatggacgaagagaaaacagctgttattgatcatattaattatgacaagagagatgaaggctatcatactatggttgttgcgaaatctaaagctagtttaatcgacgcacctgtagttgttggtgtcggcgttaatgatcctttactttacagaggtataggattgactgttgatgcagacaatccacttgtaatggaaattttgactggaagtccatctagcttttcttattttcctgatgaaagagttaagaatgccccgcaagccattggaaaaaatactgtccttatcgcatctatgcaagccagaaataacgcacgtgttgttttctgcggttcactggatttctttagcgatgaattcttgcattcaaatgttcaggtagcctatccaaaagaaagaacgtatgagaatagcggcaatgaacgtttagctatttctttagccggctggacctttaaaaagaacggtgttctacgttacggaaatatacgtcatcacaaagtaggggaaacgaaggaagcacagttttatactgtcggagatgaattggaatttactgtcgatatcgaagaactcgttaacggtaaatgggtgccccctatccgctcggatatccaacttgaatttgttcgtattgatccatttgttcgggtgacgatgaaccgttcttcaaatccgataacattcaaagctcactttaaagttccagacgtttatggcgtttaccaatttaaaattgattacttgagacttggatatactcatatgtttagtgccactcaggtatctgtccgtccattggagcacacgcagtatgaacgattcatcctatccgcttatccgtattatgccagcgccttttcaatgatgtttggtgtctttatattctcatttgtctttttacactaccgacctaacgataaagataagagagattaa

SEQ ID NO: 7632 - protein, 445 aa, Trichoplax adhaerens
MGLRLTDIIIIFSVLGSLVVCDTQSNNQDRTLVLLDNFNTKETHSSFLKILQGIGLSLDFKTADDPSLALSKYGEFLYEHLVILSPSVEEFGGNINVAAITEFIDSGRNVLVAGSSDIGEPIRDLAAECGLEMDEEKTAVIDHINYDKRDEGYHTMVVAKSKASLIDAPVVVGVGVNDPLLYRGIGLTVDADNPLVMEILTGSPSSFSYFPDERVKNAPQAIGKNTVLIASMQARNNARVVFCGSLDFFSDEFLHSNVQVAYPKERTYENSGNERLAISLAGWTFKKNGVLRYGNIRHHKVGETKEAQFYTVGDELEFTVDIEELVNGKWVPPIRSDIQLEFVRIDPFVRVTMNRSSNPITFKAHFKVPDVYGVYQFKIDYLRLGYTHMFSATQVSVRPLEHTQYERFILSAYPYYASAFSMMFGVFIFSFVFLHYRPNDKDKRD

SEQ ID NO: 7633 - DNA, 1317 bp, Ciona intestinalis
  CDS (1)..(1317)
atgaagcaaagttatttctgtttggtattgcttgcctgccttgcgtttgtgtggtcgaagcaaaacaagaagactttggttttatatgacaattctgatatcaaaactactcattcaatattcttcaaatctttgtcggacagaggttttgatttaacgttcaaatccgctgatgatgccagcttggagttgatcaaatatggggtgcaactttatgaaaatcttattatattttccccatcagttgaagattttggtggtggcatcaaagtttcaacaatcacagattttgtagatggtggaggtaatgttttggtagcagctgattcaagcatcggtgatccgatcagagaacttgcttctgaatgtggagtggagtttgatgaggagcgaaccaaagttatcgatcatcataactttgatgaaagtgatagaggatcgcatacaaaacttgttgttgatccgagcaacctcattaaatctgaaaacattgtggggaaaccaaaatcaccaatcttatttaatggaatcgggatggtacttgatcaggaaaacccacttgttctaccaataatgaaaggttcagcaacttgctactcctactttactgatgacaaaattgaacaatatcctcttggagttggtacaaacactgtgttagttgcaggattacaggctcgcaacaatgcacgtcttgtatttgctggttcacttcaaatgttcagtgatgattatttgacttctggagttaaacaggattcacccggttcaaaggcgtttgcaaaatctggcaatgctgactttgtaatcaccctttctaagtgggtgttttcagaaagtggtgtgttacgagttggaaagattaatcatcataaattgggagagaaagtcgcacctgatgcttacaccatcacagatatggtgcacttcagcattgtaatcgaagaacgtactattgatggaaaatggaagccgttcaagggtgatgatgtccagatggaatttgttaggattgatccgtttgtgagattacccatcaaactcaatccaaaacttggagcttttaccattgattttaaactacccgatgtgtatggtgttttccaatttaaaattgattactccagattaggatacacatttttaaagagtgccactcaagtttctgttcgcccattgcagcacactcagtatgagagatttatatcatctgcatacccatattatgccagtgcattcagcatgatgcttggtgttgttatcttctctgtgttcttcctttaccatgatgatgcaaagaaagtcaaatctgaataa

SEQ ID NO: 7634 - protein, 438 aa, Ciona intestinalis
MKQSYFCLVLLACLAFVWSKQNKKTLVLYDNSDIKTTHSIFFKSLSDRGFDLTFKSADDASLELIKYGVQLYENLIIFSPSVEDFGGGIKVSTITDFVDGGGNVLVAADSSIGDPIRELASECGVEFDEERTKVIDHHNFDESDRGSHTKLVVDPSNLIKSENIVGKPKSPILFNGIGMVLDQENPLVLPIMKGSATCYSYFTDDKIEQYPLGVGTNTVLVAGLQARNNARLVFAGSLQMFSDDYLTSGVKQDSPGSKAFAKSGNADFVITLSKWVFSESGVLRVGKINHHKLGEKVAPDAYTITDMVHFSIVIEERTIDGKWKPFKGDDVQMEFVRIDPFVRLPIKLNPKLGAFTIDFKLPDVYGVFQFKIDYSRLGYTFLKSATQVSVRPLQHTQYERFISSAYPYYASAFSMMLGVVIFSVFFLYHDDAKKVKSE

SEQ ID NO: 7635 - DNA, 1308 bp, Schizosaccharomyces japonicus yFS275
  CDS (1)..(1308)
atgcgaagttctctattaaactttctattcttcacatttattgcagctgttgctgcagtgaacgagagagttttggctatctttgaccatgagcacgcagactatgaaagtttgctcgattctcttcgtgaacgcgactttgatgtcactgttaaggatgtgaaggcgcccgatagctctctttttgagtttggagaacgcaagtacgacgacttgctgttgttcagtgcccgtaacaaaggtcttggtgcatctttttctcccaaggctttaattgaatttgtcgaagacggaggaaacattcttttggccgccggcacaaatgtgcccgaaggactgcgtgaattcggtcgtcaacttggcatttttgttgccgaaagaggaaacgctctcgtagatcattttgcgtcggttggatctgaggatcatcagttagttgctcttgacgaattttccagctcgaaatacatcgtctccgacgaaacacgtaacgctggcgcagtcctgtacaagggttccggacatgctctgggagaaaaccctcttgtcgagcctgttttgcgcgccaagactactagctacctttacaaccaaaagtctgaatccgagagttccgcacatccttgggctgccggatcgcaactctttgtggtgagttccctccaaaccttgaacggttctcgtgttgccttcagtagcagcttggatatctttaaaaacgagtacttgtcgccttcgtctgagtcttacaacgctgccaatgctctctttgcccgcgatctgacgaactgggtgttccaacgcagtggtcgtctcgtcctcgagaacatgacttacggtttgatttccgaatcggtcgaggagcgtaatggtcctgtgtaccgtatcaaggatgaaatggaattcacggccgatatgtctgtatacgagaatggtgtccgtaagccttacattgcctccgatgttcagatggagcttgtcatgcttgatccctactatcgtttgaactttgagcctgttgaaagcgacttgaaggacgctcaacgttattccgtcaagctcgttgcacctgaccattatggtgttttcagctacaaagttcgttactctcgtcctggccttacgaacattgacgaaaagcaaacgttcacccttcgacaattccatcacaacgagtatcctcgtttcttgccccatgcatacccttactacacgtctgcctttattgtcttcgttggttttgttatgtttgctggtgcttggctgtttttcaagcctgccgcaccttctgtaaaaaagcaacagtag

SEQ ID NO: 7636 - protein, 435 aa, Schizosaccharomyces japonicus yFS275
MRSSLLNFLFFTFIAAVAAVNERVLAIFDHEHADYESLLDSLRERDFDVTVKDVKAPDSSLFEFGERKYDDLLLFSARNKGLGASFSPKALIEFVEDGGNILLAAGTNVPEGLREFGRQLGIFVAERGNALVDHFASVGSEDHQLVALDEFSSSKYIVSDETRNAGAVLYKGSGHALGENPLVEPVLRAKTTSYLYNQKSESESSAHPWAAGSQLFVVSSLQTLNGSRVAFSSSLDIFKNEYLSPSSESYNAANALFARDLTNWVFQRSGRLVLENMTYGLISESVEERNGPVYRIKDEMEFTADMSVYENGVRKPYIASDVQMELVMLDPYYRLNFEPVESDLKDAQRYSVKLVAPDHYGVFSYKVRYSRPGLTNIDEKQTFTLRQFHHNEYPRFLPHAYPYYTSAFIVFVGFVMFAGAWLFFKPAAPSVKKQQ

SEQ ID NO: 7637 - DNA, 1302 bp, Branchiostoma floridae
  CDS (1)..(1302)
atggcttcccgtgtgctgattgttctgttggcggctcttgtcggcgtccatgcaggcgggcggacactcgttctgctggacaacctggccatcaaggagtcccactccgttttctttaagtctctggcagaccgaggcttcgacctgaccttcaagactgctgacgactcaagccttgctctcatcaagtacggagagttcctcttcgaacacctcatcatcttcgctccatcagtggaagaatttggaggtaacttggacaccagtgctctgacagagttcatcgatggaggtggaaacatcctggtagccgcaagctctgagattggtgagccaatccgtgagctggccagtgagtgtggcgtggagtttgatgaggagaagacggcagtgatcgatcacctgaactatgacctggctgacgagggacagcacaccctgattgttgccgacccagaaaacctgattgacgttaagaacatcgtgggaaccaaacgggacacacccattctcttcaggggggtcggcatggtagcagacacagacaaccctcttgtgctggatgtcctgactggatcctccacttcctactccttctaccctgatgagaaagtgtctgagtacccacatgctgtagggaagaacacccttctggtggctgcactccaggctaggaacaacgcccgtgtggtgttcactggttctctggagctcttcagtgatgagttctttactgcctctgtacagaaggcactggccggggcacagaagcacgacaagtccggtaacgaggcattcgccctggcgctgtctcgctgggtgtttaaggaggagggtgtgctgcgtgggggggtggtcagccatcaccgcaagggggaacaagaaccccccacagcttacaccgtcatggaggaagtggtgtacagtattgtgattgagcagctggtgaacgggaagtgggtcccgtttgatgccaccgatgtccagctggagtttgtgcggatcgacccgttcgtgcgcaccaccatgcaacgcaaaggagggaagtttgtggctgagttcaagttacccgacgtgtacggagtgttccagtaccgtgtggactacaacaggctaggctacactcacctcttctctactactcaggtgtctgtgcgcccgttcacccacacccagtacgagcggttcatcgcggcagcctacccgtactacgccagtgccttctccatgatgttcggactcttcgtcttcagtctggtgtttttacaccaccgcgaagacaccaaggaaaaggcagaataa

SEQ ID NO: 7638 - protein, 433 aa, Branchiostoma floridae
MASRVLIVLLAALVGVHAGGRTLVLLDNLAIKESHSVFFKSLADRGFDLTFKTADDSSLALIKYGEFLFEHLIIFAPSVEEFGGNLDTSALTEFIDGGGNILVAASSEIGEPIRELASECGVEFDEEKTAVIDHLNYDLADEGQHTLIVADPENLIDVKNIVGTKRDTPILFRGVGMVADTDNPLVLDVLTGSSTSYSFYPDEKVSEYPHAVGKNTLLVAALQARNNARVVFTGSLELFSDEFFTASVQKALAGAQKHDKSGNEAFALALSRWVFKEEGVLRGGVVSHHRKGEQEPPTAYTVMEEVVYSIVIEQLVNGKWVPFDATDVQLEFVRIDPFVRTTMQRKGGKFVAEFKLPDVYGVFQYRVDYNRLGYTHLFSTTQVSVRPFTHTQYERFIAAAYPYYASAFSMMFGLFVFSLVFLHHREDTKEKAE

SEQ ID NO: 7639 - DNA, 1308 bp, Vitis vinifera
  CDS (1)..(1308)
atggcgaatcttcctatgttcctcaccctcatctcacttctaccatttctatgctactccttctctcccgaaaaccccacggatcgccgcattctagtcgtcctcgatgacatcggcctcaaatcttcccactccatcttcttcaaatctctccaaactcgcggttcagaactcgacttcaagcttgcagacgatccgaagatttctcttcaaagatacggccaatatttatatgatggattgattctattttccccgacaaccgagcggtttggagggtcattggacctgggtgctattctcgattttgttgattctggtcatgacttaattataactactgatgcatctgcatctggtttgatccggagtatcgcgacggagtgcggcgttgattttgatgaggatccgtcggctatggttattgatcacaccagctatgcagtgtcagacaccgaaggagaccatacattgattgctagtgatgatttcattcagtccgatgtcattctgggaagcaccacaattgaggcccctgtactttacaaagggattggacattcattaaattctgccaacagcctggttttgaaagttctttcagcttctccttcagcatattctgctgacccaaactccaagttgtcaagtcctccattgttgactggattggctatttcattagtttcagttgtgcaagctagaaacaatgctcggatcatgatctctggttctttagaaatgtttagtaatcgactgttccagtctagtgctcagaaagctgggagctcaaataggtatgagaaatcaggtaatgaacagtttgtgactgaacttagcaaatggattttccatgaaaggggtcatctaaaggctgcaaatgtcaggcaccacaaagttggggaaacagatgaacctgcaatgtacaggatcaatgatgaccttgaatactctgttgagatccatgaatggtctggtaagagctgggaaccatacgtatctaatgatgttcaaatacagttctacatgatgagcccctatgtattgaaaaccctgtcaagtgaccagaagggtaaatactttacatcattcaaagtgcccgatgtttatggggtcttccagtttaaggtcgagtatcagagacttggatacactagcttgtctctcttgaagcagattccagtccggcccttcaaacacaatgaatatgaaagattcataaaaacagcatttccctattatggagcttcattttctgctatggcagggttcttcatcttcaccattgtctacctgtactacaagtga

SEQ ID NO: 7640 - protein, 435 aa, Vitis vinifera
MANLPMFLTLISLLPFLCYSFSPENPTDRRILVVLDDIGLKSSHSIFFKSLQTRGSELDFKLADDPKISLQRYGQYLYDGLILFSPTTERFGGSLDLGAILDFVDSGHDLIITTDASASGLIRSIATECGVDFDEDPSAMVIDHTSYAVSDTEGDHTLIASDDFIQSDVILGSTTIEAPVLYKGIGHSLNSANSLVLKVLSASPSAYSADPNSKLSSPPLLTGLAISLVSVVQARNNARIMISGSLEMFSNRLFQSSAQKAGSSNRYEKSGNEQFVTELSKWIFHERGHLKAANVRHHKVGETDEPAMYRINDDLEYSVEIHEWSGKSWEPYVSNDVQIQFYMMSPYVLKTLSSDQKGKYFTSFKVPDVYGVFQFKVEYQRLGYTSLSLLKQIPVRPFKHNEYERFIKTAFPYYGASFSAMAGFFIFTIVYLYYK

SEQ ID NO: 7641 - DNA, 1308 bp, Vitis vinifera
  CDS (1)..(1308)
atgtctcgtttcgtcgtcttcctcacgttgatcgcacttcttccgacgctctcattttccttctctcccgagaatcccacggatcgacggatcctcgtcttgctggacgacatctctttgaaatcatctcactccctcttcttcaaatctctccaatctcgcggattcgagctcgagttcaagcttgctgacgatccgaagatcagtttgcagagatatggacagtatttgtacgacggattgattctgttttctccaacaatcgagcgatttgggggatctgttgacttggccgcaattctggattttgtcgattcgggtcatgatttgatcatgtcagctgatgtttccgcgtctgatttaattcgggagattgcaacggagtgtggtgttgaattcgatgaggatcctgcagccatggttattgatcacaccagttttgcagtctcagatactgaaggagaccatacattgatagtcagtgatgattttataaaatctgatgtgattttggggaaagagaagatcgaggcgcctgtactttttagggggattggtcattcaacaaatcctgccaatagcttggttttgaaagctctctcagcgtctcctgccgcctattcggccaacccaaagtctaagttgtcaaaccctccatctctcactggatctgcgatctctttagtttcagttgtgcaggcaagaaacaatgctcgagtcttgatctcaggttcattaagcatgtttagtaatagattgttcagatctggagtacaaaaggctggaagctcaaccaaacatgagaaatctggaaacgagcagtttttgactgagcttagcagatgggttttccatgaaagaggtcatctcaaggctgtaaatgttagccaccacaatgtcggggaagcagatgaaccttcaatgtacaggatcaaggatgacctggaatattcggttgagatatatgagtggtctggaacaagttgggaaccatatattgccgaagatgttcaagtgcaattttatatgatgagcccctatgttttgaaaaccttatcaaccaaccagaagggtctatattacacggcgttcaaggttcctgatgtttatggcgttttccagttcaaggttgagtaccagaggcttggatacacaagcttgtctctatcaaagcagattccagttcggcctttcagacacaatgaatatgaaagatttataacagctgcatttccctattatggctcatcatttactatgatggctggtttctttatcttctccatcgtctacctatacaacaagtag

SEQ ID NO: 7642 - protein, 435 aa, Vitis vinifera
MSRFVVFLTLIALLPTLSFSFSPENPTDRRILVLLDDISLKSSHSLFFKSLQSRGFELEFKLADDPKISLQRYGQYLYDGLILFSPTIERFGGSVDLAAILDFVDSGHDLIMSADVSASDLIREIATECGVEFDEDPAAMVIDHTSFAVSDTEGDHTLIVSDDFIKSDVILGKEKIEAPVLFRGIGHSTNPANSLVLKALSASPAAYSANPKSKLSNPPSLTGSAISLVSVVQARNNARVLISGSLSMFSNRLFRSGVQKAGSSTKHEKSGNEQFLTELSRWVFHERGHLKAVNVSHHNVGEADEPSMYRIKDDLEYSVEIYEWSGTSWEPYIAEDVQVQFYMMSPYVLKTLSTNQKGLYYTAFKVPDVYGVFQFKVEYQRLGYTSLSLSKQIPVRPFRHNEYERFITAAFPYYGSSFTMMAGFFIFSIVYLYNK

SEQ ID NO: 7643 - DNA, 1320 bp, Populus trichocarpa
  CDS (1)..(1320)
atggcgagaagcaatttctcggtattaacaattctatcagtcacactcctccttcccgttctctccctctctttctcccctgactcgccctcagatcgtcgcctcttagtcctcctcgacgacttgtcactcaaatcttccctctcaatcttcttcaattctctcaaatctcgcggttttgatctcgatttcaagcttgctgatgacccaaaactcgcccttcaacgttatggccagtacttgtatgatggcttgattctcttctctccttcaatcgaaagatttggtggtgcattggatttagctgctgtgcttgactttgttgactcgggtcatgatctgcttattgcggccgatagttctgcttctgatttgattaagagtgtagctactgaatgcggggttgattttgatgaggatccatcggctctggttattgatcataaaagttatgcagtcgctgggactgagggtgatcatacattgattgctgcagatgattttattgaatctgatgtgctgcttggaaaaaataagattgaggctcctgtgctctttaaagggattgcacattctttaaatgcagcaaataccctggtattgaaggtcctttctgcatctccttctgcttattcagctaatccaagttccaaattgtcaagtcctccatcattaaccggatcttccatctcattagtttcagtaattcaggctagaaacaatgctcggattatgattacaggctcattagatatgtttagtaaccgatttttcagatcaagcgtacagaaagctgggagcccaaaaaaatatgataaatctggtaatgagcaatttgtgactgaacttagcaaatgggtcttccatgaaagaggtcatctgaaggctgtgaatcttagacacaataaagctggggaaacagacgagcctgcaatgtacaggatcaaggatgatctggatttttctgttgagatatatgaatggtctggaaagagctgggagccatatgtggccgatgatgttcaggtccagttctatatgatgagcccctatgtgttgaaaaccctatcaaatgacaagaagggcttgtatcatacatcattcaaggtgcctgatgtttatggggttttccagtttaaggttgagtataacaggcttggatatactagcctgttgctctccaaacagattccagttcggcccttcagacacaatgaatatgagagatttataacagctgcttttccctactatggagcttcttttacaatgatggctggcttctttgtcttcagctttgtttacctgtaccacaagtga

SEQ ID NO: 7644 - protein, 439 aa, Populus trichocarpa
MARSNFSVLTILSVTLLLPVLSLSFSPDSPSDRRLLVLLDDLSLKSSLSIFFNSLKSRGFDLDFKLADDPKLALQRYGQYLYDGLILFSPSIERFGGALDLAAVLDFVDSGHDLLIAADSSASDLIKSVATECGVDFDEDPSALVIDHKSYAVAGTEGDHTLIAADDFIESDVLLGKNKIEAPVLFKGIAHSLNAANTLVLKVLSASPSAYSANPSSKLSSPPSLTGSSISLVSVIQARNNARIMITGSLDMFSNRFFRSSVQKAGSPKKYDKSGNEQFVTELSKWVFHERGHLKAVNLRHNKAGETDEPAMYRIKDDLDFSVEIYEWSGKSWEPYVADDVQVQFYMMSPYVLKTLSNDKKGLYHTSFKVPDVYGVFQFKVEYNRLGYTSLLLSKQIPVRPFRHNEYERFITAAFPYYGASFTMMAGFFVFSFVYLYHK

SEQ ID NO: 7645 - DNA, 1377 bp, Anopheles gambiae str. PEST
  CDS (1)..(1377)
atgtcgaaccggtcggtgctaggatttacgggaattttgctgctcgcgctgcttgcccacaccccggcggcggtcgtggcggagccgggcgaaacgctggtgctgctggacaatctagccatccgcgagacgcactccatcttcttcaaatcgctgcaggagcgcggctacaagctcaccttcaagctagccgatgacgccgggctcgtgctcagcaagtatggcgaatttctgtaccagcacctcatcctgttcgccccgtcggtggaggagttcggcggttcgctgagcgtggaagccatcaccgagttcatcgacaacggaggcaatgtgctggtggccggtagcaccgcctcgggcgacccgctccgtgagcttgcgtccgagtgcgggttcgaggtggacgaggagaaggcggcagtgatcgaccatctgaactatgacgtgtccgatgcgggcgaccacacgaccatcgttgcctcgcccgacaatctgatcgatgcgagcatcatcgtgggcgatcgggcgggcgtcgcgccgctcctgtaccgcggcaccggcctgctggccgatcgggagaatccgctcgtgctgcagctgctgacggcggacagttcggcgtacagctacgtgccggacgccccgatcaaggagtacccgcatgcggtcggcaagggcacactgctgattgccgccctgcaggcacgcaacaacgcgcgggttgtgttttccggctcgctgtacttcttctctgacgaagcattcctggcaccggtccagcgtgcccaggccggtggcaagcactttgcccgctcgggcaaccaggacgtcgcgatggccatcagcaagtgggtgtttggcgagaacggagtgatccgagcgcggtcggtgagccacagcaaggagggcgagtcgcagccgccgtcctcgtacaccgtgaccgatccggtcgtgtacacgatcgagattgaaacgcgcggaagcgacggcaagtggaaagcgttcgaggcgtccgacgtgcagctggagtttgtgcgcatcgatccgttcgtgcgcacgacgctggtcccggttggcggtgggcgttacgaggcccggttcctcatcccggacgtgtacggggtgtaccagttcaaggtgaactacgaccggatcggctacacgcacctgtactcgacgacgcaggtgtcggtccggccgctcacccacacccagtacgagcggttcatcccgagcgcctatccgtactatgccagcgccttctcgatggtggtcggcatgttcctgttctcgttcctgttcctgcacttcaaggacgatggtagcaaaccggcccgcaccaccaccgccgccgccagcgagaagaaggctcagtag

SEQ ID NO: 7646 - protein, 458 aa, Anopheles gambiae str. PEST
MSNRSVLGFTGILLLALLAHTPAAVVAEPGETLVLLDNLAIRETHSIFFKSLQERGYKLTFKLADDAGLVLSKYGEFLYQHLILFAPSVEEFGGSLSVEAITEFIDNGGNVLVAGSTASGDPLRELASECGFEVDEEKAAVIDHLNYDVSDAGDHTTIVASPDNLIDASIIVGDRAGVAPLLYRGTGLLADRENPLVLQLLTADSSAYSYVPDAPIKEYPHAVGKGTLLIAALQARNNARVVFSGSLYFFSDEAFLAPVQRAQAGGKHFARSGNQDVAMAISKWVFGENGVIRARSVSHSKEGESQPPSSYTVTDPVVYTIEIETRGSDGKWKAFEASDVQLEFVRIDPFVRTTLVPVGGGRYEARFLIPDVYGVYQFKVNYDRIGYTHLYSTTQVSVRPLTHTQYERFIPSAYPYYASAFSMVVGMFLFSFLFLHFKDDGSKPARTTTAAASEKKAQ

SEQ ID NO: 7647 - DNA, 1401 bp, Magnaporthe grisea 70-15
  CDS (1)..(1401)
atgtttaagccaatcctctcactgctcttcctgctgctggccgccactgtgagcgccgtgagctccagcggcaacaggctacttgcggtattggaagatgtcgcagaaaaggaaaagtactccaagttcatgggagatctgcagagcagaggcttcagcataacatacagcacacccaaaagtgattctctcaagctttcccacttgggagagcgggtttttgaccatgtcattatattcccgaccaagtcaaagggtcttggccccaacttgactcccgctcttctcctccagttcgtcaaggatgagggcaacgttatgttggctctttctgccgaaaccgccgtgcccatctcgatcgtttcgcttctccacgagctcgatatccagctccctgccgatcgcaccggtcttgtggtcgaccatttccactatgacaagatctctgccgctgagaagcacgatgtcatccttgtcaaacccaggccggttcgtgacttccacaaggacatctttggcagcgagaagcagaccagccagctgcttgcggttccgcgagccattggccagacccttggccagagccccctcctgaaccctgtccttcgcgcccctctcaccgcctacagctacgatcctaaggagcaatcggaggtcgttgatgacctttttgctgccggcgagcagttgagcctcgtcagcgctgtgcagccgcgtaactcggctcgcgttacagtcgttggctctgccgagatgctgcaggaccagtggtttgatgccgaagtcaagccgtccagctcaaacaaaaaggtctcgacctacaaccgcgagtttgccaagaagttgagcggctggaccttccaggagtacggtgtcctgcgcgtcaactctgtggagcaccacctgaacgaagcgggcgcaagcaacgtttcgaacccggctatctaccgggtcaagaacgatgtgacctacaccatctctctgtcagagtacaagcccgaaactcagtcctggggaccatttaccgttccggatggcgatgagattcagctggagttttccatgctgtcgcccttccaccgcttgggcctcaaacctacgacctccaccgaaagtgatgctaccaagtacagcgtgtcttttacgctgcccgaccagcacggcatcttcaacttccgtgtcaactacaagaggccattcctcacctacatcgacagcaaggaccaggtctcggtccgccacatggcccacgacgagtggccacgctcgtttgtcatctcaggcgcatggccctggatcactggtatcggcgccaccatcactggatttttggccttttgcctggttttcatgttcagcgcacccactggaaaagccaccgttaccaaaaagactcaataa

SEQ ID NO: 7648 - protein, 466 aa, Magnaporthe grisea 70-15
MFKPILSLLFLLLAATVSAVSSSGNRLLAVLEDVAEKEKYSKFMGDLQSRGFSITYSTPKSDSLKLSHLGERVFDHVIIFPTKSKGLGPNLTPALLLQFVKDEGNVMLALSAETAVPISIVSLLHELDIQLPADRTGLVVDHFHYDKISAAEKHDVILVKPRPVRDFHKDIFGSEKQTSQLLAVPRAIGQTLGQSPLLNPVLRAPLTAYSYDPKEQSEVVDDLFAAGEQLSLVSAVQPRNSARVTVVGSAEMLQDQWFDAEVKPSSSNKKVSTYNREFAKKLSGWTFQEYGVLRVNSVEHHLNEAGASNVSNPAIYRVKNDVTYTISLSEYKPETQSWGPFTVPDGDEIQLEFSMLSPFHRLGLKPTTSTESDATKYSVSFTLPDQHGIFNFRVNYKRPFLTYIDSKDQVSVRHMAHDEWPRSFVISGAWPWITGIGATITGFLAFCLVFMFSAPTGKATVTKKTQ

SEQ ID NO: 7649 - DNA, 1272 bp, Apis mellifera
  CDS (1)..(1272)
atgatatttggaatagcgaatgctggaggaccgacactcgttttattagataatttagctataagagaaacacattccatattttttaagacactgcaagataatggatatatattaacttttaaattagcagatgatgctaatctgcagctttctaaatatggagaatatttatatcaacatttaataatatttgctccttctgtagaagaatttggaggagcattaagtgttgaaacaataacagatttcattgatggtggtggtaatgtcttagttgctggttcatctcaatcaggagatgctttacatgaattagcatcagaatgtggttttgaaattgatgaagaaggttctgcagtcattgatcatttaaactatgatgtttctgataatggttatcatacaaaaatagtagcagaccctgctaatttgatagatgctcctgcaattgttggaaataaaaacataaattctttactttaccaaggaactggattgattgcagatacagaaaatcctttaattttacgtttattaacagcatctagttcagcatattcatataatccacagaattctataaaagagtatcctcatgcagtaggcaaaaatacattgttaattacagctttgcaagccagaaataatgccagagtagtattttctggttctttgtatttttttagtgatgaagcttttactagtcctattcagaaagctcaaggtggtcaaaagtatttgaaatctggaaatgaagctgtagcaacaatgattgctcgctgggtgttcaaggaaaatggtgtgatacgtgtttcttctgctcatcaccatagagtaggagaatctgaacctccagcagcttatacaattatggatgatgtagtttattctattgacgttcagaaattagcaggagataaatggattccttatgaaaccaatgatctacaattagaatttgttagaatagatccttttgttcgtatgactatgaaacctgtaggtaatggccgatatgaagcaagatttaaaattcctgatgtctatggtgtttatcagttcaaagtagattatactcgtattggtttaacgcatttatatagtaccactcaagtatctgtccgtcctctacaacacactcaatatgaacgttttatacctagtgcatttccttattacataagtgctttttcgatgatgggtggagtatttttattctctttggcattcttatattataaagaagatacaaaaccaaagtttgaataa

SEQ ID NO: 7650 - protein, 423 aa, Apis mellifera
MIFGIANAGGPTLVLLDNLAIRETHSIFFKTLQDNGYILTFKLADDANLQLSKYGEYLYQHLIIFAPSVEEFGGALSVETITDFIDGGGNVLVAGSSQSGDALHELASECGFEIDEEGSAVIDHLNYDVSDNGYHTKIVADPANLIDAPAIVGNKNINSLLYQGTGLIADTENPLILRLLTASSSAYSYNPQNSIKEYPHAVGKNTLLITALQARNNARVVFSGSLYFFSDEAFTSPIQKAQGGQKYLKSGNEAVATMIARWVFKENGVIRVSSAHHHRVGESEPPAAYTIMDDVVYSIDVQKLAGDKWIPYETNDLQLEFVRIDPFVRMTMKPVGNGRYEARFKIPDVYGVYQFKVDYTRIGLTHLYSTTQVSVRPLQHTQYERFIPSAFPYYISAFSMMGGVFLFSLAFLYYKEDTKPKFE

SEQ ID NO: 7651 - DNA, 1383 bp, Aspergillus nidulans FGSC A4
  CDS (1)..(1383)
atgcggtggtgttcgtctctcttgctgttcggcttcttggccgctgtcaatgcattgagcagttcggggagtcgattgcttgtggttttggaggatgccacagagaaggggctatattcaacgctatggggggatctggaaggtcgcgggtataacctcatcttcgaatcgcctaagaatgaacagctttcattgttcgagcttggagagagagcttacgaccacgtcctccttcttcctcccaaatcgaaaggttttggaccctccttaagccctaagaacctcgtcgacttcctcaatagcgaaggcaacatcctccttgcactttccggaaagtccactacgcccagcgccgttagctctcttctcttggagtttgacctccacctatctaccgatcgttcttccatcaccgtcgatcacttcaactatgataccctctctgcttcagaaaagcacgatgtccttcttctcgagcgccccggcaagctcagatatgacaccaaggagttcttctccggcgagggtgttgttgccgttccaagcgccagtcctcacacccttggtgacaactcgcttctcgcacctattctgcgcgcgcccgccacggcttacagctacaacccaaaggaggacaccggctcggttgaagacgtctttgcgactggctcgcagctggccctagtgtcagccatgcaggccagaaattctgcccgctttactgtgcttggttccgtggagactctgcaggacaaatggttctctgctaccgttaaagcacccggtggtgaagaggtccaaactgtcaaccgggaattcgccaagcaattgaccgcgtggacatttaaggagaccggtgttctcaaggtcggaaagattgagcatcacctggcgaaggatgacctcacagccgaagatctgaatcctagcatctaccgaatcaagaacgagaccgtcttctccatcgaaatttccgaatataactacgatggctatgtacccttcgaggttcccgtcaacgacaacatccagctcgaattcaccatgctatccccattccaccgtcttaacctacaacagtctgcaacaacaccaaatagcaccatcttcagcacccggttcactgttcctgaccagcatggcatcttctccttccgcgtcaactataaacggcccttccttaccaacatcgaggagaagcacgaggtcacggtccgccactttgcgcacaacgagtatccgcgcagctggaagatcaccggcggctgggtctggatcgctggcctttggtctgttatcgtgggattcctggcctttgtagttgtttggctttattcggagcccgcgacggcggagaaggcaaagactaagaaaacgcagtaa

SEQ ID NO: 7652 - protein, 460 aa, Aspergillus nidulans FGSC A4
MRWCSSLLLFGFLAAVNALSSSGSRLLVVLEDATEKGLYSTLWGDLEGRGYNLIFESPKNEQLSLFELGERAYDHVLLLPPKSKGFGPSLSPKNLVDFLNSEGNILLALSGKSTTPSAVSSLLLEFDLHLSTDRSSITVDHFNYDTLSASEKHDVLLLERPGKLRYDTKEFFSGEGVVAVPSASPHTLGDNSLLAPILRAPATAYSYNPKEDTGSVEDVFATGSQLALVSAMQARNSARFTVLGSVETLQDKWFSATVKAPGGEEVQTVNREFAKQLTAWTFKETGVLKVGKIEHHLAKDDLTAEDLNPSIYRIKNETVFSIEISEYNYDGYVPFEVPVNDNIQLEFTMLSPFHRLNLQQSATTPNSTIFSTRFTVPDQHGIFSFRVNYKRPFLTNIEEKHEVTVRHFAHNEYPRSWKITGGWVWIAGLWSVIVGFLAFVVVWLYSEPATAEKAKTKKTQ

SEQ ID NO: 7653 - DNA, 1389 bp, Aspergillus fumigatus Af293
  CDS (1)..(1389)
atgcggtggtgcctcactcttctggcattctgcttcttggcagttgtacgtgcattaagtagctccggcagtcgtctgttggttgttttggaagatgccacagaaaaggaattatactcgaaattatgggctgacctagaagctcgaggatataacctcgacttcgaatcccccaagaatgacaagctcagcctgttcgaactcggagaccgagtctacgaccacatgcttctcctgcctcccaagtcaaagggctatggaccctcccttacccccaagaatatcattgatttcatgaacaaggacggtaacgtcctcctcgccttgtcgggcaagtccacaaccgccagcgctatcagctcgctgctattggagctcgatctccatctccctgtcgatcgttcctctgtcaccgtcgatcacttcaactacgatacactttctgcctccgataagcatgatgttctgctactccaccgaccaggcaagttgaggtccgataccaaggctttctttgatggcgagggcgttgtagcatttcccagagccgtcccccacaccctgggcgatgcaaaccctctcattgcgcctattctgcgagcgcccgccactgcgtatagttacaaccccaaggaggacgcgtcgtcagttgaggatgttgcagctacgggttcgcagttggctctggtctcggccatgcaggctagaaactccgctcggttcactctactgggatccgtggagagtctgcaggatcagtggttttctgcgactgtcaaggctcctggtgatgggaagcagatgaagacggtcaaccaggaattcgccaagcagcttactgcgtggacattcaaggaaaccggagtcctcaaggtcggaaagatcgagcatcatctggctgaagatggtgaaatcactcccgagaagctgaaccctaagatctatcgaataaagaatgaaactgtctttagcattgaactttccgaatacaactatgatcgttacgcgcccttcgaggttccaactggcgatgccgtccagctcgagtttaccatgctgtctcccttccatcgcctgaacttggaacccgtccgtcgaacagataacagtacagtttacagcacacgattcaccacccccgatcagcatggaatcttctccttccgagtgaactacaagcgcccgttcctcacgaacatcgaagaaaaacttgaggtgaccgttcgtcatttcgctcataacgagtacccccgaagctggaaaatcagcggtggatgggtctggattgcgggtctgtggtccgtcatcgctggcttcttagtattcgttgttgcatggctttactcagcgccttctgccgccgcactgaacacaaagaagacacaataa

SEQ ID NO: 7654 - protein, 462 aa, Aspergillus fumigatus Af293
MRWCLTLLAFCFLAVVRALSSSGSRLLVVLEDATEKELYSKLWADLEARGYNLDFESPKNDKLSLFELGDRVYDHMLLLPPKSKGYGPSLTPKNIIDFMNKDGNVLLALSGKSTTASAISSLLLELDLHLPVDRSSVTVDHFNYDTLSASDKHDVLLLHRPGKLRSDTKAFFDGEGVVAFPRAVPHTLGDANPLIAPILRAPATAYSYNPKEDASSVEDVAATGSQLALVSAMQARNSARFTLLGSVESLQDQWFSATVKAPGDGKQMKTVNQEFAKQLTAWTFKETGVLKVGKIEHHLAEDGEITPEKLNPKIYRIKNETVFSIELSEYNYDRYAPFEVPTGDAVQLEFTMLSPFHRLNLEPVRRTDNSTVYSTRFTTPDQHGIFSFRVNYKRPFLTNIEEKLEVTVRHFAHNEYPRSWKISGGWVWIAGLWSVIAGFLVFVVAWLYSAPSAAALNTKKTQ

SEQ ID NO: 7655 - DNA, 1401 bp, Neurospora crassa OR74A
  CDS (1)..(1401)
atgaggacgctattatccttcttgctgcttgcgctggcgagcgcagtggctgccatcagcacatctggcaacaggttgctggttgtcctggacgatgtcgcagacaaggccaactactccaagttcttcgctgatctagaagaacgagaattcaagataacgtacgaaacaccaaagagcgactccctaaccctcttcagcctgggcgagcgcacctacgaccacgtcctcttcctgcccgtccgcaccaagggtctcggccccaatctgacgcccaagaccctccacgacttcgtcaacgccaagggcaacatcctgctcgccctcagcgccaacaccaccacgcccacctcgctcatcgccctcctctccgagctcgacattaccctccctaccgaccgtaacagcctggttgttgaccacttcaactacgacatcacgagcgccactgacaaacacgatgttctgctcctgccgcctcccaagcccacccgtgctggcatcaaggacttcttcagcgagggcgcaggcaccaagctgatcgccttcccgcgcggcgtcggtgccgtcctcggcaatggccagcttctcaaccccatcctgcgcgccccgcgcaccgcctacagctacaaccccaaggagcaagtcgaggcggttaacggggacgacctcttcgcggctggccagcagctctcgctggtgtccaccatgcaggcgcgcaacaacgcgcgcgtgacggtggtcggctcggccgagatgttgcaggacaagtggtttgatgccagcgtgacgaagctggacggccagccggtcgttcagacgttcaacagggaattcgccaaacgcgtcagcggctggacgttccaggagattggcgtgttgaaggtcaactgggtggagcaccatttggaggaggaaggggcgccgaatgattctaaccccgagatgtaccgggtgaagaacaatgtgtcctacacaatctccctctccgaattcgcctgggaccactggatcggcttcaacgttcccgaacacgacgagatccagctcgagttctccatgctctcgcccttccaccgactcaatctcaaggaggaatcgcaccgcctggctgctgtgcactaccacaccgtctttactaccccggaccagcacggcatcttcaactttatggtcaactacaagcgtcccttcctgtcccacattgaagagaagaacacggtgccggtccgccacatggcccacaacgagtggccgcgcagctacgtcatcagcggcgcgtggccgtggattgccggtcttggttctacggtcgtgggctttttgggctttgtggcgctttggatgtacagtgcccctgttgatgcggggaagaaggtgactgtgaagaagacacagtaa

SEQ ID NO: 7656 - protein, 466 aa, Neurospora crassa OR74A
MRTLLSFLLLALASAVAAISTSGNRLLVVLDDVADKANYSKFFADLEEREFKITYETPKSDSLTLFSLGERTYDHVLFLPVRTKGLGPNLTPKTLHDFVNAKGNILLALSANTTTPTSLIALLSELDITLPTDRNSLVVDHFNYDITSATDKHDVLLLPPPKPTRAGIKDFFSEGAGTKLIAFPRGVGAVLGNGQLLNPILRAPRTAYSYNPKEQVEAVNGDDLFAAGQQLSLVSTMQARNNARVTVVGSAEMLQDKWFDASVTKLDGQPVVQTFNREFAKRVSGWTFQEIGVLKVNWVEHHLEEEGAPNDSNPEMYRVKNNVSYTISLSEFAWDHWIGFNVPEHDEIQLEFSMLSPFHRLNLKEESHRLAAVHYHTVFTTPDQHGIFNFMVNYKRPFLSHIEEKNTVPVRHMAHNEWPRSYVISGAWPWIAGLGSTVVGFLGFVALWMYSAPVDAGKKVTVKKTQ

SEQ ID NO: 7657 - DNA, 1305 bp, Tribolium castaneum
  CDS (1)..(1305)
atgaaattttcgattttcctccttttcgtcgcattttcttgcgtaaaatcgcaaggaaacactttagtcctgctggacaaccaagtgattcgcgagactcattcaatttttttcaaatcattgcaggaaaggggctataatttaagcttcaaaatcgccgacgatgcttctctggtactatcaaaatacggggagtacctttacgaaaatttgattatttttgcgccggctgttgaagagtttgggggcaccctcaacgttgagaccatcacccagtttattgatgatggtggtaacgttttagtagctgggaatagtggcactggggatgttctacgcgaattagcttccgaatgtggatttgaggtggatgaagaaggggcctatgttattgaccatttgaactacgacgtgaatgatgaggggcaacatacgcgcctggcgatttcgcctgagaatcttattgattccccgatcattgttgggtctaaaaaagacgccaaacctttgatttatcaaggcactgggattttggccgaccctgataacccccttgtcctgccattgttgacagctgatagcacggcttatagctacgtacccgaccaaccaattaaagagtacccccacgccgttggaaaagacaccgttttgatcgccggcctccaagcacgtaacaacgcccgagtggtgttcagcggttctctttcgttcttttcagacgagtttttcacatcaccggttgcaaaatctagaggcggccttaaatcagacacttcagggaacagggacgtggcaattgcaatcagccaatgggtctttaaggaacatggtcagttgcgcgtgcgctctgtcaaacacagcaaagtcggcgaagccaagccaccaaccgcttacaccatcatggacgacgttgtgtataaaatcgaaattgacattaaagaagacggccaatggaaacaattcaacgccgacgacatccaattagaattcgtccgaatcgatcccttcgtgcgcataaacttgcagaaaaagggcaaagaatacgaggcccggttcaaaataccggacgtttacggcgtttaccaattcaaagtcgactatgaccgagtcggctacacccgaatttacaacacaacgcaagtttccgtacgccctctccagcacactcagtatgagagattcattgcttgtgcttatccctactatgccggcgcattctcgatgatggccggtgtgttcttgttttctattgttttcctacatatgaaggatgatgatgttaagaaatccaaaggtgattag

SEQ ID NO: 7658 - protein, 434 aa, Tribolium castaneum
MKFSIFLLFVAFSCVKSQGNTLVLLDNQVIRETHSIFFKSLQERGYNLSFKIADDASLVLSKYGEYLYENLIIFAPAVEEFGGTLNVETITQFIDDGGNVLVAGNSGTGDVLRELASECGFEVDEEGAYVIDHLNYDVNDEGQHTRLAISPENLIDSPIIVGSKKDAKPLIYQGTGILADPDNPLVLPLLTADSTAYSYVPDQPIKEYPHAVGKDTVLIAGLQARNNARVVFSGSLSFFSDEFFTSPVAKSRGGLKSDTSGNRDVAIAISQWVFKEHGQLRVRSVKHSKVGEAKPPTAYTIMDDVVYKIEIDIKEDGQWKQFNADDIQLEFVRIDPFVRINLQKKGKEYEARFKIPDVYGVYQFKVDYDRVGYTRIYNTTQVSVRPLQHTQYERFIACAYPYYAGAFSMMAGVFLFSIVFLHMKDDDVKKSKGD

SEQ ID NO: 7659 - DNA, 1296 bp, Vitis vinifera
  CDS (1)..(1296)
atgtctcgtttcgtcgtcttcctcacgttgatcgcacttcttccgacgctctcattttccttctctcccgagaatcccacggatcgacggatcctcgtcttgctggacgacatctctttgaaatcatctcactccctcttcttcaaatctctccaatctcgcggattcgagctcgagttcaagcttgctgacgatccgaagatcagtttgcagagatatggacagtatttgtacgacggattgattctgttttctccaacaatcgagcgatttgggggatctgttgacttggccgcaattctggattttgtcgattcgggtcatgatttgatcatgtcagctgatgtttccgcgtctgatttaattcgggagattgcaacggagtgtggtgttgaattcgatgaggatcctgcagccatggttattgatcacaccagttttgcagtctcagatactgaaggagaccatacattgatagtcagtgatgattttataaaatctgatagaagatcgaggcaagcgcctgtactttttagggggattggtcattcaacaaatcctgccaatagcttggttttgaaagctctctcagcgtctcctgccgcctattcggccaacccaaagtctaagttgtcaaaccctccatctctcactggatctgcgatctctttagtttcagttgtgcaggcaagaaacaatgctcgagtcttgatctcaggttcattaagcatgtttagtaatagattgttcagatctggagtacaaaaggctggaagctcaaccaaacatgagaaatctggaaacgagcagtttttgactgagcttagcagatgggttttccatgaaagaggtcatctcaaggctgtaaatgttagccaccacaatgtcggggaagcagatgaaccttcaatgtacaggatcaaggatgacctggaatattcggttgagatatatgagtggtctggaacaagttgggaaccatatattgccgaagatgttcaagtgcaattttatatgatgagcccctatgttttgaaaaccttatcaaccaaccagaagggtctatattacacggcgttcaaggttcctgatgtttatggcgttttccagttcaaggttgagtaccagaggcttggatacacaagcttgtctctatcaaagcagattccagttcggcctttcagacacaatgaatatgaaagatttataacagctgcatttccctattatggctcatcatttactatgatggctggtttctttatcttctccatcgtctacctatacaacaagtag

SEQ ID NO: 7660 - protein, 431 aa, Vitis vinifera
MSRFVVFLTLIALLPTLSFSFSPENPTDRRILVLLDDISLKSSHSLFFKSLQSRGFELEFKLADDPKISLQRYGQYLYDGLILFSPTIERFGGSVDLAAILDFVDSGHDLIMSADVSASDLIREIATECGVEFDEDPAAMVIDHTSFAVSDTEGDHTLIVSDDFIKSDRRSRQAPVLFRGIGHSTNPANSLVLKALSASPAAYSANPKSKLSNPPSLTGSAISLVSVVQARNNARVLISGSLSMFSNRLFRSGVQKAGSSTKHEKSGNEQFLTELSRWVFHERGHLKAVNVSHHNVGEADEPSMYRIKDDLEYSVEIYEWSGTSWEPYIAEDVQVQFYMMSPYVLKTLSTNQKGLYYTAFKVPDVYGVFQFKVEYQRLGYTSLSLSKQIPVRPFRHNEYERFITAAFPYYGSSFTMMAGFFIFSIVYLYNK

SEQ ID NO: 7661 - DNA, 1529 bp, Picea sitchensis
  CDS (41)..(1354)
gagacggagaaaccctctgaaaaccctgttttctgtaacaatggctgcgaccattcggctgtttacattatcagtattatttctgttccccattttttcacttgggttttctccggagagtccaacggatcggcacattctcgtgctcgtggacgacctagccatcaagtcatctcattcaattttcttcaaaacactcacagatcgcggtttcgatctcgatttcaaactcgcacatgatcccaagctcgcactgcagagatacggccagtacttgtatgatggcctcattctctttgccccctctgttgaccatctggggggatcattggatttgtctgcaattttggactttgttgattccggccatgatttgattcttgctgctgatacgaccacctctgatctcattcgtgatatcgctgctgactgcggggttgattttgatgaagacctgggtgctttggttattgatcacaccagctatgctgtttcgaaaactgacagtgatcatactttgattgtgagcgacgatgcaatcaattccaaagttattttgggcgggaaaaagcttgaggctcccgtgcttttccgagggattgctcattctttaaatcctgcaaacagcctggtgctaaaagtgctatctgcttcaccttctgcgtattctgcaaatcctaaagctgatctctctagtcctccagcactgataggatcttctatttctttggtgtcagttgtgcaggcaagaaataatgcccgggttcttatttctggctcccttgatttatttagtaacaagtttttcaaatccccagttaaaaggtttggcagttcagttgagcatgcaaaaagtggcaatgagcagtttgtgtctgaattaagcaagtgggttttccatgaaaggggtcatcttaaggctgtaaatgttcagcatcataaagttggtgagacttttgaacctgctatgtatcgaatcactgataacctggaatactctgttgaaatttatgaatggactggaaaggattggaagccttacattgcagatgacgtacaagtgcagttttatatgatgagtccttatgttctgaagacattgtcacatgacaataaaggattatattctgtttctttccaagttcctgatgtttacggtgttttccaatttaaaattgagtatcaaagggttggttatacaagtctctctctgagcaagcagattcctgtaaggcctttcaggcacaatgaatatgaaaggttcataaaagctgcatatccatattatggaggcacattttccatgatgacaggtttctttatttttggtttgttcttcttatatcataaatgaagaaagttttagaaagagctctgtactagaatgccagtgactggtaaaagaagcatagagagttattgtggggatgttgagaaatattataattctgaatgttggactataggctaaactggccattgcttttatatgtatcatttagattttcaccccaaaaaaaaaaaaaaaa

SEQ ID NO: 7662 - protein, 437 aa, Picea sitchensis
MAATIRLFTLSVLFLFPIFSLGFSPESPTDRHILVLVDDLAIKSSHSIFFKTLTDRGFDLDFKLAHDPKLALQRYGQYLYDGLILFAPSVDHLGGSLDLSAILDFVDSGHDLILAADTTTSDLIRDIAADCGVDFDEDLGALVIDHTSYAVSKTDSDHTLIVSDDAINSKVILGGKKLEAPVLFRGIAHSLNPANSLVLKVLSASPSAYSANPKADLSSPPALIGSSISLVSVVQARNNARVLISGSLDLFSNKFFKSPVKRFGSSVEHAKSGNEQFVSELSKWVFHERGHLKAVNVQHHKVGETFEPAMYRITDNLEYSVEIYEWTGKDWKPYIADDVQVQFYMMSPYVLKTLSHDNKGLYSVSFQVPDVYGVFQFKIEYQRVGYTSLSLSKQIPVRPFRHNEYERFIKAAYPYYGGTFSMMTGFFIFGLFFLYHK

SEQ ID NO: 7663 - DNA, 1779 bp, Populus trichocarpa
  CDS (71)..(1387)
cacgcttggtaaaccctcagcctctctctctctctctctctctctcacttaggcagccaagactgcaaaaatgggaagaaacaatttctcgatcttaacagttctatcggtaacactccttcccattctctccctctctttctccacagattccccaacagattgtcgcctcttagtcctcctcgacgacttgtcactcaaatcttcccactcaatcttcttcaattctcttaaatctcgtggtttcgatcttgatttcaagcttgctgatgacccaaaactcgccgttcaacgttatggccagtacttatatgatggcttaattctcttctctccttcaatcgaaagatttggcggtgcattggatttagctgctgttcttgactttgttgactcgggtcatgatttgattattgcggcggatagttcctcttctgatttgattaagagtctagctactgaatgtggggttgatttcgatgaggatccatctgccttggttattgaccataaaagttatgctatctctgagactgagggtgatcatacattgattgctgccgatgattatatcgaatctgatgtgctgcttggaaaaaagaaaattgaggctcctgtgctctttaaagggattgcacattctttaaatgcagcgaataccctggtattgaaagtcctttctgcatctcctttggcttattcagctaatccaagctccaaattgtcaagtcctccatcagtaactggatcttccatctcgttagtttcagtagtgcaggctagaaacaatgctcggattatgattacaggttcattagatatgtttagtaaccgatttttcagatcaagcgtacagaaagctgggagtccaagaaaatgtgataaatctggtaacgagcagtttgtgactgaacttagcaaatgggtcttccatgtaagaggtcatctgaaggctgtgaatcttagacacaacaaagctggggaaacagatgagccagcaatgtataggatcaaagatgatctggatttttctgttgagatatatgaatggtctggaaagagctgggaaccatatgtggccaatgatgtccaggtccagctttacatgatgagcccttatgtgttgaaaaccctatcaaatgacaagaagggcttgtatcatacatcattcaaggttcctgatgtttatggggttttccagtttaaggttgagtatcacaggcttggatatactagcctgtctctctccaaacagattccagttcggcccttcagacacaatgaatatgagagattcattacagctgctttcccctattatggggcttcttttactatgatggccgggttctttatcttcagctttgtctacctataccacaagtgaggccctattgtaatagagaggattgcactgctatgaagatggttctttctgatatacactgagaatatatcgagggccttgtaacagttttccccctcagtttcattatttaggaagaatttattgtagtaaaattatccggcattagtatggctcttctgaggtggtgccaaagcttgaaccttggtcaggtagttggagctttcctacaacaaaccgcaaggccagagagcattggtatcgaaatgtctctctcgttctccgtgaagaaaactgttgacgagcaccagagccagaaaattataggcccgacacagttttactacataaacaaacatctagattctggtctaataaatttgccagtgatagtatcaaaaaaaaaaaaaaaa

SEQ ID NO: 7664 - protein, 438 aa, Populus trichocarpa
MGRNNFSILTVLSVTLLPILSLSFSTDSPTDCRLLVLLDDLSLKSSHSIFFNSLKSRGFDLDFKLADDPKLAVQRYGQYLYDGLILFSPSIERFGGALDLAAVLDFVDSGHDLIIAADSSSSDLIKSLATECGVDFDEDPSALVIDHKSYAISETEGDHTLIAADDYIESDVLLGKKKIEAPVLFKGIAHSLNAANTLVLKVLSASPLAYSANPSSKLSSPPSVTGSSISLVSVVQARNNARIMITGSLDMFSNRFFRSSVQKAGSPRKCDKSGNEQFVTELSKWVFHVRGHLKAVNLRHNKAGETDEPAMYRIKDDLDFSVEIYEWSGKSWEPYVANDVQVQLYMMSPYVLKTLSNDKKGLYHTSFKVPDVYGVFQFKVEYHRLGYTSLSLSKQIPVRPFRHNEYERFITAAFPYYGASFTMMAGFFIFSFVYLYHK

SEQ ID NO: 7665 - DNA, 1362 bp, Penicillium chrysogenum (strain ATCC 28089 / DSM 1075 / Wisconsin 54-1255)
  CDS (1)..(1362)
atgaggtggtgtcttgcgttgctcatttgttgcttggctgtggtaaatgcgctgagtagctccggcagtcgcctgttggccattctggaagacacagaacagaaggacttatactccacgttgtgggcagacctagaggcacggggatatgatgtctcaatcgaatcctctaagagtgaacagctagccctgttcaagcacggcgaaagagcttacgatcacctcctgatcctccctcccaagtccaaaggcctcggcccctccttgaccccaaaacacatcctcgacttcatgaacaaggatggcaacatcctcctcgccctttctggcaagactgccacctccagcgccatcagctcccttctccttgaactcgacattcacctctccaccgatcgctcacaagtcgttgtcgaccacttcaactacgacaccctctcggccgctgagaaacatgacgtccttgttctccagcgccctggacccctccgttctgacgtcaaggccttttttgatggtgaaggtgttcttgccctcccccgagttgctccccagactctcggtgacagcgccctcctctctccgatcctcagggcccccgccactgcctacagctacaaccccaaggagggcatgcccgcggcggaggatatcctggctaccggttcgcagctgaacattgtttccgctatgcaggcccgcaactctgcccgcttcactgttctcggatcagtggagtcgttggaggacaaatggttctctgcctccgtcaagacgcccagcggcaagaagacttccaccgtgaaccgcgagttcgctaagcagttgacagcttgggctttcaaggagactggtgtcctcaaggttgacaaggtcgagcatcgccttgccactgagggcgccgaattgaacccctcgatctaccggatcaagaacgagactatctacagcatcgaggtttccgagtatgtctatgacaagtgggttcccttcgatgtccccggcgacgacgcgctccagctcgagttcaccatgctctcgcccttccaccgtctcaccctccaacccacccaccgcaccgataccagcactgtgttcagcactcagtttgtgacccccgatcagcacggtatcttctccttccgcgtcaactacaagcgtcccttcttgacctccatcgaggagaagcatgaggtcaccaaccgccactttgcacacgatgagtaccctcgcagctgggctattactggcggttgggtatggattgccggtctttggtcggtgattggaggatttttggctttcgtcattgtctggctctactctgcccctgtgactgatacgcttaagaagactcagtaa

SEQ ID NO: 7666 - protein, 453 aa, Penicillium chrysogenum (strain ATCC 28089 / DSM 1075 / Wisconsin 54-1255)
MRWCLALLICCLAVVNALSSSGSRLLAILEDTEQKDLYSTLWADLEARGYDVSIESSKSEQLALFKHGERAYDHLLILPPKSKGLGPSLTPKHILDFMNKDGNILLALSGKTATSSAISSLLLELDIHLSTDRSQVVVDHFNYDTLSAAEKHDVLVLQRPGPLRSDVKAFFDGEGVLALPRVAPQTLGDSALLSPILRAPATAYSYNPKEGMPAAEDILATGSQLNIVSAMQARNSARFTVLGSVESLEDKWFSASVKTPSGKKTSTVNREFAKQLTAWAFKETGVLKVDKVEHRLATEGAELNPSIYRIKNETIYSIEVSEYVYDKWVPFDVPGDDALQLEFTMLSPFHRLTLQPTHRTDTSTVFSTQFVTPDQHGIFSFRVNYKRPFLTSIEEKHEVTNRHFAHDEYPRSWAITGGWVWIAGLWSVIGGFLAFVIVWLYSAPVTDTLKKTQ

SEQ ID NO: 7667 - DNA, 1383 bp, Penicillium marneffei (strain ATCC 18224 / CBS 334.59 / QM 7333)
  CDS (1)..(1383)
atgaggtcatttctttcttttctattacttggcttctggggagcttgcgtacatgccttgagtagctcaggatcccgattgcttgtcgttttggaggagaacaagagcttatattcggatttatgggctgatctagaaggccgcggctacgacattactttcgaatctcccaagagcgaccagttgtcgttattcgcacatggagaaaaggcatatgaccaccttattcttctcccatccaagtcgaaaggtcttggtcccgcattgacacccaagctcctactcgacttcctcaatgatgagggcaacgttcttctcgccctctccggaaggttcaccactcctagctccatcaatgctctcctccttgagctggaccttcacatctcgcctgaccgttcgtctattgtggttgaccacttcaactatgacaccatctccgccgccgaaaagcacgatgtcctcctcgtgcccctccccgatcccgtgagatcagatgtgaaatcatacttctccggtgaaggtgtgctagctctccctcgaccagtgggacagtccctcggcaacgctagtccgctccttacacctatcgtccgagcccccgaaactgcttatagctacaataccaaggatgattctctttccgttgaggacagctttgcgactggctcgcaattagccttggtatcggcattgcaggccaggaactctgctcgtttcactgttctcggatctgcggaggctcttgaagacaagtggttttctgcttctgtcaagtctcctaagtccaagtccgcagttacaactgccaaccgacagtttgccaagcagcttaccggctggacgttcaaggaacttggtgtcttgaaggttggaaagattgagcattatctcagtgatgagtttggcaatatcgaaggcgaggtcaacccaaccatctatcgcattaagaacgacgtaaccttcgatattgaagtctccgaatacgaatttgataagtgggtgccattcaaggtccccgccaacgacgaacttcaacttgaattcagcatgctgtcccccttccaccgtctgaaactgcagcccaagactactactcagaatagcacaatattcggcgtcacattcaccacacccgaccaacacggcattttctctttccgagtaaactatctccgcccgttcctgaccaacgttgaagagaagcacgaagtcacagtccgacactttgcacacgatgagtaccctcgaagctgggagattactggtggctgggtctggattgcgggactttgggcagttattggcggattcattgcctttgtgcttgtctggctttattcggccccggtgccgagtccagaggcgacgaagaccaaatag

SEQ ID NO: 7668 - protein, 460 aa, Penicillium marneffei (strain ATCC 18224 / CBS 334.59 / QM 7333)
MRSFLSFLLLGFWGACVHALSSSGSRLLVVLEENKSLYSDLWADLEGRGYDITFESPKSDQLSLFAHGEKAYDHLILLPSKSKGLGPALTPKLLLDFLNDEGNVLLALSGRFTTPSSINALLLELDLHISPDRSSIVVDHFNYDTISAAEKHDVLLVPLPDPVRSDVKSYFSGEGVLALPRPVGQSLGNASPLLTPIVRAPETAYSYNTKDDSLSVEDSFATGSQLALVSALQARNSARFTVLGSAEALEDKWFSASVKSPKSKSAVTTANRQFAKQLTGWTFKELGVLKVGKIEHYLSDEFGNIEGEVNPTIYRIKNDVTFDIEVSEYEFDKWVPFKVPANDELQLEFSMLSPFHRLKLQPKTTTQNSTIFGVTFTTPDQHGIFSFRVNYLRPFLTNVEEKHEVTVRHFAHDEYPRSWEITGGWVWIAGLWAVIGGFIAFVLVWLYSAPVPSPEATKTK

SEQ ID NO: 7669 - DNA, 1320 bp, Zea mays
  CDS (1)..(1320)
atggcgacgcggcgccacatcctcctcctcgccgctgccttcgtgtcccttctcgcgctcgaggctgtggagggcctcgaagaggggccccgcgggcgccggctgctggtcctgctggacgacctggccgtgcggtcgtcgcactcggccttcttcggctcgctccaggcgcgcgggttcgatctcgaattccgcctcgccgacgaccccaagctctcgctgcaccgctacggccagtacctctacgatggcctcgtgctgttcgccccctccaccccacgttttggtggatcagtggaccagaacgcagtccttgaatttattgatgctgggcatgatatgatcctggcggcagattcctctgcctctgatcttattcgtggcattgcgacagagtgtggggttgattttgatgaggatccagaggcaatggttattgaccacattaactatgccgctatggatgttgaaggcgatcacaccttgattgttggtgatgatcttattcaatcagatgtcatactggggtctaaaaagattgaggctcctgtattatttcgtggaattggacacacggctaatccatcaaacagtttggttctgaaagtcctatctgcctctccatcagcatactcagctaacccaaagactaagttattgttgcctccatcgcttactgggtcagctatatcactggtttcggttatgcaggcaagaaataatgctcgggtgctgctatctggatcacttgatctttttagcaaccggttcctgaagtctggtgttcaaaaggctggtagcaaaacgagatacgagagagctggaaatgagcaatttgtgacagagacaagcaaatgggtcttccatgagagggggcaccttaaggctgttaatgttaagcaccacaaggttggggagaccaatgaaccaggcatgtaccgcattaacgatgacctggaatactctgttgagatctatgaatggtctggaacaagctggaagccatatgttgctgatgatgtgcaactccagtttttcatgatgagtccttatgttctgaaaactatgtcgaatgacaacaagggtttatactcaacatccttcaaagttcctgatgtctacggagttttccagttcaaagttgagtaccagaggctgggatatactggtttgtcttttacaaagcagattccagtgcgcccttacaggcataacgagtatgagaggttcataacatcagcgtacccatactacactgcctcattttcaacgatgtgtgctttcttcatattctcgcttgtgtacctgtaccacaaataa

SEQ ID NO: 7670 - protein, 439 aa, Zea mays
MATRRHILLLAAAFVSLLALEAVEGLEEGPRGRRLLVLLDDLAVRSSHSAFFGSLQARGFDLEFRLADDPKLSLHRYGQYLYDGLVLFAPSTPRFGGSVDQNAVLEFIDAGHDMILAADSSASDLIRGIATECGVDFDEDPEAMVIDHINYAAMDVEGDHTLIVGDDLIQSDVILGSKKIEAPVLFRGIGHTANPSNSLVLKVLSASPSAYSANPKTKLLLPPSLTGSAISLVSVMQARNNARVLLSGSLDLFSNRFLKSGVQKAGSKTRYERAGNEQFVTETSKWVFHERGHLKAVNVKHHKVGETNEPGMYRINDDLEYSVEIYEWSGTSWKPYVADDVQLQFFMMSPYVLKTMSNDNKGLYSTSFKVPDVYGVFQFKVEYQRLGYTGLSFTKQIPVRPYRHNEYERFITSAYPYYTASFSTMCAFFIFSLVYLYHK

SEQ ID NO: 7671 - DNA, 1320 bp, Oryza sativa subsp. indica
  CDS (1)..(1320)
atggcggcgccgcgccaccaccacctcgccctcgccgtcgccctcgccctcctcgtcgtcaccgccgcggcggcggacgaggggggaccgcgggggaggcgggtgctggtgctcgtggacgacctggcggtgcggtcgtcgcactcggccttcttcgcgtcgctccaggggcgagggttcgatctcgacttccgcctcgccgacgaccccaagctctcactccaccgctacggccagtacctctacgacggcctcgtcctcttcgccccctccaccccgcgttttggaggatcagtggaccaaaattcaattctggaattcatcgatgctggtcatgatatgatcctggcagcagactcttcggcctctgatcttatccgaggcattgcaacagagtgtggggttgattttgatgaggatccagaggcaatggttattgatcacattaattatgctgccactgatgctgaaggtgatcatactttgattgctggtgatgacctcatccagtcagatgtgatactggggtcaaagaaaattgaggcccctgtattatttcggggaattggacatgcggttaatccatctaacagcttggtcctgaaagtcttatccgcctctccgtcagcatactcagcaaacccaaagtctaagttggcttcccctccatctctcacagggtcggctatatcactggtttctgttatgcaggcaagaaacaatgctcgggtcttgatatctggatcactcgatctgtttagcaacaggttcctaaaatctggtgttcagaaggccggtagcaagataaggcatgagaaagctggaaatgaacaatttgtgacagaaacaagcaaatgggtcttccatgagaggggccatctaaaggcagtgaatgtcaagcataacaaggttggggagacaaatgagcctggcatgtaccgcatcaatgatgacttggaatactctgttgagatctacgaatggtctgggacaagctggaagccatatgttgctgatgatgttcaagttcagttttacatgatgagcccttatgttctgaagacactgtcgactgacaagaagggtgtattttcaacatccttcaaagttccagatgtttatggagttttccagttcaaagttgagtaccagaggcttggatatactggtctctctctttctaagcagattccagtgcgcccttacaggcataatgagtatgaaagattcataacttcggcatatccgtactatgctgcgtcgttttcaacaatgggagcctccttcatcttctcatttgtgtacctgtaccacaaatag

SEQ ID NO: 7672 - protein, 439 aa, Oryza sativa subsp. indica
MAAPRHHHLALAVALALLVVTAAAADEGGPRGRRVLVLVDDLAVRSSHSAFFASLQGRGFDLDFRLADDPKLSLHRYGQYLYDGLVLFAPSTPRFGGSVDQNSILEFIDAGHDMILAADSSASDLIRGIATECGVDFDEDPEAMVIDHINYAATDAEGDHTLIAGDDLIQSDVILGSKKIEAPVLFRGIGHAVNPSNSLVLKVLSASPSAYSANPKSKLASPPSLTGSAISLVSVMQARNNARVLISGSLDLFSNRFLKSGVQKAGSKIRHEKAGNEQFVTETSKWVFHERGHLKAVNVKHNKVGETNEPGMYRINDDLEYSVEIYEWSGTSWKPYVADDVQVQFYMMSPYVLKTLSTDKKGVFSTSFKVPDVYGVFQFKVEYQRLGYTGLSLSKQIPVRPYRHNEYERFITSAYPYYAASFSTMGASFIFSFVYLYHK

SEQ ID NO: 7673 - DNA, 1389 bp, Talaromyces stipitatus (strain ATCC 10500 / CBS 375.48 / QM 6759 / NRRL 1006)
  CDS (1)..(1389)
atgaggtcgtttctttcttttctactacttggcttctggggagcttgcgtacatgcattgagtagctcgggatcccgcttgctcgtcgttttggaagaagacaagaacttatattcgaatttatgggctgatttagaagaccgcggctacgacatcactttcgaatctcccaaaagcgacaagttgtcgttatttgcacatggagagaaagcatacgaccaccttattctccttccatccaagtcgaaaggtcttggtcctgcattgacccccaagcttctgctcgacttcgtcaacaacgagggcaatgttcttctcgccctttccggaaagtctactactcctagctccatcaactctctcctccttgagctagatctgcatatctcgcctgaccgttcgtcaattgtgatcgatcattttaactacgatactatttctgcgtccgaaaagcatgatgttcttcttctacctctgcctgatcccgtgaggtcagatgtaaaatcatttttctccggtgaaggtgtactagctttcccccgcccggtgggacagtctcttggaaacgccagcccgctccttacacctatcgtacgagcccccgaaacagcttatagctacaacaccaaggaggactctctttccgtcgaggatagctttgcgactggctcgcaattggcgttggtatcggcactacaagcgaggaactctgctcgtttcactgttctcggatctgcagaggctctggaagacaaatggttttctgcgtctgtcaaggctccgaaatccaagtcggcagttacaactgcaaatcggcaatttgccaagcagctcactgcttggacattccaggagcttggcgttttgaaggttggcaagattgagcattatctcagtgatgaatttggaaacattgaaggcgcggtgaacccgaagatttatcgcattaagaacgacgtgacatttgatattgaagtttctgagtatgagttcgataagtggattccatacaaggttcccgccaacgacgaactccaacttgagttcaccatgctatctccctggcacagacttaagctcttgcccaaatccagcactctgaacagtaccgtctttggcgtcactttcaccactcccgaccaacacggcattttctcattccgagtaaactacaaccgcccattcctgaccaacatcgaagagaagcatgaggttactgtccgccactttgcgcacgacgagtacccacgaagctggcagatcactggtggatgggtatggattgcgggactttggtctgttattgggggtttcattgcatttgtgctagtatggctctattcggccccggtgctgagcgcagaagcgaaggttcagaagatcaaataa

SEQ ID NO: 7674 - protein, 462 aa, Talaromyces stipitatus (strain ATCC 10500 / CBS 375.48 / QM 6759 / NRRL 1006)
MRSFLSFLLLGFWGACVHALSSSGSRLLVVLEEDKNLYSNLWADLEDRGYDITFESPKSDKLSLFAHGEKAYDHLILLPSKSKGLGPALTPKLLLDFVNNEGNVLLALSGKSTTPSSINSLLLELDLHISPDRSSIVIDHFNYDTISASEKHDVLLLPLPDPVRSDVKSFFSGEGVLAFPRPVGQSLGNASPLLTPIVRAPETAYSYNTKEDSLSVEDSFATGSQLALVSALQARNSARFTVLGSAEALEDKWFSASVKAPKSKSAVTTANRQFAKQLTAWTFQELGVLKVGKIEHYLSDEFGNIEGAVNPKIYRIKNDVTFDIEVSEYEFDKWIPYKVPANDELQLEFTMLSPWHRLKLLPKSSTLNSTVFGVTFTTPDQHGIFSFRVNYNRPFLTNIEEKHEVTVRHFAHDEYPRSWQITGGWVWIAGLWSVIGGFIAFVLVWLYSAPVLSAEAKVQKIK

SEQ ID NO: 7675 - DNA, 1689 bp, Oryza sativa subsp. japonica
  CDS (1)..(1689)
atggcggcgccgcgccaccaccacctcgcccttgccgtcgccctcgccctcctcgtcgtcaccgccgcggcggcggacgaggggggaccgcgggggaggcgggtgctggtgctcgtggacgacctggcggtgcggtcgtcgcactcggccttcttcgcgtcgctccaggggcgagggttcgatctcgacttccgcctcgccgacgaccccaagctctcactccaccgctacggccagtacctctacgacggcctcgtcctcttcgccccctccaccccgccgtcctcaagtcctccctcgtcgtcgtcgcctcctctcccaaaccccacgcgaaacaaaacctccccacgccgcgagatctcgcagcaatggcggcgccgcgccaccaccacctcgccctcgccgtcgccctcgccctcctcggtcgtcaccgccgcggcggcggacgaggggggaccgcgggggaggcgggtgctggtgctcgtggacgacctggcggtgcggtcgtcgcactcggccttcttcgcgtcgctccaggggcgagggttcgatctcgacttccgcctcgccgacgaccccaagctctcactccaccgctacggccagtacctctacgacggcctcgtcctcttcgccccctccaccccgcgttttggaggatcagtggaccaaaattcaattctggaattcatcgatgctggtcatgatatgatcctggcagcagactcttcggcctctgatcttatccgaggcattgcaacagagtgtggggttgattttgatgaggatccagaggcaatggttattgatcacattaattatgctgccactgatgctgaaggtgatcatactttgattgctggtgatgacctcatccagtcagatgtgatactggggtcaaagaaaattgaggcccctgtattatttcggggaattggacatgcggttaatccatctaacagcttggtcctgaaagtcttatccgcctctccgtcagcatactcagcaaacccaaagtctaagttggcttcccctccatctctcacagggtcggctatatcactggtttctgttatgcaggcaagaaacaatgctcgggtcttgatatctggatcactcgatctgtttagcaacaggttcctaaaatctggtgttcagaaggccggtagcaagataaggcatgagaaagctggaaatgaacaatttgtgacagaaacaagcaaatgggtcttccatgagaggggccatctaaaggcagtgaatgtcaagcataacaaggttggggagacaaatgagcctggcatgtaccgcatcaatgatgacttggaatactctgttgagatctacgaatggtctgggaccagctggaagccgtatgttgctgatgatgttcaagttcagttttacatgatgagcccttatgttctgaagacactgtcgactgacaagaagggtgtattttcaacatccttcaaagttccagatgtttatggagttttccagttcaaagttgagtaccagaggcttggatatactggtctctctctttctaagcagattccagtgcgcccttacaggcataatgagtatgaaagattcataacttcggcatatccgtactatgctgcgtcgttttcaacaatgggagccttcttcatcttctcatttgtgtacctgtaccacaaatag

SEQ ID NO: 7676 - protein, 562 aa, Oryza sativa subsp. japonica
MAAPRHHHLALAVALALLVVTAAAADEGGPRGRRVLVLVDDLAVRSSHSAFFASLQGRGFDLDFRLADDPKLSLHRYGQYLYDGLVLFAPSTPPSSSPPSSSSPPLPNPTRNKTSPRREISQQWRRRATTTSPSPSPSPSSVVTAAAADEGGPRGRRVLVLVDDLAVRSSHSAFFASLQGRGFDLDFRLADDPKLSLHRYGQYLYDGLVLFAPSTPRFGGSVDQNSILEFIDAGHDMILAADSSASDLIRGIATECGVDFDEDPEAMVIDHINYAATDAEGDHTLIAGDDLIQSDVILGSKKIEAPVLFRGIGHAVNPSNSLVLKVLSASPSAYSANPKSKLASPPSLTGSAISLVSVMQARNNARVLISGSLDLFSNRFLKSGVQKAGSKIRHEKAGNEQFVTETSKWVFHERGHLKAVNVKHNKVGETNEPGMYRINDDLEYSVEIYEWSGTSWKPYVADDVQVQFYMMSPYVLKTLSTDKKGVFSTSFKVPDVYGVFQFKVEYQRLGYTGLSLSKQIPVRPYRHNEYERFITSAYPYYAASFSTMGAFFIFSFVYLYHK

SEQ ID NO: 7677 - DNA, 1428 bp, Ricinus communis
  CDS (1)..(1428)
atgcacgatataggaagatcgacattacaagaagaatactactgtatggacagaatgccagcatgcacagctaagaagaaaagtgaagtcaacagcctcaagtacacagaggatgtcagaattcaatgctgttgcaaacattcttcgagcggtggttgtgtacctggcaagaaaaggctagattttatacggatctccaaaagatggacgtgtcctcgttatatagacgattttgcaatcaaatcatcacactctctatacttcaattccctaaaatctcggggcttcaatctcgagttcaagctcgctgacgatcctaagatcgcactccagcgttacggccagtattactacgatgctttaattctcttttgcccatacgcagaacggtttggtggatcgattgatcaaggtgctattttgagttttgttgattctggtcgtgatctgataattgctgctgatattaatgcttctgatttaattcgtgatgttgccaccgaaactggcgttgatttcgatgaggatcctttggcaatggttattgatcacactagctatgctgttttggagacggaaggagatcatacattaattgctagtgatgattttattgactctgatgttatattgggcagcaacaaaattgaagctcccgtgcttttccaggggattggtcatacattaaatccttccaatagcttggtgttaaaagttctctccgcttctccttcaccctattcggctaatccaaagaccaagttgtcgagtcctccatcacttactggatctgctatctctttagtgtcaattgtgcaggcaagaaataatgcccgagttctggtagctggttcattaagcatgttcagcaatcgattccttagaagttgggtacagaaggcagggagctcaacgagacatgagagatctggtaatgagcagtttttgactgagctcagcaaatgggttttccatgaaagaggccatcttaaggctgaaaatgttagatacaaaaaagttggggaaggagatgaaccagcaatgtacagaatcaatgatgatttggaatactcagtggaaatttatgagtggtcaggaacaaactggcaaccttatgtagcagatgacgttcaattacagttttacatgatgagcccctatgttttgaaaaacttatcaactgacaagaagggtctctattatactgctttcaaggttccagatgtctatggggttttccagttcaagatagactatcaaagacttggatacacaagcttatccttgtcaaagcagattccagtccgtccctataggcacaatgagtatgaaagattcattcctgctgcttatccttactatggtgcagcattttctatgatggctggtttcttcgttttcactgtagtccacctctacaacaagtag

SEQ ID NO: 7678 - protein, 475 aa, Ricinus communis
MHDIGRSTLQEEYYCMDRMPACTAKKKSEVNSLKYTEDVRIQCCCKHSSSGGCVPGKKRLDFIRISKRWTCPRYIDDFAIKSSHSLYFNSLKSRGFNLEFKLADDPKIALQRYGQYYYDALILFCPYAERFGGSIDQGAILSFVDSGRDLIIAADINASDLIRDVATETGVDFDEDPLAMVIDHTSYAVLETEGDHTLIASDDFIDSDVILGSNKIEAPVLFQGIGHTLNPSNSLVLKVLSASPSPYSANPKTKLSSPPSLTGSAISLVSIVQARNNARVLVAGSLSMFSNRFLRSWVQKAGSSTRHERSGNEQFLTELSKWVFHERGHLKAENVRYKKVGEGDEPAMYRINDDLEYSVEIYEWSGTNWQPYVADDVQLQFYMMSPYVLKNLSTDKKGLYYTAFKVPDVYGVFQFKIDYQRLGYTSLSLSKQIPVRPYRHNEYERFIPAAYPYYGAAFSMMAGFFVFTVVHLYNK

SEQ ID NO: 7679 - DNA, 1299 bp, Ricinus communis
  CDS (1)..(1299)
atggagagggagaaactatcgatctcattactattattaacgataatctcacttctgcttccctttctctcaatctcattctcaccagaatctccaacagatcgccgcatcttagtattactcgatgacttctctttcaagtcctcacactccattttctttaattccctaaaatctcggggtttcgacctcgatttcaagctcgctgacgatccaaaactcgccattcaacgatatggccagtacttgtacgatggcattatcgtcttttcgccttccatcgagaggtttggaggtgcattagatttagcggcagtgattgactttgttgactccggacgagacttgattattgctgctgattcttctgcttctgattttattaaaagcattgctactgaatgtggtgttgattttgatgagaatccgacagctatggttattgatcataaaagctatgcactttcggagactgagggtgatcatactttaattgctgctactgattttatcgagtctgatgttatattaggaaaagctaagattgaggccccggtgctgtttaaaggtattgcgcattctgtaaatccagcaaatggcctggtgctgaaagtgctttcagcttctccttcggcatattcagctaaccctaattccaagctatcaagtcctccatcagtagctggatccgctatttcattagtttcgctaatgcaggctagaaacaatgctcggattatgattactggctccttggatatgttcagtaaccgatttttcaaatcaggtgtgcaaagtgctgagagtgcaataaaatataagaaatctggcaatgaacagtttgtgactgaacttagcaaatggatctttcatgaaaggggtcatctgaaggctgtcaatcttagacacaacaaagttggggaaaccgatgaacctgcaatatataggataaaagatgagttggacttttatgtggagatatatgaatggtctggaaagagctgggaaccatatgtggcggatgatgttcaggttcagttctacatgatgagcccttatgtgttgaaaaccctctcgactgaccagaagggtctgtaccagacatcattcaaggtgcctgatgtttatggggttttccaatttaaggttgagtatcagaagcttggatacactagcttgtctctttccaagcagattcctgttcggccctacaggcacaacgaatatgaaagatttataacaactgcctatccatattatggagcttctttcaccacggctaagcatcttgcctgttga

SEQ ID NO: 7680 - protein, 432 aa, Ricinus communis
MEREKLSISLLLLTIISLLLPFLSISFSPESPTDRRILVLLDDFSFKSSHSIFFNSLKSRGFDLDFKLADDPKLAIQRYGQYLYDGIIVFSPSIERFGGALDLAAVIDFVDSGRDLIIAADSSASDFIKSIATECGVDFDENPTAMVIDHKSYALSETEGDHTLIAATDFIESDVILGKAKIEAPVLFKGIAHSVNPANGLVLKVLSASPSAYSANPNSKLSSPPSVAGSAISLVSLMQARNNARIMITGSLDMFSNRFFKSGVQSAESAIKYKKSGNEQFVTELSKWIFHERGHLKAVNLRHNKVGETDEPAIYRIKDELDFYVEIYEWSGKSWEPYVADDVQVQFYMMSPYVLKTLSTDQKGLYQTSFKVPDVYGVFQFKVEYQKLGYTSLSLSKQIPVRPYRHNEYERFITTAYPYYGASFTTAKHLAC

SEQ ID NO: 7681 - DNA, 1519 bp, Caligus clemensi
  CDS (28)..(1335)
ggggggagtttggtttccttctgatcaatgatgaagttgttgggtacacttcttctgctgtccatgctgagcctggctcatgggggccgtgtccttgtgctcctggatagtttgagtatcaaagagagtcacgtgagtttcctccgggatttgtctgacctgggcttggatttgaccgtgaagacctccgaagacccctccattgaggtcaagaagtacggtgagttcctctacgagcacatccttatccttagtcccaatgtagaggaatttggcggtggattgagccccgagggtctcgcggagttcattgacgccggaggcgatgtcttcgttgctggtgtggagtcatcgaacgtattgcgtgagctggcatctgaagtcggatttgaggtggacgaggaaggcacaaccgttctggatcatagcagctatgactctgtcaaggacgaggaaggtcttcatgccgttatcattgccgaacccaagaagcatcttcaaaaggccatcgtgggacaaagtcctcttctgaaagaagataaacccttactcttcaggggagcagggatccttgcagatgagaaccccttggtcctacccattctacgggcatcctcctacgcttactcccataaccccctcaagcccatatccgactacccccatgccgttggaaagaacacgctcctcatcgcgggtctacaggctcggaacaacgcccgtgtcgtattctccgcctccctggacttcttctctaacgattacttcgagtcctctgttcattacaagggcgcagagagccccagcgggaaccgagagctctccaaagcactcctctcatggtgtttcaagcaaacgggtctcctccgcacctccgacctccgccatcacctcgtgggcgccacgcaatcccctccattttacaccatcatggaagaagtagagtacagtatccgcatcgaggagtttaaggggggcaaatgggtcccctatacggcaacggatgtccgattggagtttgtccgcattgaccccttcgttcgcacgaatttgatcccggacggcaaggggaagttcacagctcgcttcaagatcccggatgtctacggggtctaccagttcaagattgattatgttcgcatcgggatttctcgactctactctacaacgcaggtctcggtgaggccactacgccatgatcaatatgagaggttcatcctctctgcctacccctactacgcctcggcatttagtatgatgttcggggtctttgtctctgcattcgtgttccttcatcacaaagagccggcttctcccaagagcaaggcggagtgaggatcgtaatagtgcgcattttattaattaaatatttatatttctcgtaaattaaagcctcaccttattttgtttttatatttttttgttcttcatattgttcattaaataattaacacccccctttaaggtttgcattttttgatgaatcccatacacacaaataaatacacgatttttttat

SEQ ID NO: 7682 - protein, 435 aa, Caligus clemensi
MMKLLGTLLLLSMLSLAHGGRVLVLLDSLSIKESHVSFLRDLSDLGLDLTVKTSEDPSIEVKKYGEFLYEHILILSPNVEEFGGGLSPEGLAEFIDAGGDVFVAGVESSNVLRELASEVGFEVDEEGTTVLDHSSYDSVKDEEGLHAVIIAEPKKHLQKAIVGQSPLLKEDKPLLFRGAGILADENPLVLPILRASSYAYSHNPLKPISDYPHAVGKNTLLIAGLQARNNARVVFSASLDFFSNDYFESSVHYKGAESPSGNRELSKALLSWCFKQTGLLRTSDLRHHLVGATQSPPFYTIMEEVEYSIRIEEFKGGKWVPYTATDVRLEFVRIDPFVRTNLIPDGKGKFTARFKIPDVYGVYQFKIDYVRIGISRLYSTTQVSVRPLRHDQYERFILSAYPYYASAFSMMFGVFVSAFVFLHHKEPASPKSKAE

SEQ ID NO: 7683 - DNA, 1347 bp, Aedes aegypti
  CDS (1)..(1347)
atgtcccgtgctttgtactggctcgttgccggccttgccgtgtttgcattggcaacggttcctgcccgtgccgaagccggagaaaccctggtgctgctggacaatttggccatccgcgagacgcactccattttcttcaagaacctgcaagaacgtggctacaaactcaccttcaagctggcggacgatgccagtctggtcctgtcgaaatacggagaatttctgtacaagcatctgatcctgtttgcgccttcggtggaggaattcggcggatcgttgagcgtcgaggccatcaccgatttcgtggacaacggaggaaacgttttggttgcgggaagctcgaactccggtgatgccctgagggaattggcatccgagtgtggatttgaggtggatgaggaaaatgctgctgtgattgatcatctgaactacgacatctcggacagtggagaccatactctggtggtggcttccccggagaatttgatcgattcggaaattgtcgtgggtaagaaatccgtgggcccactattgtacaagggaactggtctgttggccgataaggaaaatcccttggtgttgcaactgttgactgcggacagcaccgcctacagctatgttccggatgcccctatcaaagaataccctcacgccgttggaaagggaacacttctgatcgcagccctccaggcccggaacaacgcccgagtggtattctccggatcgctctatttcttctccgatgaagccttcctgtcgtcggttcagcgcgcccaggatgaaaagctgcatagcaagtcgggtaaccaggacgtggccacgtccatcagcaaatgggtcttcggagaaaacggagttattcgcgtccgttccgtaaaacacttcaaagagggagaaagccaaccaccagctgcctacacaatcaccgaaccggtcgtgtacaccattgaaatcgaaaccctggctgccgatggcaagtggcaaccattccaggccaacgatgttcagctggaattcgtccggatcgatccgtttgttcggaccactttgaaccacatcggtggcggacgctaccaggccaaattcaagatccctgatgtatatggcgtgtatcagtttaaggtcgattacgatcgcattggatatacccatctgtattcgacaactcaggtttcggtccgtccactcacccacacccaatacgaacggttcattcccagcgcttacccgtactatgtgagcgccttctcgatgatggtcggaatgttcctgttctcaatcatcttcctgcacttcaaggatgatggcccgagtgggaaagtagccactgataagaagtctcagtag

SEQ ID NO: 7684 - protein, 448 aa, Aedes aegypti
MSRALYWLVAGLAVFALATVPARAEAGETLVLLDNLAIRETHSIFFKNLQERGYKLTFKLADDASLVLSKYGEFLYKHLILFAPSVEEFGGSLSVEAITDFVDNGGNVLVAGSSNSGDALRELASECGFEVDEENAAVIDHLNYDISDSGDHTLVVASPENLIDSEIVVGKKSVGPLLYKGTGLLADKENPLVLQLLTADSTAYSYVPDAPIKEYPHAVGKGTLLIAALQARNNARVVFSGSLYFFSDEAFLSSVQRAQDEKLHSKSGNQDVATSISKWVFGENGVIRVRSVKHFKEGESQPPAAYTITEPVVYTIEIETLAADGKWQPFQANDVQLEFVRIDPFVRTTLNHIGGGRYQAKFKIPDVYGVYQFKVDYDRIGYTHLYSTTQVSVRPLTHTQYERFIPSAYPYYVSAFSMMVGMFLFSIIFLHFKDDGPSGKVATDKKSQ

SEQ ID NO: 7685 - DNA, 1302 bp, Schistosoma japonicum
  CDS (1)..(1302)
atgatgtggttgtcgttgttgttcatgttagtggcaccgtttgtggctgctaatgaggacaagcggaaaaatttacttgtacttttggacgatgtttatgtcaaggaaactcattctacatttttaaaaatgctaacaagtaggggctacaacttgactacaaaacttgctgatgactcatctctttcgctgaaacaccttggagaatatttgtactcaggcttaataattttagccccatctgtcagtgagttcggcggtacgataaatgttaatgagataactaatttcgtcgatgatggaggtaacctcgttgtagttgctgggcctaatgtcggcgagtctattcgtgagttggggagtgattgtggtgtagaattcgacgaagaaaataccttcgttatcgaccatttcaattttgacaaaaaagatagtggtttgcactctttaattactgtacctgttagtaatttgatcaaaagcaaagtaataactggaggaaaagtcaatgcaccaatcttatatcgtggtataggtatttcagctgatcaaactaaccccttgcttattgacgtcttacacggatcaaagacatcctacagttacaatccagataaatcagtaacagattacccaaatacagtcgggacaaacacccagttaatcactgcattacaagccagaaataatgcacgtgccttattcattggttcgttagattttctgtcaaactcgtttttcgaatctaccgtggagactgagtctaaaatgagtgttctatgtggcaatcaggtgcttactgaaaatttgatgcgatgggttttaggtgaatgtggtcagctacggtacacttctgtaaagcatcatcgggtagatgagactgtccctcctagccaatatacaatcatggatgatgttgtttacactatcaagatagagacaaaagatgatagcggaaattggatcccttatgatgcagacgatgtccagcttgagttcgtacgaatcgatccatttattagaaagaacatggagcacaaagatggtgaatacaaacttgtcatgaaattacccgatgtttatggagtatttaaatttgtagttgattattatcgtgttggttacacacaccttttaagcgtcgtacaagtgcctgttcgtccatttactcatacacaatatgaaagattcctcgtggctgcttatccttattatactagtgctttatcaatgatggttggcctagtgctatttagtttcgtatttttatacttaaaagatgataaagaaaagggtgaataa

SEQ ID NO: 7686 - protein, 433 aa, Schistosoma japonicum
MMWLSLLFMLVAPFVAANEDKRKNLLVLLDDVYVKETHSTFLKMLTSRGYNLTTKLADDSSLSLKHLGEYLYSGLIILAPSVSEFGGTINVNEITNFVDDGGNLVVVAGPNVGESIRELGSDCGVEFDEENTFVIDHFNFDKKDSGLHSLITVPVSNLIKSKVITGGKVNAPILYRGIGISADQTNPLLIDVLHGSKTSYSYNPDKSVTDYPNTVGTNTQLITALQARNNARALFIGSLDFLSNSFFESTVETESKMSVLCGNQVLTENLMRWVLGECGQLRYTSVKHHRVDETVPPSQYTIMDDVVYTIKIETKDDSGNWIPYDADDVQLEFVRIDPFIRKNMEHKDGEYKLVMKLPDVYGVFKFVVDYYRVGYTHLLSVVQVPVRPFTHTQYERFLVAAYPYYTSALSMMVGLVLFSFVFLYLKDDKEKGE

SEQ ID NO: 7687 - DNA, 1302 bp, Branchiostoma belcheri tsingtauense
  CDS (1)..(1302)
atggcttcccgtgttctgatcgtcctgttagcggctcttgtcggcgtccatgcaagcgggcggacgctcgttctgctggacaacctggccatcaaggaatcacactcggtgttctttaagtctctggcagaccgagggtttgacctgaccttcaagaccgcagacgactccagcctcgctctcatcaagtacggagagttcctctttgaacatctcatcatctttgctccgtccgtggaagaatttggaggtaatctggacaccagcgctctgacggagtttattgatggaggtggaaacatcctggtggcagcaagctcagagatcggtgagccaatccgtgagctggccagcgagtgtggcgtggagtttgatgaagagaaaacagctgtgatcgaccacttgaactacgacctggctgacgagggacagcacacgctgattgttgctgacccagaaaacctcatcgatgtgaagaacatagtgggaaccaaacgggacactcccattctcttcaggggggtgggcatggttgcagacacagacaaccccctggtgttggatgtcctgacgggatcctctacttcctactccttctaccctgacgagaaagtgtccgagtacccccatgccgtagggaaaaacaccctcctggtggctgcgctccaggctaggaacaatgctcgtgtggtgttcaccgggtccctggagctgttcagtgatgagttcttcacagcctctgtacagaaggccctcgctggggcacagaagcacgacaagtctggtaacgaggcgttcgccctggcgctgtctcgctgggtgtttaaggaggagggggtgctgcgagggggggtcgtcagccaccatcgtaagggggaacaagaaccccccacagcatacaccgtcatggaggaagtggtgtacagtatcgtcatagaacagctggtgaacgggaagtgggttccgttcgatgccaacgacgtccagctggagttcgtgaggatcgacccgttcgtacgcaccaccatgcagcgcaaaggagggaagtttgtggcggagttcaagttacctgacgtgtacggagtgttccagtatcgagtggactacaacaggctaggcttcactcacctgttctctaccactcaggtgttggtgcggccgttcacccacacccagtacgaacgtttcatcgcggccgcgtacccgtactacgccagtgccttctctatgatgtttggactcttcgtcttcagcctcgtgttcttacaccaccgagaagacaccaaggaaaaagcagaataa

SEQ ID NO: 7688 - protein, 433 aa, Branchiostoma belcheri tsingtauense
MASRVLIVLLAALVGVHASGRTLVLLDNLAIKESHSVFFKSLADRGFDLTFKTADDSSLALIKYGEFLFEHLIIFAPSVEEFGGNLDTSALTEFIDGGGNILVAASSEIGEPIRELASECGVEFDEEKTAVIDHLNYDLADEGQHTLIVADPENLIDVKNIVGTKRDTPILFRGVGMVADTDNPLVLDVLTGSSTSYSFYPDEKVSEYPHAVGKNTLLVAALQARNNARVVFTGSLELFSDEFFTASVQKALAGAQKHDKSGNEAFALALSRWVFKEEGVLRGGVVSHHRKGEQEPPTAYTVMEEVVYSIVIEQLVNGKWVPFDANDVQLEFVRIDPFVRTTMQRKGGKFVAEFKLPDVYGVFQYRVDYNRLGFTHLFSTTQVLVRPFTHTQYERFIAAAYPYYASAFSMMFGLFVFSLVFLHHREDTKEKAE

SEQ ID NO: 7689 - DNA, 1314 bp, Arabidopsis thaliana
  CDS (1)..(1314)
atggtgaacctctcgagatccgtcgcgttgatctcagtattcctccttcctttacttagcttctctttctccgtcgataatccgacggatcggcgtgttcttgttcttctcgatgatttatcactcaaatcctctcattctatcttcttcaacactctcaagtctcgtggattcgatctcgatttcaagttagctgaagattcgaagcttgcgcttcaacgatacggccagtacttgtacgatgggttgatcatcttcgccccatcaacagaacggtttggaggatccttggattcgaaatccattgctgattttgttgattccggtcgtgacttgatcttatcggcggatactgctgcatctgatttgattaggggtattgccacagagtgtggggttgatttcgatgaggattcttcagctatggttattgatcatactagcttctccgtctctgatgttgacggcgaccacaccttgattgctgccgacgatttagtgaaatccgatgtcattttgggaaaaaccaagattgaggctcccgtgctcttcagaggagttgcacattcgttgaaccctactaacaatctggttttgaaagttctttcagcctctccatcagcttattctgctaacccaagctcgaagttgtctagtcccccccagctcactgggtcttcaatttcgctagtctcggtcatgcaggccaggaacaatgctagggttgtgatctcaggctcagtgcagttgtttagcgataggttaatcagatctggtgtccagaaagcagggattccgaaccaatacgaaaaatctggcaacgaacagtttgtgactgaactaagcaaatgggtcttccacgaaaggggccatctgaaggctggtaatcttgtacaccatagggttggagaaacagatgagccagctatatataggataaaggatgacctggaattttctgtagagatatatgagtggtcaggaaagagctgggagccgtatgttgctaacgatgtgcaggttcagttttacatgatgagcccgtatgtgttgaaaaccctgtcaacagacaagaagggtctgtttcatacatctttcaaggttcctgatgtctacggtgtattccagtttaaggttgaatatgaaaagctaggctacactacattatctctttcgaagcagattccggtgcggccttacagacacaatgagtatgagagatttatcccaactgcgtatccttattatggagcctgctttacgacgatggctggtttcttcgtcttcagcttcgtctacctctaccataagtag

SEQ ID NO: 7690 - protein, 437 aa, Arabidopsis thaliana
MVNLSRSVALISVFLLPLLSFSFSVDNPTDRRVLVLLDDLSLKSSHSIFFNTLKSRGFDLDFKLAEDSKLALQRYGQYLYDGLIIFAPSTERFGGSLDSKSIADFVDSGRDLILSADTAASDLIRGIATECGVDFDEDSSAMVIDHTSFSVSDVDGDHTLIAADDLVKSDVILGKTKIEAPVLFRGVAHSLNPTNNLVLKVLSASPSAYSANPSSKLSSPPQLTGSSISLVSVMQARNNARVVISGSVQLFSDRLIRSGVQKAGIPNQYEKSGNEQFVTELSKWVFHERGHLKAGNLVHHRVGETDEPAIYRIKDDLEFSVEIYEWSGKSWEPYVANDVQVQFYMMSPYVLKTLSTDKKGLFHTSFKVPDVYGVFQFKVEYEKLGYTTLSLSKQIPVRPYRHNEYERFIPTAYPYYGACFTTMAGFFVFSFVYLYHK

SEQ ID NO: 7691 - DNA, 1314 bp, Arabidopsis thaliana
  CDS (1)..(1314)
atggtgaacctctcgagatccgtcgcgttgatctctgtattcctccttcctttacttagcttctctttctccgtcgataatccgacggatcggcgtgttcttgttcttctcgatgatttatcactcaaatcctctcattctatcttcttcaacactctcaagtctcgtggattcgatctcgatttcaagttagctgaagattcgaagcttgcgcttcaacgatacggccagtacttgtacgatgggttgatcatcttcgccccatcaacagaacggtttggaggatccttggattcgaaatccattgctgattttgttgattccggtcgtgacttgatcttatcggcggatactgctgcatctgatttgattaggggtattgccacagagtgtggggttgatttcgatgaggattcttcagctatggttattgatcatactagcttctccgtctctgatgttgacggcgaccacaccttgattgctgccgacgatttagtgaaatccgatgtcattttgggaaaaaccaagattgaggctcccgtgctcttcagaggagttgcacattcgttgaaccctactaacaatctggttttgaaagttctttcagcctctccatcagcttattctgctaacccaagctcgaagttgtctagtcccccccagctcactgggtcttcaatttcgctagtctcggtcatgcaggccaggaacaatgctagggttgtgatctcaggctcagtgcagttgtttagcgataggttaatcagatctggtgtccagaaagcagggagtccgaaccaatacgaaaaatctggcaacgaacagtttgtgactgaactaagcaaatgggtcttccacgaaaggggccatctgaaggctggtaatcttgtacaccatagggttggagaaacagatgagccagctatatataggataaaggatgacctggaattttctgtagagatatatgagtggtcaggaaagagctgggagccgtatgttgctaacggtgtgcaggttcagttttacatgatgagcccgtatgtgttgaaaaccctgtcaacagacaagaagggtctgtttcatacatctttcaaggttcctgatgtctacggtgtattccagtttaaggttgaatatgaaaagctaggctacactacattatctctttcgaagcagattccggtgcggccttacagacacaatgagtatgagagatttatcccaactgcgtatccttattatggagcctgctttacgacgatggctggtttcttcgtcttcagcttcgtctacctctaccataagtag

SEQ ID NO: 7692 - protein, 437 aa, Arabidopsis thaliana
MVNLSRSVALISVFLLPLLSFSFSVDNPTDRRVLVLLDDLSLKSSHSIFFNTLKSRGFDLDFKLAEDSKLALQRYGQYLYDGLIIFAPSTERFGGSLDSKSIADFVDSGRDLILSADTAASDLIRGIATECGVDFDEDSSAMVIDHTSFSVSDVDGDHTLIAADDLVKSDVILGKTKIEAPVLFRGVAHSLNPTNNLVLKVLSASPSAYSANPSSKLSSPPQLTGSSISLVSVMQARNNARVVISGSVQLFSDRLIRSGVQKAGSPNQYEKSGNEQFVTELSKWVFHERGHLKAGNLVHHRVGETDEPAIYRIKDDLEFSVEIYEWSGKSWEPYVANGVQVQFYMMSPYVLKTLSTDKKGLFHTSFKVPDVYGVFQFKVEYEKLGYTTLSLSKQIPVRPYRHNEYERFIPTAYPYYGACFTTMAGFFVFSFVYLYHK

SEQ ID NO: 7693 - DNA, 1329 bp, Arabidopsis thaliana
  CDS (1)..(1329)
atggtgaacctctcgagatccgtcgcgttgatctctgtattcctccttcctttacttagcttctctttctccgtcgataatccgacggatcggcgtgttcttgttcttctcgatgatttatcactcaaatcctctcattctatcttcttcaacactctcaagtctcgtggattcgatctcgatttcaagttagctgaagattcgaagcttgcgcttcaacgatacggccagtacttgtacgatgggttgatcatcttcgccccatcaacagaacggtttggaggatccttggattcgaaatccattgctgattttgttgattccggtcgtgacttgatcttatcggcggatactgctgcatctgatttgattaggggtattgccacagagtgtggggttgatttcgatgaggattcttcagctatggttattgatcatactagcttctccgtctctgatgttgacggcgaccacaccttgattgctgccgacgatttagtgaaatccgatgtcattttgggaaaaaccaagattgaggctcccgtgctcttcagaggagttgcacattcgttgaaccctactaacaatctggttttgaaagttctttcagcctctccatcagcttattctgctaacccaagctcgaagttgtctagtcccccccagctcactgggtcttcaatttcgctagtctcggtcatgcaggtctgtctctcttctgccaggaacaatgctagggttgtgatctcaggctcagtgcagttgtttagcgataggttaatcagatctggtgtccagaaagcagggagtccgaaccaatacgaaaaatctggcaacgaacagtttgtgactgaactaagcaaatgggtcttccacgaaaggggccatctgaaggctggtaatcttgtacaccatagggttggagaaacagatgagccagctatatataggataaaggatgacctggaattttctgtagagatatatgagtggtcaggaaagagctgggagccgtatgttgctaacgatgtgcaggttcagttttacatgatgagcccgtatgtgttgaaaaccctgtcaacagacaagaagggtctgtttcatacatctttcaaggttcctgatgtctacggtgtattccagtttaaggttgaatatgaaaagctaggctacactacattatctctttcgaagcagattccggtgcggccttacagacacaatgagtatgagagatttatcccaactgcgtatccttattatggagcctgctttacgacgatggctggtttcttcgtcttcagcttcgtctacctctaccataagtag

SEQ ID NO: 7694 - protein, 442 aa, Arabidopsis thaliana
MVNLSRSVALISVFLLPLLSFSFSVDNPTDRRVLVLLDDLSLKSSHSIFFNTLKSRGFDLDFKLAEDSKLALQRYGQYLYDGLIIFAPSTERFGGSLDSKSIADFVDSGRDLILSADTAASDLIRGIATECGVDFDEDSSAMVIDHTSFSVSDVDGDHTLIAADDLVKSDVILGKTKIEAPVLFRGVAHSLNPTNNLVLKVLSASPSAYSANPSSKLSSPPQLTGSSISLVSVMQVCLSSARNNARVVISGSVQLFSDRLIRSGVQKAGSPNQYEKSGNEQFVTELSKWVFHERGHLKAGNLVHHRVGETDEPAIYRIKDDLEFSVEIYEWSGKSWEPYVANDVQVQFYMMSPYVLKTLSTDKKGLFHTSFKVPDVYGVFQFKVEYEKLGYTTLSLSKQIPVRPYRHNEYERFIPTAYPYYGACFTTMAGFFVFSFVYLYHK

SEQ ID NO: 7695 - DNA, 1308 bp, Brassica napus
  CDS (1)..(1308)
atgatgaacctctcgagatccgtcgcgttgatatccttattccttcttccgctgcttagcttctccttctccgtcgataatccgacggatcggcgtgttctcgttcttctcgacgatttatcactcaaatcctctcactccatcttcttcagcactctcaaatcccgtggattcgatctcgatttcaaattagcagatgactcgaagctcgcgcttcaacgatacggccagtacttgtacgacgggctcatcatcttcgccccgtccacagagcgatttggaggatccttggattcgaaatccatagctgatttcgttgattcgggtcgtgacttgatcttatcggcggatacttctgcttctgatctgattcgcgggattgctttagaatgtggggttgatttcgatgaggattcttcggctatggttattgatcattccagcttctccgtctctgacggcgaccacaccttgattgctgccgatgatttagttaagtccgatgccattttaggaaaaaccaagattgaggctcccgtgctcttcagaggtgttgcgcattcattgaaccctaccaacaatctggttttgaaagttctttcagcttctccatcagcttattctgctaacccgagctcgaagttgtcgagtcctccccagctcactgggtctgcaatttcgctagtgtcggtcatgcaggccaggaacaatgctagggttgtgatctctggctctttgcagttgtttagcgataggttgttcagatctggtgtccagaaagctgggagtccgaacaaatatgaaaaatctggcaacgaacagtttgcgactgaactaagcaaatgggtcttccacgaaagaggccacctgaaggctggtagtctggtacaccacagggttggagaaacagatgagccagcaatatataggataaaggatgacctggaattttcggtggagatactagagtggtcagggaagagctgggaaccgtatgtagctgatgatgtgcaggttcagttttacatgatgagcccatatgtgttgaaaaccttgtcaacagacaagaagggtatgtttcatacatctttcaaggttcctgatgtctatggtgtattccagtttaaggttgaatacggaaagctaggctacactacactatctctttcaaagcagattcctgtgaggccttacagacacaatgagtatgagagatttattccaactgcgtatccttattatggagcctgctttaccactatggctggtttctttgtcttcagcttcgtctacctctaccataagtag

SEQ ID NO: 7696 - protein, 435 aa, Brassica napus
MMNLSRSVALISLFLLPLLSFSFSVDNPTDRRVLVLLDDLSLKSSHSIFFSTLKSRGFDLDFKLADDSKLALQRYGQYLYDGLIIFAPSTERFGGSLDSKSIADFVDSGRDLILSADTSASDLIRGIALECGVDFDEDSSAMVIDHSSFSVSDGDHTLIAADDLVKSDAILGKTKIEAPVLFRGVAHSLNPTNNLVLKVLSASPSAYSANPSSKLSSPPQLTGSAISLVSVMQARNNARVVISGSLQLFSDRLFRSGVQKAGSPNKYEKSGNEQFATELSKWVFHERGHLKAGSLVHHRVGETDEPAIYRIKDDLEFSVEILEWSGKSWEPYVADDVQVQFYMMSPYVLKTLSTDKKGMFHTSFKVPDVYGVFQFKVEYGKLGYTTLSLSKQIPVRPYRHNEYERFIPTAYPYYGACFTTMAGFFVFSFVYLYHK

SEQ ID NO: 7697 - DNA, 1314 bp, Brassica napus
  CDS (1)..(1314)
atgatgaacctctcgagatccgtcgcgttgatatccttattccttcttccgctgcttagcttctccttctccgtcgataatccgacggatcggcgtgttctcgttcttctcgacgatttatcactcaaatcctctcactccatcttcttcagcactctcaaatcccgtggattcgatctcgatttcaaattagcagatgactcgaagctcgcgcttcaacgatacggccagtacttgtacgacgggctcatcatcttcgccccgtccacagagcgatttggaggatccttggattcgaaatccatagctgatttcgttgattcgggtcgtgacttgatcttatcggcggatacttctgcgtctgatctgattcgcgggattgccttagaatgtggggttgatttcgatgaggattcttcggctatggttattgatcattccagcttctctgtctctgatgttgacggagaccacaccttgattgctgcagacgatttagttaaatcccatgccattctaggaaaaaccaagattgaggctcctgtgctcttcagaggggttgcacattcattgaaccctaccaacaatctggttttgaaagttctttcagcttctccctcagcttattctgctaacccgagctcgaagttgtcgagtcccccccagctcactgggtctgctatttcgctagtgtcggtcatgcaggccaggaacaatgctagggttgtgatctcaggctcgttgcagttgtttagcgacaggttattaagatctggtgtccagaaagctgggagtccaaacaaatatgaaaaatctggcaacgaacagtttgtgactgaactaagcaaatgggtcttccacgaaagaggtcatcttaaggctggtagtcttgtacaccacagggttggagaaacagatgagccagcaatatataggataaaggatgacctggaattttctgtggagatactcgagtggtcagggaagagctgggaaccgtatgtagctgatgatctgcaggttcagttttacatgatgagcccatatgtgttgaaaaccttgtcaacagacaagaagggtatgtttcatacatctttcaaggttcctgatgtgtatggtgtattccagtttaaggttgaatacgaaaagctaggctacactacattatctctttcaaagcagattcctgtgaggccttacagacataatgagtatgagagatttattccaactgcgtatccttattatggagcctgttttaccactatggctggtttctttgtcttcagcttcgtctacctctaccataagtag

SEQ ID NO: 7698 - protein, 437 aa, Brassica napus
MMNLSRSVALISLFLLPLLSFSFSVDNPTDRRVLVLLDDLSLKSSHSIFFSTLKSRGFDLDFKLADDSKLALQRYGQYLYDGLIIFAPSTERFGGSLDSKSIADFVDSGRDLILSADTSASDLIRGIALECGVDFDEDSSAMVIDHSSFSVSDVDGDHTLIAADDLVKSHAILGKTKIEAPVLFRGVAHSLNPTNNLVLKVLSASPSAYSANPSSKLSSPPQLTGSAISLVSVMQARNNARVVISGSLQLFSDRLLRSGVQKAGSPNKYEKSGNEQFVTELSKWVFHERGHLKAGSLVHHRVGETDEPAIYRIKDDLEFSVEILEWSGKSWEPYVADDLQVQFYMMSPYVLKTLSTDKKGMFHTSFKVPDVYGVFQFKVEYEKLGYTTLSLSKQIPVRPYRHNEYERFIPTAYPYYGACFTTMAGFFVFSFVYLYHK

SEQ ID NO: 7699 - DNA, 1302 bp, Glycine max
  CDS (1)..(1302)
atgtcgaagctgatcttcgtgttccttgcactcattcctcttctctgcacctccttctccccagagagaccctcagatcgacgcgtcctcgttttgctcgatgacttcgccatcaaatcctctcattctctcttcttcaactccctcaaatctcgcggcttcgatctccaattccacctcgcagacgaccccaaaattgcgctccagagatacggccagtacctctacgacgccctaattctcttttcccccaccattgaacgttttggaggatccattgacgcggctgcaattttggattttgttgattcgggtcatgatttgatcgttgctgctgatagcaatgcatctgatttaatcagggaaatagccaccgagtgtggagtggactttgatgaggatcctgctgctgtggttgtggatcattcggcatatgcagtctctgctactgaaggagatcatacattgattgctagtgatgattttatcaagtctgacgtcatatttggaagcaaaaaaattgaggctccagtacttttccaggggattgggcattcactaaatcctaccaatagcctggtgttgaaagttctctctgcatctccttcagccttttctgctaacccaaaatctaaagtgacaagtcctccatcactcactggaacttcaatctcattagtttcaattatacaggcaagaaataatgcccggatattgatctctggctccttgagtttgttcagcaaccgatttttcacgtcaggtgtgcagaaggctgggagtccaaccaaacatgagaagtcaggtaatgagcagttcttgaatgaacttagcaaatggattttccatgaacgaggtcacctcaaggcggtgaatgtgcaacaccacaaagttggggaagctaatgaaccagccatctataggatcaatgataatttggaatactctgttgaagtttatgagtggtctgggacaacatgggaaccttatgtagctgatgatgttcaagtgcaattttacatgatgagcccctatgtcttgaagactttatcaactgacggcaagggccattatttcacatcatttaaggttccagatgtctatggggttttccaattcaaagttgagtacgaaaaacttggatatacaagcttatctttatcaaagcagattcctgttcgtccctttagacacaatgaatatgaaagatttataccagcagcttatccctattatggagcagcattttcaatgatggcaggcttcttcatcttcaccgcagttcatctatacagcaagtag

SEQ ID NO: 7700 - protein, 433 aa, Glycine max
MSKLIFVFLALIPLLCTSFSPERPSDRRVLVLLDDFAIKSSHSLFFNSLKSRGFDLQFHLADDPKIALQRYGQYLYDALILFSPTIERFGGSIDAAAILDFVDSGHDLIVAADSNASDLIREIATECGVDFDEDPAAVVVDHSAYAVSATEGDHTLIASDDFIKSDVIFGSKKIEAPVLFQGIGHSLNPTNSLVLKVLSASPSAFSANPKSKVTSPPSLTGTSISLVSIIQARNNARILISGSLSLFSNRFFTSGVQKAGSPTKHEKSGNEQFLNELSKWIFHERGHLKAVNVQHHKVGEANEPAIYRINDNLEYSVEVYEWSGTTWEPYVADDVQVQFYMMSPYVLKTLSTDGKGHYFTSFKVPDVYGVFQFKVEYEKLGYTSLSLSKQIPVRPFRHNEYERFIPAAYPYYGAAFSMMAGFFIFTAVHLYSK

SEQ ID NO: 7701 - DNA, 1302 bp, Glycine max
  CDS (1)..(1302)
atgtcgaagctgatcttcgtgttccttgcactcattcctcttctctgcacctccttctccccagagagaccctcagatcgacgcgtcctcgttttgctcgatgacttcgccatcaaatcctctcattctctcttcttcaactccctcaaatctcgcggcttcgatctccaattccacctcgcagacgaccccaaaattgcgctccagagatacggccagtacctctacgacgccctaattctcttttcccccaccattgaacgttttggaggatccattgacgcggctgcaattttggattttgttgattcgggtcatgatttgatcgttgctgctgatagcaatgcatctgatttaatcagggaaatagccaccgagtgtggagtggactttgatgaggatcctgctgctgtggttgtggatcattcggcatatgcagtctctgctactgaaggagatcatacattgattgctagtgatgattttatcaagtctgacgtcatatttggaagcaaaaaaattgaggctccagtacttttccaggggattgggcattcactaaatcctaccaatagcctggtgttgaaagttctctctgcatctccttcagccttttctgctaacccaaaatctaaagtgacaagtcctccatcactcactggaacttcaatctcattagtttcaattatacaggcaagaaataatgcccggatattgatctctggctcattgagcttgttcagcaaccgatttttcaggtcaggtgtgcagaaggctgggagtccaaccaaacatgagaagtcaggtaatgagcagttcttgaatgaacttagcaaatggattttccatgaacgaggtcacctcaaggcggtgaatgtgcaacaccacaaagttggggaagctaatgaaccagccatctataggatcaatgataatttggaatactctgttgaagtttatgagtggtctgggacaacatgggaaccttatgtagctgatgatgttcaagtgcaattttacatgatgagcccctatgtcttgaagactttatcaactgacggcaagggccattatttcacatcatttaaggttccagatgtctatggggttttccaattcaaagttgagtacgaaaaacttggatatacaagcttatctttatcaaagcagattcctgttcgtccctttagacacaatgaatatgaaagatttataccagcagcttatccctattatggagcagcattttcaatgatggcaggcttcttcatcttcaccgcagttcatctatacagcaagtag

SEQ ID NO: 7702 - protein, 433 aa, Glycine max
MSKLIFVFLALIPLLCTSFSPERPSDRRVLVLLDDFAIKSSHSLFFNSLKSRGFDLQFHLADDPKIALQRYGQYLYDALILFSPTIERFGGSIDAAAILDFVDSGHDLIVAADSNASDLIREIATECGVDFDEDPAAVVVDHSAYAVSATEGDHTLIASDDFIKSDVIFGSKKIEAPVLFQGIGHSLNPTNSLVLKVLSASPSAFSANPKSKVTSPPSLTGTSISLVSIIQARNNARILISGSLSLFSNRFFRSGVQKAGSPTKHEKSGNEQFLNELSKWIFHERGHLKAVNVQHHKVGEANEPAIYRINDNLEYSVEVYEWSGTTWEPYVADDVQVQFYMMSPYVLKTLSTDGKGHYFTSFKVPDVYGVFQFKVEYEKLGYTSLSLSKQIPVRPFRHNEYERFIPAAYPYYGAAFSMMAGFFIFTAVHLYSK

SEQ ID NO: 7703 - DNA, 1317 bp, Hordeum vulgare
  CDS (1)..(1317)
atggcggcgccgcgcgtcctcctcctcctcgccgccgcggccctcctctccgtctcctccctcggagacgcttcgggcgatggcccccgcgggcgcaagctgctggtgctcgtcgacgatctggccgtccgctcctcccactcggccttcttcggctcgctccaggcccgcgggctagatctggagttccgcctcgcggacgaccccaagctctcgctccaccgctacggtcagtacctctacgacggcctcgtcctcttcgccccgtcgaccccgcgctttggcggatcggtggaccagaacgctgttctggagttcatcgatgctgggcacgacatgattctggcagcagatcattcggcttctgatctgatccgcggcatcgcaaccgagtgtggggttgattttgatgaggacccggaagcgatggttattgaccacattaattatgcctccactgagtctgaaggggatcacaccttgattgctggcgatgatctgattcagtcagatgtgatattggggtccaaaaagattgaggctcctgtattgtttcgagggattggacatgcggccaatccatccaacagcttggttttgaaggttctatctgcctcgccgtcggcgtattcagcaaacccagggactaagttggcatccgttccatctctcacagggtcggccatatcactggtttctgttatgcaggctaggaacaatgctcgtgtgttgatatctggatcactggatttgtttagcaacaggttcctcaagtctggtgtgcagaaggcaggcagcaaaatgagccatgacaaagctggaaatgaacaatttgtgacagagacaagcaaatgggtcttccatgagaggggtcatctgaaggcagtgaatgtcaggcaccataaggttggggagacagatgaacctagcatgtaccgcatcaatgatgacttggaatactcagttgagatatacgaatggtctggaacaagctggaagccatatgttgccgatgatgttcagattcagtttttcatgatgagcccttacgttctgaaaaatatgtcaaccgacaaaactgctctatattcagcatccttcaaagttccggatgtttatggagttttccagttcaaagttgagtaccaaaggcttggatacactggcgtctctcttgcaaagcagattccagtgcggccatacaggcatgacgagtatgagaggttcataacttcagcgtttccatactatgctgcctcattttcaacaatgggagccttcttcatattctcagttgcgtacctgtatcacaaatag

SEQ ID NO: 7704 - protein, 438 aa, Hordeum vulgare
MAAPRVLLLLAAAALLSVSSLGDASGDGPRGRKLLVLVDDLAVRSSHSAFFGSLQARGLDLEFRLADDPKLSLHRYGQYLYDGLVLFAPSTPRFGGSVDQNAVLEFIDAGHDMILAADHSASDLIRGIATECGVDFDEDPEAMVIDHINYASTESEGDHTLIAGDDLIQSDVILGSKKIEAPVLFRGIGHAANPSNSLVLKVLSASPSAYSANPGTKLASVPSLTGSAISLVSVMQARNNARVLISGSLDLFSNRFLKSGVQKAGSKMSHDKAGNEQFVTETSKWVFHERGHLKAVNVRHHKVGETDEPSMYRINDDLEYSVEIYEWSGTSWKPYVADDVQIQFFMMSPYVLKNMSTDKTALYSASFKVPDVYGVFQFKVEYQRLGYTGVSLAKQIPVRPYRHDEYERFITSAFPYYAASFSTMGAFFIFSVAYLYHK

SEQ ID NO: 7705 - DNA, 1320 bp, Zea mays
  CDS (1)..(1320)
atggcgacgcggcgccacatcctcctcctcgccgctgccttcgtgtcccttctcgcgctcgaggctgtggagggcctcgaagaggggccccgcgggcgccggctgctggtcctgctggacgacctggccgtgcggtcgtcgcactcggccttcttcggctcgctccaggcgcgcgggttcgatctcgaattccgcctcgccgacgaccccaagctctcgctgcaccgctacggccagtacctctacgatggcctcgtgctgttcgccccctccaccccacgttttggtggatcagtggaccagaacgcagtccttgaatttattgatgctgggcatgacatgatcctggcggcagattcctctgcctctgatcttattcgtggcattgcgacagagtgtggggttgattttgatgaggatccagaggcaatggttattgaccacattaactatgccactatggatgttgaaggcgatcacaccttgattgttggtgatgatcttattcagtcagatgtcatactggggtctaaaaagatcgaggctcctgtattatttcgtggaattggacacacggctaatccatcaaacagtttggttatgaaagtcctatctgcctctccatcagcatactcagctaacccaaagactaagttatcgttgcctccatcgcttactgggtcagctatatcactggtttcggttatgcaggcaagaaataatgctcgggtgctgctatctggatcacttgatctttttagcaaccggttcctgaagtctggtgttcaaaaggctggtagcaaaacgagatacgagagagctggaaatgagcaattcgtgacagagacaagcaaatgggtcttccatgagagggggcaccttaaggctgttaatgttaagcaccacaaggttggggagaccaatgaaccaggcatgtaccgcattaacgatgacctggaatactctgttgagatctatgaatggtctggaacaagctggaagccatatgttgctgatgatgtgcaactccagtttttcatgatgagtccttatgttctgaaaactatgtcgaatgacaacaagggtttatactcaacatccttcaaagttcctgatgtctacggagttttccagttcaaagttgagtaccagaggctgggatatactggtttgtcttttacaaagcagattccagtgcgcccttacaggcataacgagtatgagaggttcataacatcagcgtacccatactacactgcctcattttcaacgatgtgtgctttcttcatattctcgcttgtgtacctgtaccacaaataa

SEQ ID NO: 7706 - protein, 439 aa, Zea mays
MATRRHILLLAAAFVSLLALEAVEGLEEGPRGRRLLVLLDDLAVRSSHSAFFGSLQARGFDLEFRLADDPKLSLHRYGQYLYDGLVLFAPSTPRFGGSVDQNAVLEFIDAGHDMILAADSSASDLIRGIATECGVDFDEDPEAMVIDHINYATMDVEGDHTLIVGDDLIQSDVILGSKKIEAPVLFRGIGHTANPSNSLVMKVLSASPSAYSANPKTKLSLPPSLTGSAISLVSVMQARNNARVLLSGSLDLFSNRFLKSGVQKAGSKTRYERAGNEQFVTETSKWVFHERGHLKAVNVKHHKVGETNEPGMYRINDDLEYSVEIYEWSGTSWKPYVADDVQLQFFMMSPYVLKTMSNDNKGLYSTSFKVPDVYGVFQFKVEYQRLGYTGLSFTKQIPVRPYRHNEYERFITSAYPYYTASFSTMCAFFIFSLVYLYHK

SEQ ID NO: 7707 - DNA, 1323 bp, Zea mays
  CDS (1)..(1323)
atggcgacgcggcgccacgtcctgctcctcctcgccgccgccttcgcgtccctcctcgcgctcgcggccgcggaagggggcgaagaggggccccgcgggcgccggctgctcgtcctcctggacgacctggccgtgcggtcgtcgcactcggccttcttcggctcgctccaggcgcgtgggttcgatctcgacttccgcctcgctgacgatcccaagctctcgctccaccgctacggccagtacctctacgacggcctcgtgctcttcgccccctccacaccacgttttggtggatcagtggaccagaacgcagtcctcgaatttattgatgctgggcatgacatgatcctggcggcagattcctctgcctctgatctcattcgtggcattgcaacagagtgtggggttgattttgatgaggatccagaggcaatggttattgaccatatgaactatgccgtcacagatgttgaaggtgatcacaccttgattgctggtgacgatcttatccattcggatgtgatactagggtctgaaaagattgaggctcctgtattgtttcgaggaattggacacatggctaatccatcaaacagtttggttctgaaggttctatcagcctctccatcagcatattcagctaatccaaagactaagttagcgtctcctccatcgctcactgggtcagctatatcattggtttcggttatgcaggcaagaaataatgctcgggtgctgttatctggatcactcgatctgtttagcaaccggttcctgaagtctggtgttcaaaaggctgatagcaaaacaagatatgagagagctggaaacgagcaatttgtggcagagataagcaaatgggttttccatgagaggggacatctaaaggctgttaatgttaggcatcacaaggttggggagaccaatgaaccaggcatgtaccgcattaatgatgacctggaatactctgttgagatctatgaatggtccggaacaagctggaagccgtatgttgctgatgatgtgcagcttcaatttttcatgatgagcccttacgttctgaaaactatgtcgactgacaacaagggtttgtattcaacaacctccaaagttccagatgtttatggagatttccagttcaaagttgaggaccaaagactgggatatactggcctgtcttttaaaaagcagattccagtacgtccttacagacataatgagtatgagagattcataacatcagcgtacccatactacaccgcctcattttcaacaatgggtgctttcttcgtattctcgtttgtgtacctgtaccacaaataa

SEQ ID NO: 7708 - protein, 440 aa, Zea mays
MATRRHVLLLLAAAFASLLALAAAEGGEEGPRGRRLLVLLDDLAVRSSHSAFFGSLQARGFDLDFRLADDPKLSLHRYGQYLYDGLVLFAPSTPRFGGSVDQNAVLEFIDAGHDMILAADSSASDLIRGIATECGVDFDEDPEAMVIDHMNYAVTDVEGDHTLIAGDDLIHSDVILGSEKIEAPVLFRGIGHMANPSNSLVLKVLSASPSAYSANPKTKLASPPSLTGSAISLVSVMQARNNARVLLSGSLDLFSNRFLKSGVQKADSKTRYERAGNEQFVAEISKWVFHERGHLKAVNVRHHKVGETNEPGMYRINDDLEYSVEIYEWSGTSWKPYVADDVQLQFFMMSPYVLKTMSTDNKGLYSTTSKVPDVYGDFQFKVEDQRLGYTGLSFKKQIPVRPYRHNEYERFITSAYPYYTASFSTMGAFFVFSFVYLYHK

SEQ ID NO: 7709 - DNA, 1323 bp, Zea mays
  CDS (1)..(1323)
atggcgacgcggtgccacgtcctgctcctcctcgccgccgccttcgcgtccctcctcgcgctcgtggccgcggaagggggcgaagaggggccccgcgggcgccggctgctcgtcctcctggacgacctggccgtgcggtcgtcgcactcggccttcttcggctcgctccaggcgcgtgggttcgatctcgacttccgcctcgctgacgatccaaagctctcgctccaccgctacggccagtacctctacgacggcctcgtgctcttcgccccctccacaccacgttttggtggatcagtggaccagaacgcagtcctcgaatttattgatgctgggcatgacatgatcctggcggcagattcctctgcctctgatctcattcgtggcattgcaacagagtgtggggttgattttgatgaggatccagaggcaatggttattgaccatatgaactatgccgtcacagatgttgaaggtgatcacaccttgattgctggtgacgatcttatccattcggatgtgatactagggtctgaaaagattgaggctcctgtattgtttcgaggaattggacacatggctaatccatcaaacagtttggttctgaaggttctatcagcctctccatcagcatattcagctaatccaaagactaagttagcgtctcctccatcgctcactgggtcagctatatcattggtttcggttatgcaggcaagaaataatgctcgggtgctgttatctggatcactcgatctgtttagcaaccggttcctgaagtctggtgttcaaaaggctgatagcaaaacaagatatgagagagctggaaacgagcaatttgtggcagagataagcaaatgggttttccatgagaggggacatctaaaggctgttaatgttaggcatcacaaggttggggagaccaatgaaccaggcatgtaccgcattaatgatgacctggaatactctgttgagatctatgaatggtccggaacaagctggaagccgtatgttgctgatgatgtgcagcttcaatttttcatgatgagcccttacgttctgaaaactatgtcgactgacaacaagggtttgtattcaacaaccttcaaagttccagatgtttatggagttttccagttcaaagttgagtaccaaagactgggatatactggtctgttttttacaaagcagattccagtacgtccttacagacataatgagtatgagagattcataacatcagcgtacccatactacaccgcctcattttcaacaatgggtgctttcttcgtattttcgtttgtgtacctgtaccacaaataa

SEQ ID NO: 7710 - protein, 440 aa, Zea mays
MATRCHVLLLLAAAFASLLALVAAEGGEEGPRGRRLLVLLDDLAVRSSHSAFFGSLQARGFDLDFRLADDPKLSLHRYGQYLYDGLVLFAPSTPRFGGSVDQNAVLEFIDAGHDMILAADSSASDLIRGIATECGVDFDEDPEAMVIDHMNYAVTDVEGDHTLIAGDDLIHSDVILGSEKIEAPVLFRGIGHMANPSNSLVLKVLSASPSAYSANPKTKLASPPSLTGSAISLVSVMQARNNARVLLSGSLDLFSNRFLKSGVQKADSKTRYERAGNEQFVAEISKWVFHERGHLKAVNVRHHKVGETNEPGMYRINDDLEYSVEIYEWSGTSWKPYVADDVQLQFFMMSPYVLKTMSTDNKGLYSTTFKVPDVYGVFQFKVEYQRLGYTGLFFTKQIPVRPYRHNEYERFITSAYPYYTASFSTMGAFFVFSFVYLYHK

SEQ ID NO: 7711 - DNA, 20 bp, Artificial sequence
  primer
atggcgagaagcaatttctc

SEQ ID NO: 7712 - DNA, 21 bp, Artificial sequence
  primer
tcacttgtggtacaggtaaac

SEQ ID NO: 7713 - protein, 586 aa, Artificial sequence
  consensus sequence
  Variant (3)..(3): Xaa in position 3 is any amino acid
  Variant (4)..(14): Xaa in position 4 to 14 is any or no amino acid
  Variant (16)..(22): Xaa in position 16 to 22 is any amino acid
  Variant (23)..(24): Xaa in position 23 to 24 is any or no amino acid
  Variant (26)..(26): Xaa in position 26 is any amino acid
  Variant (28)..(30): Xaa in position 28 to 30 is any amino acid
  Variant (32)..(33): Xaa in position 32 to 33 is any amino acid
  Variant (34)..(36): Xaa in position 34 to 36 is any or no amino acid
  Variant (39)..(40): Xaa in position 39 to 40 is any amino acid
  Variant (42)..(47): Xaa in position 42 to 47 is any amino acid
  Variant (49)..(50): Xaa in position 49 to 50 is any amino acid
  Variant (51)..(173): Xaa in position 51 to 173 is any or no amino acid
  Variant (175)..(175): Xaa in position 175 is any amino acid
  Variant (177)..(179): Xaa in position 177 to 179 is any amino acid
  Variant (181)..(183): Xaa in position 181 to 183 is any amino acid
  Variant (185)..(191): Xaa in position 185 to 191 is any amino acid
  Variant (193)..(196): Xaa in position 193 to 196 is any amino acid
  Variant (199)..(208): Xaa in position 199 to 208 is any amino acid
  Variant (210)..(212): Xaa in position 210 to 212 is any amino acid
  Variant (214)..(218): Xaa in position 214 to 218 is any amino acid
  Variant (220)..(232): Xaa in position 220 to 232 is any amino acid
  Variant (233)..(235): Xaa in position 233 to 235 is any or no amino acid
  Variant (237)..(237): Xaa in position 237 is any amino acid
  Variant (239)..(242): Xaa in position 239 to 242 is any amino acid
  Variant (244)..(259): Xaa in position 244 to 259 is any amino acid
  Variant (260)..(263): Xaa in position 260 to 263 is any or no amino acid
  Variant (265)..(287): Xaa in position 265 to 287 is any amino acid
  Variant (288)..(297): Xaa in position 288 to 297 is any or no amino acid
  Variant (299)..(305): Xaa in position 299 to 305 is any amino acid
  Variant (306)..(306): Xaa in position 306 is any or no amino acid
  Variant (308)..(308): Xaa in position 308 is any amino acid
  Variant (310)..(313): Xaa in position 310 to 313 is any amino acid
  Variant (315)..(315): Xaa in position 315 is any amino acid
  Variant (317)..(319): Xaa in position 317 to 319 is any amino acid
  Variant (323)..(324): Xaa in position 323 to 324 is any amino acid
  Variant (326)..(332): Xaa in position 326 to 332 is any amino acid
  Variant (333)..(336): Xaa in position 333 to 336 is any or no amino acid
  Variant (338)..(340): Xaa in position 338 to 340 is any amino acid
  Variant (342)..(345): Xaa in position 342 to 345 is any amino acid
  Variant (346)..(346): Xaa in position 346 is any or no amino acid
  Variant (348)..(351): Xaa in position 348 to 351 is any amino acid
  Variant (353)..(357): Xaa in position 353 to 357 is any amino acid
  Variant (364)..(367): Xaa in position 364 to 367 is any amino acid
  Variant (370)..(381): Xaa in position 370 to 381 is any amino acid
  Variant (383)..(387): Xaa in position 383 to 387 is any amino acid
  Variant (388)..(400): Xaa in position 388 to 400 is any or no amino acid
  Variant (403)..(411): Xaa in position 403 to 411 is any amino acid
  Variant (413)..(413): Xaa in position 413 is any amino acid
  Variant (415)..(415): Xaa in position 415 is any amino acid
  Variant (417)..(417): Xaa in position 417 is any amino acid
  Variant (419)..(419): Xaa in position 419 is any amino acid
  Variant (421)..(426): Xaa in position 421 to 426 is any amino acid
  Variant (428)..(438): Xaa in position 428 to 438 is any amino acid
  Variant (439)..(450): Xaa in position 439 to 450 is any or no amino acid
  Variant (452)..(452): Xaa in position 452 is any amino acid
  Variant (454)..(464): Xaa in position 454 to 464 is any amino acid
  Variant (466)..(477): Xaa in position 466 to 477 is any amino acid
  Variant (478)..(482): Xaa in position 478 to 482 is any or no amino acid
  Variant (484)..(484): Xaa in position 484 is any amino acid
  Variant (486)..(487): Xaa in position 486 to 487 is any amino acid
  Variant (489)..(492): Xaa in position 489 to 492 is any amino acid
  Variant (494)..(509): Xaa in position 494 to 509 is any amino acid
  Variant (510)..(515): Xaa in position 510 to 515 is any or no amino acid
  Variant (517)..(518): Xaa in position 517 to 518 is any amino acid
  Variant (521)..(522): Xaa in position 521 to 522 is any amino acid
  Variant (524)..(526): Xaa in position 524 to 526 is any amino acid
  Variant (528)..(528): Xaa in position 528 is any amino acid
  Variant (530)..(530): Xaa in position 530 is any amino acid
  Variant (532)..(532): Xaa in position 532 is any amino acid
  Variant (534)..(534): Xaa in position 534 is any amino acid
  Variant (536)..(536): Xaa in position 536 is any amino acid
  Variant (538)..(543): Xaa in position 538 to 543 is any amino acid
  Variant (545)..(546): Xaa in position 545 to 546 is any amino acid
  Variant (549)..(551): Xaa in position 549 to 551 is any amino acid
  Variant (553)..(554): Xaa in position 553 to 554 is any amino acid
  Variant (556)..(556): Xaa in position 556 is any amino acid
  Variant (558)..(559): Xaa in position 558 to 559 is any amino acid
  Variant (562)..(563): Xaa in position 562 to 563 is any amino acid
  Variant (565)..(565): Xaa in position 565 is any amino acid
  Variant (569)..(580): Xaa in position 569 to 580 is any amino acid
  Variant (582)..(585): Xaa in position 582 to 585 is any amino acid
LVXXXXXXXXXXXXLXXXXXXXXXSXFXXXLXXXXXRGXXLXXXXXXDXXXXXXXXXXXXXXXXXXXXXXXXXXXXXXXXXXXXXXXXXXXXXXXXXXXXXXXXXXXXXXXXXXXXXXXXXXXXXXXXXXXXXXXXXXXXXXXXXXXXXXXXXXXXXXXXXXXXXXXXXXXXXLXLXXXGXXXYXXXXXXXPXXXXFGXXXXXXXXXXFXXXGXXXXXAXXXXXXXXXXXXXXXXEXGXXXXEXXXXXXXXXXXXXXXXXXXXHXXXXXXXXXXXXXXXXXXXXXXXXXXXXXXXXXGXXXXXXXXNXLXXXXLXAXXXAYSXXPXXXXXXXXXXXPXXXGXXXXXLXXXXQXXXXXARNNARXXXXGSXXXXXXXXXXXXVXXXXXXXXXXXXXXXXXXGNXXXXXXXXXWXFXEXGXLXXXXXXHXXXXXXXXXXXXXXXXXXXXXXXYXIXXXXXXXXXXXEXXXXXXXXXXXXXXXXXDXQXXFXXXXPXXXXXXXXXXXXXXXXXXXXXXFXXPDXXGXXXFXVXYXRXGXTXXXXXXQXXVRXXXHXXYXRXXFIXXAXPYYXXXXXXXXXXXXFXXXXL

SEQ ID NO: 7714 - protein, 42 aa, Artificial sequence
  protein pattern
  Variant (3)..(4): Xaa in position 3 to 4 is any amino acid
  Variant (6)..(7): Xaa in position 6 to 7 is any amino acid
  Variant (8)..(8): Xaa in position 8 is Glu, His, Lys or Arg
  Variant (9)..(9): Xaa in position 9 is any amino acid
  Variant (10)..(10): Xaa in position 10 is Ala or Pro
  Variant (11)..(11): Xaa in position 11 is any amino acid
  Variant (12)..(12): Xaa in position 12 is Asp, Asn or Ser
  Variant (13)..(14): Xaa in position 13 to 14 is any amino acid
  Variant (15)..(15): Xaa in position 15 is Ile or Leu
  Variant (16)..(16): Xaa in position 16 is any amino acid
  Variant (17)..(17): Xaa in position 17 is Ile, Leu or Val
  Variant (18)..(20): Xaa in position 18 to 20 is any amino acid
  Variant (22)..(24): Xaa in position 22 to 24 is any amino acid
  Variant (25)..(25): Xaa in position 25 is Phe or Tyr
  Variant (26)..(27): Xaa in position 26 to 27 is any amino acid
  Variant (28)..(28): Xaa in position 28 is Ile, Leu, Met or Val
  Variant (29)..(29): Xaa in position 29 is Phe, Ile, Leu or Val
  Variant (30)..(30): Xaa in position 30 is Ile, Leu or Val
  Variant (31)..(31): Xaa in position 31 is Phe or Leu
  Variant (32)..(32): Xaa in position 32 is any amino acid
  Variant (33)..(33): Xaa in position 33 is Pro or Ser
  Variant (34)..(38): Xaa in position 34 to 38 is any amino acid
  Variant (40)..(40): Xaa in position 40 is Gly or Pro
  Variant (41)..(41): Xaa in position 41 is any amino acid
  Variant (42)..(42): Xaa in position 42 is Ile, Leu or Val
RGXXLXXXXXXXXXXXXXXXGXXXXXXXXXXXXXXXXXGXXX

SEQ ID NO: 7715 - protein, 26 aa, Artificial sequence
  protein pattern
  Variant (2)..(2): Xaa in position 2 is any amino acid
  Variant (3)..(3): Xaa in position 3 is any or no amino acid
  Variant (6)..(6): Xaa in position 6 is any or no amino acid
  Variant (8)..(11): Xaa in position 8 to 11 is any amino acid
  Variant (14)..(15): Xaa in position 14 to 15 is any amino acid
  Variant (16)..(16): Xaa in position 16 is Phe, Leu or Met
  Variant (17)..(17): Xaa in position 17 is Phe or Leu
  Variant (18)..(18): Xaa in position 18 is Ala, Glu, Gln or Ser
  Variant (19)..(19): Xaa in position 19 is Asp or Asn
  Variant (20)..(21): Xaa in position 20 to 21 is any amino acid
  Variant (22)..(22): Xaa in position 22 is Phe, Ile, Leu or Met
  Variant (23)..(25): Xaa in position 23 to 25 is any amino acid
  Variant (26)..(26): Xaa in position 26 is Ala, Ile or Val
AXXNAXRXXXXGSXXXXXXXXXXXXX

SEQ ID NO: 7716 - protein, 16 aa, Artificial sequence
  protein pattern
  Variant (2)..(2): Xaa in position 2 is Ile or Val
  Variant (3)..(3): Xaa in position 3 is Pro, Ser or Thr
  Variant (6)..(8): Xaa in position 6 to 8 is any amino acid
  Variant (10)..(10): Xaa in position 10 is any amino acid
  Variant (11)..(12): Xaa in position 11 to 12 is any or no amino acid
  Variant (14)..(15): Xaa in position 14 to 15 is any or no amino acid
QXXVRXXXHXXXEXXR

SEQ ID NO: 7717 - protein, 18 aa, Artificial sequence
  protein pattern
  Variant (2)..(3): Xaa in position 2 to 3 is any amino acid
  Variant (4)..(5): Xaa in position 4 to 5 is any or no amino acid
  Variant (7)..(7): Xaa in position 7 is any amino acid
  Variant (8)..(8): Xaa in position 8 is any or no amino acid
  Variant (10)..(10): Xaa in position 10 is Ile, Leu, Met or Val
  Variant (11)..(11): Xaa in position 11 is Glu or Gln
  Variant (13)..(14): Xaa in position 13 to 14 is any amino acid
  Variant (15)..(15): Xaa in position 15 is Ile, Leu, Met or Val
  Variant (16)..(16): Xaa in position 16 is Asp, Asn or Ser
  Variant (18)..(18): Xaa in position 18 is Phe, Trp or Tyr
PXXXXDXXQXXFXXXXPX

SEQ ID NO: 7718 - protein, 26 aa, Artificial sequence
  protein pattern
  Variant (2)..(5): Xaa in position 2 to 5 is any amino acid
  Variant (6)..(10): Xaa in position 6 to 10 is any or no amino acid
  Variant (12)..(12): Xaa in position 12 is any amino acid
  Variant (14)..(14): Xaa in position 14 is any amino acid
  Variant (16)..(16): Xaa in position 16 is any amino acid
  Variant (18)..(18): Xaa in position 18 is any amino acid
  Variant (19)..(19): Xaa in position 19 is Ile or Leu
  Variant (20)..(20): Xaa in position 20 is Lys or Arg
  Variant (21)..(21): Xaa in position 21 is Ala or Val
  Variant (22)..(23): Xaa in position 22 to 23 is any amino acid
  Variant (24)..(24): Xaa in position 24 is Ala, Ile, Leu or Val
  Variant (25)..(25): Xaa in position 25 is any amino acid
NXXXXXXXXXWXFXEXGXXXXXXXXH

SEQ ID NO: 7719 - protein, 23 aa, Artificial sequence
  protein pattern
  Variant (2)..(2): Xaa in position 2 is Phe, Trp or Tyr
  Variant (3)..(3): Xaa in position 3 is Pro or Val
  Variant (4)..(4): Xaa in position 4 is Trp or Tyr
  Variant (5)..(6): Xaa in position 5 to 6 is any amino acid
  Variant (7)..(7): Xaa in position 7 is Ala, Gly or Ser
  Variant (8)..(11): Xaa in position 8 to 11 is any amino acid
  Variant (12)..(12): Xaa in position 12 is Phe, Leu, Met or Val
  Variant (13)..(13): Xaa in position 13 is any amino acid
  Variant (14)..(14): Xaa in position 14 is Ala or Gly
  Variant (15)..(15): Xaa in position 15 is any amino acid
  Variant (16)..(16): Xaa in position 16 is Phe, Leu or Val
  Variant (17)..(17): Xaa in position 17 is any amino acid
  Variant (19)..(19): Xaa in position 19 is Ala, Cys, Gly, Ser, Thr or Val
  Variant (20)..(21): Xaa in position 20 to 21 is any amino acid
  Variant (22)..(22): Xaa in position 22 is Phe, His, Trp or Tyr
AXXXXXXXXXXXXXXXXFXXXXL

SEQ ID NO: 7720 - protein, 17 aa, Artificial sequence
  protein pattern
  Variant (2)..(2): Xaa in position 2 is Ala, Ile, Leu or Val
  Variant (3)..(4): Xaa in position 3 to 4 is any amino acid
  Variant (5)..(5): Xaa in position 5 is Ala, Ile, Leu or Val
  Variant (6)..(6): Xaa in position 6 is Leu or Val
  Variant (7)..(7): Xaa in position 7 is any amino acid
  Variant (9)..(9): Xaa in position 9 is Asp, Glu, Pro or Ser
  Variant (10)..(11): Xaa in position 10 to 11 is any amino acid
  Variant (15)..(16): Xaa in position 15 to 16 is any amino acid
  Variant (17)..(17): Xaa in position 17 is Ala, Pro, Thr or Val
LXXXXXXAXXXAYSXXX

SEQ ID NO: 7721 - DNA, 873 bp, Arabidopsis thaliana
  CDS (1)..(873)
atggcggagaaagatgcgacggcgagtggcgatgacgccattagagttagcggtatgcaattcgcatacgaagttgaggatccaatattcttcgacttcaacctcgatcttccagctggttctcgctgtcttctggttggtgccaatggatctggcaagacaaccttattgaagattctggctggaaagcatatggtgggaggaaagaacgttgtacaagttcttagccgctcggctttccatgatactcaacttgtttgcagtggtgacttgtcttaccttggaggatcatggagtaaaaccgttggttcagctggagaggttcctctccagggagatttctcagcagaacatatgatatttggagttgaaggaactgatcccgtgagaagagaaaaactgattgatcttcttgatatcaatcttcaatggcgtatgcataaggtttctgatgggcagaaacggcgcgtgcagatatgtatgggactcttacatccattcaaggtgttattactcgatgaggtcactgttgacctagacgtcgttgcaaggatggatttgctggaattcttcaaagaagaatgtgatcagagaggagctacaatcgtgtatgcaactcacatattcgacgggctagagacatgggcgacacatttggcctacattcaggacggtgagctgaatcgtttatcgaaaatgacagatattgaggagctgaaaacttcacccaacctcctctccgtggtagaatcttggctccgttctgaaatcaaactcgtgaagaagaagaagaagcctgtggcgccatggaaaccatctccattcgataactctccttttagatcatcgagacacatggcttattaccgatga

SEQ ID NO: 7722 - protein, 290 aa, Arabidopsis thaliana
MAEKDATASGDDAIRVSGMQFAYEVEDPIFFDFNLDLPAGSRCLLVGANGSGKTTLLKILAGKHMVGGKNVVQVLSRSAFHDTQLVCSGDLSYLGGSWSKTVGSAGEVPLQGDFSAEHMIFGVEGTDPVRREKLIDLLDINLQWRMHKVSDGQKRRVQICMGLLHPFKVLLLDEVTVDLDVVARMDLLEFFKEECDQRGATIVYATHIFDGLETWATHLAYIQDGELNRLSKMTDIEELKTSPNLLSVVESWLRSEIKLVKKKKKPVAPWKPSPFDNSPFRSSRHMAYYR

SEQ ID NO: 7723 - DNA, 879 bp, Oryza sativa
  CDS (1)..(879)
atggccggcggcgaggacgaagggtggaggaggagcggcatcgaggtgagcgcactgcagttcgactacgacgggcagccgccgctcttcgcgcggttcaatctccgcatcgcccccggctcacgatgcctcctcatcggcgcgaacggatcaggcaagaccactctcttgaagattcttgcggggaaacatatggttggaggaagagatgttgtccgtgttcttaatggttctgcttttcatgacacacagcttgtgtgcaacggtgacctttcctacttaggtggttcatggagtcgggctatcggttcagctggtgacgttcctctgcaaggcgacttctctgctgaacacatgatttttggagttgatggggttgatcctgttaggcgagagaagcttgttgatctactagatattgatctgcaatggcgcatgcataaagtctcagatggacaacgccgcagggtacaaatctgcatgggtcttcttcatccatacaaggtactcttgcttgatgaaatcaccgttgatcttgatgttgtgactagaatggatctccttgacttctttaaggaagagtgtgaacagagagaagcaaccattgtctatgccactcatatatttgatggattggaatcatgggctactgacattgcatacatccaagaaggtgaattgagaaaatcagcaaaatactctgacgttgaggagctaaagagtgccaaaaacttgctgtcagttgtcgagtcatggctgcgatctgagaccaaactccctaagaaagaacatccccgtcctgagacccagcccaggcgctcctctccatttgatgcttcaccgttccgatcttcacgccacatggcctactaccgttga

SEQ ID NO: 7724 - protein, 292 aa, Oryza sativa
MAGGEDEGWRRSGIEVSALQFDYDGQPPLFARFNLRIAPGSRCLLIGANGSGKTTLLKILAGKHMVGGRDVVRVLNGSAFHDTQLVCNGDLSYLGGSWSRAIGSAGDVPLQGDFSAEHMIFGVDGVDPVRREKLVDLLDIDLQWRMHKVSDGQRRRVQICMGLLHPYKVLLLDEITVDLDVVTRMDLLDFFKEECEQREATIVYATHIFDGLESWATDIAYIQEGELRKSAKYSDVEELKSAKNLLSVVESWLRSETKLPKKEHPRPETQPRRSSPFDASPFRSSRHMAYYR

SEQ ID NO: 7725 - DNA, 963 bp, Oryza sativa
  CDS (1)..(963)
atggcgccaacggtggagatcagccacctctccttcacctacccgggcatcgacggccgcccgccgcccggcgcgccgccgctcatcgaggacgtctgcttctccctcgacgccggccaccgctgcctcctcctcggctccaacggcgccggcaagacgacgatactgaagatactgggcgggaagcacatggtggatccgagcatggtgcgggtcctgggcaggtcggccttccacgacacggcgctcacatcatctggcgacctctgctacctaggcggtgagtggaggcgcgatgttgcctttgcgggctaccaggtaaatatacagatggacatttcagcagagaagatgatatttggtgttgtgggcgttgatcctcaaaggagagatgagcttatcaagattttggatattgaccttgcctggcgcatgcacaaggcatccgatggtcaaaggagacgggtccaaatttgcatggggcttctcaagccattcaaagttcttcttcttgatgagatcacagtagatctggatgtgttggcaagagcaaatctattgacatatttaaagaaggaatgcgaggaacggggtgctacaatcatctacgcaacacatatttttgacggacttgatgattggccaacacacattgtgtacattgcccgtgggaagttgcaactagcactgcctttagagaaggtgaaagaaatgagccagttatctctcatgagaacagtggagagctggctgaggaaagagagagatgaggataggcggagaagaaaggaacggaaggagaagggcctcccagagtttgacaaggttactgaggggagtcgggttataggtgatcccgctgccagagcggtgaacaatgggtgggcagcagggaggctcgcctcaacggttgctggtgaagagaatttcattttcagctctaacagcgttcttaggcaataa

SEQ ID NO: 7726 - protein, 320 aa, Oryza sativa
MAPTVEISHLSFTYPGIDGRPPPGAPPLIEDVCFSLDAGHRCLLLGSNGAGKTTILKILGGKHMVDPSMVRVLGRSAFHDTALTSSGDLCYLGGEWRRDVAFAGYQVNIQMDISAEKMIFGVVGVDPQRRDELIKILDIDLAWRMHKASDGQRRRVQICMGLLKPFKVLLLDEITVDLDVLARANLLTYLKKECEERGATIIYATHIFDGLDDWPTHIVYIARGKLQLALPLEKVKEMSQLSLMRTVESWLRKERDEDRRRRKERKEKGLPEFDKVTEGSRVIGDPAARAVNNGWAAGRLASTVAGEENFIFSSNSVLRQ

SEQ ID NO: 7727 - DNA, 1002 bp, Glycine max
  CDS (1)..(1002)
atggccggtaaagggacccattcagattcaaaagcagcaacaattgtgattaaggatctgagattcacataccccggcatcgacggccaccctccgccgggttccactcccctcattcaggatttcaatctcactctttcttccggccatcgctgcctcctcgtcggttccaacggcgccggaaagaccactctcctcaagatattaggagggaaacacttggtggagcctgacatggttcgcgtgctcggaagatcagcttttcacgacaccactctaatatcttctggtgatctctgttaccttggtggcgagtggaggcgagatgttgcttttgcgggttttgaggttccaatacaaatggacatatctgctcaaaaaatgatatttggtgtgcctgggattgatcctcaaagaagagccgagctaatcaaggtattagatatcgatctttcctggagattgcataaagtatctgatggtcaaagaagaagggtgcagatttgtatgggtctcctcaaaccattcaaggttcttcttctcgatgagataacagttgaccttgatgttctagcaagagctgaccttctgagatttctaagaaaggaatgtgacgagaggggtgccactattatctatgcaacacatatatttgacggcctcgaggattggccaacaaatattgtttatgtagcccatgggaagctgcaactagcaatgcctatggacaaagtcaaagaaattagcaaattatcactaatgagaacagtagaaagttggctgcggaaagaacgagatgaagatagaaagaaaaggaaagagagaaaagcagctggtcttcctgaatttggaaagcgagttgaggaaagccgtgtaacaggggatccagcgcgtgctgcagttcgagtaattaataatggttgggctgcaggacgattaacttccaccgttgctggtgaggaaaactttctcctgagctcaaaccgagtattgaggcagtag

SEQ ID NO: 7728 - protein, 333 aa, Glycine max
MAGKGTHSDSKAATIVIKDLRFTYPGIDGHPPPGSTPLIQDFNLTLSSGHRCLLVGSNGAGKTTLLKILGGKHLVEPDMVRVLGRSAFHDTTLISSGDLCYLGGEWRRDVAFAGFEVPIQMDISAQKMIFGVPGIDPQRRAELIKVLDIDLSWRLHKVSDGQRRRVQICMGLLKPFKVLLLDEITVDLDVLARADLLRFLRKECDERGATIIYATHIFDGLEDWPTNIVYVAHGKLQLAMPMDKVKEISKLSLMRTVESWLRKERDEDRKKRKERKAAGLPEFGKRVEESRVTGDPARAAVRVINNGWAAGRLTSTVAGEENFLLSSNRVLRQ

SEQ ID NO: 7729 - DNA, 852 bp, Glycine max
  CDS (1)..(852)
atggcggcagaaaacgaagattcctgcggaatccgcgtcaccggcatgcaattctcctacgacgtgcagcaaccgccgctcttcctcgacttcaacctcaacgtctctcccggatcccgctgcctcctcgtcggtgccaatggatccggaaagacgactttgctgaagattctggcggggaagcacatggttggaggaagagacgttgtgcgcgtcttgagtggttccgcttttcacgacactcagctcgtttgtagcggagatctcgcttatttgggcggatcttggagcaaaaacgttggctccgctggagaaattccgctccaaggagacttctctgctgaacatatgatctttggagttgagggtgctgatccagaaaggagagataagttaattgagctgcttgatattgatctacagtggcgaatgcataaggtatctgatgggcagcggcgtcgagtgcaaatctgtcttggtcttcttcatccgtacaaggttctcttgctggatgaggttactgtggatctggatgttgttactcggatggatttattggacttctttaaggaagaatgtgaacagagagaagctataatcgtatatgcaactcatatttttgatggactggagacatgggcaactcatttggcatacatacaagatggtgaactgagaagagcagaaaaaatatcaaatgttaaagagttgaaatcttcaactaatctgctgtctgttgttgaggcctggcttcgcgctgaaacaaagcttgaaaagaagaaccctgtccaaaagacttctgttgccagttctcctttcttttcatctagacacatggcatactatagatag

SEQ ID NO: 7730 - protein, 283 aa, Glycine max
MAAENEDSCGIRVTGMQFSYDVQQPPLFLDFNLNVSPGSRCLLVGANGSGKTTLLKILAGKHMVGGRDVVRVLSGSAFHDTQLVCSGDLAYLGGSWSKNVGSAGEIPLQGDFSAEHMIFGVEGADPERRDKLIELLDIDLQWRMHKVSDGQRRRVQICLGLLHPYKVLLLDEVTVDLDVVTRMDLLDFFKEECEQREAIIVYATHIFDGLETWATHLAYIQDGELRRAEKISNVKELKSSTNLLSVVEAWLRAETKLEKKNPVQKTSVASSPFFSSRHMAYYR

SEQ ID NO: 7731 - DNA, 852 bp, Brassica napus
  CDS (1)..(852)
atggcggagaaagatgcgatggccagaagcgacggtgcgattagggttagcggaatgcagttttcttacgatgtccaagatcctatcttcttcgatttcagcctccatctccccgccggatctcgctgcctcttggttggtgctaatggatctggcaagacgactttattgaagattttggcaggaaagcatatggttggagggaagaacattgtgcaagtcctgaatcgctctgcttttcacgacacagaccttgtctgtagtggtgacttgtcttaccttggaggctcatggagcaaaaccgctggttccgctggtgagattcctctccagggagatttctcagcagagcatatgatatttggagttgaagggattgatcctgtgagaagagagaaactgattgatcttcttgatatcaatcttaagtggcgtatgcataaggtttctgatgggcagagacgccgagtgcagatatgcatgggtcttttacatccattcaaggtattattactggacgaggtcactgtggacctagacgttgttgctaggatggatttgttggaattctttaaagaagaatgtgaacagagaggagctactattgtatatgcaactcatatttttgacggactagagacatgggctagtcatttggcctatatccatggaggagagctgaagctctctgctaaactgaaggagatcaaggatttagaaacatccccaaatctgctctctgtggttgaaaattggcttcggtctgaaaccaaagtggagaagaagactaagaagaaacctgttgccacgtctccatttatgtcatctagacaaatggcgtattaccgatga

SEQ ID NO: 7732 - protein, 283 aa, Brassica napus
MAEKDAMARSDGAIRVSGMQFSYDVQDPIFFDFSLHLPAGSRCLLVGANGSGKTTLLKILAGKHMVGGKNIVQVLNRSAFHDTDLVCSGDLSYLGGSWSKTAGSAGEIPLQGDFSAEHMIFGVEGIDPVRREKLIDLLDINLKWRMHKVSDGQRRRVQICMGLLHPFKVLLLDEVTVDLDVVARMDLLEFFKEECEQRGATIVYATHIFDGLETWASHLAYIHGGELKLSAKLKEIKDLETSPNLLSVVENWLRSETKVEKKTKKKPVATSPFMSSRQMAYYR

SEQ ID NO: 7733 - DNA, 876 bp, Brassica napus
  CDS (1)..(876)
atggcagcgaaagatcaggcgacgaccagtgatgatgccattagagttagcggtatggagttttcttatgaagcggaggatcctatattcttcgatttcaacctcgatcttccagcaggatctcgctgccttcttgttggcgccaatggatctggcaagacaaccttgttgaagattctggctggaaagcatatggttggaggaaagaacgttgtacaagttctaagccgctctgctttccatgatactcaacttgtttgcagtggtgacttgtcttaccttggaggatcttggagtaaaaccattggttcggctggtgaggttcctcttcagggagacttttcagcagaacatatgatatttggagttgaaggaatcgatccggtgagaagagataaactgattgatcttcttgacatcaaccttcagtggcgtatgcataaggtttctgatgggcaaaaacgccgagttcagatatgcatgggactcttacatccattcaaggtgttgttacttgacgaggtaactgttgaccttgatgttgttgcaaggatggatttgctggaattcttcaaagaagaatgtgatcagagaggagctacaattgtatatgcaactcatatattcgacgggctagagacatgggctacacatttggcttacattcagaacggtgagctgaatcgttcatcaaaaatggcagacatcagcgagatgaaaacttcacccaacctcctctccgtggtagaatcttggctccgttctgaaaccaaaatttacaagaaaaagaagaaggagcctgtggcagcatggaaaccaactccatttgataactctccttttaggtcatctagacacatggcttactaccgatga

SEQ ID NO: 7734 - protein, 291 aa, Brassica napus
MAAKDQATTSDDAIRVSGMEFSYEAEDPIFFDFNLDLPAGSRCLLVGANGSGKTTLLKILAGKHMVGGKNVVQVLSRSAFHDTQLVCSGDLSYLGGSWSKTIGSAGEVPLQGDFSAEHMIFGVEGIDPVRRDKLIDLLDINLQWRMHKVSDGQKRRVQICMGLLHPFKVLLLDEVTVDLDVVARMDLLEFFKEECDQRGATIVYATHIFDGLETWATHLAYIQNGELNRSSKMADISEMKTSPNLLSVVESWLRSETKIYKKKKKEPVAAWKPTPFDNSPFRSSRHMAYYR

SEQ ID NO: 7735 - DNA, 849 bp, Arabidopsis thaliana
  CDS (1)..(849)
  misc_feature (792)..(792): s is g or c
atggcggagaaaaatgcgagcgcggtggacggtgcaattagggttagtggaatgcagttttcttacgatgttcaagatcctattttcttcgattttaatctcgatcttcccgctggatctcgttgcctcttggttggtgccaatggatctgggaaaaccacattattgaagattttggctggaaagcatatggttggaggaaagaatgttgtacaagtgctggatcgctcagcatttcatgatacagagcttgtttgtagtggtgatttgtcttaccttggaggatcatggagtaaaactgctggttctgctggtgatattccacttcaaggagacttctcagcagaacatatgatatttggagttgaagggattgatcctttcagaagagagaaattgattgatcttcttgatatcaatcttcaatggcgtatgcataaggtttctgatggacagagacgtcgagtgcaaatatgtatgggtcttttacatccattcaaggtgttactactggatgaggttactgttgacctcgacgttgttgctaggatggatttgttggagttctttaaagaagaatgtgaacagagaggagctacaattgtatatgcaactcatattttcgacgggctcgagacatgggctagtcatctggcttatattaatggaggagagctgaaactctcggccaaattagatgagatcaaggatctcaagacctcaccaaatctgctctctgttgttgaagcttggctccggtctgaaaccaaagttgagaaaaagacgaagaasaaacctgttgttacctctccatttatgtcgtctagacaaatggcatattaccgatga

SEQ ID NO: 7736 - protein, 282 aa, Arabidopsis thaliana
  misc_feature (264)..(264): The Xaa at location 264 stands for Asn, or Lys.
MAEKNASAVDGAIRVSGMQFSYDVQDPIFFDFNLDLPAGSRCLLVGANGSGKTTLLKILAGKHMVGGKNVVQVLDRSAFHDTELVCSGDLSYLGGSWSKTAGSAGDIPLQGDFSAEHMIFGVEGIDPFRREKLIDLLDINLQWRMHKVSDGQRRRVQICMGLLHPFKVLLLDEVTVDLDVVARMDLLEFFKEECEQRGATIVYATHIFDGLETWASHLAYINGGELKLSAKLDEIKDLKTSPNLLSVVEAWLRSETKVEKKTKXKPVVTSPFMSSRQMAYYR

SEQ ID NO: 7737 - DNA, 972 bp, Zea mays
  CDS (1)..(972)
atggcgccaacggttgagatcagccacctcaccttcacctaccccggcatcgacggccgcccgccacccggcgcgccaccgctcatcgaggacgtctgcttctccctcgacgccggccaacgatgcctcctcctcggctccaacggcgcaggcaagacgacgatactgaagatactaggcgggaagcacatggtggatccgagcatggtgcgggtcctgggaaggtccgccttccacgacacggcactcacctcctccggcgacctctcctatctcggcggtgagtggagacgcgacgtggcctttgctggctaccaggtgaacattcagatggatatatcggcagagaagatgatttttggtattgctggtgttgatccaaagaggagagacgagcttatcaagattttagacatcgacctcacctggcgcatgcacaaggcatcagatggtcagaggagacgtgtccagatttgcatgggacttcttaagtcattcaaggttcttcttcttgatgagatcacagttgatcttgatgttctggcaagatcaaatctgttatcgtatcttaaaaaggaatgtgaggaaagaggtgcaacaatcatctatgccacacatatttttgatggtcttgatgattggccaacacacattgtttacattgctcatgggaaactgcaattagcagtgcctttggaaaaggtgaaagaaatgagtcagttatctctcatgaggactgtggagagctggttgaggaaagaaagaaatgaggacaggaggaggagaaaggagcgaaaggagaaaggcctcccagaattcgacaaggttgtcgagggtagtcgggttataggtgatccagcaaagaacgcagacagagttataaacaacgggtgggcagctggacggcttacctcgacgattgcaggagaggaaaatttcgtcttcagctctaacagcgtacttaggcaatga

SEQ ID NO: 7738 - protein, 323 aa, Zea mays
MAPTVEISHLTFTYPGIDGRPPPGAPPLIEDVCFSLDAGQRCLLLGSNGAGKTTILKILGGKHMVDPSMVRVLGRSAFHDTALTSSGDLSYLGGEWRRDVAFAGYQVNIQMDISAEKMIFGIAGVDPKRRDELIKILDIDLTWRMHKASDGQRRRVQICMGLLKSFKVLLLDEITVDLDVLARSNLLSYLKKECEERGATIIYATHIFDGLDDWPTHIVYIAHGKLQLAVPLEKVKEMSQLSLMRTVESWLRKERNEDRRRRKERKEKGLPEFDKVVEGSRVIGDPAKNADRVINNGWAAGRLTSTIAGEENFVFSSNSVLRQ

SEQ ID NO: 7739 - DNA, 888 bp, Zea mays
  CDS (1)..(888)
atggccggcgaagggaatggggatgaagggtggaggcggagcggcatcgaggtcagcgccctgcagttcggctacgacgggcagccgccgctcttcgcgcgcttcaacctctgcgtcgcacccggctcccgctgcctcctcgtcggcgccaacggatcaggcaagaccacactcttgaagattcttgcgggaaagcatatggttggaggaagagatgtggtccgtgtcctcaatggttccgcttttcatgatacacagctagtgtgcaatggtgacctttcgtacttgggtggttcttggagccgtactattggttcagctggggatgttccactgcaaggcgacttctctgctgagcacatgatttttggagttgatggggttgatcctgtcaggcgagagaagctggttgatctgctagacattgatctgcagtggcgcatgcataaagtttcagatgggcagcgccgcagggtgcaaatctgcatgggtcttcttcatccatacaaggtgcttttgctcgatgagatcacggttgatctggacgtggtgaccaggatggacctgcttggtttcttcaaggaagagtgcgagcagagggaagctaccatcgtgtacgccacccatatatttgacggactcgagacgtgggctaccgactttgcgtacatccaagaaggcgagctgagaaggtccgggagatactccgacatcgaggagctaaggagcgccaagaacttgctgtcggtagtcgagtcgtggctgaggtcagagaccaaactcccgaagaaggaacccccaccacgtcctgagacccaggccaggcgttcctcgccgttcgatgcttctcctttccgttcgtcacgccacatggcctactaccgttga

SEQ ID NO: 7740 - protein, 295 aa, Zea mays
MAGEGNGDEGWRRSGIEVSALQFGYDGQPPLFARFNLCVAPGSRCLLVGANGSGKTTLLKILAGKHMVGGRDVVRVLNGSAFHDTQLVCNGDLSYLGGSWSRTIGSAGDVPLQGDFSAEHMIFGVDGVDPVRREKLVDLLDIDLQWRMHKVSDGQRRRVQICMGLLHPYKVLLLDEITVDLDVVTRMDLLGFFKEECEQREATIVYATHIFDGLETWATDFAYIQEGELRRSGRYSDIEELRSAKNLLSVVESWLRSETKLPKKEPPPRPETQARRSSPFDASPFRSSRHMAYYR

SEQ ID NO: 7741 - DNA, 870 bp, Saccharomyces cerevisiae
  CDS (1)..(870)
atggtttcccaatttgctattgaggtgcgtaacctaacgtacaaattcaaagaaagctccgatccgtcagttgttgatatcaatcttcaaatcccatggaatacaagatctttagttgtgggtgccaatggtgctggtaaatccacccttttgaaattactaagcggtaagcatctttgccttgatggaaaaatcctggtcaatggtcttgatccattcagtccattatctatgaatcaagtggacgatgatgaaagtgttgaagattcgacgaactaccaaacgaccacttatctaggtacggaatggtgccatatgagtatcattaatagggatatcggcgtcttggaactattaaaaagtattggattcgatcattttagggaaagaggtgaaagattggttagaatcctggacatcgatgtacgttggagaatgcacaggttaagtgatggacaaaagagaagagttcagttagccatggggctcttgaaaccttggagagttttactacttgatgaggtcactgtggatctcgatgttattgccagagcaagacttctggagtttttaaagtgggagaccgaaaccagaagatgctcagtggtctacgctacacatatttttgacggcttggccaaatggcctaaccaagtataccatatgaaatcaggtaagattgtggataatttagattatcagaaagacgtagagttctctgaagtggtcaatgctaaagttaatggacaagtggcctttgaaaatgacaacaataaggttgttattagtaaagtgaatagtttgcatccattagcactagaatggttgaaacgtgataatcaaattcctgacaaagagattggtatataa

SEQ ID NO: 7742 - protein, 289 aa, Saccharomyces cerevisiae
MVSQFAIEVRNLTYKFKESSDPSVVDINLQIPWNTRSLVVGANGAGKSTLLKLLSGKHLCLDGKILVNGLDPFSPLSMNQVDDDESVEDSTNYQTTTYLGTEWCHMSIINRDIGVLELLKSIGFDHFRERGERLVRILDIDVRWRMHRLSDGQKRRVQLAMGLLKPWRVLLLDEVTVDLDVIARARLLEFLKWETETRRCSVVYATHIFDGLAKWPNQVYHMKSGKIVDNLDYQKDVEFSEVVNAKVNGQVAFENDNNKVVISKVNSLHPLALEWLKRDNQIPDKEIGI

SEQ ID NO: 7743 - DNA, 987 bp, Arabidopsis thaliana
  CDS (1)..(987)
atggcggtgacggaggaggagaagaagcggaattcaacggttgagatctccggattacgtttcacgtatcctggaatcgacggtcatccaccaccgggatcgaaaccacttattgaagatttctcaatcacgcttaattccagcgatcggtgtctcctcgtcggatctaatggcgctgggaaaacgacgattctgaagatattgggagggaaacacatggtggagccgcatatggttagggttctgggtcgctcggcgtttcatgatactggattgacctcttctggtgatctctgttatctcggtggcgagtggaggcgtgatgttgcatttgcaggatttgaagttccgatacaaatggacatttcggcggagaagatgatatttggagtggctggtattgatcctcagagaagagatgagttgatcaaggtgttggatatcgacatctcatggagactgcacaaggtatccgatggccaaagaagacgtgtacagatctgtatgggactcctgaagccattcaaggttctccttttggatgaaataactgttgatcttgacgttctcgctagagcagaccttttgaagtttctgagaaaggaatgtgaagaacgaggagcaaccataatctacgctactcatatattcgatggcttagaggactggccaacacacattgtgtatgtagcaaacggaaaattgcagttagcattgccaatggagaaagtgaaggagacaagcaagaagtcattgatgagaacagttgagagttggctgaggaaagaaagagatgaagagagaaagagaaggaaagagaggaaagctaatgggcttccagagtttgaaacacggactgaagaaagccgtgtgactggtgatccagcacggatgctgaacaatggctgggctgccgggagacttcactctacggttgcaggtggtgaggataatttcgtcttaagctcaaacagagttctaagataa

SEQ ID NO: 7744 - protein, 328 aa, Arabidopsis thaliana
MAVTEEEKKRNSTVEISGLRFTYPGIDGHPPPGSKPLIEDFSITLNSSDRCLLVGSNGAGKTTILKILGGKHMVEPHMVRVLGRSAFHDTGLTSSGDLCYLGGEWRRDVAFAGFEVPIQMDISAEKMIFGVAGIDPQRRDELIKVLDIDISWRLHKVSDGQRRRVQICMGLLKPFKVLLLDEITVDLDVLARADLLKFLRKECEERGATIIYATHIFDGLEDWPTHIVYVANGKLQLALPMEKVKETSKKSLMRTVESWLRKERDEERKRRKERKANGLPEFETRTEESRVTGDPARMLNNGWAAGRLHSTVAGGEDNFVLSSNRVLR

SEQ ID NO: 7745 - DNA, 849 bp, Arabidopsis thaliana
  CDS (1)..(849)
atggcggagaaaaatgcgagcgcggtggacggtgcaattagggttagtggaatgcagttttcttacgatgttcaagatcctattttcttcgattttaatctcgatcttcccgctggatctcgttgcctcttggttggtgccaatggatctgggaaaactacgttattgaagattcttgctggaaaacatatggttggaggaaagaatgttgtacaagtgcttgatcgctcagcatttcatgatacagagcttgtttgtagtggtgatttgtcttacctaggaggatcatggagtaaaactgctggttctgctggtgatattccactccaaggagacttctcagcagaacatatgatatttggagttgaagggattgatcctttcagaagagagaagttgattgatcttcttgatatcaatcttcaatggcgtatgcataaggtttctgatgggcagagacgtcgagtgcaaatatgtatgggtctattacatccgttcaaggtattactactggatgaagttactgttgacctcgacgttgttgctaggatggatttgttggagttctttaaagaagaatgtgaacagagaggagctacaattgtatatgcaactcatattttcgacgggctcgagacatgggctagtcatttggcttacattaatggaggagagctgaaactctcggccaagttagatgagatcaaggatctcaaaacctcaccaaatctgctatctgttgttgaagcttggctccggtctgaaaccaaagttgagaaaaagacgaagaagaaacctgttgttacctctccatttatgtcgtctagacaaatggcatattaccgatga

SEQ ID NO: 7746 - protein, 282 aa, Arabidopsis thaliana
MAEKNASAVDGAIRVSGMQFSYDVQDPIFFDFNLDLPAGSRCLLVGANGSGKTTLLKILAGKHMVGGKNVVQVLDRSAFHDTELVCSGDLSYLGGSWSKTAGSAGDIPLQGDFSAEHMIFGVEGIDPFRREKLIDLLDINLQWRMHKVSDGQRRRVQICMGLLHPFKVLLLDEVTVDLDVVARMDLLEFFKEECEQRGATIVYATHIFDGLETWASHLAYINGGELKLSAKLDEIKDLKTSPNLLSVVEAWLRSETKVEKKTKKKPVVTSPFMSSRQMAYYR

SEQ ID NO: 7747 - DNA, 813 bp, Ashbya gossypii ATCC 10895
  CDS (1)..(813)
atggacaccagccaagcagtggaggttacaggcctcagctacaagttcccacacgccgaggaggagtcgctcacagacgtgaacctggtgttgccgtggcgcaagcgcatgctgctctgcggctccaacggcgccggcaaatccacgctgctcaagttgctcagtggcaagcatctgtgccgcagcggtaatatccgcgtcgacggccgcgacccgtttgctcccgctaacacggccgatcccgcggatgtcatggtcactgcataccttggtaccgagtggtgccacatggccatagtgcaccgcgacatcggcgtgcaggaactgcttgacagcatcggcctgcagcacttccgcgagcgcggcacagagctgttgcgtatcctcgacgtcgacctccgctggcgcatgcaccgcctcagcgacggccagaagcgccgcgtccagctttgcatgggcctgctcaagcccttcaagctgctgctgctcgacgaggttactgtcgacctcgacgtggtcgcccgcaccaagctgctgcactttctccgcctggagaccgagcgccgcgagtgcagcattatttacgctacccatattttcgacggtttggctgattggccggaccgcgttgtccacatcgcccacggccgtgtgttggccgacctcgatgtcgcccgcgatgtcagttttgccgcagaccgcaccgacgtcgtcgaagccgccggacgtgtccgtatcgggcacgtacgcagcctgcatccgctggcactagcatggctcgcccgtgacgagggcaagatggcctccgagtaa

SEQ ID NO: 7748 - protein, 270 aa, Ashbya gossypii ATCC 10895
MDTSQAVEVTGLSYKFPHAEEESLTDVNLVLPWRKRMLLCGSNGAGKSTLLKLLSGKHLCRSGNIRVDGRDPFAPANTADPADVMVTAYLGTEWCHMAIVHRDIGVQELLDSIGLQHFRERGTELLRILDVDLRWRMHRLSDGQKRRVQLCMGLLKPFKLLLLDEVTVDLDVVARTKLLHFLRLETERRECSIIYATHIFDGLADWPDRVVHIAHGRVLADLDVARDVSFAADRTDVVEAAGRVRIGHVRSLHPLALAWLARDEGKMASE

SEQ ID NO: 7749 - DNA, 831 bp, Aspergillus terreus NIH2624
  CDS (1)..(831)
atggcctcttcggcgccctcaatccaagtaaagaatctcacatatgcattccaggacgggacttctggattgtcaaacgtgactctggacgtacccccaggaagtcgtaccctactcattggagccaatggcgcggggaaaacgacgctcctacgactcctcgccggcaaacgcctggcgcccaatgacaccatctccgtcggcggcaaagaccccttcaaggacggcctggaaggcgtgacgtatctaggcgtggagtgggttctcaacagcatcgtgcgaacggacatcgacgtcccgacgctgctcgcctcagtcggcggcaacgcctacccggagcgccgggacgagctcgtcgacatcctagacatcgacctgaactggcgcatgcacgccgtgtcggacggcgaacggcgccgtgtccagctcgccatgggcctcctccggccgtggcaggttctccttctcgacgagatcaccgtcgacctcgacctgctctcgcggagcaatttcctggccttcctgaagcgggagaccgagacgcggccgtgctctattgtctatgcgacgcatatcctggacaacttgacgcactggccgacgcatctggtgcatatgcatcttggctcggtgcggcagtggggtccgtttgagaagttccggcaagaggtgaacgaaacgtcggagaatagccagcttggtgagctggtgcttaagtggctcaaagaggatctggatgctagagggccgcgaaacggacgcagtagcgaaggcaagacttacgagtctctcgagggcaagggtggatatggtttcgaaaagagaaactga

SEQ ID NO: 7750 - protein, 276 aa, Aspergillus terreus NIH2624
MASSAPSIQVKNLTYAFQDGTSGLSNVTLDVPPGSRTLLIGANGAGKTTLLRLLAGKRLAPNDTISVGGKDPFKDGLEGVTYLGVEWVLNSIVRTDIDVPTLLASVGGNAYPERRDELVDILDIDLNWRMHAVSDGERRRVQLAMGLLRPWQVLLLDEITVDLDLLSRSNFLAFLKRETETRPCSIVYATHILDNLTHWPTHLVHMHLGSVRQWGPFEKFRQEVNETSENSQLGELVLKWLKEDLDARGPRNGRSSEGKTYESLEGKGGYGFEKRN

SEQ ID NO: 7751 - DNA, 900 bp, Chaetomium globosum CBS 148.51
  CDS (1)..(900)
atggcccaaccatcccaacccacccccccggcccccaccatcgaaaccaacgacctcacctacaccttccaagactactccaccggcatctcccacatcactttatccctgccctcccgctcgcgcaccctgctcatcggcgccaacggcgccggcaaaaccaccctgctgcgcctgctcgcgggcaagcggctcgcgccctcgagcaccatccgcgtgggcggcgtggacccgttcaaggagacggtcgagggggtgacctacctcgggctggagtgggtgctgaacgcgatcgtgcggacggatatcggggtgggggagctgttgcgcagtgtggggggcgatgtgtacgcgcagaggagggatgagttggtcgcggtgctggatattgatttggagtggcggatgcatgcggtgtcggatggggagcggaggagggtgcagttggcgatggggttgatcaggccgtggagggtgttgttgctggatgagattacggtggatttggatgtgtggagcagggcgcagtttttggggtttttgaggcgggagacggagaccagggagtgtacggtcgtgtatgcgacgcatattttggataatttggccgggtggccgactcatttggtgcatatgcatctggggacggtgaaggcgtgggggagggcggaggagatgttgaaggcggtagaggagaaggatcccgaggagggggatgggatcgtggggatggtggggaatagcaagttgggggagttggtgttgcggtggttgagggatgatttgcgggaacggggccccaggagccagaataagcgcgggccggagggctggtcgtatagtgtgacgggtttgggggggtatgggttcgagcccaagggagggaaggaggacgcttga

SEQ ID NO: 7752 - protein, 299 aa, Chaetomium globosum CBS 148.51
MAQPSQPTPPAPTIETNDLTYTFQDYSTGISHITLSLPSRSRTLLIGANGAGKTTLLRLLAGKRLAPSSTIRVGGVDPFKETVEGVTYLGLEWVLNAIVRTDIGVGELLRSVGGDVYAQRRDELVAVLDIDLEWRMHAVSDGERRRVQLAMGLIRPWRVLLLDEITVDLDVWSRAQFLGFLRRETETRECTVVYATHILDNLAGWPTHLVHMHLGTVKAWGRAEEMLKAVEEKDPEEGDGIVGMVGNSKLGELVLRWLRDDLRERGPRSQNKRGPEGWSYSVTGLGGYGFEPKGGKEDA

SEQ ID NO: 7753 - DNA, 813 bp, Coccidioides immitis RS
  CDS (1)..(813)
atggcgtcagccactccggattcatccgttcacgttcacgacctcaactacagctttcccgacggcacagctggtcttacaaacatcaatcttgacctccctctgggaagccgtaccttgctaattggagcgaatggtgcgggcaaaagcactctcctccgtctcctctcaggaaaacgtctcgctccagctaataccataactgtcggtggtgtcgatccttttaaggaggggcttgaaggcgtcacatatctcggggtggaatgggtcctgaaccctatcgtccgcacagacattgatgttcccaccctcctcgcctccgtcggaggcgaccactaccctgaacgtcgcgatgaattggtcgagattctcgacgtagatctatcatggcatatgcacgctgtttctgacggtgaacggcgccgtgttcagctcgccatgggtctactgcggccatggaatctgctcctgctggatgaaattactgttgatctagacctactcagtcgggccaatttcctggcatttttgcgaagggagacggaaatccgaccgtgcactatcttgtatgccactcacatcttggataaccttgcaaattggcccactcatcttgtgcacatgcatatgggccaagtacgagactggggtgctattgaaaagttttacgccggaaaaccaagagtgtctgagaatagtcaacttggtgagttggttctagaatggctgaagaaggatttaaaagaaagagggccgcgacccggaaggccgagtgagagtaaagtggaaccaggatataacatggaaatatag

SEQ ID NO: 7754 - protein, 270 aa, Coccidioides immitis RS
MASATPDSSVHVHDLNYSFPDGTAGLTNINLDLPLGSRTLLIGANGAGKSTLLRLLSGKRLAPANTITVGGVDPFKEGLEGVTYLGVEWVLNPIVRTDIDVPTLLASVGGDHYPERRDELVEILDVDLSWHMHAVSDGERRRVQLAMGLLRPWNLLLLDEITVDLDLLSRANFLAFLRRETEIRPCTILYATHILDNLANWPTHLVHMHMGQVRDWGAIEKFYAGKPRVSENSQLGELVLEWLKKDLKERGPRPGRPSESKVEPGYNMEI

SEQ ID NO: 7755 - DNA, 843 bp, Neosartorya fischeri NRRL 181
  CDS (1)..(843)
atggcagactcagacaatcaaacgggtccttcaatcagtgtgaatggcctgaattataagttccaggatggttcctcaggcttgacgaacgtgtctctcagtctcccggcagggagccggacattgctcattggagcaaatggtgccggcaagaccactctcctgcgcttgctggcaggcaagcgcttggccccaacagacacaatttctgtttctggcagggaccccttcaagcacggcctcgaaggggtgacttacctaggtgtcgagtgggttctgaacagcattgtccggacggacatcgacgtcccgacgcttctcgcatctgtgggcggagacgcctatcccgagcgcagggatgagctagttgagattctcgacattgacctccggtggcgtatgcacgccgtgtcggacggtgagcgccgccgtgtgcagctggcgatgggtctgctgcgcccttggcaggtgcttctgctggatgagatcactgtggacctcgacttgctttctaggagtaacttcctttccttcctcaagcgggaaacagagacaagaccctgcacgattgtctatgccacacacatcctggataatctctcgcagtggcccacccatctcgtgcatatgcacctcggaaacgtcaggcaacggggccccatggaaaagttcaagagtgaggtcactgagacatcagagaacagtcaactcggtgagcttgtgctcaagtggctcaaggaggacctgtcggccagaggaccgaggaacgggcaatccagccagagcaagacctacgggtcactggatggacttgggggatatgggctggagaagccaacctga

SEQ ID NO: 7756 - protein, 280 aa, Neosartorya fischeri NRRL 181
MADSDNQTGPSISVNGLNYKFQDGSSGLTNVSLSLPAGSRTLLIGANGAGKTTLLRLLAGKRLAPTDTISVSGRDPFKHGLEGVTYLGVEWVLNSIVRTDIDVPTLLASVGGDAYPERRDELVEILDIDLRWRMHAVSDGERRRVQLAMGLLRPWQVLLLDEITVDLDLLSRSNFLSFLKRETETRPCTIVYATHILDNLSQWPTHLVHMHLGNVRQRGPMEKFKSEVTETSENSQLGELVLKWLKEDLSARGPRNGQSSQSKTYGSLDGLGGYGLEKPT

SEQ ID NO: 7757 - DNA, 840 bp, Aspergillus clavatus NRRL 1
  CDS (1)..(840)
atggcagacttcagcaatgagacaaagccatccatcactgtacacggtctaaactataaatttcaagatgggtcgtccggcttgaccaatgtgtcactcgatcttccttcagggagtcgaaccttgctcgtcggagcaaatggtgcgggcaagactacccttctgcgtttgctggcaggcaagcgtctggccccaacggatacaatttccgtcggtgggaaggaccctttcaagcatggcctcgagggggtgacatacctcggtgtcgaatgggtgctcaacagcatcgtccgcactgatatcgacgttccgaccctgctggcatctgtgggcggagacgcctatcccgagcgcagggatgagctcgttgagatcctcgatgtcgacctcagatggcgcatgcatgctgtttcggatggagagcggcgccgggtacagctggccatgggcttactacgcccttggcaagtgctccttctggatgagatcactgtggaccttgacttgctgtctcggagtaactttctttccttcctcaagcgagaaaccgagacaagagcatgcacaattgtctacgccacgcatattctagacaatctatcgcactggcctacgcatctggtgcatatgcatctcggcaatatcagacaatggggccccatggagaaatttcagcaggaagtcaccgagacctcagagaacagccaactcagtgagctcatcctcaaatggctcaaagaggacttgaaggccagaggaccgagaaatggaaagagcgagggcaagacatatgaggcccttggcgcaattggaggatacgggctggaaaagcacagctag

SEQ ID NO: 7758 - protein, 279 aa, Aspergillus clavatus NRRL 1
MADFSNETKPSITVHGLNYKFQDGSSGLTNVSLDLPSGSRTLLVGANGAGKTTLLRLLAGKRLAPTDTISVGGKDPFKHGLEGVTYLGVEWVLNSIVRTDIDVPTLLASVGGDAYPERRDELVEILDVDLRWRMHAVSDGERRRVQLAMGLLRPWQVLLLDEITVDLDLLSRSNFLSFLKRETETRACTIVYATHILDNLSHWPTHLVHMHLGNIRQWGPMEKFQQEVTETSENSQLSELILKWLKEDLKARGPRNGKSEGKTYEALGAIGGYGLEKHS

SEQ ID NO: 7759 - DNA, 846 bp, Aspergillus niger CBS 513.88
  CDS (1)..(846)
atgacagacaacaacgccccttccccctcaattgaggtcaagaacctatccttcaagttccccgacggttctcccggcttgaccgacgtcaatctccaagcccccgccggcagtcgaaccctacttattggagccaatggcgcaggcaagaccaccctcctccgcctcctagcaggcaaacgtctagctcctacagacaccatcaccgtagcaggcaaagaccccttcaaggacggcctggaaggcgtaacctacctcggcatggaatgggttctcaacaacatcgtccgcaccgacatcgacgtccctaccctcctcgcctccgtcggcggcaacgcataccctgaccgccgggatgaactcgtcgacatcctagacatcgatctccgctggcgcatgcatgccgtttcggacggcgaacgtcgccgcgtccagctagctatgggcctcctccggccctggcaagtcctccttctggatgaaatcactgtcgatttggacctcctctctcgctccaatttcctggcctttcttaagcgtgagactgagaccagaccctgtactatcgtctatgcgacccatatcttggataacttgtcgctgtggcctacgcatctagtccatatgcatttgggaagcgtgcgtcagtggggtcccattgagaagttccgcgaagaggttaaggagacctccgaaaatagtcagctcggtgagcttgtgctgaattggctcaaagaggacttgcattctaggggtccgagaaatgggttcaccagtcaggctaagacttacccgtcgctggagggtttgggcgggtatggcttggaaaagcggcctgctgcgtga

SEQ ID NO: 7760 - protein, 281 aa, Aspergillus niger CBS 513.88
MTDNNAPSPSIEVKNLSFKFPDGSPGLTDVNLQAPAGSRTLLIGANGAGKTTLLRLLAGKRLAPTDTITVAGKDPFKDGLEGVTYLGMEWVLNNIVRTDIDVPTLLASVGGNAYPDRRDELVDILDIDLRWRMHAVSDGERRRVQLAMGLLRPWQVLLLDEITVDLDLLSRSNFLAFLKRETETRPCTIVYATHILDNLSLWPTHLVHMHLGSVRQWGPIEKFREEVKETSENSQLGELVLNWLKEDLHSRGPRNGFTSQAKTYPSLEGLGGYGLEKRPAA

SEQ ID NO: 7761 - DNA, 891 bp, Ostreococcus lucimarinus CCE9901
  CDS (1)..(891)
atgcacggcgtcgtggacgtcgtcctggacgatgcccccgaaccgtcgtgcgccgtcgccgtcgacgcgctgacgtacgcgtacccgggatgcgacgcggtgctgcgcgattggagcctgcgcctgccgccggggtcgaggtgcttgctttccggcgcgaacggggcggggaagacgacggcgctgcacgtcatcgcgggtaaaaccatggtgaacgaagacgtcgtgcgcgtgctgggacgaccgccgtttcacgacatcgcgctcacgtgcgggggcgagctttcttacctgggcgcgcagtggcggcgcaacatcggaagcgcgggcgcggacgtgcccctgcaaggagacatttcggcgaggaaaatgatcgagggcgtcgcagacgtggacccggcgaggcgagaacgattggtgaagctgctggatgtggatttggactggtccatgaaggcgttgagcgacggacaacgacgtcgagttcagatttgtctcggactcttgaagccgtacaaggtgttgctgtgcgacgaaatcacggtggatttggacatcctcggtcggcttgacttgttggagtttttcaaggaagagtgcgaggtgcgcggggccaccatcgtgtacgccacgcacatcttcgatggcatggcggattggatgacgcacctcgcgttcacgtccaacgggcagttgaagtatggcggcgccaaggtggacattccggaaattcaaggcacgaaacatttattgtcgaccattgaaaagtggcttcgcatcgatcgcgacgagcgccgcgcgcgagaggcggcggaactcgccgccccgacggcgaagaaaatcgacgccgcgagtcacttccaaacgaggcacatggcgtattatagatga

SEQ ID NO: 7762 - protein, 296 aa, Ostreococcus lucimarinus CCE9901
MHGVVDVVLDDAPEPSCAVAVDALTYAYPGCDAVLRDWSLRLPPGSRCLLSGANGAGKTTALHVIAGKTMVNEDVVRVLGRPPFHDIALTCGGELSYLGAQWRRNIGSAGADVPLQGDISARKMIEGVADVDPARRERLVKLLDVDLDWSMKALSDGQRRRVQICLGLLKPYKVLLCDEITVDLDILGRLDLLEFFKEECEVRGATIVYATHIFDGMADWMTHLAFTSNGQLKYGGAKVDIPEIQGTKHLLSTIEKWLRIDRDERRAREAAELAAPTAKKIDAASHFQTRHMAYYR

SEQ ID NO: 7763 - DNA, 804 bp, Ajellomyces capsulatus NAm1
  CDS (1)..(804)
atgcaaagccctcatccccctcgattccttgtccgcaacctcagttacaacttcgcagatggcgctgttggcctgactgatgtctctttcgatctccctagcggcagtcgaaccctattaattggcgccaacggtgccggaaaatctacccttctccgagtcctctccggcaaacgtctcgcaccccacggcaccgtccaaatcggcggggtagaccctttcaccacaggtctcgaaagcgtaacctacctgggcgtggaatgggttctaaacccaatagtccacacggacatagatgtgcccactctcctagcctccgttggcggtgacgcctacccagatcgccgcgaccaactcattcaaatcctcgatatagacctcaactggcacatgcacgcagtctcagatggggaacgccgccgtgtgcaacttgccatgggtcttttgcggccctggaccctcctcttactggatgaaatcacgatggatctggatctgttgagccggagtgagtttctgggatttctgaagcgggagacggaggagagggagtgtacgattgtgtatgctacgcatatcttggataatctttccaggtggccgacgcacttggtacacatgcatttaggtcgggtgatagattggggtcccgttgagaaatttcaggtgggcaggctggcttcgccgtcggaggatagtcggttgggggaggtggtgttggagtggttgaagagggatttgagggagcgaggaccgcgcccaggtctaccaggagagggaaagaagatcgcggttgaattctga

SEQ ID NO: 7764 - protein, 267 aa, Ajellomyces capsulatus NAm1
MQSPHPPRFLVRNLSYNFADGAVGLTDVSFDLPSGSRTLLIGANGAGKSTLLRVLSGKRLAPHGTVQIGGVDPFTTGLESVTYLGVEWVLNPIVHTDIDVPTLLASVGGDAYPDRRDQLIQILDIDLNWHMHAVSDGERRRVQLAMGLLRPWTLLLLDEITMDLDLLSRSEFLGFLKRETEERECTIVYATHILDNLSRWPTHLVHMHLGRVIDWGPVEKFQVGRLASPSEDSRLGEVVLEWLKRDLRERGPRPGLPGEGKKIAVEF

SEQ ID NO: 7765 - DNA, 849 bp, Botryotinia fuckeliana B05.10
  CDS (1)..(849)
atggtcaattcagtagatgatcaaacggccgctccttcaattgaagtcaagaaccttacatataaattcccggattcgtctttggggcttacggatattacgctgagtttgccacctagctcgaggactttactaattggcgcaaatggggccggtaaaaccacactcctgcgtctcctctccggaaaacgacttgcgcccacttccacaatttccatctccggtctcgatcccttcaaagattctctcgtcggcgtaacctatctcggtctcgaatgggtactcaaccctattgtgcgaaccgacatcggtgtccgagaactccttacttccgtgggcggaaaccattatcccgagcgaagagatgagcttgtgcaggttttagatattgatttggaatggcgcatgcatcaagtttctgatggggagagaagaagagtacaacttgccatgggacttattagaccgtggagaatcctgctgttagacgagattacggtggatttggatctcttgagtcgaaagagattcttggatttcctgagagaggagacggagaagagaaaatgcaccattgtttatgcgacacacattttggataatttggcgggatggccgacggatttggtgcatatgagtcttggacgagtaaaggagtggggtaacatagagaagtttgagaaggagatgagtggagatagtagtggaaattcgagattgggagaattggttcttaagtggttgggagaggatttgaaggagagaggaccaaggaaaaatgcggggagcgcgggaactagttatttagtggcaggtgtgggtggatatggaagtgagaagaaggtttag

SEQ ID NO: 7766 - protein, 282 aa, Botryotinia fuckeliana B05.10
MVNSVDDQTAAPSIEVKNLTYKFPDSSLGLTDITLSLPPSSRTLLIGANGAGKTTLLRLLSGKRLAPTSTISISGLDPFKDSLVGVTYLGLEWVLNPIVRTDIGVRELLTSVGGNHYPERRDELVQVLDIDLEWRMHQVSDGERRRVQLAMGLIRPWRILLLDEITVDLDLLSRKRFLDFLREETEKRKCTIVYATHILDNLAGWPTDLVHMSLGRVKEWGNIEKFEKEMSGDSSGNSRLGELVLKWLGEDLKERGPRKNAGSAGTSYLVAGVGGYGSEKKV

SEQ ID NO: 7767 - DNA, 834 bp, Sclerotinia sclerotiorum 1980
  CDS (1)..(834)
atgccaaactcagtagatgatcagaccgatgccccttcaatcgaagtcaagaatcttacatataagtttccggattctactctgggtcttacggatataacactgagtttacctcctagttcgcgaactctattaatcggcgccaacggtgccggcaaaaccacactcctccgtctcctctccggcaaacgtctcgcccccacctccacaatctccatctcgggactcgaccccttcaaagactctctcgtaggagtgacctacctcggactcgaatgggtactcaaccccatcgtacgaaccgacatcggggtccgcgaactcctctcctcagtaggcggtacatactaccccgatcgacgggacgagctagttcgcgttctcgatatcgatctcgaatggcgcatgcaccaagtctccgacggtgaacgtcgtcgcgtgcaacttgctatgggcttaatacgaccctggcggatattactcctggatgaaattacagtggatttagatttattgagtcgaaagagatttttggattttttgaaggaggagacggaaaagaggaattgcaccattgtttatgcgacgcatattttggataatctggcggggtggcctacggatttggtgcatatgagtttggggagggtgaaggagtgggggccgattgggaagtttgaggaggagatgaaaggggatggcgggggaaattcgatattagcactcaacatgacacaagaagggaacaggtctgctgggatactcacacttcacactttcacacttttcattttgcactccgttatttcatttcaactcaattcatctatataa

SEQ ID NO: 7768 - protein, 277 aa, Sclerotinia sclerotiorum 1980
MPNSVDDQTDAPSIEVKNLTYKFPDSTLGLTDITLSLPPSSRTLLIGANGAGKTTLLRLLSGKRLAPTSTISISGLDPFKDSLVGVTYLGLEWVLNPIVRTDIGVRELLSSVGGTYYPDRRDELVRVLDIDLEWRMHQVSDGERRRVQLAMGLIRPWRILLLDEITVDLDLLSRKRFLDFLKEETEKRNCTIVYATHILDNLAGWPTDLVHMSLGRVKEWGPIGKFEEEMKGDGGGNSILALNMTQEGNRSAGILTLHTFTLFILHSVISFQLNSSI

SEQ ID NO: 7769 - DNA, 843 bp, Vanderwaltozyma polyspora DSM 70294
  CDS (1)..(843)
atgagtaaggaagatttagctgtttacgtttcgaatttaagctatactttccctgaaagtgaagttcctagtctggtagatatcaatcttgaagtgccttggaacacaagaactttagtagtgggttgtaacggtgccggtaagtctacgttgttgagactactaagtgggaaacatttatgtagaaatggtgaacttttagtaaatggtttagatccttttgctcccatatcgttaaccaaaaagcgtcaagaagacgtagacgttcaaacaactacatatttaggcactgaatggtgtcatatgactatcataaatagggatattggtgttactgaactgttaaatagtatcggtatgaaggtttatcaagaaagatgtgataccttggttgatattttagatatcgatttgaattggcgaatgcataggctaagtgatggccaaaaaagaagagtccaattggcaatgggtctgttaaaaccatggagaatcttacttttggatgaagtcactgtcgatcttgatgtcatttgtcgcagtagactactaaattttttaaaatttgaaactgaatctcgtaaatgtagtgttatatatgcgacacatatttttgatggtttggctaactggccaaaccgtatattgcatatggattatggtaagatagtttcagatgtagattataagaaagatatcaaatttacagaaaatataggagacatggaaaatggtaaagtgatcaaagatgaaaataataagatcattatcagtaaagtcaacagtttacatccacttgcccttcattggttgaacaatgaccttggattgcccgaattatga

SEQ ID NO: 7770 - protein, 280 aa, Vanderwaltozyma polyspora DSM 70294
MSKEDLAVYVSNLSYTFPESEVPSLVDINLEVPWNTRTLVVGCNGAGKSTLLRLLSGKHLCRNGELLVNGLDPFAPISLTKKRQEDVDVQTTTYLGTEWCHMTIINRDIGVTELLNSIGMKVYQERCDTLVDILDIDLNWRMHRLSDGQKRRVQLAMGLLKPWRILLLDEVTVDLDVICRSRLLNFLKFETESRKCSVIYATHIFDGLANWPNRILHMDYGKIVSDVDYKKDIKFTENIGDMENGKVIKDENNKIIISKVNSLHPLALHWLNNDLGLPEL

SEQ ID NO: 7771 - DNA, 933 bp, Chlamydomonas reinhardtii
  CDS (1)..(933)
atgaccgttgtagctgaaaatgcaccgtcaacgagcgggaacgaggccatagtgctcaactccacaacattcgcgtaccccggctgtgacccctttatcaagggctgcaacctgaacattcctcgtggtagccgctgcttgctcatcggcgcgaatggcgccggaaagaccacgctactgcaaatcgtcgcgggcaaatacatggtcgctaaagactccgtgcgggtgctcactcgctcgccattccatgaccttcaacttacatgcaccggtcagctgagctacctggggacgtcgtggcgcaaggacgtggcgtttgccggctatggagtgccgctgcagggcgacatcagcgcgggcaagatgatcttcggcgttgagggcgtggaacccgcccgccgctcccggctgatcgagatgctggacattgacctctaccagcgcatcaccacaatgtcggacggccagaagcgccgcgtgcagatctgcatgggactgctcaagccctacgacgtgctgctgctggacgagatcacagtggacctagatgtggtgggccgcctgcgcctgctggacttcttcaagcaggagagcgacgagcgcggcgccaccatcctgtacgccacccacatcttcgacggcctggagggctggatcagccacatcgcctacatggaggacggggccatggtcaagggcggagacatcgccagcgtgcgcgaggtggcggagctggcggcgcaggcgtccgccgcgcccggcaaggcgccgcgcaagctgctgcatgtggtggaggactggctgcggtcggagcgggatgcgcggcacgcacgcgccgcggccgccggcaccaccgccgccgacctggagacggcggtgaagccgcagcgcacgccattcatgccgtccaagcatttggcctttttccggtaa

SEQ ID NO: 7772 - protein, 310 aa, Chlamydomonas reinhardtii
MTVVAENAPSTSGNEAIVLNSTTFAYPGCDPFIKGCNLNIPRGSRCLLIGANGAGKTTLLQIVAGKYMVAKDSVRVLTRSPFHDLQLTCTGQLSYLGTSWRKDVAFAGYGVPLQGDISAGKMIFGVEGVEPARRSRLIEMLDIDLYQRITTMSDGQKRRVQICMGLLKPYDVLLLDEITVDLDVVGRLRLLDFFKQESDERGATILYATHIFDGLEGWISHIAYMEDGAMVKGGDIASVREVAELAAQASAAPGKAPRKLLHVVEDWLRSERDARHARAAAAGTTAADLETAVKPQRTPFMPSKHLAFFR

SEQ ID NO: 7773 - DNA, 843 bp, Schizosaccharomyces pombe
  CDS (1)..(843)
atggaagtaactgtttcaaacctctcttacacgttttctccaaagcagcctttaagtcttgatcacgtaactttagatcttcctaaaggatcaaggactttacttgttggagccaatggagctggaaaatcaactttacttaaacttttatctggaaaatcgcttgcgaaagcaggacatatatcggtgggtggtaaagatccttttcgtgagtctagttctgcatttgtttatttaggaactgaatgggttaacaaccctgttatacatagggatatgagtgttgcacgattaattgcttctgttggaggagataaatttgccgaacgtagggatttcttgatttcaattcttgatatagatcttcgttggcgaatgcatgcagtgtccgatggtgaaagacgacgtgttcaactatgtatgggacttctgcgtccatttgaagtacttttacttgatgaagtaactgtagatttggatgttcttgcccgggcagatttgttaaattttttgcaagaggaaacggaagtaaggaatgctactattgtttatgcaacacatatatttgatggtttagctgagtggccaactcacttggtccatctcagtcttgggcgtatcgtggattatggaccaatatccaagtttggtgctctgatgacaaggtcctctacgggaaatagcgcccttctagagacatgtttggaatggctcaaagaagacaaaaaaaataggggaactcgagaagaggaaaagcgtagtacctgggacgacgttcaagaatcattaaaagttggaactgatgtatttactgattactttaagatttcccgagcaaaatag

SEQ ID NO: 7774 - protein, 280 aa, Schizosaccharomyces pombe
MEVTVSNLSYTFSPKQPLSLDHVTLDLPKGSRTLLVGANGAGKSTLLKLLSGKSLAKAGHISVGGKDPFRESSSAFVYLGTEWVNNPVIHRDMSVARLIASVGGDKFAERRDFLISILDIDLRWRMHAVSDGERRRVQLCMGLLRPFEVLLLDEVTVDLDVLARADLLNFLQEETEVRNATIVYATHIFDGLAEWPTHLVHLSLGRIVDYGPISKFGALMTRSSTGNSALLETCLEWLKEDKKNRGTREEEKRSTWDDVQESLKVGTDVFTDYFKISRAK

SEQ ID NO: 7775 - DNA, 942 bp, Malassezia globosa CBS 7966
  CDS (1)..(942)
atggcgacaacgcacgcgccaccggccgttgaggtccacaacttatgctacagttttgcgacaagtcctgcgcctgcactcgaaggatgcgatcttattcttgagcgggggtcacgttgcttgcttataggtgcaaatggcgctgggaaaagcactctacttcgcttgctcgctggcaagcgtttgtgcgaggcaaacattcgtgtgtttggtcaagatgtattccgtgcgccaccacgcggcatcacttacctgggtactgagtgggcaatgaaccctgttgtgcgcagtgacatatctgtgcatgactttttgaattcagtgggcgggtttcgattcagcgaacgacgtgaccacttgctggacctgctggacgtcgacctgtcatggcgcatgcatatgatcagtgacggcgaacggcgtcgtgtacagctatgcatggggcttatggagccatgggatttgttgctccttgacgaagtgaccgtggacttggacgtccaagtccgctgcgacttgcttgacttcttgcgtaaagaaagcgagtcacgcggctctacgattgtttacgcgacgcacattttcgacggaattcatgaattccctacgcatttggtgcacatgcagctaggacgtactacaactcatgcacccataccctggcccttgcgtcttgactcacatttaccttcagagatccttgcatccctacctgccaatatccagcaagacgtggcatcgatgaatccgcaagtcacttatccactaacactgctttctttggcacttgcgtggctgcgagaagatcgcattctacgtgaccaatacgaacaaagtcgcggcgtgaagcgcgggcgcgcaggtcgacttccggctgaagaaacaaaggatgccaagaagttctttagtcagtacgactattattcgaactatacaacgtag

SEQ ID NO: 7776 - protein, 313 aa, Malassezia globosa CBS 7966
MATTHAPPAVEVHNLCYSFATSPAPALEGCDLILERGSRCLLIGANGAGKSTLLRLLAGKRLCEANIRVFGQDVFRAPPRGITYLGTEWAMNPVVRSDISVHDFLNSVGGFRFSERRDHLLDLLDVDLSWRMHMISDGERRRVQLCMGLMEPWDLLLLDEVTVDLDVQVRCDLLDFLRKESESRGSTIVYATHIFDGIHEFPTHLVHMQLGRTTTHAPIPWPLRLDSHLPSEILASLPANIQQDVASMNPQVTYPLTLLSLALAWLREDRILRDQYEQSRGVKRGRAGRLPAEETKDAKKFFSQYDYYSNYTT

SEQ ID NO: 7777 - DNA, 885 bp, Physcomitrella patens subsp. patens
  CDS (1)..(885)
atgggtagtgtagaagaagtggaggagaatgtagtagaagtctcggatttggagttcgcttatggaggccaagcacccttcatcagcaagttctcacttaagctcaagcgcggatctcggtgtctcctcattggtgccaatggagccggcaaaacgactctgctgagaattttagccgggaaacacttggtgggaggcaagaatgtggtgcgtgtcttgggtcgctctgcctttcatgatacagctctgacatgctcgggtcagttggcttacttgggtggatcttggagccgaaccgttggctgtgcgggtgagattcctttgcaaggtgacttctcggctgagcacatgatttttggagtggagaacgtagatgaggcaagacgagcccgtttaattgagctcctggatatcgatcttcgttggcgaatgcacaaagtttccgacggacaacgtcgtcgagttcagatttgcatggggttgttgcaccctttccaggtcttacttctggatgaaattaccgtggatctcgatgttgttgctcgcatggacttacttgctttctttgtagatgaatgtaatgagagaggagccactctggtttatgcaacacacatttttgatggtctggaaacgtgggccacagatatagcatacgtagaggatggaaagctgaagagggcgcaaccaatcaaggagcttcaagagttgttacctccaagtaaagcgaaaaatttgattcaagtagtagaaccctggctcagaacagagcgcgaagagagggagaagaaaggtccagttacacaagccaaagtgggtacagttacacgccctgctgatgtgtctccattcacttccagtcgccaaatggcctactataggtga

SEQ ID NO: 7778 - protein, 294 aa, Physcomitrella patens subsp. patens
MGSVEEVEENVVEVSDLEFAYGGQAPFISKFSLKLKRGSRCLLIGANGAGKTTLLRILAGKHLVGGKNVVRVLGRSAFHDTALTCSGQLAYLGGSWSRTVGCAGEIPLQGDFSAEHMIFGVENVDEARRARLIELLDIDLRWRMHKVSDGQRRRVQICMGLLHPFQVLLLDEITVDLDVVARMDLLAFFVDECNERGATLVYATHIFDGLETWATDIAYVEDGKLKRAQPIKELQELLPPSKAKNLIQVVEPWLRTEREEREKKGPVTQAKVGTVTRPADVSPFTSSRQMAYYR

SEQ ID NO: 7779 - DNA, 999 bp, Physcomitrella patens subsp. patens
  CDS (1)..(999)
atggcagcccagggacaggatgttgcgaagcctgttattgtgcacatcaaccgcctcaagttcacgtatcctggcatcgatggagctccccctcctggcgccaagcctctcatccaagacttctccctcacgttgcacgctggggaccggtgcctcctcgtgggcgccaatggagctggcaagacaactcttctaaagatcttgggcggcaagcacatggtggaccccgacatggtgcgagttttaggtcgatcggccttccatgataccgccctgacatcgagtggtgccctagcttatcttggtggagagtggagacgagatgtagcattcgcaggcttcgatgtccctctgcagatggacattcctgctgagaaaatgatcttcggactacaaggcgtcgatgcagaaagacgagatcgtttgatcaaggtccttgatattgacttgaagtggcgtatgcacaaagtctccgatggccaaaggcgaagagtccaaatctgcatgggtttgttacgcccgtatcaggtgttgcttctggacgagataacagtcgatctagatgtgttggcacgtgccgatctgatgggattccttagatctgaatgcgaagaaagaggggccactatcatctatgccactcatatttttgatggacttgagtcctggcctacgcacatggcttacgtgtccaaagggacgttgcgattcgccaagccgattggagaaattgcggaaatgaaggagctttccttgatgaggactgttgaaaggtggcttcggaaagaaattgaggaacagaggagaatacgaaaggagagactggcgaatgggctccctgagttcgaggatcagaatcctgacggcacacgagttattggggaagcggcaaagaaagcagcaatgaacaatggttgggcaggtggccggctgcattcaactttagctggagaggaaaatgtttatgacctgagctccaatcgagttttacgagtgtga

SEQ ID NO: 7780 - protein, 332 aa, Physcomitrella patens subsp. patens
MAAQGQDVAKPVIVHINRLKFTYPGIDGAPPPGAKPLIQDFSLTLHAGDRCLLVGANGAGKTTLLKILGGKHMVDPDMVRVLGRSAFHDTALTSSGALAYLGGEWRRDVAFAGFDVPLQMDIPAEKMIFGLQGVDAERRDRLIKVLDIDLKWRMHKVSDGQRRRVQICMGLLRPYQVLLLDEITVDLDVLARADLMGFLRSECEERGATIIYATHIFDGLESWPTHMAYVSKGTLRFAKPIGEIAEMKELSLMRTVERWLRKEIEEQRRIRKERLANGLPEFEDQNPDGTRVIGEAAKKAAMNNGWAGGRLHSTLAGEENVYDLSSNRVLRV

SEQ ID NO: 7781 - DNA, 828 bp, Aspergillus oryzae RIB40
  CDS (1)..(828)
atggccaatacaccgtcaatccaagtcaacaatctgtcatatcaatttcaggacggttcatccggcctggcagatgtaagtctctacttaccggccggaagtcgaactttactcatcggagccaatggagcgggaaaaaccactcttctacggttgctcgcgggcaagcgtctcgcgcccgatgacacaatcaccgtcgggggtaaggaccccttcaaagagggtctggaaggggtgacttatctaggcgtcgagtgggttcttaacaatattgtccggactgacatcgacgttcctacactgctggcttctgtgggcgggaacgcctatcccgagcggagggacgagcttgtagatattctcgatattgacttgcggtggcgtatgcatgcagtgtctgatggagagcgccgccgcgtccagttggccatgggtctgctccgaccctggcaagttctactccttgacgaaatcactgttgacctggacctgctatcccgtcataattttctttcttttctcaagcgtgagactgaaactagaccctgcaccatagtgtatgcgacgcacatcttggacaatttgtctcaatggcccacgcatttggtgcacatgaatcttggtaatgtcaagcagtggggcccgattacaaagtttcagaaagaagtgcccgaaacgtccgaaaatagccaacttggagagcttgttctaaggtggctcaaggaagatctcaaggccagaggtcctagaaatgggcggcatggccaagccaagacctacgagtcgtttgatgggagggggggatatggatttgaaaaacggaattga

SEQ ID NO: 7782 - protein, 275 aa, Aspergillus oryzae RIB40
MANTPSIQVNNLSYQFQDGSSGLADVSLYLPAGSRTLLIGANGAGKTTLLRLLAGKRLAPDDTITVGGKDPFKEGLEGVTYLGVEWVLNNIVRTDIDVPTLLASVGGNAYPERRDELVDILDIDLRWRMHAVSDGERRRVQLAMGLLRPWQVLLLDEITVDLDLLSRHNFLSFLKRETETRPCTIVYATHILDNLSQWPTHLVHMNLGNVKQWGPITKFQKEVPETSENSQLGELVLRWLKEDLKARGPRNGRHGQAKTYESFDGRGGYGFEKRN

SEQ ID NO: 7783 - DNA, 873 bp, Podospora anserina DSM 980
  CDS (1)..(873)
atggcccccccttccggccccccctcggtagtaacaaacaacctctcctacctcttccaagaccactccaccggcctctcaggcataaccctctccctcccccccagatcccgcaccctcttgatcggcgccaacggcgcaggcaaaaccaccctcctccgcctcttggcgggaaaacgcctagcgccagcaggcacaatcaccatcggcggcaacgaccccttcaaagtcggcctcgagggcgtgacctacctcggcctggaatgggtcctcaacgccatcgtccgcaccgacatcggcgtcgacgagctcctccgctccgtcggcggggaccaataccccgaccgtcgtgacgagctcgtcgccgttctcgacatcgataccaggtggaggatgcacgccgtttccgacggcgagcgccgcagggtccagctcgccatgggcctagtccggccgtggacgatcctgttattggatgaaatcaccgtcgacctggacgtctggtcccggagtcagtttttgagctttttgaaaaaggagacggaggagagggagtgcacggttgtgtatgcgacgcacatattggataatttggcggggtggccgacgcatttggtgcatatgcatcttgggacggtggtggagtgggggacgacggaggagatgttggagagtaaactggggggagaaaaagagacgggaaacagtcggctaggggagttggtgttaaggtggttgaaggaggacttggatagaagggggccgagagaccagttgaggagggggccggaggggttgagttataattcggggaatttggggattggggggtatgggttagagagtaagagcaagttggaggagaagagatga

SEQ ID NO: 7784 - protein, 290 aa, Podospora anserina DSM 980
MAPPSGPPSVVTNNLSYLFQDHSTGLSGITLSLPPRSRTLLIGANGAGKTTLLRLLAGKRLAPAGTITIGGNDPFKVGLEGVTYLGLEWVLNAIVRTDIGVDELLRSVGGDQYPDRRDELVAVLDIDTRWRMHAVSDGERRRVQLAMGLVRPWTILLLDEITVDLDVWSRSQFLSFLKKETEERECTVVYATHILDNLAGWPTHLVHMHLGTVVEWGTTEEMLESKLGGEKETGNSRLGELVLRWLKEDLDRRGPRDQLRRGPEGLSYNSGNLGIGGYGLESKSKLEEKR

SEQ ID NO: 7785 - DNA, 867 bp, Pyrenophora tritici-repentis Pt-1C-BFP
  CDS (1)..(867)
atgtcaggaacagcccccaataaagatattgcgccgtcaatcgatgtcaagaacctcagctatctctttccagacggctcgaatggattaaaggacgtgttgctggatcttcctccgggaagtaggacccttctgattggagcagctaatggcgcgggtaaaactacgctgctccgtctcctctccggaaagcgcatggcaccctctggcaccgtccacattgcgggcgttgacccattcaagatgggccttgaaggtgtcacctatcttggcctcgaatgggtgctcaaccccatcgtgcgtacagacattgacgttcccacgctcctctcatccatcggcggcgattactacaccgagcgtcgcgacgagctcatacgcatcctggacattgatttgagctggcgcatgcacgccgtctcagacggtgagaggcgacgagtacaactagcaatgggtctcctacggccatggactatcctgctgctggacgagattaccgtcgacctggatctgctatcgcgcagcaacttcctcaacttcctgaagaaggaaacgcaggaacgcccatgcaccatcgtgtatgcgacacatatcctggacaacctcgctacgtggccgacgcatctcgtccacatgagtctgggcaaggtcaagaagtggggcagcaccgaggacatgggcgttaaggttgaacagagcgagaggatgtacacgggaaacagccaactgggagaattggtactgaaatggctgcaagaggatctgaatgagagaggaccaaggaatggaaagggcgagggcatggcgtatcagagcctggacggaaagggtggctatggtgcggagaagaggaccgaaaagtag

SEQ ID NO: 7786 - protein, 288 aa, Pyrenophora tritici-repentis Pt-1C-BFP
MSGTAPNKDIAPSIDVKNLSYLFPDGSNGLKDVLLDLPPGSRTLLIGAANGAGKTTLLRLLSGKRMAPSGTVHIAGVDPFKMGLEGVTYLGLEWVLNPIVRTDIDVPTLLSSIGGDYYTERRDELIRILDIDLSWRMHAVSDGERRRVQLAMGLLRPWTILLLDEITVDLDLLSRSNFLNFLKKETQERPCTIVYATHILDNLATWPTHLVHMSLGKVKKWGSTEDMGVKVEQSERMYTGNSQLGELVLKWLQEDLNERGPRNGKGEGMAYQSLDGKGGYGAEKRTEK

SEQ ID NO: 7787 - DNA, 864 bp, Schizosaccharomyces japonicus yFS275
  CDS (1)..(864)
atgtcttcgtcctctaatgatctttgcgttcatacggaccatttatcatactcttttgcaccaaaccttccgttaagtctgcacgatgtttctgtcaagttcccaaaaggctccagaacacttcttgttggtgcaaatggtgcaggaaaatcgaccctgttgaaactgttagcaggaaagaccattgcaaacgcaggaaagattacagttaacggcagtgacccctttagagagacgaacagtggtatcatctatttaggcactgaatgggtaacgaacccagttgttcaccgtgatatggatgtcgttcgtctgattgcttctattggaggtgatctctatcctgaacgtcgagacaagttaatcaagatgctcgacatcgaccttcgttggagaatgcacgcagtttcggatggagaacgtcgtagagtccaattgtgcatgggtctaattcgtccattcgaggtcttgttgcttgatgaagttactgtcgatttggatgttttggctagatactctttgcttgaattcctgagagaggaaacacaatcgagaaacgctactatcgtatacgctactcacatctttgatggtattggtgactggcctacacagttggttcatctctctttaggaagaatagttcactacggtcccatttccgagctggtagattccagcatcgtttcacaaaaaggcaacagcagactgctggaagtgtgtctttactggcttcaacaagacagaaagctacgtggcgatcgaggtcaggagaatcgtgctacatgggatgatgtgaaagaacatctgaacgttggtatcaatgtcttcaccgattacttcaagcgctctcgcggcttgtaa

SEQ ID NO: 7788 - protein, 287 aa, Schizosaccharomyces japonicus yFS275
MSSSSNDLCVHTDHLSYSFAPNLPLSLHDVSVKFPKGSRTLLVGANGAGKSTLLKLLAGKTIANAGKITVNGSDPFRETNSGIIYLGTEWVTNPVVHRDMDVVRLIASIGGDLYPERRDKLIKMLDIDLRWRMHAVSDGERRRVQLCMGLIRPFEVLLLDEVTVDLDVLARYSLLEFLREETQSRNATIVYATHIFDGIGDWPTQLVHLSLGRIVHYGPISELVDSSIVSQKGNSRLLEVCLYWLQQDRKLRGDRGQENRATWDDVKEHLNVGINVFTDYFKRSRGL

SEQ ID NO: 7789 - DNA, 876 bp, Vitis vinifera
  CDS (1)..(876)
atggcgatccagagcagcagcagcagcaacagcatcaaagtcaatggtctgcagttcgcttacgaaggccaaccacctctcttcttagacttcaacctccaaatatctcctggttctcgatgccttctcgtcggcgccaacggatccgggaaaaccactttgctgaggattttggcagggaagcacatggttggcgggagagatgtggtgcaggtgttgaattgttcggcttttcacgacacccatctggtttgtagtggcgatttatcctatttggggggatcttggagtaaaaatattggctctgctggagaggttccactccagggagacttctctgccgaacatatgatatttggagttgaagggatcaatcctgttagaagagacaagttggttgacctgcttgatattgatctacaatggagaatgcataaggtatctgatggacagcggcgtcgagtccaaatatgcatgggtcttcttcatccgttccaggttcttttactagatgaagtgacagttgatcttgatgttgtggcaaggatggatttacttgaattcttcaaggaagaatgtgatcagcgaggagctacaattgtgtatgcaacccatatttttgatgggttggagacatgggcaacagatctggcatatgtccaagaaggcgatttaaggaagattgagaagttatctgagcttgacgagttgaagacctccgccaaccttctttcagtggtggagtcttggctccgttctgaaaccaagtgtgagaaaaagaaacccataaatcctcctgctcaaatccaaagaacaccctctccttttgattcttcaccttttagatcatccagacacatggcatactaccgttga

SEQ ID NO: 7790 - protein, 291 aa, Vitis vinifera
MAIQSSSSSNSIKVNGLQFAYEGQPPLFLDFNLQISPGSRCLLVGANGSGKTTLLRILAGKHMVGGRDVVQVLNCSAFHDTHLVCSGDLSYLGGSWSKNIGSAGEVPLQGDFSAEHMIFGVEGINPVRRDKLVDLLDIDLQWRMHKVSDGQRRRVQICMGLLHPFQVLLLDEVTVDLDVVARMDLLEFFKEECDQRGATIVYATHIFDGLETWATDLAYVQEGDLRKIEKLSELDELKTSANLLSVVESWLRSETKCEKKKPINPPAQIQRTPSPFDSSPFRSSRHMAYYR

SEQ ID NO: 7791 - DNA, 990 bp, Vitis vinifera
  CDS (1)..(990)
atggcagtgaaggacatctcgaagcaaacggtggagatcaacaatctgagattcacctacccaggaatcgacggccaacctcctcccggatctacgcctctgatcgaccacttctctctcactctcaactccggcgaccgctgcctcctcgtcggatccaatggcgcagggaaaactacaattctgaaaatcttgggtgggaagcacatggtagaacctcacatggttcgagtacttggaagatcggcttttcatgacactgccttgacatcttctggtgacctctgctatcttggaggagagtggaggcgagacgttgcctttgctgggtttgaggttccgattcaaatggatgtttcagctgagaaaatgatatttggagtatcgggtattgatcctcaaagaagagctgaactaatcaaggttttagatattgatctatcatggagacttcacaaggtgtctgatggtcagagaagacgggtgcaaatctgtatgggtctcctcaagccattcaaagttcttcttctagacgagataacagttgatcttgatgtactggccagggccgaccttctgaagttcctcagaaaggaatgtgaagagcgaggtgctacaatcatctatgcgacgcatatatttgatggtctggagaattggccatcccatcttgtgtatgtggctcatgggaaattacaattagcaatgccaatggaaaaggtcagggagatgagcaatttgtcactaatgagaacagtggagagttggctaaggaaggaaagagatgaggggaggaaaagaaggaaagaacgaaaggcagtcggccttccagaatttgaaagccaagttgagggcagccgagtggccggggaccctgctcgtgctgccgttcgtgcattgaacaatggatgggctgctggaagactgcactccaccattgctggtgaagagaattttttcttaagttcaaacagtgtcttgagacaataa

SEQ ID NO: 7792 - protein, 329 aa, Vitis vinifera
MAVKDISKQTVEINNLRFTYPGIDGQPPPGSTPLIDHFSLTLNSGDRCLLVGSNGAGKTTILKILGGKHMVEPHMVRVLGRSAFHDTALTSSGDLCYLGGEWRRDVAFAGFEVPIQMDVSAEKMIFGVSGIDPQRRAELIKVLDIDLSWRLHKVSDGQRRRVQICMGLLKPFKVLLLDEITVDLDVLARADLLKFLRKECEERGATIIYATHIFDGLENWPSHLVYVAHGKLQLAMPMEKVREMSNLSLMRTVESWLRKERDEGRKRRKERKAVGLPEFESQVEGSRVAGDPARAAVRALNNGWAAGRLHSTIAGEENFFLSSNSVLRQ

SEQ ID NO: 7793 - DNA, 825 bp, Populus trichocarpa
  CDS (1)..(825)
atgcaattcgcatacgcaggacagcatccactcttctacgatttcaatctcaacatctctcccggatctcgttgccttctcgtcggcgctaacggatctgggaagactactttgctgaaaataatggcagggaagcatatggtaggagggaaagatgtggtgcgggtgataaatggttcggcttttcatgatacgcaattggtttgtagtggtgacttggcttatttaggaggttcttggagtaaaactgttggatctgctggagagattccactacagggagacttctctgcggaacatatgatatttggagttgaagggactgatcctgttagaagagaaaagttgattgacctgcttgacattgatctgcaatggcgaatgcacaaggtatctgatgggcagcggcgaagagtccagatttgcatgggtcttctccatccatttaaggttcttttacttgatgaagttacagtcgatctagatgttgttgccaggatggatttgcttgagttcttcaaggaagagtgtgatcagagaggagctacaattgtatatgctactcatatttttgatgggttagagacttgggcaactcatctagcttacatacaagacggtgagctgaggagggctgagaagctaacggaggttcatgagttgaaaagctcagccaatctgctttctgttgttgagtcttggctccgtcatgaaaccaagagtgagaaaaagaaacccaccaaccctcctgcccaaaatcaaaagacctctccacttggtagttctcctttcatgtcatctagacacatggcatactaccgttga

SEQ ID NO: 7794 - protein, 274 aa, Populus trichocarpa
MQFAYAGQHPLFYDFNLNISPGSRCLLVGANGSGKTTLLKIMAGKHMVGGKDVVRVINGSAFHDTQLVCSGDLAYLGGSWSKTVGSAGEIPLQGDFSAEHMIFGVEGTDPVRREKLIDLLDIDLQWRMHKVSDGQRRRVQICMGLLHPFKVLLLDEVTVDLDVVARMDLLEFFKEECDQRGATIVYATHIFDGLETWATHLAYIQDGELRRAEKLTEVHELKSSANLLSVVESWLRHETKSEKKKPTNPPAQNQKTSPLGSSPFMSSRHMAYYR

SEQ ID NO: 7795 - DNA, 981 bp, Populus trichocarpa
  CDS (1)..(981)
atggagcatcaagaaccaacaatagatatcaacggcttgagattcacgtacccaggaatagacggtcacccaccgcctgggtccaaaccgttgatcgatgagttctttctcaccctcaattctggtgatcgatgccttcttgttggatccaacggcgctgggaaaactacaattctgaagatattaggaggaaaacacatggtggaaccccaaatggttcgtgttctaggaaggtctgcttttcacgacactgctgctttaacttcttctggacatctttcttatcttggaggagagtggaggcgagaagttgcttttgctggttttgaggttccgatacaaatggatatttctgcggagaagatgatatttggggtggcaggtattgatcctcaaagaagagctgagctaatcaaggtattggacattgatctgtcatggaggatgcacaaggtttctgatggccagagaaggcgggtgcaaatttgcatgggtctcctgaggccattcaaggttcttcttcttgatgagataatggttgacctcgatgtgctagcaagggctgaccttctgaagtttctaagaaaggaatgtgaagagcgaagtgctacaattatctatgcaacacatatatttgatggtttggaggagtggccaacgcatattttgtatgttgctcatgggaagttgcaattcgcaatgccaatggccaaaataaaagagactagtaatttgtcactaatgagaacagtggagagctggctgaggaaggaaagagatgaggagaggaaaagaagacaagagagaaaggcaggaggtcttccagaatatgaaaagcaggttgagggaagtcgagtgaccggtgatccagctcgtgttggtgctcgtgttatgaacaatggttgggctgcaggaaggctgcactccaccattgcgggtgaagagaacttcttcttgagctcaaacagagttttgagatag

SEQ ID NO: 7796 - protein, 326 aa, Populus trichocarpa
MEHQEPTIDINGLRFTYPGIDGHPPPGSKPLIDEFFLTLNSGDRCLLVGSNGAGKTTILKILGGKHMVEPQMVRVLGRSAFHDTAALTSSGHLSYLGGEWRREVAFAGFEVPIQMDISAEKMIFGVAGIDPQRRAELIKVLDIDLSWRMHKVSDGQRRRVQICMGLLRPFKVLLLDEIMVDLDVLARADLLKFLRKECEERSATIIYATHIFDGLEEWPTHILYVAHGKLQFAMPMAKIKETSNLSLMRTVESWLRKERDEERKRRQERKAGGLPEYEKQVEGSRVTGDPARVGARVMNNGWAAGRLHSTIAGEENFFLSSNRVLR

SEQ ID NO: 7797 - DNA, 825 bp, Populus trichocarpa
  CDS (1)..(825)
atgcaattcgcatacccaggacagcatccactcttctacgaattcaatctcaacatctctcctggatctcgttgccttctcgttggcgctaacggatctgggaagacaactttgctgaaaataatggcagggaagcatatggtaggaggaagagatgtggtgcgagtgataaatggttcggcttttcatgatactcaattggtttgtagtggtgacttggcttatttaggcggttcgtggagtaaaactgttggatctgctggggagattccactacagggagacttctctgcagaacatatgatatttggagtggaagggactgatcctgttagaagagaaaagttaattgagctgcttgacattgatttgaaatggcgtatgcacaaggtgtctgatgggcagcggcgacgagtccagatttgcatgggtcttcttcatccatttaaggttcttttgctagatgaagttacagtcgatctagatgttgttgccaggatggatttgcttgagttcttcaaggaagaatgtgatcagagaggagctacaattgtatatgctactcatatttttgatgggttagagacgtgggcaacacatctagcatacatacaagatggtgagctgaagagggttaagaagttaaccgaggttcatgagttgaaaaactcagccactctgctttctgttgttgagtcttggctccgttctgaaaccaagaatgagaaaaagaaacccactaaccctcctgcccaaaatcaaaagacctctccttttggtagttctcctttcatgtcttctagacacatggcatactaccgctga

SEQ ID NO: 7798 - protein, 274 aa, Populus trichocarpa
MQFAYPGQHPLFYEFNLNISPGSRCLLVGANGSGKTTLLKIMAGKHMVGGRDVVRVINGSAFHDTQLVCSGDLAYLGGSWSKTVGSAGEIPLQGDFSAEHMIFGVEGTDPVRREKLIELLDIDLKWRMHKVSDGQRRRVQICMGLLHPFKVLLLDEVTVDLDVVARMDLLEFFKEECDQRGATIVYATHIFDGLETWATHLAYIQDGELKRVKKLTEVHELKNSATLLSVVESWLRSETKNEKKKPTNPPAQNQKTSPFGSSPFMSSRHMAYYR

SEQ ID NO: 7799 - DNA, 978 bp, Populus trichocarpa
  CDS (1)..(978)
atggagcatcaagaaccaacaatagttatcaacggcctgagattcacgtacccaggaatcgacggtcacccacctcctgggtctaaaccgttgatcgatgagttctctctcaacctcaattctggtgatcgatgccttcttgttggatccaacggcgctgggaaaactacaattctgaagatattaggaggaaaacacatggtggaaccccaaatggttcgtgttctaggaaggtctgcttttcacgacactgctttaacttcttctggacatctttcttatcttggaggagagtggaggcgagaagttgcttttgctggttttgaggttccgatacaaatggatatttctgcggagaagatgatatttggggtggcaggtattgatcctcaaagaagagctgagctaatcaaggtattggacattgatctgtcatggaggatgcacaaggtttctgatggccagagaaggcgggtgcaaatttgcatgggtctcctgaggccattcaaggttcttcttcttgatgagataacggttgacctcgatgtgctagcaagggctgaccttctgaagtttctaagaaaggaatgtgaagagcgaggtgctacaattatctatgcaacgcatatatttgatggtttggaggagtggccaacgcatattttgtatgttgctcatgggaagttgcaattcgcattgccaatggccaaaataaaagagactagtaatttgtcactaatgagaacagtggagagctggctgaggaaggaaagagatgaggagaggaaaagaagacaagagagaaaggcaggaggtcttccagaatatgaaaagcaggttgagggaagtcgagtgaccggtgatccagctcgtgttggtgctcgtgttatgaacaatggttgggctgcaggaaggctgcactccaccattgcgggtgaagagaacttcttcttgagctcaaacagggttttgagatag

SEQ ID NO: 7800 - protein, 325 aa, Populus trichocarpa
MEHQEPTIVINGLRFTYPGIDGHPPPGSKPLIDEFSLNLNSGDRCLLVGSNGAGKTTILKILGGKHMVEPQMVRVLGRSAFHDTALTSSGHLSYLGGEWRREVAFAGFEVPIQMDISAEKMIFGVAGIDPQRRAELIKVLDIDLSWRMHKVSDGQRRRVQICMGLLRPFKVLLLDEITVDLDVLARADLLKFLRKECEERGATIIYATHIFDGLEEWPTHILYVAHGKLQFALPMAKIKETSNLSLMRTVESWLRKERDEERKRRQERKAGGLPEYEKQVEGSRVTGDPARVGARVMNNGWAAGRLHSTIAGEENFFLSSNRVLR

SEQ ID NO: 7801 - DNA, 873 bp, Magnaporthe grisea 70-15
  CDS (1)..(873)
atggccgacggaagttccacgccgagatcgccctcactcgaggtcaaagacttgacgtacagctttccagaccggagcaccggcattagcaacatcagtctttcgctgccagcccggagtcggacctgcctcatcggcgccaatggagccggcaagacgaccctcctccgcctcctggcaggtaagcgcctctccccgcgcggcgccatcaccgtgggcggcgtggaccccttctccgagggcctcgagggggtgacgtacctggggctggagtgggtgctgaacccgatcgtgcgcaccgacattggcgtcgccgagctgctccgctcggttggtggggacgcctacccagcgcggcgcgacgagctggtcgaggtgctggacattgacaccgcgtggcgcatgcacgccgtgtcggacggcgagcggcggcgcgtccagctggccatgggcctggtgcggccgtggacggtgctgctgctcgacgagatcacggtcgacctcgacgtgctgtctcgttcgggcttcctcgactggctcaagcgcgagaccgagtcccgcgacgccaccgtcgtctacgccacccacattctcgacaacctgcatgcttggcccacccacttggtgcacatgcacctcggcaccgtcaaggagtggggtcccgccgccgactttctcgaggcccagggtgcctccaaggacggcaatagccagctcggccacctggtcctgggctggctgcgggaagacctcaaggaccgcggtccgaggagccagcacaagagggctcccgagggcaagtcgtatggtgccggcgggatcgagctcggcggatacggatacgagcccaaggcaccgcccaaggggcagtaa

SEQ ID NO: 7802 - protein, 290 aa, Magnaporthe grisea 70-15
MADGSSTPRSPSLEVKDLTYSFPDRSTGISNISLSLPARSRTCLIGANGAGKTTLLRLLAGKRLSPRGAITVGGVDPFSEGLEGVTYLGLEWVLNPIVRTDIGVAELLRSVGGDAYPARRDELVEVLDIDTAWRMHAVSDGERRRVQLAMGLVRPWTVLLLDEITVDLDVLSRSGFLDWLKRETESRDATVVYATHILDNLHAWPTHLVHMHLGTVKEWGPAADFLEAQGASKDGNSQLGHLVLGWLREDLKDRGPRSQHKRAPEGKSYGAGGIELGGYGYEPKAPPKGQ

SEQ ID NO: 7803 - DNA, 864 bp, Gibberella zeae PH-1
  CDS (1)..(864)
atgactcttcctcctaagccccctcgtgtcgaggtcaacaacctctcatacacgttccctgactactcaactggtgtcaacaacattactctcgaccttcccccgcgatcccgtactctgctcattggcgccaacggtgccggtaagacgactctgcttcgtctcctcgctggcaagcgtcttgcgcccagtgacaccatctctatctgcggagttgatcctttcaaggaaggtcttgagggtgtcacttatctcggtctcgaatgggttctcaaccccattgtccgaactgatattggtgtcaacgagctgctcagctctgttggcggtgatgcgtaccccgatcgtcgagatgagcttgtagccatgctcgacgtcgacaccaactggcgcatgcacgctgtttctgacggtgagcgtcgtcgcgttcagcttgcaatgggtcttctgagaccctggactgtcctgcttctcgatgagatcactgttgatctcgatgtcctgagccgtgccgaattcctcgcctggctcaagaacgagacagagatccgagagtgcaccatcgtttacgctacccatatcctggacaaccttgctggctggcctactcacctcgcgcatatgcacctcggtactgtcaaggagtgggacgaggccgacaagatgcttgccaccatcgacggcactgtcggtgcctctggcaacagtcgtctgggagagctcgtcctgagctggctccgcgatgacctgaaagagcgaggaccacgaagcggtatcaaccgcggttctgaaggcaagacgtacggttttggaggaatccagattggcggctatggcgacgagtctaagccgcgtaaagaatag

SEQ ID NO: 7804 - protein, 287 aa, Gibberella zeae PH-1
MTLPPKPPRVEVNNLSYTFPDYSTGVNNITLDLPPRSRTLLIGANGAGKTTLLRLLAGKRLAPSDTISICGVDPFKEGLEGVTYLGLEWVLNPIVRTDIGVNELLSSVGGDAYPDRRDELVAMLDVDTNWRMHAVSDGERRRVQLAMGLLRPWTVLLLDEITVDLDVLSRAEFLAWLKNETEIRECTIVYATHILDNLAGWPTHLAHMHLGTVKEWDEADKMLATIDGTVGASGNSRLGELVLSWLRDDLKERGPRSGINRGSEGKTYGFGGIQIGGYGDESKPRKE

SEQ ID NO: 7805 - DNA, 885 bp, Candida glabrata CBS 138
  CDS (1)..(885)
atgacggactacgcagtcgaagttacagacctcacttaccgttttaaagagagccctgaaccagccgtcgagaatatcaacttaaaggttccctggaacacaagaactctggttgttggtgctaatggtgcaggtaagtcgacactactgaagctgctcagtggtaagcatttatgcctaactgggaatatcaaagttaatggcctcgacccattcagtccgctttcaatgactacttcaatagacaatactctcattgagaatgacgatggttttggaaataaaggtgaatgtcaggtatccacatatttaggtacagaatggtgccatatgagcattattaatagagacataggagtacttgaactattggatagcattggttatcagtttttcaagcagaggggtgatagacttattgatattctggatatcgatgtcaattggagaatgcatcgtttgagtgatggtcaaaagagacgtgttcaactagcaatgggacttttaaagccttggagagtgctcttactggatgaggtaacagttgacctggatgttattgcacgcatgcgtctattagattttttgaagtgggaaacaactaatagaaagtgttcagtagtgtacgcaacacatatttttgacggtttggctgcttggcccgattatgtcttacatatgcaaagtgggaaaatagtctcaaaattagactataagaacgatgttacattctgcaatgccaaagaggactcagaagccaatggcaaagtaattgttaaggagaacggtcagaaactggatgtgatccgtctaaatagtttacacccattagcaattcactggctacaaggagaccattccaagatatcaccagggttgtcataa

SEQ ID NO: 7806 - protein, 294 aa, Candida glabrata CBS 138
MTDYAVEVTDLTYRFKESPEPAVENINLKVPWNTRTLVVGANGAGKSTLLKLLSGKHLCLTGNIKVNGLDPFSPLSMTTSIDNTLIENDDGFGNKGECQVSTYLGTEWCHMSIINRDIGVLELLDSIGYQFFKQRGDRLIDILDIDVNWRMHRLSDGQKRRVQLAMGLLKPWRVLLLDEVTVDLDVIARMRLLDFLKWETTNRKCSVVYATHIFDGLAAWPDYVLHMQSGKIVSKLDYKNDVTFCNAKEDSEANGKVIVKENGQKLDVIRLNSLHPLAIHWLQGDHSKISPGLS

SEQ ID NO: 7807 - DNA, 822 bp, Kluyveromyces lactis NRRL Y-1140
  CDS (1)..(822)
atggcctcgaacgacctagcagtggaagtgcacgatctaacgtacgcattccccggaagtaaacgctcagcaatccacgatctatcgctaagtgtcgaatggaacaagaaagtcttagtggtgggtaacaacggtgctggaaaatctacgctgttgaaactactaagtggtaaacatttgtgtctcggtgggaacataaaagttggaaacaagaacccattcgcaccaaacaatgaccaggagtccgtgatactgactacttacttaggcactgaatgggctagtatggctattgtacacagggatataggagtcctggaactcttggagagtatcggactaagccactacagggctcgaggtgaagagctagtgagaatcttggaagtggatatcaattggagaatgttcaaacttagcgatggccaaaagagacgtgtacaactgtgcatgggtttattgaaacccttcaaagttctgctattagacgaagtcactgtggacttggatgtcgtggcacgtgaccgtctattccaattcctggatcgagaaacgagagacagacaatgtagcgttgtgtatgcaacgcacattttcgatgggctagcaccatgggctgatgagattatccatttgcaagatggcaccatcacaagaacgttggattaccaacgtgatatccactttacaaaggaaatagagggcgtccaagagcgaaaggacaacggacgacacaccgtgatactaggctacatgaagagtttatacccgcttgcactccactggttgaccagagaccaagtcgaagaccaaaagctttga

SEQ ID NO: 7808 - protein, 273 aa, Kluyveromyces lactis NRRL Y-1140
MASNDLAVEVHDLTYAFPGSKRSAIHDLSLSVEWNKKVLVVGNNGAGKSTLLKLLSGKHLCLGGNIKVGNKNPFAPNNDQESVILTTYLGTEWASMAIVHRDIGVLELLESIGLSHYRARGEELVRILEVDINWRMFKLSDGQKRRVQLCMGLLKPFKVLLLDEVTVDLDVVARDRLFQFLDRETRDRQCSVVYATHIFDGLAPWADEIIHLQDGTITRTLDYQRDIHFTKEIEGVQERKDNGRHTVILGYMKSLYPLALHWLTRDQVEDQKL

SEQ ID NO: 7809 - DNA, 966 bp, Debaryomyces hansenii CBS767
  CDS (1)..(966): transl_table=12
atgactgatagcgccaacgaccatacattagccgtagaaacgattgacttaacttataagttcccttcaaaccaaaaaattggattacaggatgttaaccttcaaatcccatgggggtcaactaatttacttatcggacaaaatggtgctgggaaatctactttattaaagatcttagcaggtaagacattaattaagcaaggtaaactaaaactaggaggatttgatccatttgatttttcaaaagagaggaacgaaagacagaattctgatgtcaataatttaattacttacttaggtacggaatgggcagccaatccagttgttaaaagagatatccctgtcaacttattagtttcctcgattggcggaggaacttatccagaaaggagagacgaattgattagaattatggatatcgatcctgaatggtcaatggcatatatttccgatggtgagagaagaagggtccaattagtgatgggtttattgaagccatggaaattattattattagatgaggtgacagttgacttagacgtggtcgttagacaagatttacttaattttttgaagaaagaatgcagactccgtaattgttgtgtaatatatgctacacatatttttgacggattaggcaaacattggtgtgatagacttattcatttaaacgagggaatgaaggtgaacgatataaacatgaaagatatagaatttgtatcaaaaaacgagcaactggacaaggttaatgacaaagcgatacaagtggaattagcagaatcattgcatcctttggcattgcattggctaagggatgacttaaggaaaagagggtcaagagaagaagagaagattaaaatggccaaaagacaagaagaatggaataatgcaagagatgatacttattttgatgccaaggaatcaaaattaaaggattacttcaaggcaactagaagtgctaaataa

SEQ ID NO: 7810 - protein, 321 aa, Debaryomyces hansenii CBS767
MTDSANDHTLAVETIDLTYKFPSNQKIGLQDVNLQIPWGSTNLLIGQNGAGKSTLLKILAGKTLIKQGKLKLGGFDPFDFSKERNERQNSDVNNLITYLGTEWAANPVVKRDIPVNLLVSSIGGGTYPERRDELIRIMDIDPEWSMAYISDGERRRVQLVMGLLKPWKLLLLDEVTVDLDVVVRQDLLNFLKKECRLRNCCVIYATHIFDGLGKHWCDRLIHLNEGMKVNDINMKDIEFVSKNEQLDKVNDKAIQVELAESLHPLALHWLRDDLRKRGSREEEKIKMAKRQEEWNNARDDTYFDAKESKLKDYFKATRSAK

SEQ ID NO: 7811 - DNA, 762 bp, Yarrowia lipolytica CLIB122
  CDS (1)..(762)
atgtcgatcacggcgcaaaacctctcctacaccttccccaatgggcttgtgggcatccatcccacctcgttcgacctgcctcccgggtctagaacgttgctgatcggagccaatggagctggaaagtcgacgttgctgcgaattctggcgggaaagaccctcgccaaggccgacagtctcattgtccagggctttgatcccttccgagactgttctcctcctggaatccggtacctgggcaccgaatgggccggcaatccaatcgtgagacatgacattgaggtcacccagctgctaaagtacgccggaggagatgcctatcctgaccgacgagaccatcttgtgcagctgctggacgtggatcccacctggcacatgcacgaggtgtctgacggagagcgtcggcgagtgcagctagtcatgggactgctggtgccgtgggaaactcttctgctggacgaggtgacggttgatctggacgttctggcccgaactaacctgctcaacttcctcaaggaggagaccgagacccgacaagccaccattgtttacgccacccatattttcgacggcctcaaccagtggcctacgcacgttgcccatatgagccagtccaccatgttgagttgcgacacctacgatgtggtccagcgggagttccccggcaagagcattctggaaattgcactgggctggatcaccggggatatggaacggcgtgggcctcgcctccccagagcaaagagacagagggttaactag

SEQ ID NO: 7812 - protein, 253 aa, Yarrowia lipolytica CLIB122
MSITAQNLSYTFPNGLVGIHPTSFDLPPGSRTLLIGANGAGKSTLLRILAGKTLAKADSLIVQGFDPFRDCSPPGIRYLGTEWAGNPIVRHDIEVTQLLKYAGGDAYPDRRDHLVQLLDVDPTWHMHEVSDGERRRVQLVMGLLVPWETLLLDEVTVDLDVLARTNLLNFLKEETETRQATIVYATHIFDGLNQWPTHVAHMSQSTMLSCDTYDVVQREFPGKSILEIALGWITGDMERRGPRLPRAKRQRVN

SEQ ID NO: 7813 - DNA, 807 bp, Cryptococcus neoformans var. neoformans JEC21
  CDS (1)..(807)
atgccagcggcggatcaactggccatcgactgtcaaagtctcacctattcatggaaagaaggagacgatccagtcctcgaaaatgtgaacctcgagcttcgaaagggggataggtgtctgctattgggtgctaacggagcgggaaaatcgacacttttaaggattttagcaggcaagagattgaccaagacgaggacttgtcggatcttggggcaggacgtattcatgagccctccaggtggtgttgtctatctcggaacagaatggtcctccaaccccgttgttcgctcggacattgttgtttctcatttcttagactctgtggggggttacaggcacaaggagaggagagataggcttttgaggatcctcgatgtcgatcttgactggcatatgcaccaaatctctgatggagagcgtcgtcgggtccagctttgtatgggacttatgggagaatgggatgtcttgcttctggatgaagtcactgttgatctggatgtgctcgttcgtgcagacttgattgattttctgatttctgaatccgaaacaagaggtgctactattgtctatgccacccacatctttgatggcctcaaaaaattccctacaaaaatttgtcacatccagctaggctcaactcctcgtggcctcatcgcttggcctcctgccgacaaagggttgcaagaggaaacgcttttcgagttggcattaggctggttgagggaggatagagatctgagaaggcagaaagaaaatgagaagggaaggacgagagggcccaagacggatgtaagtgttactcgctaa

SEQ ID NO: 7814 - protein, 268 aa, Cryptococcus neoformans var. neoformans JEC21
MPAADQLAIDCQSLTYSWKEGDDPVLENVNLELRKGDRCLLLGANGAGKSTLLRILAGKRLTKTRTCRILGQDVFMSPPGGVVYLGTEWSSNPVVRSDIVVSHFLDSVGGYRHKERRDRLLRILDVDLDWHMHQISDGERRRVQLCMGLMGEWDVLLLDEVTVDLDVLVRADLIDFLISESETRGATIVYATHIFDGLKKFPTKICHIQLGSTPRGLIAWPPADKGLQEETLFELALGWLREDRDLRRQKENEKGRTRGPKTDVSVTR

SEQ ID NO: 7815 - DNA, 843 bp, Aspergillus fumigatus Af293
  CDS (1)..(843)
atggcagactcggacaatcatacgggtccttcgatcaatgtgaatggcctaaattataagttcccggatggttcttcaggcttgacaaatgtgtctctcagtctccccgcagggagccggacattgctcattggagcaaatggtgccggcaagaccactctcctgcgcttgctggcaggcaagcgcttggccccgacagatacagtttctgtttctggcagggatccctttaagcacggcctcgaaggggtgacttacttaggtgttgagtgggttctgaacagcattgtccggacggacatcgacgtcccaacgctcctagcatctgtgggtggagacgcctatcccgagcgcagggatgagctagttgagattctcgacattgacctccggtggcgtatgcacgccgtgtcggacggtgagcgccgccgtgtgcagctggcgatgggtctgctgcgcccttggcaggtgctcctgctggatgaaatcaccgtggacctggacttgctttctaggagtaacttcctttccttcctcaagcgggagacagagacaagaccctgcacgattgtctatgccacacacatcctggataatctgtcgcagtggcccacccatctcgtgcatatgcacctcggaaacgttaggcaatggggccctatggaaaacttcaaaagtgaggttacagagacatcagagaacagtcaactcggtgagcttgtgctcaagtggctcaaggaggacctgtcggccagaggaccgaggaacgggcaatccagccagagcaagacctacgggtcactggacggacttgggggatatgggctggagaagccaacctga

SEQ ID NO: 7816 - protein, 280 aa, Aspergillus fumigatus Af293
MADSDNHTGPSINVNGLNYKFPDGSSGLTNVSLSLPAGSRTLLIGANGAGKTTLLRLLAGKRLAPTDTVSVSGRDPFKHGLEGVTYLGVEWVLNSIVRTDIDVPTLLASVGGDAYPERRDELVEILDIDLRWRMHAVSDGERRRVQLAMGLLRPWQVLLLDEITVDLDLLSRSNFLSFLKRETETRPCTIVYATHILDNLSQWPTHLVHMHLGNVRQWGPMENFKSEVTETSENSQLGELVLKWLKEDLSARGPRNGQSSQSKTYGSLDGLGGYGLEKPT

SEQ ID NO: 7817 - DNA, 894 bp, Neurospora crassa OR74A
  CDS (1)..(894)
atggcctcccaaccagcccccccaacagtggaaaccttcaacctcacctacagctttcccgaccgctccaacggcgtctcggacattaccctctccctcccgcctcgctcacgcacgctcctgattggcgccaacggtgccggcaaaaccaccttgcttcgcctgttggccggcaagcgtctcgcgcccgccaacaccatcaaagtgtcgggcgttgacccgttcaaggaaggtctggagggcgtcacctacttggggttggaatgggtcctcaacgcgattgtgcgcacggacattggtgtcgttgagctgctgcggtcagtgggcggcgatgcttatcccgagagaagggatgaattggtgtcggtgctggatatcgacaccaactggcgaatgcacgccgtgtcggacggagaacgccgcagggtgcagctggcaatgggcttgatccggccctggacggtgctgttgctggacgaaatcaccgtcgacttggatgtctggtcccgggcgcagtttctagggtggctgagacgggagacggagacgagagagtgcacggttgtgtacgcgacgcacatcctggacaacttggccagttggccgacgcacctggtgcacatgcacttgggcactgtgaaggggtgggggaaggcggaggagatgttgaaggaggtcgaggatgggaagaatgtgattgaaggcgtgacgggaaatagtaggctgggagagctggtgttgaggtggttgagggatgatttgaaggagagagggccgagaagccagcacaggaggggaccggaggggttgagttataacagcccgggcttgggcggttatgggttggaggcgaagacgaatcaacaggctacggatgggcctagctgcaactga

SEQ ID NO: 7818 - protein, 297 aa, Neurospora crassa OR74A
MASQPAPPTVETFNLTYSFPDRSNGVSDITLSLPPRSRTLLIGANGAGKTTLLRLLAGKRLAPANTIKVSGVDPFKEGLEGVTYLGLEWVLNAIVRTDIGVVELLRSVGGDAYPERRDELVSVLDIDTNWRMHAVSDGERRRVQLAMGLIRPWTVLLLDEITVDLDVWSRAQFLGWLRRETETRECTVVYATHILDNLASWPTHLVHMHLGTVKGWGKAEEMLKEVEDGKNVIEGVTGNSRLGELVLRWLRDDLKERGPRSQHRRGPEGLSYNSPGLGGYGLEAKTNQQATDGPSCN

SEQ ID NO: 7819 - DNA, 879 bp, Oryza sativa subsp. indica
  CDS (1)..(879)
atggccgtcggcgaggacgaagggtggaggaggagcggcatcgaggtgagcgcactgcagttcgactacgacgggcagccgccgctcttcgcgcggttcaatctccgcatcgcccccggctcacgatgcctcctcatcggcgctaacggatcaggcaagaccactctcttgaagattcttgcggggaaacatatggttggaggaagagatgttgtccgtgttcttaatggttctgcttttcatgacacacagcttgtgtgcaacggtgacctttcctacttaggtggttcatggagtcgggctatcggttcagctggtgacgttcctctgcaaggcgacttctctgctgaacacatgatttttggagttgatggggttgatcctgttaggcgagagaagcttgttgatctactagatattgatctgcaatggcgcatgcataaagtctcagatggacaacgccgcagggtacaaatctgcatgggtcttcttcatccatacaaggtactcttgcttgatgaaatcaccgttgatcttgatgttgtgactagaatggatctccttgacttctttaaggaagagtgtgaacagagagaagcaaccattgtctatgccactcatatatttgatggattggaatcatgggctactgacattgcatacatccaagaaggtgaattgagaaaatcagcaaaatactctgacgttgaggagctaaagagtgccaaaaacttgctgtcagttgtcgagtcatggctgcgatctgagaccaaactccctaagaaagaacatccccgtcctgagacccagcccaggcactcctctccatttgatgcttcaccgttccgatcttcacgccacatggcctactaccgttga

SEQ ID NO: 7820 - protein, 292 aa, Oryza sativa subsp. indica
MAVGEDEGWRRSGIEVSALQFDYDGQPPLFARFNLRIAPGSRCLLIGANGSGKTTLLKILAGKHMVGGRDVVRVLNGSAFHDTQLVCNGDLSYLGGSWSRAIGSAGDVPLQGDFSAEHMIFGVDGVDPVRREKLVDLLDIDLQWRMHKVSDGQRRRVQICMGLLHPYKVLLLDEITVDLDVVTRMDLLDFFKEECEQREATIVYATHIFDGLESWATDIAYIQEGELRKSAKYSDVEELKSAKNLLSVVESWLRSETKLPKKEHPRPETQPRHSSPFDASPFRSSRHMAYYR

SEQ ID NO: 7821 - DNA, 873 bp, Vitis vinifera
  CDS (1)..(873)
atgaccgacgacaaaacttttgacatcgtgttgccggaagttggtgcagtgacaaaaatggcgatccagagcagcagcagcagcaacagcatcaaagtcaatggtctgcagttcgcttacgaaggccaaccacctctcttcttagacttcaacctccaaatatctcctggttctcgatgccttctcgtcggcgccaacggatccgggaaaaccactttgctgaggattttggcagggaagcacatggttggcgggagagatgtggtgcaggtgttgaattgttcggcttttcacgacacccatctgggagaggttccactccagggagacttctctgccgaacatatgatatttggagttgaagggatcaatcctgttagaagagacaagttggttgacctgcttgatattgatctacaatggagaatgcataaggtatctgatggacagcggcgtcgagtccaaatatgcatgggtcttcttcatccgttccaggttcttttactagatgaagtgacagttgatcttgatgttgtggcaaggatggatttacttgaattcttcaaggaagaatgtgatcagcgaggagctacaattgtgtatgcaacccatatttttgatgggttggagacatgggcaacagatctggcatatgtccaagaaggcgatttaaggaagattgagaagttatctgagcttgacgagttgaagacctccgccaaccttctttcagtggtggagtcttggctccgttctgaaaccaagtgtgagaaaaagaaacccataaatcctcctgctcaaatccaaagaacaccctctccttttgattcttcaccttttagatcatccagacacatggcatactaccgttga

SEQ ID NO: 7822 - protein, 290 aa, Vitis vinifera
MTDDKTFDIVLPEVGAVTKMAIQSSSSSNSIKVNGLQFAYEGQPPLFLDFNLQISPGSRCLLVGANGSGKTTLLRILAGKHMVGGRDVVQVLNCSAFHDTHLGEVPLQGDFSAEHMIFGVEGINPVRRDKLVDLLDIDLQWRMHKVSDGQRRRVQICMGLLHPFQVLLLDEVTVDLDVVARMDLLEFFKEECDQRGATIVYATHIFDGLETWATDLAYVQEGDLRKIEKLSELDELKTSANLLSVVESWLRSETKCEKKKPINPPAQIQRTPSPFDSSPFRSSRHMAYYR

SEQ ID NO: 7823 - DNA, 990 bp, Vitis vinifera
  CDS (1)..(990)
atggcagtgaaggacatctcgaaaccaacggtggagatcaacaatctgagattcacctacccaggaatcgacggccaacctcctcccggatctacgcctctgatcgaccacttctctctcactctcaactccggcgaccgctgcctcctcgtcggatccaatggcgcagggaaaactacaattctgaaaatcttgggtgggaagcacatggtagaacctcacatggttcgagtacttggaagatcggcttttcatgacactgccttgacatcttctggtgacctctgctatcttggaggagagtggaggcgagacgttgcctttgctgggtttgaggttccgattcaaatggatgtttcagctgagaaaatgatatttggagtatcgggtattgatcctcaaagaagagctgaactaatcaaggttttagatattgatctatcatggagacttcacaaggtgtctgatggtcagagaagacgggtgcaaatctgtatgggtctcctcaagccattcaaagttcttcttctagacgagataacagttgatcttgatgtactggccagggccgaccttctgaagttcctcagaaaggaatgtgaagagcgaggtgctacaatcatctatgcgacgcatatatttgatggtctggagaattggccatcccatcttgtgtatgtggctcatgggaaattacaattagcaatgccaatggaaaaggtcagggagatgagcaatttgtcactaatgagaacagtggagagttggctaaggaaggaaagagatgaggggaggaaaagaaggaaagaacgaaaggcagtcggccttccagaatttgaaagccaagttgagggcagccgagtggccggggaccctgctcgtgctgctgttcgtgcattgaacaatggatgggctgctggaagactgcactccaccattgctggtgaagagaattttttcttaagttcaaacagtgtcttgagacaataa

SEQ ID NO: 7824 - protein, 329 aa, Vitis vinifera
MAVKDISKPTVEINNLRFTYPGIDGQPPPGSTPLIDHFSLTLNSGDRCLLVGSNGAGKTTILKILGGKHMVEPHMVRVLGRSAFHDTALTSSGDLCYLGGEWRRDVAFAGFEVPIQMDVSAEKMIFGVSGIDPQRRAELIKVLDIDLSWRLHKVSDGQRRRVQICMGLLKPFKVLLLDEITVDLDVLARADLLKFLRKECEERGATIIYATHIFDGLENWPSHLVYVAHGKLQLAMPMEKVREMSNLSLMRTVESWLRKERDEGRKRRKERKAVGLPEFESQVEGSRVAGDPARAAVRALNNGWAAGRLHSTIAGEENFFLSSNSVLRQ

SEQ ID NO: 7825 - DNA, 870 bp, Saccharomyces cerevisiae (strain YJM789)
  CDS (1)..(870)
atggtttcccaatttgctattgaggtgcgtaacctaacgtacaaattcaaagaaaactccggtccgtcagttgttgatatcaatcttcaaatcccatggaatacaagatctttagttgtgggtgccaatggtgctggtaaatccacccttttgaaattactaagtggtaagcatctttgccttgatggaaaaatcctggtcaatggtcttgatccatttagtccattatctatgaatcaagtggacgatgatgaaagtgttgaagattcgacgaactaccaaacgaccacttatctaggtacggaatggtgccatatgagtatcattaatagggatatcggcgtcttggaactattaaaaagtattggattcgatcattttagggaaagaggtgaaagattggtcagaatcctggacatcgatgtacgttggagaatgcataggttaagtgatgggcaaaagagaagagttcagttagccatggggctcttgaaaccttggagagttttactacttgatgaggtcactgtggatctcgatgttattgccagagcaagacttctggagtttttaaagtgggagaccgaaaccagaagatgctcagtggtctacgctacacatatttttgacggcttggccaaatggcctaaccaagtataccatatgaaatcaggtaagattgtggataatttagattatcagaaagacgtagagttctctgaagtagtcaatgctaaagttaatggacaagtggcctttgaaaatgacaacaataaggttgttattagtaaagtgaatagtttgcatccattagcactagaatggttgaaacgtgataatcaaattcctgacaaagagattggtatataa

SEQ ID NO: 7826 - protein, 289 aa, Saccharomyces cerevisiae (strain YJM789)
MVSQFAIEVRNLTYKFKENSGPSVVDINLQIPWNTRSLVVGANGAGKSTLLKLLSGKHLCLDGKILVNGLDPFSPLSMNQVDDDESVEDSTNYQTTTYLGTEWCHMSIINRDIGVLELLKSIGFDHFRERGERLVRILDIDVRWRMHRLSDGQKRRVQLAMGLLKPWRVLLLDEVTVDLDVIARARLLEFLKWETETRRCSVVYATHIFDGLAKWPNQVYHMKSGKIVDNLDYQKDVEFSEVVNAKVNGQVAFENDNNKVVISKVNSLHPLALEWLKRDNQIPDKEIGI

SEQ ID NO: 7827 - DNA, 870 bp, Saccharomyces cerevisiae (strain AWRI1631)
  CDS (1)..(870)
atggtttcccaatttgctattgaggtgcgtaacctaacgtacaaattcaaagagagctccgatccgtcagttgttgatatcaatcttcaaatcccatggaatacaagatctttagttgtgggtgccaatggtgctggtaaatccacccttttgaaattactaagtggtaagcatctttgccttgatggaaaaatcctggtcaatggtcttgatccattcagtccattatctatgaatcaagtggacgatgatgaaagtattgaagattcgacgaactaccaaacgaccacttatctaggtacggaatggtgccatatgagtatcattaatagggatatcggcgtcttggaactattaaaaagtattggattcgatcattttagggaaagaggtgaaagattggtcagaatcctggacatcgatgtacgttggagaatgcacaggttaagtgatgggcagaagagaagagttcagttagccatggggctcttgaaaccttggagagttttactacttgatgaggtcactgtggatctcgatgttattgccagagcaagacttctggagtttttaaagtgggagaccgaaaccagaagatgctcagtggtctacgctacacatatttttgacggcttggccaaatggcctaaccaagtataccatatgaaatcaggtaagattgtggataatttagattaccagaaagacgtagagttctctgaagtagtcaatgctaaagttaatggacaagtggcctttgaaaatgacaacaataaggttgttattagtaaagtgaatagtttgcatccattagcactagaatggttgaaacgtgataatcaaattcctgacaaagagattggtatataa

SEQ ID NO: 7828 - protein, 289 aa, Saccharomyces cerevisiae (strain AWRI1631)
MVSQFAIEVRNLTYKFKESSDPSVVDINLQIPWNTRSLVVGANGAGKSTLLKLLSGKHLCLDGKILVNGLDPFSPLSMNQVDDDESIEDSTNYQTTTYLGTEWCHMSIINRDIGVLELLKSIGFDHFRERGERLVRILDIDVRWRMHRLSDGQKRRVQLAMGLLKPWRVLLLDEVTVDLDVIARARLLEFLKWETETRRCSVVYATHIFDGLAKWPNQVYHMKSGKIVDNLDYQKDVEFSEVVNAKVNGQVAFENDNNKVVISKVNSLHPLALEWLKRDNQIPDKEIGI

SEQ ID NO: 7829 - DNA, 888 bp, Zea mays
  CDS (1)..(888)
atggccggcgaagggaatggggatgaagggtggaggcggagcggcatcgaggtcagcgccctgcagttcggctacgacgggcagccgccgctcttcgcgcgcttcaacctctgcgtcgcacccggctcccgctgcctcctcgtcggcgccaacggatcagccaagaccacactcttgaagattcttgcgggaaagcatatggttggaggaagagatgtggtccgtgtcctcaatggttccgcttttcatgatacacagctagtgtgcaatggtgacctttcgtacttgggtggttcttggagccgtactattggttcagctggggatgttccactgcaaggcgacttctctgctgagcacatgatttttggagttgatggggttgatcctgtcaggcgagagaagctggttgatctgctagacattgatctgcagtggcgcatgcataaagtttcagatgggcagcgccgcagggtgcaaatctgcatgggtcttcttcatccatacaaggtgcttttgctcgatgagatcacggttgatctggacgtggtgaccaggatggacctgcttggtttcttcaaggaagagtgcgagcagagggaagctaccatcgtgtacgccacccatatatttgacggactcgagacgtgggctaccgactttgcgtacatccaagaaggcgagctgagaaggtccgggagatactccgacatcgaggagctaaggagcgccaagaacttgctgtcggtagtcgagtcgtggctgaggtcagagaccaaacttccgaagaaggaacccccaccacgtcctgagacccaggccaggcgttcctcgccgttcgatgcttctcctttccgttcgtcacgccacatggcctactaccgttga

SEQ ID NO: 7830 - protein, 295 aa, Zea mays
MAGEGNGDEGWRRSGIEVSALQFGYDGQPPLFARFNLCVAPGSRCLLVGANGSAKTTLLKILAGKHMVGGRDVVRVLNGSAFHDTQLVCNGDLSYLGGSWSRTIGSAGDVPLQGDFSAEHMIFGVDGVDPVRREKLVDLLDIDLQWRMHKVSDGQRRRVQICMGLLHPYKVLLLDEITVDLDVVTRMDLLGFFKEECEQREATIVYATHIFDGLETWATDFAYIQEGELRRSGRYSDIEELRSAKNLLSVVESWLRSETKLPKKEPPPRPETQARRSSPFDASPFRSSRHMAYYR

SEQ ID NO: 7831 - DNA, 891 bp, Micromonas sp. RCC299
  CDS (1)..(891)
atgaacgcacctgcaggtgtcaaggctgaggccgccgctgccacagacgcggcgcccagcctggtcatctccaacctgaactacgcgtacccgatgggcgaaaagatcatcaaggacttctcactcaccctccctcccggttcgcgatgcctgctgtcgggcgcgaacggcgcgggcaagaccacgctgctccaggtcctcgccggcaagaccatggtgcccaccgaggacgtccgcgtcatcgggcgtccccccttccacgacaccgaactgacctgctccggcgacctcgcgtacctcggagcgcagtggcgtcgcaacgtgggcagcgccgggtccgttcctctggcgggtgacatcagcgcgggtaagatgatcttcggcgtggagggcatcgacaagaaccgcagggctgacctcatcgatatcctcgacatagacgtcgactggaacatgatgcgggtcagcgacggccaaagacggcgggtccagatctgcatgggcctcctcaagcctttcaaggtgttgctgtgcgacgagatcaccgttgaccttgacatcctgggccggttggacctcctgaactttttgaagcaagagtgcgagcaacggggtgcgactgtggtgtacgccacgcacatcttcgacggcatggaaccgtggatgacccacatcgcgttcaccagcgacggcaagctggtgcacggcgggaagaaggaggacgtcggcgatctgaagggggtcaggcacctcttatcgacggtgtacgactggctggtggtggacaggaacgacaggaaggaacgcgagaagctggagaaagcgaaccccaagcccaaatccagcctggagagcaggttcgggtccagacacatggcgtattaccgatga

SEQ ID NO: 7832 - protein, 296 aa, Micromonas sp. RCC299
MNAPAGVKAEAAAATDAAPSLVISNLNYAYPMGEKIIKDFSLTLPPGSRCLLSGANGAGKTTLLQVLAGKTMVPTEDVRVIGRPPFHDTELTCSGDLAYLGAQWRRNVGSAGSVPLAGDISAGKMIFGVEGIDKNRRADLIDILDIDVDWNMMRVSDGQRRRVQICMGLLKPFKVLLCDEITVDLDILGRLDLLNFLKQECEQRGATVVYATHIFDGMEPWMTHIAFTSDGKLVHGGKKEDVGDLKGVRHLLSTVYDWLVVDRNDRKEREKLEKANPKPKSSLESRFGSRHMAYYR

SEQ ID NO: 7833 - DNA, 894 bp, Micromonas pusilla CCMP1545
  CDS (1)..(894)
atgaccgccgtaaccgctcccgccgcggagccgccgaccgacaacgccaccgacaccgggtcgctcaagatcagagccctcgcgtacgcgtaccccggcggcgagtcgatcctgaacgacgtcacgctggacctccctcccgggtcgcgatgccttctcagcggcgcgaacggcgcgggtaagagcacgctgcttcagatcctcgcggggaagacgatggtggaccgagacgcggtccgcgtcatcgggaagccgccgttccacgagatcgagctcacgtgcagcggcgacctggggtacctcgggtcgcagtggcgtcgcaccatcggcagcgcgggctccgtcgcgctcgcgggcgacttcaccgcgggcaagatgatcttcggcgtcgaggacgtcgaccccgagcgtcgcgcgcgcctcgtccaactcctcgacatcgacctcgactggagcatgatgaaagtctccgacggccagcgaagacgcgtgcagatctgcatggggctcctcaagccgttcaaagtcctcctctgcgacgagatcaccgtggacttggacatcctcggccgattagacctcctcgagtttttaaagtccgagtgcgaagaacgcggcgccaccgttgtgtacgccacgcacatcttcgacggcatggagccgtggatgacgcacgtcgcgttcgtgtccaacggcgcgctcgcgcacggcgggcgcaagtccgacgtcgtcgggctcaagggcgtgaaacacttgctcgggacgatcgacgcgtggctgcgcgtggacagggacgagaggcgggcgagggaggcgattgcggcgacggcgccgaagaagacggcgacggatcggttctcgaacgtgtctcgacacatggggtactaccggtaa

SEQ ID NO: 7834 - protein, 297 aa, Micromonas pusilla CCMP1545
MTAVTAPAAEPPTDNATDTGSLKIRALAYAYPGGESILNDVTLDLPPGSRCLLSGANGAGKSTLLQILAGKTMVDRDAVRVIGKPPFHEIELTCSGDLGYLGSQWRRTIGSAGSVALAGDFTAGKMIFGVEDVDPERRARLVQLLDIDLDWSMMKVSDGQRRRVQICMGLLKPFKVLLCDEITVDLDILGRLDLLEFLKSECEERGATVVYATHIFDGMEPWMTHVAFVSNGALAHGGRKSDVVGLKGVKHLLGTIDAWLRVDRDERRAREAIAATAPKKTATDRFSNVSRHMGYYR

SEQ ID NO: 7835 - DNA, 873 bp, Ostreococcus tauri
  CDS (1)..(873)
atggagatcgcgctcagcgacgccgcgaccgaaccctcggttcgagtcgacgggctgacgtacgcgtacccgggacacgaggcggtcgtgcgcgcgtggacgctcgcgctgccgccggggtcgagatgcttgctcagcggtgcgaatggggctggtaaaacgacggcgctgcaggtattggctgggaaaaccatggtgagcgaagacgcggtgcgggtgctgggacgaccgccgtttcacgacatcgcgctcacgtgcgacggcgaactgagctatctcggggcgcagtggcgaaggaacattggaagcgccggagccgacgtgccgctgagcggagacatctcggcgcgagcgatgatcgagggcgtcactggggtcgatccagagcgaagagaacgattggtcaagcttttggacgttgatttagattggtccatgaaggcgctgagtgatggacagcgacgacgggtgcaaatctgcatgggactcctcaagccgtacaaggtgctcctgtgcgatgagatcacggtcgatttggacattttgggccgactggacctgctcaaattcttcaaggaggaatgcgagcagcgtggggcgactatcgtgtacgcgacgcatatctttgacggcatggcggattggatgacgcacctcgcgttcacgtccaacggcgagctcaagtacggaggcgctaaggaagatattccagagattcaaggaacgaaacacttattgtcgacgatcgagaagtggttacgcatcgatcgcgacgagcgacgcgtgcgcgaggccgagcgcgcggcgaatcctccgccaaaggtggacgcggcgagccacttccagacgcgccacatggcgtactatagatga

SEQ ID NO: 7836 - protein, 290 aa, Ostreococcus tauri
MEIALSDAATEPSVRVDGLTYAYPGHEAVVRAWTLALPPGSRCLLSGANGAGKTTALQVLAGKTMVSEDAVRVLGRPPFHDIALTCDGELSYLGAQWRRNIGSAGADVPLSGDISARAMIEGVTGVDPERRERLVKLLDVDLDWSMKALSDGQRRRVQICMGLLKPYKVLLCDEITVDLDILGRLDLLKFFKEECEQRGATIVYATHIFDGMADWMTHLAFTSNGELKYGGAKEDIPEIQGTKHLLSTIEKWLRIDRDERRVREAERAANPPPKVDAASHFQTRHMAYYR

SEQ ID NO: 7837 - DNA, 852 bp, Brassica napus
  CDS (1)..(852)
atggcggagaaagatgcgatggccagaagcgacggtgcgattagggttagcggaatgcagttttcttacgatgtccaagatcctatcttcttcgatttcagcctccatctccccgccggatctcgctgcctcttggttggtgctaatggatctggcaagacgactttattgaagattttggcaggaaagcatatggttggagggaagaacattgtgcaagttctgaatcgctctgcctttcacgacacagaccttgtctgtagtggtgacttgtcttaccttggaggttcttggagcaaaaccgctggttccgctggtgagattcctctccagggagatttctcagcagagcatatgatatttggagttgaagggattgatcctgtgagaagagagaaactaattgatcttcttgatatcaatcttaagtggcgtatgcataaggtttctgatgggcagagacgtcgagtgcagatatgcatgggtcttttacaaccattcaaggtattattactggacgaggtcactgtggacctagacgttgttgctaggatggatttgttggaattcttcaaagaagaatgtgaacagagaggagctacaattgtatatgcaacgcatattttcgacggactagagacatgggctagtcatttggcctatatccatggaggagagctgaagctctctgctaaactgaaggagatcaaggatttagaaacgtccccaaatttgctttctgtggttgaaaattggcttcggtctgaaaccaaagtggagaagaagactaagaagaaacctgttgccacgtctccatttatgtcatctagacaaatggcgtattaccgatga

SEQ ID NO: 7838 - protein, 283 aa, Brassica napus
MAEKDAMARSDGAIRVSGMQFSYDVQDPIFFDFSLHLPAGSRCLLVGANGSGKTTLLKILAGKHMVGGKNIVQVLNRSAFHDTDLVCSGDLSYLGGSWSKTAGSAGEIPLQGDFSAEHMIFGVEGIDPVRREKLIDLLDINLKWRMHKVSDGQRRRVQICMGLLQPFKVLLLDEVTVDLDVVARMDLLEFFKEECEQRGATIVYATHIFDGLETWASHLAYIHGGELKLSAKLKEIKDLETSPNLLSVVENWLRSETKVEKKTKKKPVATSPFMSSRQMAYYR

SEQ ID NO: 7839 - DNA, 891 bp, Glycine max
  CDS (1)..(891)
atgaatagctccctctctggcaatggtggttccacaacaatggcggcagaaaacgaagattcctgcggaatccgcgtcaccggcatgcaattctcctacgacgtgcagcaaccgccgctcttcctcgacttcaacctcaacgtctctcccggatcccgctgcctcctcgtcggtgccaatggatccggaaagacgactttgctgaagattctggcggggaagcacatggttggaggaagagacgttgtgcgcgtcttgagtggttccgcttttcacgacactcagctcgtttgtagcggagatctcgcttatttgggcggatcttggagcaaaaacgttggctccgctggagaaattccgctccaaggagacttctctgctgaacatatgatctttggagttgagggtgctgatccagaaaggagagataagttaattgagctgcttgatattgatctacagtggcgaatgcataaggtatctgatgggcagcggcgtcgagtgcaaatctgtcttggtcttcttcatccgtacaaggttctcttgctggatgaggttactgtggatctggatgttgttactcggatggatttattggacttctttaaggaagaatgtgaacagagagaagctataatcgtatatgcaactcatatttttgatggactggagacatgggcaactcatttggcatacatacaagatggtgaactgagaagagcagaaaaaatatcaaatgttaaagagttgaaatcttcaactaatctgctgtctgttgttgaggcctggcttcgcgctgaaacaaagcttgaaaagaagaaccctgtccaaaagacttctgttgccagttctcctttcttttcatctagacacatggcatactatagatag

SEQ ID NO: 7840 - protein, 296 aa, Glycine max
MNSSLSGNGGSTTMAAENEDSCGIRVTGMQFSYDVQQPPLFLDFNLNVSPGSRCLLVGANGSGKTTLLKILAGKHMVGGRDVVRVLSGSAFHDTQLVCSGDLAYLGGSWSKNVGSAGEIPLQGDFSAEHMIFGVEGADPERRDKLIELLDIDLQWRMHKVSDGQRRRVQICLGLLHPYKVLLLDEVTVDLDVVTRMDLLDFFKEECEQREAIIVYATHIFDGLETWATHLAYIQDGELRRAEKISNVKELKSSTNLLSVVEAWLRAETKLEKKNPVQKTSVASSPFFSSRHMAYYR

SEQ ID NO: 7841 - DNA, 975 bp, Brassica napus
  CDS (1)..(975)
atggaagaggagaagcgagatacaacgatggagatctccggattacgattcacgtatccaggaatcgatggccatccacctccgggatcgaaaccgctcatcgaggatttctctctgaagctcaactcgagcgaacggtgtctcctcgtcggatctaacggcgccgggaagacgacgatactgaagatattgggagggaaacatatggtggagccgcacatggttagggttcttggtcgatcggcgtttcacgacaccggattgacatcttcgggtgatctctgctatctcggcggcgagtggaggcgtgacgtggcatttgcaggatttgaagtgccgatacaaatggatatatcggcagagaagatgatattcggagtggctggtattgatccaaagagaagagatgaattgatcaaggtgttggatatcgatatctcatggagattgcacaaggtctctgatggccaaagaagacgcgtccagatctgtatgggactcctcaagcctttcaaggttctccttttggatgaaatcactgttgatcttgacgttctcgccagagccgaccttttggcatttctgagaaaggaatgccaagaacgaggagctaccattatctacgccactcatattttcgatggccttgaggattggcctacacacattgtgtatgtagcaaacgggaagttacagttagcaatgccaatggagaaagtgaaggaaacaagcaagaagtcattgatgagaacagttgagagttggttgaggaaagaaagagacgaggagaggaaaacaaggaaagaaaggaaagccaatggccttcctgagttcgaaacacgtcctcaagaaagccgtgtcaccggtgatcctgctcggatgctcaacaatggctgggctgccgggaggcttcactctaccattgcaggcggtgaagatcatttcgtcttaagctcaaacagggttctcagataa

SEQ ID NO: 7842 - protein, 324 aa, Brassica napus
MEEEKRDTTMEISGLRFTYPGIDGHPPPGSKPLIEDFSLKLNSSERCLLVGSNGAGKTTILKILGGKHMVEPHMVRVLGRSAFHDTGLTSSGDLCYLGGEWRRDVAFAGFEVPIQMDISAEKMIFGVAGIDPKRRDELIKVLDIDISWRLHKVSDGQRRRVQICMGLLKPFKVLLLDEITVDLDVLARADLLAFLRKECQERGATIIYATHIFDGLEDWPTHIVYVANGKLQLAMPMEKVKETSKKSLMRTVESWLRKERDEERKTRKERKANGLPEFETRPQESRVTGDPARMLNNGWAAGRLHSTIAGGEDHFVLSSNRVLR

SEQ ID NO: 7843 - DNA, 876 bp, Triticum aestivum
  CDS (1)..(876)
atggccggaggcgaggaagggtggaggaggagcggcatcgaggtgagcaccctgcagttcggctacgacggggaggcgccgctcttcgcgcgcttcaacctccgcgtcgcccccggctcgcgctgcctcctcgtcggcgccaacggatccggcaagaccactctcttaaagattcttgcaggaaaacatatggttggaggaaaggatgttgtccgtgttcttaatggttctgcttttcatgacacacagtttgtgtgcagtggtgacctttcctacttgggtggttcgtggagtcggaatgtcagttcagttggtgatgttccactacaaggcgatttctctgctgagcacatgatatttggagttgatggggttgatcctgttaggcgagagcagctgattgatctactggatattgatctgcaatggcgcatgcataaagtttcagatggacagcgccgcagggtacaaatttgcatgggtcttcttcatccatacaaggtactcttactcgatgagatcaccgtggatctcgatgtcgtgaccaggatggatctcctcgacttcttcaaggaagagtgcgagcagagggaagccacgatcgtctacgccacgcacatattcgacggcctggagacatgggcgaccgacatcgcgtacatccaggagggcgagctgaaaaagtcggcgaaatactcggacatcgaagagctcaagacggccaagaacctgctgtcggtcgtggagtcatggctgaagtccgagaccaaactcccgaagaaagagcccgcgcgcgtcgagagccagcccaggcgcccctccccgttcgacgcctcccctttccgagcgtcgcgccacatggcctactaccgatga

SEQ ID NO: 7844 - protein, 291 aa, Triticum aestivum
MAGGEEGWRRSGIEVSTLQFGYDGEAPLFARFNLRVAPGSRCLLVGANGSGKTTLLKILAGKHMVGGKDVVRVLNGSAFHDTQFVCSGDLSYLGGSWSRNVSSVGDVPLQGDFSAEHMIFGVDGVDPVRREQLIDLLDIDLQWRMHKVSDGQRRRVQICMGLLHPYKVLLLDEITVDLDVVTRMDLLDFFKEECEQREATIVYATHIFDGLETWATDIAYIQEGELKKSAKYSDIEELKTAKNLLSVVESWLKSETKLPKKEPARVESQPRRPSPFDASPFRASRHMAYYR

SEQ ID NO: 7845 - DNA, 1005 bp, Linum usitatissimum
  CDS (1)..(1005)
atggcgatcatggatcagtccccacgacagccaacgatcgaaatcaatggcctcaggttcacatatccaggaatcgacggccaccctccgcctggttccaaacccctcatcgaagatctgtcgctcactctcaatgccggcgaccgatgcctcctcgtcggatccaatggcgcagggaagacgacgatactgaaaataatgggagggaagcatatggtggagtctcacatggttcgggtgttgggtaggtctgctttccacgacactgccttgtctgcttccggcgatctttcctatctcggaggagagtggcggagggatgttgcttttgctgggtttgaggtcccaattcaaatggatatttctgcagagaagatgttgtttggtgtggctgggatcgacactcagagaagagatgaactgatcaaggtattggacattgatctgtcatggagaatgcacaaagtttctgatggtcagaggagaagagtgcagatctgtatgggcctcctgagaccattcaaggttcttttactggatgagataacagttgatctggatgtgctagcccgggcggatcttctgacattcctaaggaaggaatgcgaagaaagaggtgccactatcatctatgccactcacatatttgatgggttagaggagtggcctacacatatggtgtacgtagctggtgggaagttgcaattagcaatgccaatgtcaaaaatcaagcagattagtgatctgtctctgatgagaacagttgaaggttggttgaggaaagagagggacgaggagaggaagaggaggaaagagaggaaagctaaaggactgccggagtttgaaaaccagcaggttgagggaagtcgggtagttggtggagatccagctcgttctgcagcagttaaaatgacaaacaatggatgggcagctgggaggctgcattccactattgcaggggaagacaacttcaacctcagctccaatagagttatgaggcagtga

SEQ ID NO: 7846 - protein, 334 aa, Linum usitatissimum
MAIMDQSPRQPTIEINGLRFTYPGIDGHPPPGSKPLIEDLSLTLNAGDRCLLVGSNGAGKTTILKIMGGKHMVESHMVRVLGRSAFHDTALSASGDLSYLGGEWRRDVAFAGFEVPIQMDISAEKMLFGVAGIDTQRRDELIKVLDIDLSWRMHKVSDGQRRRVQICMGLLRPFKVLLLDEITVDLDVLARADLLTFLRKECEERGATIIYATHIFDGLEEWPTHMVYVAGGKLQLAMPMSKIKQISDLSLMRTVEGWLRKERDEERKRRKERKAKGLPEFENQQVEGSRVVGGDPARSAAVKMTNNGWAAGRLHSTIAGEDNFNLSSNRVMRQ

SEQ ID NO: 7847 - DNA, 876 bp, Hordeum vulgare
  CDS (1)..(876)
atggccggaggcgaggaagggtggaggaggagcggaatcgaggtcagcaccctgcagttcggctacgacggggaggcgcccctcttcgcgcgcttcaacctccgcgtcgcccccggctcccgctgcctcctcgtcggcgccaacggatccggcaagaccactctcttgaagattcttgcaggaaaacatatggttggagggaaggatgttgttcgtgttcttaatggttctgcttttcatgacacacagttcgtgtgcagtggtgacctttcctacttgggtggttcgtggagtcggactgtcagttcagttggtgatgttccactccaaggcgatttctctgctgagcacatgatatttggagttgatggggttgatcctgttaggcgagacaagctgattgatctactagatattgatctgcaatggcgcatgcataaagtttctgacggacaacgccgcagggtacaaatttgcatgggtcttcttcatccgtacaaggtcctcttactcgatgagatcacggttgatctcgatgtcgtgaccaggatggatctcctcgacttcttcaaggaagagtgcgagcagagagaagccacgatcgtctacgccacccacatattcgacgggctggagacatgggcgaccgacatcgcgtacatccaagagggtgagctgaaaaggtcagcgaaatactcggacatcgaagagctcaagacggccaagaacctgctgtcggtcgtggagtcatggctgaagtccgagaccaagctcccgaagaaagagcccgcgctcgtcgagacccagcccaggcgcccctccccgttcgacgcctcccctttccgggcgtcgcgccacatggcctactaccgatga

SEQ ID NO: 7848 - protein, 291 aa, Hordeum vulgare
MAGGEEGWRRSGIEVSTLQFGYDGEAPLFARFNLRVAPGSRCLLVGANGSGKTTLLKILAGKHMVGGKDVVRVLNGSAFHDTQFVCSGDLSYLGGSWSRTVSSVGDVPLQGDFSAEHMIFGVDGVDPVRRDKLIDLLDIDLQWRMHKVSDGQRRRVQICMGLLHPYKVLLLDEITVDLDVVTRMDLLDFFKEECEQREATIVYATHIFDGLETWATDIAYIQEGELKRSAKYSDIEELKTAKNLLSVVESWLKSETKLPKKEPALVETQPRRPSPFDASPFRASRHMAYYR

SEQ ID NO: 7849 - DNA, 852 bp, Glycine max
  CDS (1)..(852)
atggcggcagaaaacgaagattcctgcggaatccgcgtcaccggcatgcaattctcctacgacgtgcagcaaccgccgctcttcctcgacttcaacctcaacgtctctcccggatcccgctgcctcctcgtcggtgccaatggatccggaaagacgactttgctgaagattctggcggggaagcacatggttggaggaagagacgttgtgcgcgtcttgagtggttccgcttttcacgacactcagctcgtttgtagcggagatctcgcttatttgggcggatcttggagcaaaaacgttggctccgctggagaaattccgctccaaggagacttctttgctgaacatatgatctttggagttgagggtgctgatccagaaaggagagataagttaattgagctgcttgatattgatctacagtggcgaatgcataaggtatctgatgggcagcggcgtcgagtgcaaatctgtcttggtcttcttcatccgtacaaggttctcttgctggatgaggttactgtggatctggatgttgttactcggatggatttattggacttctttaaggaagaatgtgaacagagagaagctataatcgtatatgcaactcatatttttgatggactggagacatgggcaactcatttggcatacatacaagatggtgaactgagaagagcagaaaaaatatcaaatgttaaagagttgaaatcttcaactaatctgctgtctgttgttgaggcctggcttcgcgctgaaacaaagcttgaaaagaagaaccctgtccaaaagacttctgttgccagttctcctttcttttcatctagacacatggcatactatagatag

SEQ ID NO: 7850 - protein, 283 aa, Glycine max
MAAENEDSCGIRVTGMQFSYDVQQPPLFLDFNLNVSPGSRCLLVGANGSGKTTLLKILAGKHMVGGRDVVRVLSGSAFHDTQLVCSGDLAYLGGSWSKNVGSAGEIPLQGDFFAEHMIFGVEGADPERRDKLIELLDIDLQWRMHKVSDGQRRRVQICLGLLHPYKVLLLDEVTVDLDVVTRMDLLDFFKEECEQREAIIVYATHIFDGLETWATHLAYIQDGELRRAEKISNVKELKSSTNLLSVVEAWLRAETKLEKKNPVQKTSVASSPFFSSRHMAYYR

SEQ ID NO: 7851 - DNA, 936 bp, Hordeum vulgare
  CDS (1)..(936)
atggcgccaacagtagagatcaggaatctcaccttcacctatccgggaatcgacggcaagccgccgcccggagcaccgcccctcatcgaggacgtctgcttctccctcgaagccggtcagcgctgccttctcgtcggctccaacggcgcaggtaagacaacgatactgaagatactaggcgggaagcacatggtggatccgagcatggttcgggtcctgggaaggtcggccttccacgacacggcgcttacttcctccggtgacctctgctaccttggcggcgagtggaggcgggatgttgcctttgctggctaccaggtgaatatacagatggacatttctgcagagaagatgctatttggtgtcactggcgttgatcctcagagaagagatgagcttatcaagattttggatattgaccttacctggcgcatgcacaaggcatcagatggtcagaggagaagagtccagatttgcatgggacttctcaagccattcaaggttcttcttcttgatgagataacagttgatcttgatgtgttggcaagagcaaatctgttgacatatctaaagaaggaatgtgcggaacaaggtgcaacaattatctatgccacacatatcttcgatggcctggatgattggccaactcacattgtctatgttgctcatgggaagttgcaactagcgctgccattagaaaaggtgaaagaaatgagccagttatcgctcatgagaacagtagagcgctggctgagaaaagagagggacgaagacaggaggaagagaaaggagcggaaggagaaaggcctcccggcattcgacaaggtcattgaggggagcagagtagtgaacaacgggtgggcagcaggaaggctcacttcgacgatagccggtgaagagaacttttctctcagttcaaacagcgttcttcggtag

SEQ ID NO: 7852 - protein, 311 aa, Hordeum vulgare
MAPTVEIRNLTFTYPGIDGKPPPGAPPLIEDVCFSLEAGQRCLLVGSNGAGKTTILKILGGKHMVDPSMVRVLGRSAFHDTALTSSGDLCYLGGEWRRDVAFAGYQVNIQMDISAEKMLFGVTGVDPQRRDELIKILDIDLTWRMHKASDGQRRRVQICMGLLKPFKVLLLDEITVDLDVLARANLLTYLKKECAEQGATIIYATHIFDGLDDWPTHIVYVAHGKLQLALPLEKVKEMSQLSLMRTVERWLRKERDEDRRKRKERKEKGLPAFDKVIEGSRVVNNGWAAGRLTSTIAGEENFSLSSNSVLR

SEQ ID NO: 7853 - DNA, 936 bp, Triticum aestivum
  CDS (1)..(936)
atggcgccaacggtggagatcaggaatctcaccttcacctacccgggaatcgacggcaagccgccgcccggagcaccgcccctcatcgaggacgtctgcttctccctcgaagccggtcagcgctgccttctcgtcggctccaacggcgcaggtaagacaacgatactgaagatactgggcgggaagcacatggtggatccgagcatggttggggtcctgggaaggtcggccttccacgacacggcgcttacctcctccggagacctctgctaccttggcggcgagtggaggcgcgatgttgcctttgccggctaccaggtgaatatacagatggacatttcggcagagaaaatgctatttggtgtcactggcgttgatcctcagagaagagatgagcttatcaagattttggatgttgaccttacctggcggatgcacaaggcatcagatggtcagaggagaagagtccagatttgcatgggacttctcaagccattcaaggttcttcttcttgatgagataacagttgatcttgatgtgttggcaagagcaaatctgttgacatatctaaagaaggaatgtgcggaacaaggtgcaacaattatctatgccacacatatcttcgatggcctggatgactggccaactcacattgtctatgttgctcatgggaagttgcaactagcgctgccattagaaaaggtgaaagaaatgagccagttatcgctcatgagaacagtagagcgctggctgaggaaagagagggacgaagacaggaggaagagaaaggagcggaaggagaaaggcctcccggcattcgacaaggtcattgaggggagcagagtagtgaacaacgggtgggcagcaggaaggctcacttcgacgatagccggggaagataacttttctttcagttcaaacagcgttcttcggtag

SEQ ID NO: 7854 - protein, 311 aa, Triticum aestivum
MAPTVEIRNLTFTYPGIDGKPPPGAPPLIEDVCFSLEAGQRCLLVGSNGAGKTTILKILGGKHMVDPSMVGVLGRSAFHDTALTSSGDLCYLGGEWRRDVAFAGYQVNIQMDISAEKMLFGVTGVDPQRRDELIKILDVDLTWRMHKASDGQRRRVQICMGLLKPFKVLLLDEITVDLDVLARANLLTYLKKECAEQGATIIYATHIFDGLDDWPTHIVYVAHGKLQLALPLEKVKEMSQLSLMRTVERWLRKERDEDRRKRKERKEKGLPAFDKVIEGSRVVNNGWAAGRLTSTIAGEDNFSFSSNSVLR

SEQ ID NO: 7855 - DNA, 972 bp, Zea mays
  CDS (1)..(972)
atggcaccaacggttgagatcagccacctcaccttcacctaccccggcatcgacggccgcccgccacccggcgcgccaccgctcatcgaggacgtctgcttctccctcgacgccggccaacgatgcctccttctcggctccaacggcgcaggcaagacgacgatactaaagatactaggcgggaagcacatggtggatccgagcatggtgcgggtcctgggaaggtccgccttccacgacacggcactcacctcctccggcgacctctcctatctcggcggtgagtggagacgcgacgtggcctttgctggctaccaggtgaacattcagatggatatatcggcagagaagatgatttttggtgttgctggtgttgatccaaagaggagagacgagcttatcaagactttagacatcgacctcaccgggcgcatgcacaaggcatcagatggtcagaggagacgtgtccagatttgcatgggacttcttaagtcattcaaggttcttcttcttgatgagatcacagttgatcttgatgttctggcaagatcaaatctgttaacatatcttaaaaaggaatgtgaggaaagaggtgcaacaatcatctatgccacacatatttttgatggtcttgatgattggccaacacacattgtttacattgctcatgggaaactgcaattagcactgcctttggaaaagctgaaagaaatgagtcagttatctctcatgaggactgtggagagctggttgaggaaagaaagaaatgaggacaggaggaggagaaaggagcgaaaggagaaaggcctcccagaattcgacaaggttgtcgagggtagtcgggttataggtgatccagcaaagaacgcagacagagttataaacaacgggtgggcagctggacggcttacctcgacgattgcaggagaggaaaatttcgtcttcagctctaacagcgtacttaggcaatga

SEQ ID NO: 7856 - protein, 323 aa, Zea mays
MAPTVEISHLTFTYPGIDGRPPPGAPPLIEDVCFSLDAGQRCLLLGSNGAGKTTILKILGGKHMVDPSMVRVLGRSAFHDTALTSSGDLSYLGGEWRRDVAFAGYQVNIQMDISAEKMIFGVAGVDPKRRDELIKTLDIDLTGRMHKASDGQRRRVQICMGLLKSFKVLLLDEITVDLDVLARSNLLTYLKKECEERGATIIYATHIFDGLDDWPTHIVYIAHGKLQLALPLEKLKEMSQLSLMRTVESWLRKERNEDRRRRKERKEKGLPEFDKVVEGSRVIGDPAKNADRVINNGWAAGRLTSTIAGEENFVFSSNSVLRQ

SEQ ID NO: 7857 - DNA, 20 bp, Artificial sequence
  primer
atggcggagaaagatgcgac

SEQ ID NO: 7858 - DNA, 21 bp, Artificial sequence
  primer
tcatcggtaataagccatgtg

SEQ ID NO: 7859 - protein, 292 aa, Artificial sequence
  consensus sequence
  Variant (2)..(16): Xaa in position 2 to 16 is any amino acid
  Variant (17)..(24): Xaa in position 17 to 24 is any or no amino acid
  Variant (26)..(31): Xaa in position 26 to 31 is any amino acid
  Variant (33)..(33): Xaa in position 33 is any amino acid
  Variant (36)..(36): Xaa in position 36 is any amino acid
  Variant (38)..(38): Xaa in position 38 is any amino acid
  Variant (39)..(39): Xaa in position 39 is any or no amino acid
  Variant (42)..(42): Xaa in position 42 is any amino acid
  Variant (45)..(45): Xaa in position 45 is any amino acid
  Variant (47)..(47): Xaa in position 47 is any amino acid
  Variant (49)..(50): Xaa in position 49 to 50 is any amino acid
  Variant (52)..(52): Xaa in position 52 is any amino acid
  Variant (55)..(62): Xaa in position 55 to 62 is any amino acid
  Variant (63)..(64): Xaa in position 63 to 64 is any or no amino acid
  Variant (66)..(70): Xaa in position 66 to 70 is any amino acid
  Variant (72)..(76): Xaa in position 72 to 76 is any amino acid
  Variant (77)..(101): Xaa in position 77 to 101 is any or no amino acid
  Variant (105)..(106): Xaa in position 105 to 106 is any amino acid
  Variant (108)..(114): Xaa in position 108 to 114 is any amino acid
  Variant (115)..(122): Xaa in position 115 to 122 is any or no amino acid
  Variant (124)..(132): Xaa in position 124 to 132 is any amino acid
  Variant (134)..(134): Xaa in position 134 is any amino acid
  Variant (136)..(139): Xaa in position 136 to 139 is any amino acid
  Variant (140)..(140): Xaa in position 140 is any or no amino acid
  Variant (143)..(144): Xaa in position 143 to 144 is any amino acid
  Variant (146)..(148): Xaa in position 146 to 148 is any amino acid
  Variant (153)..(154): Xaa in position 153 to 154 is any amino acid
  Variant (159)..(160): Xaa in position 159 to 160 is any amino acid
  Variant (164)..(164): Xaa in position 164 is any amino acid
  Variant (170)..(171): Xaa in position 170 to 171 is any amino acid
  Variant (176)..(176): Xaa in position 176 is any amino acid
  Variant (178)..(179): Xaa in position 178 to 179 is any amino acid
  Variant (186)..(186): Xaa in position 186 is any amino acid
  Variant (192)..(194): Xaa in position 192 to 194 is any amino acid
  Variant (196)..(198): Xaa in position 196 to 198 is any amino acid
  Variant (200)..(200): Xaa in position 200 is any amino acid
  Variant (202)..(204): Xaa in position 202 to 204 is any amino acid
  Variant (206)..(208): Xaa in position 206 to 208 is any amino acid
  Variant (210)..(211): Xaa in position 210 to 211 is any amino acid
  Variant (213)..(214): Xaa in position 213 to 214 is any amino acid
  Variant (220)..(220): Xaa in position 220 is any amino acid
  Variant (222)..(222): Xaa in position 222 is any amino acid
  Variant (224)..(225): Xaa in position 224 to 225 is any amino acid
  Variant (226)..(226): Xaa in position 226 is any or no amino acid
  Variant (228)..(236): Xaa in position 228 to 236 is any amino acid
  Variant (238)..(255): Xaa in position 238 to 255 is any amino acid
  Variant (256)..(283): Xaa in position 256 to 283 is any or no amino acid
  Variant (285)..(289): Xaa in position 285 to 289 is any amino acid
  Variant (290)..(290): Xaa in position 290 is any or no amino acid
LXXXXXXXXXXXXXXXXXXXXXXXLXXXXXXRXLLXGXXNGXGKXTXLXXLXGKXXXXXXXXXXVXXXXXFXXXXXXXXXXXXXXXXXXXXXXXXXXXXXXYLGXXWXXXXXXXXXXXXXXXDXXXXXXXXXVXGXXXXXRRXXLXXXLDIDXXWRMHXXSDGXRRRVQXXMGLLXPXXVLLLDEXTVDLDXXXRXXXLXFXXXEXXXRXXTXXYATHIXDXLXXXWXXXXXXXXXGXXXXXXXXXXXXXXXXXXXXXXXXXXXXXXXXXXXXXXXXXXXXXXLXXXXXXWL

SEQ ID NO: 7860 - protein, 60 aa, Artificial sequence
  protein pattern
  Variant (4)..(4): Xaa in position 4 is Glu or Gln
  Variant (5)..(5): Xaa in position 5 is Lys or Arg
  Variant (10)..(10): Xaa in position 10 is Ile or Leu
  Variant (11)..(11): Xaa in position 11 is Ala or Cys
  Variant (12)..(12): Xaa in position 12 is Leu or Met
  Variant (15)..(15): Xaa in position 15 is Ile, Leu or Val
  Variant (16)..(16): Xaa in position 16 is any amino acid
  Variant (17)..(17): Xaa in position 17 is Pro or Ser
  Variant (18)..(18): Xaa in position 18 is Phe, Trp or Tyr
  Variant (19)..(19): Xaa in position 19 is any amino acid
  Variant (20)..(20): Xaa in position 20 is Ile, Leu or Val
  Variant (26)..(27): Xaa in position 26 to 27 is any or no amino acid
  Variant (32)..(34): Xaa in position 32 to 34 is any amino acid
  Variant (36)..(37): Xaa in position 36 to 37 is any amino acid
  Variant (38)..(38): Xaa in position 38 is Phe or Leu
  Variant (40)..(40): Xaa in position 40 is any amino acid
  Variant (41)..(41): Xaa in position 41 is Phe, Trp or Tyr
  Variant (42)..(42): Xaa in position 42 is Phe or Leu
  Variant (43)..(44): Xaa in position 43 to 44 is any amino acid
  Variant (46)..(46): Xaa in position 46 is Cys, Ser or Thr
  Variant (47)..(47): Xaa in position 47 is Asp, Glu, Asn, Gln or Thr
  Variant (48)..(48): Xaa in position 48 is any amino acid
  Variant (50)..(50): Xaa in position 50 is any amino acid
  Variant (51)..(51): Xaa in position 51 is Ala or Cys
  Variant (52)..(52): Xaa in position 52 is any amino acid
  Variant (53)..(54): Xaa in position 53 to 54 is Ile, Leu or Val
  Variant (60)..(60): Xaa in position 60 is Phe or Leu
SDGXXRRVQXXXGLXXXXXXLLLDEXXVDLDXXXRXXXLXXXXXEXXXRXXXXXYATHIX

SEQ ID NO: 7861 - protein, 17 aa, Artificial sequence
  protein pattern
  Variant (3)..(3): Xaa in position 3 is any or no amino acid
  Variant (5)..(6): Xaa in position 5 to 6 is any or no amino acid
  Variant (8)..(8): Xaa in position 8 is Ser or Thr
  Variant (10)..(10): Xaa in position 10 is Ile or Leu
  Variant (12)..(12): Xaa in position 12 is Lys or Arg
  Variant (13)..(13): Xaa in position 13 is Ile or Leu
  Variant (15)..(15): Xaa in position 15 is Ala, Gly or Ser
GAXGXXKXTXLXXLXGK

SEQ ID NO: 7862 - protein, 17 aa, Artificial sequence
  protein pattern
  Variant (3)..(3): Xaa in position 3 is Ala, Asp or Glu
  Variant (4)..(4): Xaa in position 4 is Asp, Glu, His, Lys or Arg
  Variant (6)..(6): Xaa in position 6 is Ile, Leu or Val
  Variant (7)..(7): Xaa in position 7 is any amino acid
  Variant (8)..(8): Xaa in position 8 is Ile, Leu, Met or Val
  Variant (11)..(11): Xaa in position 11 is Ile or Val
  Variant (12)..(12): Xaa in position 12 is Asp or Asn
  Variant (13)..(14): Xaa in position 13 to 14 is any amino acid
  Variant (16)..(16): Xaa in position 16 is any amino acid
  Variant (17)..(17): Xaa in position 17 is Leu or Met
RRXXLXXXLDXXXXWXX

SEQ ID NO: 7863 - protein, 18 aa, Artificial sequence
  protein pattern
  Variant (2)..(2): Xaa in position 2 is Gly or Asn
  Variant (4)..(4): Xaa in position 4 is Ala, Asp, Glu or Ser
  Variant (5)..(5): Xaa in position 5 is any amino acid
  Variant (7)..(7): Xaa in position 7 is Ala or Pro
  Variant (8)..(8): Xaa in position 8 is Asp, Asn, Ser or Thr
  Variant (9)..(9): Xaa in position 9 is any amino acid
  Variant (10)..(10): Xaa in position 10 is Phe, Ile, Leu, Met or Val
  Variant (11)..(11): Xaa in position 11 is any amino acid
  Variant (12)..(12): Xaa in position 12 is His or Tyr
  Variant (13)..(13): Xaa in position 13 is Ile, Leu, Met or Val
  Variant (14)..(15): Xaa in position 14 to 15 is any amino acid
  Variant (17)..(17): Xaa in position 17 is any amino acid
  Variant (18)..(18): Xaa in position 18 is Ile, Leu or Val
DXLXXWXXXXXXXXXGXX

SEQ ID NO: 7864 - DNA, 1005 bp, Arabidopsis thaliana
  CDS (1)..(1005)
atggcacctgagatgaacaacaagttgagctacggagaaaagaagagagcgtacgttacgttcctcgccggaaccggagactacgtgaaaggagtggttggtctggctaaagggctaaggaaaactaaaagcaagtacccattagtggttgctgtgttacctgacgtgccggccgatcaccggagacagctattggaccaaggctgcgtcatcaaggagattcagccggtttacccaccggataaccaaactcagtttgctatggcttactacgtcctcaactactctaaacttcgtatttggaagtttgtagagtacagcaagctgatatacttagacggagacatacaagtgtttgagaacatagatcacttgtttgatcttcctgacggcaacttctacgccgttaaagactgtttctgcgagaagacttggagccacacgcctcagtacaagattggctactgccaacagtgtccggacaaggtgacgtggcctgagtcagagcttggtcctaagccaccgttgtacttcaacgccggcatgttcgtctacgagccaagcctccccacttattacaaccttttggagacactcaaagttgtccctcccacaccttttgctgaacaggatttcttgaacatgtacttcaaagacatatacaagcctattccaccagtttacaatcttgtcttggccatgctctggaggcatccagagaacatagagcttaacgaagctaaggttgttcattactgtgcagccggtgctaagccttggaggttcacaggccaagaaggaaatatggagagggaagacatcaagatgcttgtagagaaatggtgggacatttacaacgacgagtctcttgactacaaaaactttaatgtgcattgcggacaaaaagaagatgttcacaggaaaccgaaaacccttccacagttctttacagatttgtctgaagctgatgtgcttcaatgtgccaaagctccatccgcggcttag

SEQ ID NO: 7865 - protein, 334 aa, Arabidopsis thaliana
MAPEMNNKLSYGEKKRAYVTFLAGTGDYVKGVVGLAKGLRKTKSKYPLVVAVLPDVPADHRRQLLDQGCVIKEIQPVYPPDNQTQFAMAYYVLNYSKLRIWKFVEYSKLIYLDGDIQVFENIDHLFDLPDGNFYAVKDCFCEKTWSHTPQYKIGYCQQCPDKVTWPESELGPKPPLYFNAGMFVYEPSLPTYYNLLETLKVVPPTPFAEQDFLNMYFKDIYKPIPPVYNLVLAMLWRHPENIELNEAKVVHYCAAGAKPWRFTGQEGNMEREDIKMLVEKWWDIYNDESLDYKNFNVHCGQKEDVHRKPKTLPQFFTDLSEADVLQCAKAPSAA

SEQ ID NO: 7866 - DNA, 1005 bp, Arabidopsis thaliana; identical to SEQ ID NO: 7864
  CDS (13)..(1005)

SEQ ID NO: 7867 - protein, 330 aa, Arabidopsis thaliana
MNNKLSYGEKKRAYVTFLAGTGDYVKGVVGLAKGLRKTKSKYPLVVAVLPDVPADHRRQLLDQGCVIKEIQPVYPPDNQTQFAMAYYVLNYSKLRIWKFVEYSKLIYLDGDIQVFENIDHLFDLPDGNFYAVKDCFCEKTWSHTPQYKIGYCQQCPDKVTWPESELGPKPPLYFNAGMFVYEPSLPTYYNLLETLKVVPPTPFAEQDFLNMYFKDIYKPIPPVYNLVLAMLWRHPENIELNEAKVVHYCAAGAKPWRFTGQEGNMEREDIKMLVEKWWDIYNDESLDYKNFNVHCGQKEDVHRKPKTLPQFFTDLSEADVLQCAKAPSAA

SEQ ID NO: 7868 - DNA, 1026 bp, Oryza sativa
  CDS (1)..(1026)
atggctcctccccagcttgccggcaagatgaccgccaaggccgccgcggcggtgaagcccgcgacgagggcgtacgtgacgttcctcgcgggcgacggtgactactggaagggcgttgtcgggctggccaagggccttcgcaaggtgggctcggcctacccgctggtggtcgccgtcctccccgacgtgccggagtcccaccgccgcatcctcatctcccagggctgcatcgtccgggagatcgagccggtgtacccgccggagaaccagacgcagttcgccatggcctactacgtcatcaactactccaagctccgcatctgggagttcgtggagtacgagaggatggtgtaccttgacgccgacatccaggtgttcgacaacatcgacgagctgttcgagctgcccaaggggcacttctacgcggtgatggactgcttctgcgagaagacgtggagccacaccccgcagtaccagatcggctactgccagcagtgccccgacaaggtggcgtggccgaccgccgagctcggcccgccgccggcgctctacttcaacgccggcatgttcgtgcacgagcccagcatggccaccgccaagtccctgctcgacactctgcgcgtcaccacgcccactcccttcgcggagcaggatttcctgaacatgttcttcagggagcagtacaagccgatcccactgatctacaaccttgtcctggccatgctctggaggcatccagagaacgtccagctcgagaaggtcaaggtcgtgcactactgcgcagcgggatcgaagccgtggaggtacacgggcaaggaggcgaacatggacagggaggacatcaagatgctggtcaagaagtggtgggacgtctacaacgacggcagcctggacttcaagggcctcccgcccatcgcggccgccgacgacgccgacgaggtcgaggcggcggccaagaagccgctgcgcgccgcgctggcggaggcccgcaccgtcaagtacgtcacggcgccatcggccgcgtga

SEQ ID NO: 7869 - protein, 341 aa, Oryza sativa
MAPPQLAGKMTAKAAAAVKPATRAYVTFLAGDGDYWKGVVGLAKGLRKVGSAYPLVVAVLPDVPESHRRILISQGCIVREIEPVYPPENQTQFAMAYYVINYSKLRIWEFVEYERMVYLDADIQVFDNIDELFELPKGHFYAVMDCFCEKTWSHTPQYQIGYCQQCPDKVAWPTAELGPPPALYFNAGMFVHEPSMATAKSLLDTLRVTTPTPFAEQDFLNMFFREQYKPIPLIYNLVLAMLWRHPENVQLEKVKVVHYCAAGSKPWRYTGKEANMDREDIKMLVKKWWDVYNDGSLDFKGLPPIAAADDADEVEAAAKKPLRAALAEARTVKYVTAPSAA

SEQ ID NO: 7870 - DNA, 987 bp, Oryza sativa
  CDS (1)..(987)
atgatggggccgaacgtgtcgtcggagaagaaggcgttggcggcggcgaagaggagggcgtacgtgacgttcctggccggcgacggcgactactggaagggcgtcgtggggctcgccaaggggctccgccgcgtccgctcggcgtacccgctggtggtcgccgtgctcccggacgtccccggcgagcaccggcggaagctggtcgagcaggggtgcgtggtccgggagattcagccggtgtacccgccggagagccagacgcagttcgccatggcctactacgtgatcaactactcgaagctccgcatctgggagttcgtggagtacgagcggatggtctacctcgacgccgacatacaggtgttcgacaacatcgaccacctgttcgacctcgacaagggcgccttctacgccgtcaaggactgcttctgcgagaagacgtggagccacacgccgcagtacgacatcggctactgccagcagcgccccgacgaggtggcgtggccggagcgcgagctcggccccccgccgccgctctacttcaacgccggcatgttcgtccacgagcccggcctcggcaccgccaaggacctgctcgacgcgctcgtcgtcacgccgcccaccccgttcgccgagcaggacttcctcaacatgttcttccgcgaacagtacaagcccatccccaacgtctacaacctcgttctcgccatgctctggaggcacccggagaacgtcgacctcgaccaggtcaaggtcgtccattactgtgcagcgggttcgaagccatggaggttcaccgggaaggaggagaacatgaacagagaagatataaagatgctggtgaagaggtggtgggacatctacaacgacgagagcctcgactacaaggaggaggaggacaacgccgacgaggccagccagccgatgcggacggcgctcgccgaggccggcgccgtcaagtacttcccggcgccctccgccgcgtag

SEQ ID NO: 7871 - protein, 328 aa, Oryza sativa
MMGPNVSSEKKALAAAKRRAYVTFLAGDGDYWKGVVGLAKGLRRVRSAYPLVVAVLPDVPGEHRRKLVEQGCVVREIQPVYPPESQTQFAMAYYVINYSKLRIWEFVEYERMVYLDADIQVFDNIDHLFDLDKGAFYAVKDCFCEKTWSHTPQYDIGYCQQRPDEVAWPERELGPPPPLYFNAGMFVHEPGLGTAKDLLDALVVTPPTPFAEQDFLNMFFREQYKPIPNVYNLVLAMLWRHPENVDLDQVKVVHYCAAGSKPWRFTGKEENMNREDIKMLVKRWWDIYNDESLDYKEEEDNADEASQPMRTALAEAGAVKYFPAPSAA

SEQ ID NO: 7872 - DNA, 975 bp, Glycine max
  CDS (1)..(975)
atggctcctaatatcaccaccgtcaccgacgctcaagccaaggccgccggcgggcgtggccgtgcctacgtcaccttcctcgccggaaacggtgactatgtgaaaggtgtcgttggcttggccaaaggtctgaggaaggtgaaaagcatgtaccctctggtggttgcagtgttacccgatgttccagaacatcaccgaaacattctcacctcccaaggttgcattgttagagaaattgaacccgtgtaccctcctgagaatcagacgcagttcgccatggcatattacgtcatcaactattccaagctacgtatttgggagtttgtggagttcagcaagatgatatacctagacggtgatatacaagtgtttgacaatattgaccacttgtttgacttgcctgataactacttttatgcggtgatggactgtttttgtgagcccacttggggccacactctgcagtatcaaatcggatactgccagcagtgccctcataaggttcagtggcccactcactttgggcccaagcctcctctctatttcaatgctggcatgtttgtttatgagcccaatctggatacctaccgtgacctccttcaaactgtccaagtcactaagcccacttcctttgctgaacaggattttttgaacatgtacttcaaggacaaatataggccaattcctaatgtctataatcttgtgttggccatgctgtggcgtcaccctgagaacgttgagcttgaaaaagttaaagtggttcactactgtgctgctggatctaagccttggaggtacacagggaaggaggaaaatatggagagagaagatatcaagatgttggtgaagaagtggtgggatatatatgaggatgagactttggactacaacaatccattcaacgtggataggttcactgcggcacttttggaggttggtgaagtcaagttcgtccgtgccccatctgctgcttag

SEQ ID NO: 7873 - protein, 324 aa, Glycine max
MAPNITTVTDAQAKAAGGRGRAYVTFLAGNGDYVKGVVGLAKGLRKVKSMYPLVVAVLPDVPEHHRNILTSQGCIVREIEPVYPPENQTQFAMAYYVINYSKLRIWEFVEFSKMIYLDGDIQVFDNIDHLFDLPDNYFYAVMDCFCEPTWGHTLQYQIGYCQQCPHKVQWPTHFGPKPPLYFNAGMFVYEPNLDTYRDLLQTVQVTKPTSFAEQDFLNMYFKDKYRPIPNVYNLVLAMLWRHPENVELEKVKVVHYCAAGSKPWRYTGKEENMEREDIKMLVKKWWDIYEDETLDYNNPFNVDRFTAALLEVGEVKFVRAPSAA

SEQ ID NO: 7874 - DNA, 987 bp, Glycine max
  CDS (1)..(987)
atggctcctaatatcaccactgtcaaaaccaccatcaccgacgctcaagccaaggtcgccaccgatcatggtcgtgcctacgtcaccttcctcgccggaaacggtgactatgtgaaaggtgtcgttggcttggcaaaaggtctgagaaaagtgaagagcatgtaccctctggtggttgcagtgctacccgatgttccccaagatcaccgcaacattctcacctcccaaggttgcattgttagagagattgagcccgtgtaccccccagagaatcaaacccagtttgccatggcatattacgtcatcaactattccaagctacgtatttgggagtttgtggagtacagcaagatgatatacctagacggtgatatccaagtttttgacaacattgaccacttgtttgacttgcctgataactacttctatgcggtgatggactgtttctgtgagccaacttggggccacactaaacaatatcagatcggttactgccagcagtgcccccataaggttcagtggcccactcactttgggcccaaacctcctctctatttcaatgctggcatgtttgtgtatgagcccaatttggctacttaccgtgacctccttcaaacagtccaagtcacccagcccacttcctttgctgaacaggattttttgaacatgtacttcaaggacaaatataggccaattcctaatgtctacaatcttgtgctggccatgctgtggcgtcaccctgagaacgttgagcttgacaaagttaaagtggttcactactgtgctgctgggtctaagccttggaggtacactgggaaggaggagaatatggagagagaagatatcaagatgttagtgaaaaagtggtgggatatatatgaggatgagactttggactacaacaatccactcaatgtggataagttcactgcggcacttatggaggttggtgaagtcaagttcgtccgtgccccatctgctgcttaa

SEQ ID NO: 7875 - protein, 328 aa, Glycine max
MAPNITTVKTTITDAQAKVATDHGRAYVTFLAGNGDYVKGVVGLAKGLRKVKSMYPLVVAVLPDVPQDHRNILTSQGCIVREIEPVYPPENQTQFAMAYYVINYSKLRIWEFVEYSKMIYLDGDIQVFDNIDHLFDLPDNYFYAVMDCFCEPTWGHTKQYQIGYCQQCPHKVQWPTHFGPKPPLYFNAGMFVYEPNLATYRDLLQTVQVTQPTSFAEQDFLNMYFKDKYRPIPNVYNLVLAMLWRHPENVELDKVKVVHYCAAGSKPWRYTGKEENMEREDIKMLVKKWWDIYEDETLDYNNPLNVDKFTAALMEVGEVKFVRAPSAA

SEQ ID NO: 7876 - DNA, 1008 bp, Glycine max
  CDS (1)..(1008)
atggctcctgaacttgtccccaccgttgcgttcacgaaacccgcaacccttccaaggcgtgcctacgtgacattcctcgccggaaacggtgactacgtgaaaggggtcgttggtcttgccaaagggttgcgaaaggtgaaaaccgcgtacccattggtggtggcggtcctcccagatgtgccggaggaccaccgtaagatcctggagtctcagggctgcatcgtccgcgagatcgaacccgtttacccgcccgaaaaccaaacccagttcgccatggcttattacgtcattaactactccaagctccgtatatgggagtttgtggaatacaccaagatgatatacttggacggagacattcaggtatatgagaacatagaccacctatttgacctacctggtggttacttttacgctgtgatggattgtttctgcgagaagacatggagtcacacccctcagtacaaggtggggtactgccagcaatgcccggagaaggtgcagtggcccaccgaattgggccagccaccttctctttacttcaacgccggcatgttcgtgttcgagcccagcatcgccacctaccatgacctattaaaaacagtgcaagtcaccactcccacttcgttcgcagaacaagatttcttgaacatgtacttcaaggatatttacaagccaatccctttaaattacaatcttgtccttgccatgctctggcgccacccagaaaatgttaaattagaccaagtcaaggttgttcactattgcgcagcggggtcgaaaccgtggagatatacggggaaggaagagaacatgcagagggaggacataaagatgctggtgaaaaaatggtgggatatctacaatgatgcttcgcttgactacaagccattgatgagtgcaagtgaagctccagcaccggatggtgttgacaatattgaaccattcgtgcaggctctgtcagaggttggtcatgttcaatatgtcactgcgccctcagcagcttaa

SEQ ID NO: 7877 - protein, 335 aa, Glycine max
MAPELVPTVAFTKPATLPRRAYVTFLAGNGDYVKGVVGLAKGLRKVKTAYPLVVAVLPDVPEDHRKILESQGCIVREIEPVYPPENQTQFAMAYYVINYSKLRIWEFVEYTKMIYLDGDIQVYENIDHLFDLPGGYFYAVMDCFCEKTWSHTPQYKVGYCQQCPEKVQWPTELGQPPSLYFNAGMFVFEPSIATYHDLLKTVQVTTPTSFAEQDFLNMYFKDIYKPIPLNYNLVLAMLWRHPENVKLDQVKVVHYCAAGSKPWRYTGKEENMQREDIKMLVKKWWDIYNDASLDYKPLMSASEAPAPDGVDNIEPFVQALSEVGHVQYVTAPSAA

SEQ ID NO: 7878 - DNA, 993 bp, Glycine max
  CDS (1)..(993)
atgccacctaacatcaccaccgttgttgccaatgtcaccaccgagcaattacccaaggctcgtggaggaagtgggcgtgccttcgtgacctttcttgctgggaacggtgattacgtaaagggtgtcgtgggtttggccaaaggactgagaaaggccaaaagcatgtaccctttggtggttgctgtgttaccagatgttcctgaagaacatcgtgagattctcaaatcccaaggttgcattgtcagggagattgaacctgtgtaccctcctgagaaccagacccagttcgccatggcctattatgtcatcaattactccaagctacgtatttgggagttcgtggagtacaagaagacgatatacctagacggtgacatccaagtatttggaaacatagaccacttgtttgatctgcctgataattatttctatgcggtgatggattgtttctgcgagaagacttggagccacacccctcagttccagattgggtactgccaacagtgccctgataaggttcaatggccctctcactttggttccaaacctcctctatatttcaatgctggcatgtttgtttatgagcctaatctcgacacctaccgtgatcttctccaaactgtccaactcaccaagcccacttcttttgctgagcaggactttctcaacatgtacttcaaggacaagtacaagccaataccgaacatgtacaaccttgtgctggccatgttgtggcgtcaccctgaaaatgttgaacttgataaagttcaagtggttcattactgtgctgctgggtctaagccttggaggttcactgggaaggaagagaacatggatagggaagatatcaagatgcttgtgaagaagtggtgggacatatatgaagatgagacactggactacaataacaactctgtcaacgtggaacgtttcacatcggcactattggatgctgggggctttcagtttgtgccagcaccttctgctgcctaa

SEQ ID NO: 7879 - protein, 330 aa, Glycine max
MPPNITTVVANVTTEQLPKARGGSGRAFVTFLAGNGDYVKGVVGLAKGLRKAKSMYPLVVAVLPDVPEEHREILKSQGCIVREIEPVYPPENQTQFAMAYYVINYSKLRIWEFVEYKKTIYLDGDIQVFGNIDHLFDLPDNYFYAVMDCFCEKTWSHTPQFQIGYCQQCPDKVQWPSHFGSKPPLYFNAGMFVYEPNLDTYRDLLQTVQLTKPTSFAEQDFLNMYFKDKYKPIPNMYNLVLAMLWRHPENVELDKVQVVHYCAAGSKPWRFTGKEENMDREDIKMLVKKWWDIYEDETLDYNNNSVNVERFTSALLDAGGFQFVPAPSAA

SEQ ID NO: 7880 - DNA, 1147 bp, Gossypium hirsutum
  CDS (90)..(1103)
gcttataactgtaagagctctcttcagtcctcctccatcagtgatctcaatctccatcctatatatctcaccaagtaacacacactctcatggctcctgaactggttcaagcaggtgttaaaccaactgtgttggctaaaccagtcaccttgcccaagcgagcttacgttaccttcttggctggcgatggagattacgtgaaaggcgttgtagggttagccaaagggttaaggcaggtgaaatccgcataccctttagtggttgccgttttgcccgacgttcccgaggagcacaggcggatcctggagaaccaggggtgtatcgtccgagagatcgaacccgtttacccgcccgagaatcagacccagttcgccatggcttactacgtcatcaactattccaagctccgtatttggaagttcgtggagtacagtaagatgatatacctggacggggatattcaggtgtacgagaatattggcctcctattcgacttgcctgacgggcaattctatgcagtaatggactgtttctgtgagaaaacgtggagtcataccccacaattcaagatcggttactgccaacagtgccctgacaaggtcaagtggcccgccgagatgggtcagccacctgcactttacttcaatgctggcatgtttgtgtttgagcccagtcttaccacctatgaaaacctcttggctactcttaaaagcacccctcctaccccatttgccgagcaggactttttgaacatgtactttaaggacatttacaaaccaattcctttggtctacaacctggttctcgccatgttatggcgtcatcccgacaacgtggagcttgacaaagtgaaggttgttcactactgtgcagcgggatcgaagccatggaggtacacagggaaagaagagaacatgcaaagagaagacgtgaagatgttggttcagaaatggtgggatatttacaacgacgagtctcttgattacgaaaaaccaaccattggtgaaggacaggcggcagagccggtgaacatgcagccgttcctggtggcactctcagaagctggtgcagtccaatacgtaacggccccatcagcggcttaataataaacaacatggccagctctgttttagaagaacaacgatcc

SEQ ID NO: 7881 - protein, 337 aa, Gossypium hirsutum
MAPELVQAGVKPTVLAKPVTLPKRAYVTFLAGDGDYVKGVVGLAKGLRQVKSAYPLVVAVLPDVPEEHRRILENQGCIVREIEPVYPPENQTQFAMAYYVINYSKLRIWKFVEYSKMIYLDGDIQVYENIGLLFDLPDGQFYAVMDCFCEKTWSHTPQFKIGYCQQCPDKVKWPAEMGQPPALYFNAGMFVFEPSLTTYENLLATLKSTPPTPFAEQDFLNMYFKDIYKPIPLVYNLVLAMLWRHPDNVELDKVKVVHYCAAGSKPWRYTGKEENMQREDVKMLVQKWWDIYNDESLDYEKPTIGEGQAAEPVNMQPFLVALSEAGAVQYVTAPSAA

SEQ ID NO: 7882 - DNA, 1464 bp, Gossypium hirsutum
  CDS (117)..(1127)
gctccctcgccctccgaccccagcaaaggcagtccctaaaatcttgctctcttcactcctcctattttaaccatttcttccttgtcctcgccccttccctagcaagctacatttccatggccccccctgaattggttcaacccagtgataaaacaaacgttttcgctaaacaagtcagtttgcgtaatcgtgcatatgttacgttcttggccggaaatggggactacgtgaaaggcgttgtagggttagccaaagggttaaggaaagtgaaatcggcgtaccctttagtggttgccgttttacccgacgtgcctgaggagcataggcggatcctggagaaccagggttgtatcgtccgagagatcgaaccagtttacccgcctgagaaccagacccagttcgccatggcctattacgtcatcaattactccaagcttcgtatttgggagttcgtggagtacagtaaaatgatatacttggacggcgacattcaggtatacgacaacatcgatcacctgtttgatctgcctgatgggcatttctacgcagtaatggattgcttctgtgagaaaacatggagccacaccccacaatacaggatcggttactgccaacaatgccctgacatggtgaagtggcccgccgagatgggaaatccccctgcactttacttcaatgctggcatgttcgtgtttgagcccagccttgtgacttatgaatctctcttgaagactctcaaaatcacacaacctaccccatttgcggagcaggactttttgaaaatgttctttaaggacatttacaagccgattcctttaatttacaaccttgctctcgccatgtcatggcgtcatcccgagaatgtggagcttgaaaaagtgaaagttgttcactactgtgctgcgggatctaagccttggaggtacacagggaaggaggctaacatgcaaagagaagacattaagatgcttgttcagaaatggtgggacatttacaacgacgagtcacttgattaccgtaccagcgcggctgaaggagggacagagaccgtgaacctgcaaccgttcctggtggcactctctgaagttggtgcagtccatttcgtggccgccccatctgcggcgtaaatatgttgtgtaacgacgataaataccagttcataggtgtaaagaaatattgtaagaatcgagaaaggggcgatcctatgtggaaaacaaaggtggttttaaacaagggttggggaattggtgaaacgctcttagggggttttaaaactatttagggcgttgttttttcttgatgaatggtgatgaaggtcgagtgtggggtcaaagtgggtgtctgtttattgtgtggctctggcaaaaagtcttgctgataaaatgtctttggggtctggggccttcggcatcggtgactttcggcaattgtgacatgaaaatagaaaacaagtttgtgaattcc

SEQ ID NO: 7883 - protein, 336 aa, Gossypium hirsutum
MAPPELVQPSDKTNVFAKQVSLRNRAYVTFLAGNGDYVKGVVGLAKGLRKVKSAYPLVVAVLPDVPEEHRRILENQGCIVREIEPVYPPENQTQFAMAYYVINYSKLRIWEFVEYSKMIYLDGDIQVYDNIDHLFDLPDGHFYAVMDCFCEKTWSHTPQYRIGYCQQCPDMVKWPAEMGNPPALYFNAGMFVFEPSLVTYESLLKTLKITQPTPFAEQDFLKMFFKDIYKPIPLIYNLALAMSWRHPENVELEKVKVVHYCAAGSKPWRYTGKEANMQREDIKMLVQKWWDIYNDESLDYRTSAAEGGTETVNLQPFLVALSEVGAVHFVAAPSAA

SEQ ID NO: 7884 - DNA, 1020 bp, Glycine max
  CDS (1)..(1020)
atggctcctgaacttgtccccaccgttgtgaaatccagtgctgcgttcacgaaacccgcgacccttccaaggcgtgcctacgtgacattcctcgccggaaacggtgactacgtgaaaggggtggttggcctcgccaaagggttgcgaaaggtgaaaaccgcgtacccgttggtggtggctgtcctccccgatgtgccggaggagcaccgtaagatcctggagtctcagggctgcatcgttcgcgagatcgaacccgtttacccacccgaaaaccaaacccagtttgccatggcttattacgtcatcaactactccaagctccgtatatgggagtttgtggagtacagcaagatgatatacttggacggagacattgaggtatatgagaacatagaccacctatttgacctacctgatggtaacttttacgctgtgatggattgtttctgcgagaagacatggagtcacacccctcagtacaaggtgggttactgccagcaatgcccggagaaggtgcggtggcccaccgaattgggtcagcccccttctctttacttcaacgctggcatgttcgtgttcgaacccaacatcgccacctatcatgacctattgaaaacggtgcaagtcaccactcccacctcgttcgctgaacaagatttcttgaacatgtacttcaaggacatttacaagccaatccctttaaattacaatcttgtcctcgccatgctgtggcgccacccggaaaacgttaaattagaccaagtcaaggttgttcactattgcgcagcggggtccaagccatggagatatacggggaaggaagagaatatgcagagggaggacataaagatgctggtgaagaaatggtgggatatctacaatgatgcttcgcttgactacaagccattgatgaatgcaagtgaagctccagcagcggatggtgttgacattgaacaattcgtgcaggctctatcagaggttggtcatgttcaatatgtcaccgcgccttcagcagcttaa

SEQ ID NO: 7885 - protein, 339 aa, Glycine max
MAPELVPTVVKSSAAFTKPATLPRRAYVTFLAGNGDYVKGVVGLAKGLRKVKTAYPLVVAVLPDVPEEHRKILESQGCIVREIEPVYPPENQTQFAMAYYVINYSKLRIWEFVEYSKMIYLDGDIEVYENIDHLFDLPDGNFYAVMDCFCEKTWSHTPQYKVGYCQQCPEKVRWPTELGQPPSLYFNAGMFVFEPNIATYHDLLKTVQVTTPTSFAEQDFLNMYFKDIYKPIPLNYNLVLAMLWRHPENVKLDQVKVVHYCAAGSKPWRYTGKEENMQREDIKMLVKKWWDIYNDASLDYKPLMNASEAPAADGVDIEQFVQALSEVGHVQYVTAPSAA

SEQ ID NO: 7886 - DNA, 1035 bp, Zea mays
  CDS (1)..(1035)
atgtctcccgagctgaccggcaagatggccgccaaggccgccgccgccgctgcggcggtgaagcccgcgacgagggcgtacgtgacgttcctggcgggcaacggcgactactggaagggcgtggtgggcctggccaagggcctgcgcaaggtcggctcggcctatcccctggtggtggcccttctgcccgacgtgccggagtcccaccgccgcatcctcgtctcgcagggctgcatcctccgcgagatcgagcccgtgtacccgcctgagaaccagacgcagttcgccatggcgtactacgtcatcaactactccaagctccgcatctgggagttcgtggagtacgagaagatggtgtacctggacgcggacatccaggtgttcgagaacatcgacgagctgttcgagctcgagaaagggtacttctacgcggtgatggactgcttctgcgaaaagacgtggagccacaccccgcagtacaagatcgggtactgccaacagtgcccggacaaggtgacgtggccgaccaccgagctgggccctccgcccccgctctacttcaatgccgggatgttcgcgcacgagcccagcatggccaccgccaaggcactcctcgacaccctccgcgtcactccgcccacccccttcgcagagcaagacttcctgaacatgttcttcagggaccagtacaggccgatccctaacgtgtacaacctcgtgctccccatgctctggaggcaccccgagaacgtgcaacttgagaaagtgaaagtcgtgcactactgcgcggcggggtccaagccgtggaggttcacgggcaaggaggccaacatggacagggaggacatcaagtcgctggtgaacaagtggtgggacatctacaacgacgagtcgctggacttcaagggcctgcccctctcgcccgccgacgccgacgccgacgacgaggtggaggcggtggccaagaagccgctccgcgcggcgctggcggaggccggcacggtcaagtacgtcaccgcgccctcggccgcgtga

SEQ ID NO: 7887 - protein, 344 aa, Zea mays
MSPELTGKMAAKAAAAAAAVKPATRAYVTFLAGNGDYWKGVVGLAKGLRKVGSAYPLVVALLPDVPESHRRILVSQGCILREIEPVYPPENQTQFAMAYYVINYSKLRIWEFVEYEKMVYLDADIQVFENIDELFELEKGYFYAVMDCFCEKTWSHTPQYKIGYCQQCPDKVTWPTTELGPPPPLYFNAGMFAHEPSMATAKALLDTLRVTPPTPFAEQDFLNMFFRDQYRPIPNVYNLVLPMLWRHPENVQLEKVKVVHYCAAGSKPWRFTGKEANMDREDIKSLVNKWWDIYNDESLDFKGLPLSPADADADDEVEAVAKKPLRAALAEAGTVKYVTAPSAA

SEQ ID NO: 7888 - DNA, 1047 bp, Zea mays
  CDS (1)..(1047)
atggctcccgagctgatgacagccaagatgaccgccaatgccgccgcggcggcggcggcggcggcggcggcgaagcctgccacgagggcgtacgtgacgttcctggcgggcgacggcgactactggaagggcgtggtggggctggccaagggcctccgcaaggtccgctcggcctaccccctggtggtggccgtgctgcccgacgtgcccgagtcccaccgccgcatcctcgtctcgcagggctgcgtcgtccgcgagatcgagcccgtgtacccgcctgagaaccagacgcagttcgccatggcgtactacgtcatcaactactccaagctccgcatctgggagttcgtggagtacgagaggatggtgtacctggacgcggacatccaggtgttcgagaacatcgacggcctgttcgagctcgagaaagggtacttctacgcggtgatggccggcttctgcgaaaaaacgtggagccacaccccgcagtacaggatcggctactgccaacagtgcccggacaaggtggcgtggccaacgcgaacggccgagctgggcctcccgccgtcctcctacttcaacgccggaatgttcttgaaggagccaaacttggcaaccgcaaaggggtcccccgaaaccctccggttgattccgccaacccccttcgcaaagaaggacttcctgaaaatgttcttcagggataattacaggccgatccccaacgtttacaacctcgtgctggccatgctttggaggcaccccgagaacgtgcagctggagaaggtgaaggtcgtgcattattgcgcggcggggtccaagccgtggaggttcacgggcaaggaggcgaacatggacagggaggacatcaacgccctggtgaagaagtggtgggacatctacaacgacgagacgctggacttgaagggctgcctcgcttctcgcccgacgacgacgacgaggtggaggcggtgcccaagaagccgcttcgcgcggccttggcggaggccggcacggtcaaagtacgtcaccgcgccctcggccgcgtga

SEQ ID NO: 7889 - protein, 348 aa, Zea mays
MAPELMTAKMTANAAAAAAAAAAAKPATRAYVTFLAGDGDYWKGVVGLAKGLRKVRSAYPLVVAVLPDVPESHRRILVSQGCVVREIEPVYPPENQTQFAMAYYVINYSKLRIWEFVEYERMVYLDADIQVFENIDGLFELEKGYFYAVMAGFCEKTWSHTPQYRIGYCQQCPDKVAWPTRTAELGLPPSSYFNAGMFLKEPNLATAKGSPETLRLIPPTPFAKKDFLKMFFRDNYRPIPNVYNLVLAMLWRHPENVQLEKVKVVHYCAAGSKPWRFTGKEANMDREDINALVKKWWDIYNDETLDLKGCLASRPTTTTRWRRCPRSRFARPWRRPARSKYVTAPSAA

SEQ ID NO: 7890 - DNA, 1038 bp, Zea mays
  CDS (1)..(1038)
atggctcccgagctgatgacagccaagatgaccgccaaagccgcggcggcggcggcggcggtgaagcctgccacgagggcgtacgtgacgttccttgcgggcgacggcgactactggaagggcgtggtggggctggccaaaggcctgcgcaaggtccgctcggcctaccccctggtggtggcggtgctgcccgacgtgcccgagtcccaccgccgcatcctcgtctcgcagggctgcgtcgtccgcgagatcgagcccgtgtacccgcctgagaaccagacgcagttcgccatggcgtactacgtcatcaactactccaagctccgcatctgggagttcgtggagtacgagaggatggtgtacctggacgcggacatccaggtgttcgagaacatcgacggcctgttcgagctcgagaaggggtacttctacgcggtgatggactgcttctgcgagaagacgtggagccacaccccgcagtacaggatcggctactgccagcagtgcccggacaaggtggcgtggccagcggcgaccgccgagctgggccctccgccgtcgctctacttcaacgccggcatgttcgtgcacgagcccagcgtggccaccgccaaggcgctcctcgacaccctccgcgtgactccgcccacccccttcgcagagcaggacttcctgaacatgttcttcagggatcagtacaggccgatccccaacgtgtacaacctcgtgctggccatgctctggaggcaccccgagaacgtgcagctggagaaggtgaaggtcgtgcactactgcgcggcggggtccaagccgtggaggttcacgggcaaggaggcgaacatggacagggaggacatcaacgccctggtgaacaagtggtgggacatctacaacgacgagacgctggacttgaagggcctgccctcgctctcgcccgacgacgacgacgaggtggaggcggtggccaagaagccgcttcgcgcggccctggcggaggccggcacggtcaagtacgtcaccgcgccctcggccgcgtga

SEQ ID NO: 7891 - protein, 345 aa, Zea mays
MAPELMTAKMTAKAAAAAAAVKPATRAYVTFLAGDGDYWKGVVGLAKGLRKVRSAYPLVVAVLPDVPESHRRILVSQGCVVREIEPVYPPENQTQFAMAYYVINYSKLRIWEFVEYERMVYLDADIQVFENIDGLFELEKGYFYAVMDCFCEKTWSHTPQYRIGYCQQCPDKVAWPAATAELGPPPSLYFNAGMFVHEPSVATAKALLDTLRVTPPTPFAEQDFLNMFFRDQYRPIPNVYNLVLAMLWRHPENVQLEKVKVVHYCAAGSKPWRFTGKEANMDREDINALVNKWWDIYNDETLDLKGLPSLSPDDDDEVEAVAKKPLRAALAEAGTVKYVTAPSAA

SEQ ID NO: 7892 - DNA, 1008 bp, Arabidopsis thaliana
  CDS (1)..(1008)
atggcacctgagatcaataccaaactcaccgtaccggtccactcagcaaccggcggagaaaagagggcgtacgtgactttccttgctggaactggagactacgtgaaaggggtggtgggtcttgctaaggggctaaggaaagctaagagcaagtacccactcgtggtggcggttttgccggatgtaccggaggatcaccggaaacagttggtggatcaaggctgtgttgttaaggagatagagccggtttatccaccggagaatcaaaccgagtttgctatggcttactatgtcattaactactctaagcttcgtatctgggagttcgtggagtacaacaagatgatatacttggacggtgacatacaagtgttcgacaacatagatcacttgtttgatcttccaaacggccaattctatgcagttatggactgtttttgcgagaagacatggagtcactcgccacagtacaagatcggttattgccaacagtgtccggacaaggtgacatggccagaggccaagcttggtcctaagccgcctttgtacttcaacgccggtatgttcgtttacgagcctaacctctccacttatcataacctcttggagacggtcaaaattgtgcctcccactctttttgctgaacaggattttttgaatatgtacttcaaggacatatacaagccaataccaccagtgtataacttggtcttggcaatgctttggaggcatccagagaatatagagcttgaccaagtcaaagttgttcactactgtgctgctggtgctaaaccttggagattcactggagaagaagagaacatggacagagaagacattaagatgctggtcaagaaatggtgggacatttacaatgacgagtctcttgattacaagaatgttgtcattggggacagccacaagaagcaacagacacttcagcagtttatcgaagctttgtctgaagccggtgcgcttcagtatgtcaaagctccatctgcagcttag

SEQ ID NO: 7893 - protein, 335 aa, Arabidopsis thaliana
MAPEINTKLTVPVHSATGGEKRAYVTFLAGTGDYVKGVVGLAKGLRKAKSKYPLVVAVLPDVPEDHRKQLVDQGCVVKEIEPVYPPENQTEFAMAYYVINYSKLRIWEFVEYNKMIYLDGDIQVFDNIDHLFDLPNGQFYAVMDCFCEKTWSHSPQYKIGYCQQCPDKVTWPEAKLGPKPPLYFNAGMFVYEPNLSTYHNLLETVKIVPPTLFAEQDFLNMYFKDIYKPIPPVYNLVLAMLWRHPENIELDQVKVVHYCAAGAKPWRFTGEEENMDREDIKMLVKKWWDIYNDESLDYKNVVIGDSHKKQQTLQQFIEALSEAGALQYVKAPSAA

SEQ ID NO: 7894 - DNA, 999 bp, Arabidopsis thaliana
  CDS (1)..(999)
atgacccctgaaactcatgtggacatgatcaatgcatccgagaaggctcctaaggagagagcctacgtgacgtttttggcaggaaatggagactacgtgaagggagtggtgggattagcaaagggtttgcggaaggtcaaaagtgcgtatcctcttgttgttgctatgttacctgatgtgcctgaagaacatagagagatcttgaggtctcaaggatgcattgtgcgtgagatcgagcctgttcatcctccagatagccaagatgcatacgcaagggcttattacattattaactactcaaaactgcgaatttggaattttgaagagtacaacaagatgatctacttggacgcagatattcaagtctttggcaatatcgatgacctctttgatatgcaagatggctatttacatggcgtgttgagttgtttctgtgagaaaatatggagttacactcctctctactcgatcggctattgtcaatattgtcctgagaaggtcgtgtggcccgccgagatggaatctgctcctccctctccatacttcaatgccggtatgtttgtatttgagcctaatcctttgacgtatgagagtctccttcagaccctccaggtcacacctcctacaccatttgcggagcaagattttctcaatatgttctttgggaaggtctttaaaccggtatctccggtatacaacctgattttgtctgtgctttggcgccatccggggaaggttgacttggagagtgtcaaagttgttcactactgtccacctggatccaagccatggaggtacacaggagaagaacctaacatggacagagaagacgtcaaaatgttaattaagaaatggtgggatatctacaatgacgagtctcttgattttaaaccgaaaagccctgcagatttggaagcaaccgttttggaatcaacaattatagcttcggtaaccgaagcaccactttcctactctcctgctgcaccttctgccgcttga

SEQ ID NO: 7895 - protein, 332 aa, Arabidopsis thaliana
MTPETHVDMINASEKAPKERAYVTFLAGNGDYVKGVVGLAKGLRKVKSAYPLVVAMLPDVPEEHREILRSQGCIVREIEPVHPPDSQDAYARAYYIINYSKLRIWNFEEYNKMIYLDADIQVFGNIDDLFDMQDGYLHGVLSCFCEKIWSYTPLYSIGYCQYCPEKVVWPAEMESAPPSPYFNAGMFVFEPNPLTYESLLQTLQVTPPTPFAEQDFLNMFFGKVFKPVSPVYNLILSVLWRHPGKVDLESVKVVHYCPPGSKPWRYTGEEPNMDREDVKMLIKKWWDIYNDESLDFKPKSPADLEATVLESTIIASVTEAPLSYSPAAPSAA

SEQ ID NO: 7896 - DNA, 1005 bp, Arabidopsis thaliana
  CDS (1)..(1005)
atggcccctgagatttccgtaaacccgatgtatttatccgaaaaggcgcatcaagcacctccaaggagagcttatgtgacgtttttggcaggaaatggagactacgtgaagggagtggtgggactagcaaagggtttgcgtaaggtcaaaagtgcgtatcctcttgttgttgctatgttacctgatgtgcctgaggaacatagagagatcttgaggtctcaaggctgtgtcgtgcgtgagatcgaacctgtttatcctccagacaaccaagttgagtttgccatggcttattacgttctcaactactcaaaacttcgtatttggaactttgaagagtacagcaagatgatataccttgacgcagatattcaagtctttgacaatatcgatcacctctttgatttgtctgatgcatatttctatgccgtgatggactgtttctgtgagaaaacatggagccactcgctgcagtattcaattgggtattgtcaacagtgcccggagaaggtcacgtggccagaagatatggaatctccacctcctcctctgtatttcaacgccggtatgtttgtgtttgagcctagtcctttgacttatgagagtctccttcagaccctggagatcacaccaccttcaccgtttgcagaacaagattttctcaatatgttctttgagaaagtgtacaaaccgatccctttggtatacaatctggttttggctatgctttggcgtcacccggagaacgtggagctggagaaagtcaaagttgttcactactgtgcagctggatccaagccatggagatacacaggagaagaagctaacatggacagagaagacatcaagatgttagttgataaatggtgggatgtctataatgatgaatctctcgatttcaaatcgaaaatccctgcagatgcggaagaaaccgttacaaaatcaagcatcctagcttccgttcttgaaccagaaatgacctactttcctgctccttctgctgcttga

SEQ ID NO: 7897 - protein, 334 aa, Arabidopsis thaliana
MAPEISVNPMYLSEKAHQAPPRRAYVTFLAGNGDYVKGVVGLAKGLRKVKSAYPLVVAMLPDVPEEHREILRSQGCVVREIEPVYPPDNQVEFAMAYYVLNYSKLRIWNFEEYSKMIYLDADIQVFDNIDHLFDLSDAYFYAVMDCFCEKTWSHSLQYSIGYCQQCPEKVTWPEDMESPPPPLYFNAGMFVFEPSPLTYESLLQTLEITPPSPFAEQDFLNMFFEKVYKPIPLVYNLVLAMLWRHPENVELEKVKVVHYCAAGSKPWRYTGEEANMDREDIKMLVDKWWDVYNDESLDFKSKIPADAEETVTKSSILASVLEPEMTYFPAPSAA

SEQ ID NO: 7898 - DNA, 1035 bp, Arabidopsis thaliana
  CDS (1)..(1035)
atggctccggggcttactcaaaccgctgatgctatgtccaccgtgacgataacaaaaccgtcactgccatcagtccaagacagcgatcgagcttacgtgacgtttcttgctggaaacggtgattacgtgaaaggagtcgttggtttagccaaagggttaaggaaagtcaaatcggcttatccactcgtagtagcgatgttacccgacgtcccggaggaacaccgtcgtatacttgtggatcaaggatgcatcgtccgtgaaatcgaacccgtttacccacccgagaaccaaactcagttcgccatggcttattacgtcatcaactactctaaactccgtatctggaagtttgtggagtatagtaaaatgatatatttagatggagacattcaagtttacgaaaacatcgatcacttgtttgacctaccagatggctatttgtacgcggtgatggattgtttctgtgagaaaacatggagtcacacgccgcaatacaagatcagatattgccaacaatgccccgacaaagtccagtggccaaaagcggagcttggagagccaccggctctttacttcaacgccggaatgttcttgtacgagcctaacctcgagacttacgaggatctactacgaacacttaaaatcactcctccgactcctttcgctgaacaggattttttgaacatgtactttaagaaaatctacaagccgattcctttagtgtacaatctcgtccttgcgatgttatggcgtcacccagaaaatgtagagcttggaaaagtcaaggtggttcactactgtgcagcgggttcgaagccgtggagatacacagggaaagaagcgaacatggagagggaagatataaaaatgttagtgaaaaaatggtgggacatttacgacgacgaatccttggattacaagaaacctgttaccgttgtggacacagaggtcgatctcgtgaatctgaagccgttcatcaccgctcttactgaagctggccggctcaactacgtgaccgcaccgtccgctgcttga

SEQ ID NO: 7899 - protein, 344 aa, Arabidopsis thaliana
MAPGLTQTADAMSTVTITKPSLPSVQDSDRAYVTFLAGNGDYVKGVVGLAKGLRKVKSAYPLVVAMLPDVPEEHRRILVDQGCIVREIEPVYPPENQTQFAMAYYVINYSKLRIWKFVEYSKMIYLDGDIQVYENIDHLFDLPDGYLYAVMDCFCEKTWSHTPQYKIRYCQQCPDKVQWPKAELGEPPALYFNAGMFLYEPNLETYEDLLRTLKITPPTPFAEQDFLNMYFKKIYKPIPLVYNLVLAMLWRHPENVELGKVKVVHYCAAGSKPWRYTGKEANMEREDIKMLVKKWWDIYDDESLDYKKPVTVVDTEVDLVNLKPFITALTEAGRLNYVTAPSAA

SEQ ID NO: 7900 - DNA, 1002 bp, Arabidopsis thaliana
  CDS (1)..(1002)
atgacgatgactgtcgagaagaggatcgaagctgacgttacggtgagccatgaaggtgtggaacgggcttacgtaactttcctcgccggaaacaaagactactggatgcttgtagttggtctagccaaaggtcttcgtaaagtgaaatcagcttatccactcgttgtggcgactctccctgacgtgcctgaggaacatcgtcaaatcttagtggatcagggatgcatcatccgtgacatcgaaccggtctatcctccggagaacacgaccggttattctatggcttattacgttatcaactactccaaacttcgtatttgggagtttgtggagtatgagaagatgatatatctagatggagacatacaagtgtttaagaacattgatcatcttttcgatactcctcgtggctacttgtacgcagtcaaagactgcttttgtgaggtgtcttggtccaaaactcctcaatacaagatcggttattgccaacagtcacctgaaaaggtaacttggcctgttgaaagtttaggtgctccaccgccggtatatttcaacgccggtatgttggtttttggaccaaatcttgtcacttacgaggatctccttcgtgttgttcaaatcaccactccaacttattttgccgagcaggactttctgaatatatacttcagagacatttacaagccaatcccttcgacctacaacctcgtaatggctatgctttggcgtcatcccgaacacattgaccttgaccaaatcagtgttgttcactattgtgctaatggttcgaagccttggaaattcgatgaagctgaagagcatatggatcgagaagacataaaaatgttggtgaagaagtggtgggagatttacgaagattcgagtttagactacaagaatttcgtcgagactgagtccaagctgaatccggtcactgcaaccttggcttccaagaaacttgttggcgatgtcctaacaagccttgccccttccgccgcataa

SEQ ID NO: 7901 - protein, 333 aa, Arabidopsis thaliana
MTMTVEKRIEADVTVSHEGVERAYVTFLAGNKDYWMLVVGLAKGLRKVKSAYPLVVATLPDVPEEHRQILVDQGCIIRDIEPVYPPENTTGYSMAYYVINYSKLRIWEFVEYEKMIYLDGDIQVFKNIDHLFDTPRGYLYAVKDCFCEVSWSKTPQYKIGYCQQSPEKVTWPVESLGAPPPVYFNAGMLVFGPNLVTYEDLLRVVQITTPTYFAEQDFLNIYFRDIYKPIPSTYNLVMAMLWRHPEHIDLDQISVVHYCANGSKPWKFDEAEEHMDREDIKMLVKKWWEIYEDSSLDYKNFVETESKLNPVTATLASKKLVGDVLTSLAPSAA

SEQ ID NO: 7902 - DNA, 1011 bp, Arabidopsis thaliana
  CDS (1)..(1011)
atggctcaaatgtcgatgaccgtcgagaagagtatcaaagctgacgtgacggtgagccatgaccgtgtgaaaagggcttacgtcactttccttgctggaaacaaagactactggatgggtgtagttggtctagccaagggacttcgtaaggtgaaatctgcttatcctcttgtggttgcgattctcccggacgtgcctgaggaacaccgtcaaatcctgttggctcagggatgcatcatccgtgagattgaaccggtttatccaccggaaaacaaaaccggttattcaatggcctattacgttatcaactactccaagcttcgtatttgggagtttgtggagtatgaaaagatgatttatctagatggagacattcaagtatttagtaacatcgatcatcttttcgatactcctcgtggctacttgtacgctgtcaaagattgcttttgcgagatttcttggtccaaaactcctcaatttaagataggttactgccaacaatgtcctgaaaaggtgacatggcctgttgaaagtcttggttctccaccgccggtatatttcaacgccggtatgttggtttttgaacctaatctcctcacttacgaggatctccttcgtgttgttcaaatcaccactccgacatattttgccgaacaggattttctgaatgaatactttacagacatttacaagcccatcccttcgacctacaaccttgtaatggctatgctttggcgtcatcctgaacacattgaccttgaccaaatcagtgttattcattattgtgcaaatggttcgaagccttggagattcgatgaaactgaagagcatatggatcgtgaggacataaaaatgttggtgaagaaatggtgggatatttatgaagattcgagtttagattacaagaactttgtcgagactgagtccaaactgagtccgatcaatgcaaccttggcttccaaggaatctgttggcgatgtccttattagtcttgccccttccgctgcataa

SEQ ID NO: 7903 - protein, 336 aa, Arabidopsis thaliana
MAQMSMTVEKSIKADVTVSHDRVKRAYVTFLAGNKDYWMGVVGLAKGLRKVKSAYPLVVAILPDVPEEHRQILLAQGCIIREIEPVYPPENKTGYSMAYYVINYSKLRIWEFVEYEKMIYLDGDIQVFSNIDHLFDTPRGYLYAVKDCFCEISWSKTPQFKIGYCQQCPEKVTWPVESLGSPPPVYFNAGMLVFEPNLLTYEDLLRVVQITTPTYFAEQDFLNEYFTDIYKPIPSTYNLVMAMLWRHPEHIDLDQISVIHYCANGSKPWRFDETEEHMDREDIKMLVKKWWDIYEDSSLDYKNFVETESKLSPINATLASKESVGDVLISLAPSAA

SEQ ID NO: 7904 - DNA, 987 bp, Arabidopsis thaliana
  CDS (1)..(987)
atggcaccaacggagatgaacatcgaaagaaaggtagaggctgacgtggcggtgattcctaatgatggaaaaagggcttacgtcactttcctagctggtaaccaagactattggatgggtgtggttggtttagccaagggacttcgtaaggtgaaagcagcttatcctcttgttgtggctatgctcccagacgtaccgaaagaacaccgtcaaatcttggtggctcaaggatgtatcatccgggagattgaaccggtttatccgccggaaaaccaagctggttatgctatggcttattacgttatcaactactccaagcttcgaatttgggagtttgtggaatatgagaagatgatatatttagatggagacatacaagtgtttagcaacatcgatcatctatttgacactccatctggctacttgtacgccgtcaaagactgtttttgcgagggttcttggtcaaaaacacctcaatacaagattggttactgccaacagtcgcccgaaaaagtgaggtggccgatgaacagtcttggtcatgtgccgccattgtatttcaacgcgggtatgttggtctttgaaccaaatctcctcacttacgaggatcttcttcaaactgttcaagtcaccactcctacttcattcgccgaacagccaatcccttcgacgtacaacctcgtactagctatgctttggcgtcatcccgaatgcattgacctcgaccaaatcaatgttgttcattattgtgctaaaggctcaaaaccttggagattcactggagaagaggagcatatggaccgagaagatattaaaatgttggtgaaaaaatggtgggacatttatgaagacacgagtttagactacaagacatttgttgagaacgagtcgaagctgaatccgatcgttgcagccttggcctctaaagaatcaggttgtgatggtcttactagcctcgctccttccgccgcaaaatcaaatccctaa

SEQ ID NO: 7905 - protein, 328 aa, Arabidopsis thaliana
MAPTEMNIERKVEADVAVIPNDGKRAYVTFLAGNQDYWMGVVGLAKGLRKVKAAYPLVVAMLPDVPKEHRQILVAQGCIIREIEPVYPPENQAGYAMAYYVINYSKLRIWEFVEYEKMIYLDGDIQVFSNIDHLFDTPSGYLYAVKDCFCEGSWSKTPQYKIGYCQQSPEKVRWPMNSLGHVPPLYFNAGMLVFEPNLLTYEDLLQTVQVTTPTSFAEQPIPSTYNLVLAMLWRHPECIDLDQINVVHYCAKGSKPWRFTGEEEHMDREDIKMLVKKWWDIYEDTSLDYKTFVENESKLNPIVAALASKESGCDGLTSLAPSAAKSNP

SEQ ID NO: 7906 - DNA, 954 bp, Vitis vinifera
  CDS (1)..(954)
atggatgtaactactgatagagcatacgtcactttcttagctggaaatggagactatgtgaagggagtggtggggttggcaaagggtctgaggaaggcccggagcctgtacccactagtggtgcctgttctgcctgatgtgccggaggagcaccgccagattctgaagtcacaagggtgtattgtgagggagattgagcctgtgtacccgccggagaaccagacccagttttccatggcttatttcgtcatcaactactcaaagcttcgtatttgggaattcgtggagtacagcaagatgatatacttggatggagacatacaagtattcgaaaacatcgaccacctctttgactcacaagacggccatttctatgctgtgaaggactgtttttgtgagcagacatggagtcattccacccagtacaaaattggctactgtcagcagtgcccgaacaaggtggagtggaaggccgagctcggccctccaccgccgctctacttcaacgccggcatgttcgtcttcgagcccagtctctctacctactctaatctcctcgacactctcaaagtcacccctcctacttcatttgccgagcaggactttctgaacatgtttttcagagacgtctacgttccaatcccttctgaatacaaccttgtgttggccatgctgtggcggcaccccgaaaatgtggacctcaccaaagccaaagtgattcactattgtgcggcgggatcgaagccgtggaggttcacagggaaggaggagaacatggacagagaagatataaaggagttggtgaggaaatggtgggaaatatatgaagatgagacattggattataagacaagcttgaaggatcatgacgagaagtcaagccaggatgcgcttcttaccgcaatgtgtgaagctgggcttgtgcccatcaggcccgctcctcgagctgcatag

SEQ ID NO: 7907 - protein, 317 aa, Vitis vinifera
MDVTTDRAYVTFLAGNGDYVKGVVGLAKGLRKARSLYPLVVPVLPDVPEEHRQILKSQGCIVREIEPVYPPENQTQFSMAYFVINYSKLRIWEFVEYSKMIYLDGDIQVFENIDHLFDSQDGHFYAVKDCFCEQTWSHSTQYKIGYCQQCPNKVEWKAELGPPPPLYFNAGMFVFEPSLSTYSNLLDTLKVTPPTSFAEQDFLNMFFRDVYVPIPSEYNLVLAMLWRHPENVDLTKAKVIHYCAAGSKPWRFTGKEENMDREDIKELVRKWWEIYEDETLDYKTSLKDHDEKSSQDALLTAMCEAGLVPIRPAPRAA

SEQ ID NO: 7908 - DNA, 1011 bp, Vitis vinifera
  CDS (1)..(1011)
atggccccaggagtgcccgcagatgtgtttacagccggcggaaaggtttccaccctcaacgcaggctactcaaagggggcctacgtcacatttttagctggaaacggggactatgtgaaaggggttgttgggttggctaagggtttgcgcaaggtgaagagcgcgtaccctcttgtggttgcaatgttgccggatgtgcctgaggagcaccgtgagatcttaaagtctcagggctgcataattcgtgaaattgagcccatctaccctcctgagaaccaaatccagtttgcaatggcatactacgtcatcaactattccaaactccgtatttggaatttcgaggaatacagcaagatggtgtatttggatgctgatatccaagtttacgacaacatagaccaccttatggacgccccggacggctacttttacgcggtaatggactgcttctgtgagaagacatggagtcacactccccagtactccgtcggctactgccagcagtgcccggacaaggtgacttggcccgctgagatgggttcacctccacctttgtacttcaacgctgggatgttcgtctttgagcctagccgtttgacttatgaaagccttctccatactctacggatcactcctccgaccgcctttgccgagcaagatttcttgaacatgttcttccaacatatgtacaagcccatccctctcgtatacaacttggttctagcaatgctgtggcgacacccggagaacgttgagctcgaccaggtcaaggtggtgcactactgtgctgctggatcaaagccatggagatacactgggaaagaagcaaacatggagagagaggacatcaagatgttggtagccaaatggtgggacatttacaatgataagtctctggatttcaaggctgaggacagtgttccagagggagaaggattctctaggccatcgatcatggcttccatgcctgagcctgcaatctcctatattcccgcaccctctgctgcttga

SEQ ID NO: 7909 - protein, 336 aa, Vitis vinifera
MAPGVPADVFTAGGKVSTLNAGYSKGAYVTFLAGNGDYVKGVVGLAKGLRKVKSAYPLVVAMLPDVPEEHREILKSQGCIIREIEPIYPPENQIQFAMAYYVINYSKLRIWNFEEYSKMVYLDADIQVYDNIDHLMDAPDGYFYAVMDCFCEKTWSHTPQYSVGYCQQCPDKVTWPAEMGSPPPLYFNAGMFVFEPSRLTYESLLHTLRITPPTAFAEQDFLNMFFQHMYKPIPLVYNLVLAMLWRHPENVELDQVKVVHYCAAGSKPWRYTGKEANMEREDIKMLVAKWWDIYNDKSLDFKAEDSVPEGEGFSRPSIMASMPEPAISYIPAPSAA

SEQ ID NO: 7910 - DNA, 1029 bp, Vitis vinifera
  CDS (1)..(1029)
atggctcctgaaatcatctccgcttcgggaaaaccgtccagatttttgaaaccggctagtcttccggacagagcatacgtggccttcttggccggtaacggggactacgtgaaaggtgttgttgggttagccaaggggctgcggaaggtgaaatccgcttacccgcttgtggtggcggtgttaccggacgtgccggtggagcaccgccgagaactggaatcccaggggtgcatcgtcagagagattgagccggtttacccacccgagaaccagacccagttcgccatggcctattacgttatcaattattcaaagctccgtatctgggagttcgtggagtacagtaagatgatatacttggatggggatattcaagtctacgataacattgaccacctctttgagctaccagacggacatttctatgcagtgatggactgtttctgtgagaaaacatggagtcacacgccacagtacaagattggagactgccaacagtgtccggaaaaggttcagtggccggcggagctgggtcagccgccttcactttacttcaacgcaggcatgtttgtgtttgagcccagcctctccacctatgaagatctctgggaaaccctcaggatcacccctgcaaccccttttgcagagcaggatttcttgaatatgtacttcagcgatgtatataagcctattcctctggtctacaatcttgtccttgccatgctgtggcggcatcctgagaatgtagagcttgataaagtgaaagttgttcactactgtgcagcggggtcgaagccatggaggtacacagggaaggaggacaacatgcagagagaggacattaagatgctggtaaacaaatggtgggagatatacaatgacaagtcattggattacaagaagacgaggatgatggcgaatgattacagcagtgttttgccgggggagcaggtgaatttggagccgttcattgcagctctttccgaggtggggcatgttgaatttgtgagagccccttcagcagcctag

SEQ ID NO: 7911 - protein, 342 aa, Vitis vinifera
MAPEIISASGKPSRFLKPASLPDRAYVAFLAGNGDYVKGVVGLAKGLRKVKSAYPLVVAVLPDVPVEHRRELESQGCIVREIEPVYPPENQTQFAMAYYVINYSKLRIWEFVEYSKMIYLDGDIQVYDNIDHLFELPDGHFYAVMDCFCEKTWSHTPQYKIGDCQQCPEKVQWPAELGQPPSLYFNAGMFVFEPSLSTYEDLWETLRITPATPFAEQDFLNMYFSDVYKPIPLVYNLVLAMLWRHPENVELDKVKVVHYCAAGSKPWRYTGKEDNMQREDIKMLVNKWWEIYNDKSLDYKKTRMMANDYSSVLPGEQVNLEPFIAALSEVGHVEFVRAPSAA

SEQ ID NO: 7912 - DNA, 993 bp, Vitis vinifera
  CDS (1)..(993)
atggctcctgaaatcatctccgcttcgggaaaaccgtccagatttttgaaaccggctagtcttccggacagagcatacgtggccttcttggccggtaacggggactacgtgaaaggtgttgttgggttagccaaggggctgcggaaggtgaaatccgcttacccgcttgtggtggcggtgttaccggacgtgccggtggagcaccgccgagaactggaatcccaggggtgcatcgtcagagagattgagccggtttacccacccgagaaccagacccagttcgccatggcctattacgttatcaattattcaaagctccgtatctgggagttcgtggagtacagtaagatgatatacttggatggggatattcaagtctacgataacattgaccacctctttgagctaccagacggacatttctatgcagtgatggactgtttctgtgagaaaacatggagtcacacgccacagtacaagattggagactgccaacagtgtccggaaaaggttcagtggccggcggagctgggtcagccgccttcactttacttcaacgcaggcatgtttgtgtttgagcccagcctctccacctatgaagatctctgggaaaccctcaggatcacccctgcaaccccttttgcagagcagcctattcctctggtctacaatcttgtccttgccatgctgtggcggcatcctgagaatgtagagcttgataaagtgaaagttgttcactactgtgcagcggggtcgaagccatggaggtacacagggaaggaggacaacatgcagagagaggacattaagatgctggtaaacaaatggtgggagatatacaatgacaagtcattggattacaagaagacgaggatgatggcgaatgattacagcagtgttttgccgggggagcaggtgaatttggagccgttcattgcagctctttccgaggtggggcatgttgaatttgtgagagccccttcagcagcctag

SEQ ID NO: 7913 - protein, 330 aa, Vitis vinifera
MAPEIISASGKPSRFLKPASLPDRAYVAFLAGNGDYVKGVVGLAKGLRKVKSAYPLVVAVLPDVPVEHRRELESQGCIVREIEPVYPPENQTQFAMAYYVINYSKLRIWEFVEYSKMIYLDGDIQVYDNIDHLFELPDGHFYAVMDCFCEKTWSHTPQYKIGDCQQCPEKVQWPAELGQPPSLYFNAGMFVFEPSLSTYEDLWETLRITPATPFAEQPIPLVYNLVLAMLWRHPENVELDKVKVVHYCAAGSKPWRYTGKEDNMQREDIKMLVNKWWEIYNDKSLDYKKTRMMANDYSSVLPGEQVNLEPFIAALSEVGHVEFVRAPSAA

SEQ ID NO: 7914 - DNA, 1023 bp, Vitis vinifera
  CDS (1)..(1023)
atggctcctgaaatcatctccgcttcgggaaaaccgtccggatttttgaaaccggctagtcttccggacagagcatacgtggccttcttggccggtaacggggactacgtgaaaggtgttgttgggttagccaaggggctgcggaaggtgaaatccgattacccgcttgtggtggcggtgttaccggacgtgccggtggagcacagccgagaactggaatcccaggggtgcatcgtcagagagattgtgccggtttacaagaaccagacccagttcgccatggcctattacgttatcaattattcaaagatccgtatctgggagttcgtggagtacagtaagatgatatacttggatggggatattcaagtctacgataacattgaccacctctttgagctaccagacggacatttctatgcagtgatggactgtttctgtgagaaaacatggagtcacacgccacagtacaagattggagactgccaacagtgtccggaaaaggttcagtggccggcggagctgggtcagccgccttcactttacttcaacgcaggcatgtttgtgtttgagcccagcctctccacctatgaagatctctgggaaaccctcaggatcacccctgcaaccccttttgcagagcaggatttcttgaatatgtacttcagggatgtatataagcctattcctctggtctacaatcttgtccttgccatgctgtggcggcatcctgagaatgtagagcttgataaagtgaaagttgttcactactgtgcagcggggtcgaagccatggaggtacacagggaaggaggacaacatgcagagagaggacattaagatgctggtaaacaaatggtgggagatatacaatgacaagtcattggattacaagaagacgaggatgatggcgaatgattacagcagcgttttgccgggggagcaggtgaatttggagcctttcattgcagctctttccgaggtggggcatgttgaatttgtgagagccccttcagcagcctag

SEQ ID NO: 7915 - protein, 340 aa, Vitis vinifera
MAPEIISASGKPSGFLKPASLPDRAYVAFLAGNGDYVKGVVGLAKGLRKVKSDYPLVVAVLPDVPVEHSRELESQGCIVREIVPVYKNQTQFAMAYYVINYSKIRIWEFVEYSKMIYLDGDIQVYDNIDHLFELPDGHFYAVMDCFCEKTWSHTPQYKIGDCQQCPEKVQWPAELGQPPSLYFNAGMFVFEPSLSTYEDLWETLRITPATPFAEQDFLNMYFRDVYKPIPLVYNLVLAMLWRHPENVELDKVKVVHYCAAGSKPWRYTGKEDNMQREDIKMLVNKWWEIYNDKSLDYKKTRMMANDYSSVLPGEQVNLEPFIAALSEVGHVEFVRAPSAA

SEQ ID NO: 7916 - DNA, 987 bp, Vitis vinifera
  CDS (1)..(987)
atggctcctgaaatcatctccgcttcgggaaaaccgtccggatttttgaaaccggctagtcttccggacagagcatacgtggccttcttggccggtaacggggactacgtgaaaggtgttgttgggttagccaaggggctgcggaaggtgaaatccgattacccgcttgtggtggcggtgttaccggacgtgccggtggagcacagccgagaactggaatcccaggggtgcatcgtcagagagattgtgccggtttacaagaaccagacccagttcgccatggcctattacgttatcaattattcaaagatccgtatctgggagttcgtggagtacagtaagatgatatacttggatggggatattcaagtctacgataacattgaccacctctttgagctaccagacggacatttctatgcagtgatggactgtttctgtgagaaaacatggagtcacacgccacagtacaagattggagactgccaacagtgtccggaaaaggttcagtggccggcggagctgggtcagccgccttcactttacttcaacgcaggcatgtttgtgtttgagcccagcctctccacctatgaagatctctgggaaaccctcaggatcacccctgcaaccccttttgcagagcagcctattcctctggtctacaatcttgtccttgccatgctgtggcggcatcctgagaatgtagagcttgataaagtgaaagttgttcactactgtgcagcggggtcgaagccatggaggtacacagggaaggaggacaacatgcagagagaggacattaagatgctggtaaacaaatggtgggagatatacaatgacaagtcattggattacaagaagacgaggatgatggcgaatgattacagcagcgttttgccgggggagcaggtgaatttggagcctttcattgcagctctttccgaggtggggcatgttgaatttgtgagagccccttcagcagcctag

SEQ ID NO: 7917 - protein, 328 aa, Vitis vinifera
MAPEIISASGKPSGFLKPASLPDRAYVAFLAGNGDYVKGVVGLAKGLRKVKSDYPLVVAVLPDVPVEHSRELESQGCIVREIVPVYKNQTQFAMAYYVINYSKIRIWEFVEYSKMIYLDGDIQVYDNIDHLFELPDGHFYAVMDCFCEKTWSHTPQYKIGDCQQCPEKVQWPAELGQPPSLYFNAGMFVFEPSLSTYEDLWETLRITPATPFAEQPIPLVYNLVLAMLWRHPENVELDKVKVVHYCAAGSKPWRYTGKEDNMQREDIKMLVNKWWEIYNDKSLDYKKTRMMANDYSSVLPGEQVNLEPFIAALSEVGHVEFVRAPSAA

SEQ ID NO: 7918 - DNA, 957 bp, Vitis vinifera
  CDS (1)..(957)
atggatgtaactactgatagagcatacgtcactttcttagctggaaatggcgactatgtgaagggagtggtggggttggcaaagggtttgaggaaggtccggagcctgtacccactagtggtgcctgttctgcctgatgtgccggaggagcaccgccagattctgaagtcacaagggtgtattgtgagggagattgagcctgtgtacccgccggagaaccagacccagttttccatggcttattacgtcatcaactactcaaagcttcgtatttgggaattcgtggagtacagcaagatgatatacttggatggagacatacaagtattcgaaaacatcgaccacctctttgactcacaagacggccatttctatgctgtgaaggactgtttttgtgagcagacatggagtcattccacccagtacaaaattggctactgtcagcagtgcccgaacaaggtggagtggaaggccgagcttggccctccaccgccgctctacttcaacgccggcatgttcgtcttcgagcccagtctctctacctactctaatctcctcgacactctcaaagtcacccctcctacttcatttgccgagcaggactttctgaacatgtttttcagagacgtctacgttccaatcccttctgaatacaaccttgtgttggccatgctgtggcggcaccccgaaaatgtggacctcaccaaagccaaagtggttcactattgtgcggcgggatcgaagccgtggaggttcacagggaaggaggaaaacatggagagagaagatataaaggagttggtgaggaaatggtgggaaatatatgaagatgagacattggattataagacaagcttgaaggatcatgatgacgagaagccaagccaggatgcgcttcttaccgcaatgtgtgaagctgggcttgtgcccatcaggcccgctcctcgagctgcatag

SEQ ID NO: 7919 - protein, 318 aa, Vitis vinifera
MDVTTDRAYVTFLAGNGDYVKGVVGLAKGLRKVRSLYPLVVPVLPDVPEEHRQILKSQGCIVREIEPVYPPENQTQFSMAYYVINYSKLRIWEFVEYSKMIYLDGDIQVFENIDHLFDSQDGHFYAVKDCFCEQTWSHSTQYKIGYCQQCPNKVEWKAELGPPPPLYFNAGMFVFEPSLSTYSNLLDTLKVTPPTSFAEQDFLNMFFRDVYVPIPSEYNLVLAMLWRHPENVDLTKAKVVHYCAAGSKPWRFTGKEENMEREDIKELVRKWWEIYEDETLDYKTSLKDHDDEKPSQDALLTAMCEAGLVPIRPAPRAA

SEQ ID NO: 7920 - DNA, 978 bp, Vitis vinifera
  CDS (1)..(978)
atggctcctactttggcctctgcaactggtttagccaaggctgccagcatttccagccgggcatatgtgactttcttggccggtaacggcgactacgtgaagggcgtggtggggctggccaaggggctgagaaaggtgaaaaccgcatacccacttgtggtggcggtactgccggacgtcccggcggagcaccgccgcattctggaggaccagggctgcgtcgtcagggagatcgagccggtgaacccgccggagaaccagacccagttcgccatggcctactacgtcatcaactactccaaactccgcatctgggagtttgtggagtacagtaagatgatatacttggacggagacatacaggtgtttggtaacatagaccatttgttcgatttggacaatgggtatttctatgctgtgatggactgtttctgtgagaagacgtggagcaactcgccgcagtacaagattgggtactgccagcagtgtccggagaaggtgcagtggccggcggagatgggtccagcacctcctctctacttcaacgccggcatgtttgtgtttgagccttgcctctccgtctatgatgatctccttaccactctcaagatcacaactcctacctcctttgccgagcaggactatttgaatatattcttcagggacatctacaggccaattccacccacctacaaccttgttttagccatgctatggcaccacccagagaacattgaccttcaaagaaccaatgttgttcactattgtgctgctggttcaaaaccatggaggtatactgggaaggaggagaacatggagagggaggatataaagatgttggtgaagaagtggtgggatatatacaatgatgagagcttggactacaggaactcatcagcaaatggacagcctttcacggcggtgctttcggaggccggcgaagtccaccactacattaccgccccatcggctgcctag

SEQ ID NO: 7921 - protein, 325 aa, Vitis vinifera
MAPTLASATGLAKAASISSRAYVTFLAGNGDYVKGVVGLAKGLRKVKTAYPLVVAVLPDVPAEHRRILEDQGCVVREIEPVNPPENQTQFAMAYYVINYSKLRIWEFVEYSKMIYLDGDIQVFGNIDHLFDLDNGYFYAVMDCFCEKTWSNSPQYKIGYCQQCPEKVQWPAEMGPAPPLYFNAGMFVFEPCLSVYDDLLTTLKITTPTSFAEQDYLNIFFRDIYRPIPPTYNLVLAMLWHHPENIDLQRTNVVHYCAAGSKPWRYTGKEENMEREDIKMLVKKWWDIYNDESLDYRNSSANGQPFTAVLSEAGEVHHYITAPSAA

SEQ ID NO: 7922 - DNA, 978 bp, Vitis vinifera
  CDS (1)..(978)
atggctcctactttggcctctgcaactggtttagccaaggctgccagcatttccagccgggcatatgtgactttcttggccggtaacggcgactacgtgaagggcgtggtggggctggccaaggggctgagaaaggtgaaaaccgcatacccacttgtggtggcggtactgccggacgtcccggcggagcaccgccgcattctggaagaccagggctgcgtcgtcagggagatcgagccggtgaacccgccggagaaccagacccagttcgccatggcctactacgtcatcaactactccaaactccgcatctgggagtttgtggagtacagtaagatgatatacttggacggagacatacaggtgtttagtaacatagaccatttgtttgatttggatgatgggtatttctatgctgtgatggactgtttctgtgagaagacgtggagcaactcgccgcagtacaagattgggtactgccagcagtgcccggagaaggtgaagtggccggcggagatgggtccagcaccccctctctacttcaacgccggcatgtttgtgtttgagccttgcctctccgtctatgatgatctccttaccactctcaagatcacaactcctacctcttttgccgagcaggactatttgaatatgttcttcagggacatctacaagcccattccacccacctacaaccttgttttagccatgctatggcgccacccagagaacattgaccttcaaataaccaatgttgttcactattgtgctgctggttcaaagccatggaggtatactgggaaggaggagaacatggacagggaagatataaagatgttggtgaagaagtggtgggatatatacaatgatgagagcttggactacaggaactcatcggcaaatggacagcctttcacggcggcactttcggaggccggcgtagtccaccacttcattactgcctcatcggctgcctag

SEQ ID NO: 7923 - protein, 325 aa, Vitis vinifera
MAPTLASATGLAKAASISSRAYVTFLAGNGDYVKGVVGLAKGLRKVKTAYPLVVAVLPDVPAEHRRILEDQGCVVREIEPVNPPENQTQFAMAYYVINYSKLRIWEFVEYSKMIYLDGDIQVFSNIDHLFDLDDGYFYAVMDCFCEKTWSNSPQYKIGYCQQCPEKVKWPAEMGPAPPLYFNAGMFVFEPCLSVYDDLLTTLKITTPTSFAEQDYLNMFFRDIYKPIPPTYNLVLAMLWRHPENIDLQITNVVHYCAAGSKPWRYTGKEENMDREDIKMLVKKWWDIYNDESLDYRNSSANGQPFTAALSEAGVVHHFITASSAA

SEQ ID NO: 7924 - DNA, 975 bp, Vitis vinifera
  CDS (1)..(975)
atggctcctactttggcttctgcaactggtttggccaaggctgccagcatttccagccgggcatatgtgacgttcttggccggaaacggcgactacgtgaagggcgtggtggggctggccaaggggctgagaaaggtgaaaaccgcatacccacttgtggtggcggtactgccggacgtcccggcggagcaccgccgcattctggaggaccagggctgcgtcgtcagggagatcgagccggtgaacccgccggagaaccagacccagttcgccatggcctactacgtcatcaactactccaaactccgcatctgggagtttgtggaatacagtaagatgatatacttggacggagacatacaggtgtttggtaacatagaccatttgtttgatttggatgatgggtatttctatgctgtgatggactgtttctgtgagaagacgtggagcaactcgccgcagtacaagattgggtactgccagcagtgcccggagaaggtgaagtggccggcggagatgggtccagcaccccctctctacttcaacgccggcatgtttgtgtttgagccttgcctctccgtctatgatgatctccttaccactctcaagatcacaactcctacctcctttgccgagcaggactatttgaatatgttcttcagggacatctacaggcccattccacccacctacaaccttgttttagccatgctatggcgccacccagagaacattgaccttcaaagaaccaatgttgttcactattgtgctgctggttcaaagccatggaggtatactgggaaggaggagaacatggagagggaggatataaagatgttggtgaagaagtggtgggatacatacaatgacgagagcttggattacaggaactcatctgcagacggaaagccattcacggtggcgctttcagaggccggcgtagtccactactttgccgccccatcggctgcctag

SEQ ID NO: 7925 - protein, 324 aa, Vitis vinifera
MAPTLASATGLAKAASISSRAYVTFLAGNGDYVKGVVGLAKGLRKVKTAYPLVVAVLPDVPAEHRRILEDQGCVVREIEPVNPPENQTQFAMAYYVINYSKLRIWEFVEYSKMIYLDGDIQVFGNIDHLFDLDDGYFYAVMDCFCEKTWSNSPQYKIGYCQQCPEKVKWPAEMGPAPPLYFNAGMFVFEPCLSVYDDLLTTLKITTPTSFAEQDYLNMFFRDIYRPIPPTYNLVLAMLWRHPENIDLQRTNVVHYCAAGSKPWRYTGKEENMEREDIKMLVKKWWDTYNDESLDYRNSSADGKPFTVALSEAGVVHYFAAPSAA

SEQ ID NO: 7926 - DNA, 1014 bp, Populus trichocarpa
  CDS (1)..(1014)
atggctcctgagcttgtacggtctgctttgaaaccagccgggttcaccaagctcgctagcttacctagcagggcttatgtaacgttcttggctggtgatggagattacgtgaaaggcgttgtcgggctagccaaaggcttaagaaaggtcaaaacggcatatccattaatcgtggcagtcttacctgacgtgccagaggaacacaggcagatcttggaatctcaagggtgtatagtccgggaaattgaacccgtttacccgccagagaaccagacccagtttgccatggcttactatgtcatcaactactccaagctccgtatatgggagtttgtggaatacagcaagatgatatacttggatggagatatccaggtttatgacaacatagaccacttatttgatctgcctgatgggcgtttttatgcggtgatggattgtttctgtgagaaaacatggagtcacactccgcagtacaagattggctattgccagcaatgccctgacaaggttaactggccagctgagatgggtcaaccaccatctccttacttcaatgctggcatgtgtgtgtttgagcctagtattgccacttatcatgatctcttgaagactctcaaagtcactcctcctaccccatttgcggagcaggactttttgaacatgtacttcaaggatatttacacgccaattcctctagtttacaatcttgttcttgccatgctatggcgtcacccagaaaatgtggagcttgacagggtcaaagttgttcactactgtgctgcgggctcgaagccttggagatacactggcaaagaagagaacatgcagagagaggatataaagatgctggtgaagaaatggtgggacatttacagtgatgaatcactggactccaagaaacttgtggcggattgtactactgatgctgagccagtgaacttacagccattcattgcagctctctctgaagccggcgctgttcaatatgtcactgccccatctgctgcctag

SEQ ID NO: 7927 - protein, 337 aa, Populus trichocarpa
MAPELVRSALKPAGFTKLASLPSRAYVTFLAGDGDYVKGVVGLAKGLRKVKTAYPLIVAVLPDVPEEHRQILESQGCIVREIEPVYPPENQTQFAMAYYVINYSKLRIWEFVEYSKMIYLDGDIQVYDNIDHLFDLPDGRFYAVMDCFCEKTWSHTPQYKIGYCQQCPDKVNWPAEMGQPPSPYFNAGMCVFEPSIATYHDLLKTLKVTPPTPFAEQDFLNMYFKDIYTPIPLVYNLVLAMLWRHPENVELDRVKVVHYCAAGSKPWRYTGKEENMQREDIKMLVKKWWDIYSDESLDSKKLVADCTTDAEPVNLQPFIAALSEAGAVQYVTAPSAA

SEQ ID NO: 7928 - DNA, 1017 bp, Populus trichocarpa
  CDS (1)..(1017)
atggccccaggagtgcctatagatgggaatattttgggtaccgggaaggtttccacagttaacactggctattctaagagggcctacgtgacatttttagccggcaacggggattatgttaaaggggtagttgggttggctaagggtttgcgcaaggtgaagagtgcataccctcttgtcgtagcaatcttgccggatgtgcccgaggaacaccgtgacattttgaggtctcaaggttgcattgttcgtgagatcgagcctatttatccacctgagaaccagattcagtttgccatggcctactacgtgatcaactactccaagctccgaatttggaattttgaggagtacagcaagatgatatatttggatgctgatatccaagtgttcgagaatatagaccatctatttgacacccaagatggctacttctacgccgtgatggactgcttctgtgagaaaacatggagccactcccctcaatactccgtcggctactgccagcagtgcccggaaaagataacatggcctgctgagatgggctctcctcctcccctgtacttcaatgctgggatgtttgtatttgagcctagtcgtttgacttatgagagccttcttgagaggctgcagatcaccccaccaaccccctttgccgagcaagatttcttgaatatgtttttccaaaaaacatacaagccaatccctctgctttacaacctggttttagccatgttatggcgacatcctgagaacgtggaggtcgagaaggttaaagtggttcactactgtgctgctggttcaaaaccttggagatatactggcgaggaagctaacatggatagagaggacatcaagatgttagtggcaaaatggtgggatatatataatgatgagtccctcgatttcaatggcgaaaactcagttccagaagaagaaacaatattctcgaggtcatccatcttgtcttccatgcctgagcctgccatatcctacgtccctgcaccaactgctgcttaa

SEQ ID NO: 7929 - protein, 338 aa, Populus trichocarpa
MAPGVPIDGNILGTGKVSTVNTGYSKRAYVTFLAGNGDYVKGVVGLAKGLRKVKSAYPLVVAILPDVPEEHRDILRSQGCIVREIEPIYPPENQIQFAMAYYVINYSKLRIWNFEEYSKMIYLDADIQVFENIDHLFDTQDGYFYAVMDCFCEKTWSHSPQYSVGYCQQCPEKITWPAEMGSPPPLYFNAGMFVFEPSRLTYESLLERLQITPPTPFAEQDFLNMFFQKTYKPIPLLYNLVLAMLWRHPENVEVEKVKVVHYCAAGSKPWRYTGEEANMDREDIKMLVAKWWDIYNDESLDFNGENSVPEEETIFSRSSILSSMPEPAISYVPAPTAA

SEQ ID NO: 7930 - DNA, 978 bp, Populus trichocarpa
  CDS (1)..(978)
atgtctcccaattccataatcgagcctacgacggacttgcagaagagagcatatgttacgttcttggccggaaacggtgattatgtgaaaggtgtggtgggtttagccaagggtttaagaaaagtgaaatctgcataccctcttgtggtggctattttgcctgatgtgcccgaggagcaccgcgagattctagaatctcagggctgtatcatccgtgagattgagcccctgtatccaccagagaaccagactcagttttccatggcttattatgtgattaactactcaaaacttcgtatttgggagtttgtggactatgggaagatgatatacttggatggtgatattcaagtctttgacaatattgatcatcttttcgagaagccaactggatatttttatgctgtgatggactgtttttgtgagaagacatggagtaccactcctcagtatcagatcaaatactgccagcaatgccctgaaaaagttcagtggcctttggagatgggctctccccctcctctatactttaatgctggcatgtgtctcttcgaacctaagctcgagacttactttgatctcttggagaccctcaaagtcaccacccctacctcatttgctgagcaggattttctgaacatgttcttcagggatgtataccagcctatccctcctgtctacaaccttgtttcggctatgctgtggcgccatcccgataaattcgaccttgacaaagtgaaggttgtccactattgtgctgcgggtgcaaagccatggaggtatactggaaaagaagaaaacatggatcgagaggacatcaaggttttggtgaaaaaatggtgggaaatatatgaggatgagtccctggatttcaagaatgccactgtgcctgttgctcaagaaaaacttggacccctaatagcggcattgactgaggatggggtgggtaaccacatgaatctaccatctgcagcttaa

SEQ ID NO: 7931 - protein, 325 aa, Populus trichocarpa
MSPNSIIEPTTDLQKRAYVTFLAGNGDYVKGVVGLAKGLRKVKSAYPLVVAILPDVPEEHREILESQGCIIREIEPLYPPENQTQFSMAYYVINYSKLRIWEFVDYGKMIYLDGDIQVFDNIDHLFEKPTGYFYAVMDCFCEKTWSTTPQYQIKYCQQCPEKVQWPLEMGSPPPLYFNAGMCLFEPKLETYFDLLETLKVTTPTSFAEQDFLNMFFRDVYQPIPPVYNLVSAMLWRHPDKFDLDKVKVVHYCAAGAKPWRYTGKEENMDREDIKVLVKKWWEIYEDESLDFKNATVPVAQEKLGPLIAALTEDGVGNHMNLPSAA

SEQ ID NO: 7932 - DNA, 978 bp, Populus trichocarpa
  CDS (1)..(978)
atgtcaccaaatgccattatcgagcccacgtttaactcccataagagggcatatgttactttcttggctgggaatggtgattatgtgaaaggtgttgtgggtttagccaagggtctaaggaaagcgaaatcttcataccctcttatggtggctattttacctgatgtgcctgaggagcaccgcaaaattctagaatctcagggctgtatcgtccgtgagattgagccagtgtatccaccagataaccagactcaatttgccatggcttattatgtgattaactactctaaacttcgtatttgggagtttgtggactatgagaagatgatatacctggatggtgatattcaagtctttgacaacattgatcatctttttgatgagccgaatggatatttctatgctgtgatggactgtttttgtgagaagacatggagtagcacccctcagtatcagattggatactgccagcaatgccctgaaaaagttcggtggcctaaggagatgggctcacctcctcctctatactttaatgctggcatgtttgtctttgagcctaagcttttaacttactttgatctcttggagaccctcaaagtcacccctcctacttcatttgctgagcaggattttctgaacatgttcttcagggatgtgtacaagcctatccctgctgtgtacaaccttgtctcggcgatgctgtggcgccatcctgagaatttcgagcttgacaaagtgaaggttgtccattattgtgctgcgggagcaaagccatggaggtatactggcaaggaagaaaacatggatagagaggacatccaggttttggtgaagaagtggtgggaaatatacgaggatgagtcgttggattacaagaatattactgtgcctgttgatcaagaaaaacttggacccctaatagcggcattgactgacgatggagtgattaaccatagaaatctaccatcggcagcataa

SEQ ID NO: 7933 - protein, 325 aa, Populus trichocarpa
MSPNAIIEPTFNSHKRAYVTFLAGNGDYVKGVVGLAKGLRKAKSSYPLMVAILPDVPEEHRKILESQGCIVREIEPVYPPDNQTQFAMAYYVINYSKLRIWEFVDYEKMIYLDGDIQVFDNIDHLFDEPNGYFYAVMDCFCEKTWSSTPQYQIGYCQQCPEKVRWPKEMGSPPPLYFNAGMFVFEPKLLTYFDLLETLKVTPPTSFAEQDFLNMFFRDVYKPIPAVYNLVSAMLWRHPENFELDKVKVVHYCAAGAKPWRYTGKEENMDREDIQVLVKKWWEIYEDESLDYKNITVPVDQEKLGPLIAALTDDGVINHRNLPSAA

SEQ ID NO: 7934 - DNA, 1005 bp, Populus trichocarpa
  CDS (1)..(1005)
atggctcctgatatcactactcctctcgctaacaacgccaccactcttgtgaagcaagctagcatatcaagttgtgcttatgttacgtttttggctggcgatggagactactggaagggtgttgtggggttagccaaggggctcagaaaggccgaaagtaagtatccacttgtggtggctatcttgcctgatgttcccgaggagcatcgcaagattcttgtttcacaagggtgcatagtgagggagattgagcctgttcatccaccggagaaccagactcggtttgctatgccttattatgtcatcaactactccaaacttcgtatctgggagtttgtggagtatagcaagatgatttatttggacggggacatccaggtatttgacaacatagaccacctctttgacatgcctgatggttgcttctatgctgtgatggactgcttctgtgagaaaacatggagcaacagccctcagtacaagattggttactgccagcagtgtcctgataaggtccagtggcctgctgagatgggtcctaagccccctctctacttcaatgctggcatgtttgtttatgagcccaatctgtccacatatcatgatctcttggagaccctcaaaatcacctctcccaccctctttgctgagcaggacttcttgaacatgtttttcagggatgtttacaagccaattccttcggattacaaccttgtactggccatgttatggcgccatcccgagaacattaaccttgacaaagtgaaagttgtccactattgtgctgctgggtctaagccgtggaggtacacgggaaaagaagaaaacatggacagggaagacatcaagatgctggtccagaaatggtgggacatttacaatgacgagtccttggatcacaagaacaccgtggttgcttcttctggatctgaactgcaaccaatcttggaggctctatatgaggctggtgttgatctccacttcaccgccccatccgctgcttga

SEQ ID NO: 7935 - protein, 334 aa, Populus trichocarpa
MAPDITTPLANNATTLVKQASISSCAYVTFLAGDGDYWKGVVGLAKGLRKAESKYPLVVAILPDVPEEHRKILVSQGCIVREIEPVHPPENQTRFAMPYYVINYSKLRIWEFVEYSKMIYLDGDIQVFDNIDHLFDMPDGCFYAVMDCFCEKTWSNSPQYKIGYCQQCPDKVQWPAEMGPKPPLYFNAGMFVYEPNLSTYHDLLETLKITSPTLFAEQDFLNMFFRDVYKPIPSDYNLVLAMLWRHPENINLDKVKVVHYCAAGSKPWRYTGKEENMDREDIKMLVQKWWDIYNDESLDHKNTVVASSGSELQPILEALYEAGVDLHFTAPSAA

SEQ ID NO: 7936 - DNA, 1014 bp, Populus trichocarpa
  CDS (1)..(1014)
atggctcctcatattacaactgcccttgctaacagcacaaactctctagtcaagcaagctagcttgtcgagctgtgcatatgttacctttttggctggtgatggagactactggaagggtgttgtggggttagccaaggggctgaggaaggccaagagcaagtatcctttggtggtggctatcttgcctgatgttcctgaggagcatcggatgatacttgtctctcaagggtgtatagtgagggagattgagcctgttcatccaccggagaaccagactcggtttgctatgccttattatgtcatcaactactccaaacttcgtatctgggagtttgttgagtatagcaagatgatatatttggacggggacatccaggtatttgacaacatagaccacctgttcgacatgcctgatggttacttctatgctgtgatggactgtttctgtgagaaaacatggagcaacagccctcagtacaagattggttactgccaacagtgtcctgataaggtccagtggcctgctgagatgggtcctaagccccctctgtacttcaatgctggcatgtttgtttatgagcccaacttgtccacttatcatgatctgttggagaccgtcaaagtcacctcccccaccctcttcgctgagcaggacttcttgaacatgtttttcagggatgtttacaagccaattccttcggattacaaccttgtactggccatgttatggcgccatcctgagaacattaaccttgacaaagtgaaagttgttcactattgcgctgctgggtctaagccatggaggttcactggaaaagaagagaacatggacagagaagacatcaagatggtggtcaacaaatggtgggacatttaccaggacgaatcattggactacaagaatactgctgctgctgctgctgcttctgctggagctgaactgcatccattcttggcggctctctctgaggctggtgttgtccactatgttaccgccccatccgccgcttag

SEQ ID NO: 7937 - protein, 337 aa, Populus trichocarpa
MAPHITTALANSTNSLVKQASLSSCAYVTFLAGDGDYWKGVVGLAKGLRKAKSKYPLVVAILPDVPEEHRMILVSQGCIVREIEPVHPPENQTRFAMPYYVINYSKLRIWEFVEYSKMIYLDGDIQVFDNIDHLFDMPDGYFYAVMDCFCEKTWSNSPQYKIGYCQQCPDKVQWPAEMGPKPPLYFNAGMFVYEPNLSTYHDLLETVKVTSPTLFAEQDFLNMFFRDVYKPIPSDYNLVLAMLWRHPENINLDKVKVVHYCAAGSKPWRFTGKEENMDREDIKMVVNKWWDIYQDESLDYKNTAAAAAASAGAELHPFLAALSEAGVVHYVTAPSAA

SEQ ID NO: 7938 - DNA, 1011 bp, Populus trichocarpa
  CDS (1)..(1011)
atggctcctgagcttgtccaggctgctttgaaaccagctgggttcaccaaacctgctagcttacctagccgggcttatgtaacattcttggctggtaatggagattacgtcaaaggtgttgttgggttagccaaaggattaaggaaagtcaaaacggcatacccattaatcgttgcagttttgcctgacgtgccagaggaacacaggcggattttagagtcgcagggttgcatagtccgggaaattgaacccgtttatccaccagagaatcagacccagtttgccatggcttattatgtcatcaactactccaagctccgtatttgggagtttgtggaatacagcaagatgatatacttggatggagatatccaggtttatgacaacatagaccacttatttgatctgcctgatggtcatttctatgcggtgatggattgtttctgtgagaaaacatggagccacactccacagtacaagattggctattgccagcaatgccctgacaaggttaactggcctgctgagatgggtcaaccaccatctctttacttcaatgctggtatgtttgtatttgaacctagtatctccacctatcatgacctcttgaagactctcaaggtcactccgcctacgccattcgcagagcaggacttcttgaacatgtacttcaaggatatttacaagccaattcctctagtatacaatcttgttcttgccatgttatggcgtcacccagacaacgtggagctagacaaggtcaaagttgttcactactgtgcagcgggctcaaagccatggagatacactggcaaagaagagaacatgcaaagggaggacataaagatgctggtggagaaatggtggggcatttacaatgatgaatcgctggattacatgaaatttgtggcggatggttttgatgctgagccagtgaacttgcagtctttcattgcagctctctctgaagccggtgctgttcagtacgtcactgccccatccgctgcttag

SEQ ID NO: 7939 - protein, 336 aa, Populus trichocarpa
MAPELVQAALKPAGFTKPASLPSRAYVTFLAGNGDYVKGVVGLAKGLRKVKTAYPLIVAVLPDVPEEHRRILESQGCIVREIEPVYPPENQTQFAMAYYVINYSKLRIWEFVEYSKMIYLDGDIQVYDNIDHLFDLPDGHFYAVMDCFCEKTWSHTPQYKIGYCQQCPDKVNWPAEMGQPPSLYFNAGMFVFEPSISTYHDLLKTLKVTPPTPFAEQDFLNMYFKDIYKPIPLVYNLVLAMLWRHPDNVELDKVKVVHYCAAGSKPWRYTGKEENMQREDIKMLVEKWWGIYNDESLDYMKFVADGFDAEPVNLQSFIAALSEAGAVQYVTAPSAA

SEQ ID NO: 7940 - DNA, 987 bp, Ammopiptanthus mongolicus
  CDS (1)..(987)
atggcacctgatatcaccaccgctgctgccaatgccaccgtggaacaacccaaagctggtggcggcagaggacgtgccttcgtgactttcctagcagggaacggtgactatgttaagggtgttgtaggtttggctaaaggacttaggaaggtgaaaagcgtgcaccctcttgtggtagcagtcttacctgatgtccctgaagaacaccgtaagattcttaactcacaaggttgcattgttagagagattgagccagtgtacccacctgagaaccagacccagtatgccatggcctattatgtcataaattactccaagctacgaatttgggagtttgtggagtacagcaagatgatttacctagacggtgatatccaggtttttgaaaacattgaccacctatttgatttgcctgataattacttctacgcggttatggattgtttctgtgagaaaagttggacccacacccctcagtatcagattggttactgccaacagtgccctgataaggttgaatggccttctaattttggtcccaagcctcctctctatttcaatgcagggatgtttgtttatgagcctaatctcgtcacttaccgtgacctcctcgaagcactccaagtcactaaacccacttcctttgctgaacaagactttctgaacattttcttcagggaaaaatacaagccaatacccaatgtgtacaaccttgtgctggccatgttgtggcgtcaccctgagaatgttgaacttgacaaagttcaagtggttcactactgtgctgctgggtccaagccttggaggtacactgggaaagaggagaatatggagagagaagatatcaagatgcttgtgaagaagtggtgggacatatatgaggatgagacattggattatgacaatcccctcaacgtggaacgttttacagcggcgcttttgaaggctggtggcgttaagtttgttcccgccccatccgctgcctaa

SEQ ID NO: 7941 - protein, 328 aa, Ammopiptanthus mongolicus
MAPDITTAAANATVEQPKAGGGRGRAFVTFLAGNGDYVKGVVGLAKGLRKVKSVHPLVVAVLPDVPEEHRKILNSQGCIVREIEPVYPPENQTQYAMAYYVINYSKLRIWEFVEYSKMIYLDGDIQVFENIDHLFDLPDNYFYAVMDCFCEKSWTHTPQYQIGYCQQCPDKVEWPSNFGPKPPLYFNAGMFVYEPNLVTYRDLLEALQVTKPTSFAEQDFLNIFFREKYKPIPNVYNLVLAMLWRHPENVELDKVQVVHYCAAGSKPWRYTGKEENMEREDIKMLVKKWWDIYEDETLDYDNPLNVERFTAALLKAGGVKFVPAPSAA

SEQ ID NO: 7942 - DNA, 1014 bp, Xerophyta viscosa
  CDS (1)..(1014)
atggcgccggagatcgtgagcaagagggctgccaactacgccgggaagcaggtggcagctccgcgaaacgcctacgttactttcctggcgggagctggggactacgttaagggcgtcgttggactcgctaaggggctgcgaaaagtaggctctgcttaccccttagtggttgcggtgctccccgacgttcctgacgaacaccggaagctactggtgtcccaggggtgcatcgtaaggcaaatcgagcccgtgtaccctcccgagaaccagacccaattcgccatggcgtattacgtcatcaactattctaagctccgcatttgggagtttgtagagtatagcaagatgatatatttggacgcagacatccaagtctacgataacatagaccacctgtttgacctgcccggcgggcgtttctacgcagtaatggactgcttctgcgagaagacatggagccacacgccgcagtacaaaattggctactgccagcagtgtcccaacaaggtgacatggccggcggagctggggcaaccgccggcgctatacttcaacgcaggcatgttcgttcacgagcctagcctcgctaccgccgaaaaactccttgctactctgaaggttgctccaacgactcccttcgctgagcaagactacttgaacatgttcttcaaggacatctacaggcccattccacttacttataaccttgtcctcgcaatgctctggcgccaccctgagaatgtcgagctcgacaaggtcatggtcgtccattactgtgctgcgggatcgaagccatggaggtatactggtaaagaagaaaacatggacagagaagacatcaagatgttggttaagaagtggtgggacatctacaacgacgactcgctggattacaagggaccggcggcaacgatggatctggagccggaggcccctggtttgaagcagcttaagctggcggcgctgtcggaggccggcgaggtgcgctatactaaagcaccttcagcagcttaa

SEQ ID NO: 7943 - protein, 337 aa, Xerophyta viscosa
MAPEIVSKRAANYAGKQVAAPRNAYVTFLAGAGDYVKGVVGLAKGLRKVGSAYPLVVAVLPDVPDEHRKLLVSQGCIVRQIEPVYPPENQTQFAMAYYVINYSKLRIWEFVEYSKMIYLDADIQVYDNIDHLFDLPGGRFYAVMDCFCEKTWSHTPQYKIGYCQQCPNKVTWPAELGQPPALYFNAGMFVHEPSLATAEKLLATLKVAPTTPFAEQDYLNMFFKDIYRPIPLTYNLVLAMLWRHPENVELDKVMVVHYCAAGSKPWRYTGKEENMDREDIKMLVKKWWDIYNDDSLDYKGPAATMDLEPEAPGLKQLKLAALSEAGEVRYTKAPSAA

SEQ ID NO: 7944 - DNA, 1402 bp, Oryza sativa subsp. indica
  CDS (119)..(1144)
gaaacccaagcaaaccagcagctactaagcaaagcacaaccaaagcttaagcttcctccaaatcctcacacaagaactcgctcttcttaaccctcccggattttctccgacgagatcgatggctcctccccagcttgccggcaagatgaccgccaaggccgccgcggcggtgaagcccgcgacgagggcgtacgtgacgttcctcgcgggcgacggtgactactggaagggcgtggtcgggctggccaagggccttcgcaaggtgggctcggcctacccgctggtggtcgccgtcctccccgacgtgccggagtcccaccgccgcatcctcatctcccagggctgcatcgtccgggagatcgagccggtgtacccgccggagaaccagacgcagttcgccatggcctactacgtcatcaactactccaagctccgcatctgggagttcgtggagtacgagaggatggtgtaccttgacgccgacatccaggtgttcgacaacatcgacgagctgttcgagctgcccaaggggcccttctacgcggtgatggactgcttctgcgagaagacgtggagccacaccccgcagtaccagatcggctactgccagcagtgccccgacaaggtggcgtggccgaccgccgagctcggcccgccgccggcgctctacttcaacgccggcatgttcgtgcacgagcccagcatggccaccgccaagtcccttctcgacactctgcgcgtcaccacgcccactcccttcgcggagcaggatttcctgaacatgttcttcagggagcagtacaagccgatcccactgatctacaaccttgtcctggccatgctctggaggcatccagagaacgtccagctcgagaaggtcaaggtcgtgcactactgcgcagcgggatcgaagccgtggaggtacacgggcaaggaggcgaacatggacagggaggacatcaagatgctggtcaagaagtggtgggacgtctacaacgacggcagcctggacttcaagggcctcccgcccatcgcggccgccgacgacgccgacgaggtcgaggcggcggccaagaagccgctgcgcgccgcgctggcggaggcccgcaccgtcaagtacgtcacggcgccatcggccgcgtgatcgtacggccactgtcgcttccctccggtgctcgggcgtccggctccggcggcgtacctctgcatcccgtatcttggtatttttttaggatgtccaatttgggatcagtatgttacttctagtacacttcacaaatgtaacgaggcttgtttagaatacttatgctgtggattttgtgaatatctgttccttttgagtcaaaactcaaccagtgtgatctttgtattttgtggaaatcgatatattataggaagttgt

SEQ ID NO: 7945 - protein, 341 aa, Oryza sativa subsp. indica
MAPPQLAGKMTAKAAAAVKPATRAYVTFLAGDGDYWKGVVGLAKGLRKVGSAYPLVVAVLPDVPESHRRILISQGCIVREIEPVYPPENQTQFAMAYYVINYSKLRIWEFVEYERMVYLDADIQVFDNIDELFELPKGPFYAVMDCFCEKTWSHTPQYQIGYCQQCPDKVAWPTAELGPPPALYFNAGMFVHEPSMATAKSLLDTLRVTTPTPFAEQDFLNMFFREQYKPIPLIYNLVLAMLWRHPENVQLEKVKVVHYCAAGSKPWRYTGKEANMDREDIKMLVKKWWDVYNDGSLDFKGLPPIAAADDADEVEAAAKKPLRAALAEARTVKYVTAPSAA

SEQ ID NO: 7946 - DNA, 984 bp, Oryza sativa subsp. indica
  CDS (1)..(984)
atggggccgaacgtgtcgtcggagaagaaggcgttggcggcggcgaagaggagggcgtacgtgacgttcctggccggcgacggcgactactggaagggcgtcgtggggctcgccaaggggctccgccgcgtccgctcggcgtacccgctggtggtcgccgtgctcccggacgtccccggcgagcaccggcggaagctggtcgagcaggggtgcgtggtccgggagatccagccggtgtacccgccacagagccagacgcagttcgccatggcctactacgtgatcaactactcgaagctccgcatctgggagttcgtggagtacgagcggatggtctacctcgacgccgacatacaggtgttcgacaacatcgaccacctgttcgacctcgacaagggcgccttctacgccgtcaaggactgcttctgcgagaagacgtggagccacacgccgcagtacgacatcggctactgccagcagcgccccgacgaggtggcgtggccggagcgcgagctcggtcccccgccgccgctctacttcaacgccggcatgttcgtccacgagcccggcctcggcaccgccaaggacctgctcgacgcgctcgtcgtcacgccgcccaccccgttcgccgagcaggacttcctcaacatgttcttccgcgaacagtacaagcccatccccaacgtctacaacctcgttctcgccatgctctggaggcacccggagaacgtcgacctcgaccaggtcaaggtcgtccattactgtgcagcgggttcgaagccatggaggttcaccgggaaggaggagaacatgaacagagaagatataaagatgctggtgaagaggtggtgggacatctacaacgacgagagcctcgactacaaggaggaggaggacaacgccgacgaggccagccagccgatgcggacggcgctcgccgaggccggcgccgtcaagtacttcccggcgccctccgccgcgtag

SEQ ID NO: 7947 - protein, 327 aa, Oryza sativa subsp. indica
MGPNVSSEKKALAAAKRRAYVTFLAGDGDYWKGVVGLAKGLRRVRSAYPLVVAVLPDVPGEHRRKLVEQGCVVREIQPVYPPQSQTQFAMAYYVINYSKLRIWEFVEYERMVYLDADIQVFDNIDHLFDLDKGAFYAVKDCFCEKTWSHTPQYDIGYCQQRPDEVAWPERELGPPPPLYFNAGMFVHEPGLGTAKDLLDALVVTPPTPFAEQDFLNMFFREQYKPIPNVYNLVLAMLWRHPENVDLDQVKVVHYCAAGSKPWRFTGKEENMNREDIKMLVKRWWDIYNDESLDYKEEEDNADEASQPMRTALAEAGAVKYFPAPSAA

SEQ ID NO: 7948 - DNA, 951 bp, Oryza sativa subsp. japonica
  CDS (1)..(951)
atggctcctccccagcttgccggcaagatgaccgccaaggccgccgcggcggtgaagcccgcgacgagggcgtacgtgacgttcctcgcgggcgacggtgactactggaagggcgttgtcgggctggccaagggccttcgcaaggtgggctcggcctacccgctggtggtcgccgtcctccccgacgtgccggagtcccaccgccgcatcctcatctcccagggctgcatcgtccgggagatcgagccggtgtacccgccggagaaccagacgcagttcgccatggcctactacgtcatcaactactccaagctccgcatctgggagttcgtggagtacgagaggatggtgtaccttgacgccgacatccaggtgttcgacaacatcgacgagctgttcgagctgcccaaggggcacttctacgcggtgatggactgcttctgcgagaagacgtggagccacaccccgcagtaccagatcggctactgccagcagtgccccgacaaggtggcgtggccgaccgccgagctcggcccgccgccggcgctctacttcaacgccggcatgttcgtgcacgagcccagcatggccaccgccaaggagcagtacaagccgatcccactgatctacaaccttgtcctggccatgctctggaggcatccagagaacgtccagctcgagaaggtcaaggtcgtgcactactgcgcagcgggatcgaagccgtggaggtacacgggcaaggaggcgaacatggacagggaggacatcaagatgctggtcaagaagtggtgggacgtctacaacgacggcagcctggacttcaagggcctcccgcccatcgcggccgccgacgacgccgacgaggtcgaggcggcggccaagaagccgctgcgcgccgcgctggcggaggcccgcaccgtcaagtacgtcacggcgccatcggccgcgtga

SEQ ID NO: 7949 - protein, 316 aa, Oryza sativa subsp. japonica
MAPPQLAGKMTAKAAAAVKPATRAYVTFLAGDGDYWKGVVGLAKGLRKVGSAYPLVVAVLPDVPESHRRILISQGCIVREIEPVYPPENQTQFAMAYYVINYSKLRIWEFVEYERMVYLDADIQVFDNIDELFELPKGHFYAVMDCFCEKTWSHTPQYQIGYCQQCPDKVAWPTAELGPPPALYFNAGMFVHEPSMATAKEQYKPIPLIYNLVLAMLWRHPENVQLEKVKVVHYCAAGSKPWRYTGKEANMDREDIKMLVKKWWDVYNDGSLDFKGLPPIAAADDADEVEAAAKKPLRAALAEARTVKYVTAPSAA

SEQ ID NO: 7950 - DNA, 960 bp, Triticum aestivum
  CDS (1)..(960)
atggctcccatgctcaagcggatcgccgaggacgagcccaagaaggcggcgtacgtgaccttcctcgccggctccggcgactactggaagggcgtggtgggcctggccaagggcctccgcgccgtcaagtcggcctacccgctcgtggtggccgtgctccccgacgtccccgaggaccaccgccagaagctgctcgcccagggctgcctcgtccgcgagatcgtgcccgtctacccgccggagagccagacccagttcgccatggcatactacgtcatcaactactccaagctccgcatctgggagttcgtggagtacgagaggatggtgtacctggacgcggacatccaggtgtacgacaacgtcgaccacctcttcgacctcgagaagggcagcttctacgccgtcaaggactgcttctgcgagaagacgtggagccacaccaagcagtacgagatcggctactgccagcagtgccccgacagggtcgtctggccggagcgcgacctcggcgtgcccccgccgccgctctacttcaacgccggcatgttcgtgcacgagcccagcatggccaccgccaaggccctgctcgacaagctcgtcgtcaccgaccccacccccttcgccgagcaggacttcctcaacatgttcttcagggacgtgtacacgcccattccgcccgtctacaacctcgtcttggccatgctctggaggcaccccgagaacatccagctccacaaggtcaaggtcgtccactactgtgcagcgggttcgaagccgtggaggtacaccggcgaggaggccaacatggacagggaggacatcaagatgctggtcaagaaatggtgggccatctacgacgacgagagcctcaactacaagcctgccgccgacccgctgcgtgctgccctcgccgaggtcgtcgccgtcaagtccttcccggcgccctcggctgcatag

SEQ ID NO: 7951 - protein, 319 aa, Triticum aestivum
MAPMLKRIAEDEPKKAAYVTFLAGSGDYWKGVVGLAKGLRAVKSAYPLVVAVLPDVPEDHRQKLLAQGCLVREIVPVYPPESQTQFAMAYYVINYSKLRIWEFVEYERMVYLDADIQVYDNVDHLFDLEKGSFYAVKDCFCEKTWSHTKQYEIGYCQQCPDRVVWPERDLGVPPPPLYFNAGMFVHEPSMATAKALLDKLVVTDPTPFAEQDFLNMFFRDVYTPIPPVYNLVLAMLWRHPENIQLHKVKVVHYCAAGSKPWRYTGEEANMDREDIKMLVKKWWAIYDDESLNYKPAADPLRAALAEVVAVKSFPAPSAA

SEQ ID NO: 7952 - DNA, 972 bp, Triticum aestivum
  CDS (1)..(972)
atggctcccatgctcaagcggatcgccgaggacgagccgaagaaggcggcgtacgtgaccttcctcgccggctccggcgactactggaagggcgtggtgggcctggccaagggcctccgcgccgtcaagtcggcctacccgctcgtggtggccgtgctccctgacgtccccgaggaccaccgccagaagctgctcgcccagggctgcgtcgtccgcgagatcgtgcccgtgtacccgccggagagccagacccagttcgccatggcctactacgtcatcaactactccaagctccgcatctgggagttcgtggagtacgagcggatggtgtacctggacgcggacatccagttgtacgacaacatagaccacctctttgacctggagatgggcagcttctatgccgtcatggactgcttctgcgagaagacgtggagccacaccccgcagtacgagatcggctactgccagcagtgcccggaccgggtggtctggccggagcgcgacctcggcgtgcccccgccgccgctctacttcaacgccggcatgttcgtgcacgagcccagcatggccaccgccaaggccctgctcgacaagcttgtcgtcaccgaccccacccccttcgccgagcaggactttcttaacatgttcttcagggacgtgtacaagcccatcccgccggtgtacaacctcgtgctcgccatgctctggaggcaccccgagaacatccagctccacaaggtcaaggtcgtccactactgcgccgcgggttccaagccgtggaggtacaccggcgaggaggccaacatggacagggacgacatcaagatgctggtcaagaagtggtgggccatctacgacgacgagagcctcaactacaagcctgccgccgacgaggccgccgacccgctgcgtgctgccctcgccgaggtcgtcgccgtcaagtccttcccggcgccatcagctgcgtag

SEQ ID NO: 7953 - protein, 323 aa, Triticum aestivum
MAPMLKRIAEDEPKKAAYVTFLAGSGDYWKGVVGLAKGLRAVKSAYPLVVAVLPDVPEDHRQKLLAQGCVVREIVPVYPPESQTQFAMAYYVINYSKLRIWEFVEYERMVYLDADIQLYDNIDHLFDLEMGSFYAVMDCFCEKTWSHTPQYEIGYCQQCPDRVVWPERDLGVPPPPLYFNAGMFVHEPSMATAKALLDKLVVTDPTPFAEQDFLNMFFRDVYKPIPPVYNLVLAMLWRHPENIQLHKVKVVHYCAAGSKPWRYTGEEANMDRDDIKMLVKKWWAIYDDESLNYKPAADEAADPLRAALAEVVAVKSFPAPSAA

SEQ ID NO: 7954 - DNA, 978 bp, Vitis vinifera
  CDS (1)..(978)
atggctcctactttggcctctgcaactggtttagccaaggctgccagcatttccagccgggcatatgtgactttcttggccggtaacggcgactacgtgaagggcgtggtggggctggccaaggggctgagaaaggtgaaaaccgcatacccacttgtggtggcggtactgccggacgtcccggcggagcaccgccgcattctggaggaccagggctgcgtcgtcagggagatcgagccggtgaacccaccggagaaccagacccagttcgccatggcctactacgtcatcaactactccaaactccgcatctgggagtttgtggagtacagtaagatgatatacttggacggagacatacaggtgtttagtaacatagaccatttgtttgatttggatgatgggtatttctatgctgtgatggactgtttctgtgagaagacgtggagcaactcgccgcagtacaagattgggtactgccagcagtgcccggagaaggtgaagtggccggcggagatgggtccagcaccccctctctacttcaacgccggcatgtttgtgtttgagccttgcctctccgtctatgatgatctccttaccactctcaagatcacaactcctacctcttttgccgagcaggactatttgaatatgttcttcagggacatctacaagcccattccacccacctacaaccttgttttagccatgctatggcgccacccagagaacattgaccttcaaagaaccaatgttgttcactattgtgctgctggttcaaagccatggaggtatactgggaaggaggagaacatggacagggaagatataaagatgttggtgaagaagtggtgggatatatacaatgatgagagcttggactacaggaactcatcggcaaatggacagcctttcacggcggcgctttcggaggccggcgtagtccaccacttcattaccgcctcatcggctgcctag

SEQ ID NO: 7955 - protein, 325 aa, Vitis vinifera
MAPTLASATGLAKAASISSRAYVTFLAGNGDYVKGVVGLAKGLRKVKTAYPLVVAVLPDVPAEHRRILEDQGCVVREIEPVNPPENQTQFAMAYYVINYSKLRIWEFVEYSKMIYLDGDIQVFSNIDHLFDLDDGYFYAVMDCFCEKTWSNSPQYKIGYCQQCPEKVKWPAEMGPAPPLYFNAGMFVFEPCLSVYDDLLTTLKITTPTSFAEQDYLNMFFRDIYKPIPPTYNLVLAMLWRHPENIDLQRTNVVHYCAAGSKPWRYTGKEENMDREDIKMLVKKWWDIYNDESLDYRNSSANGQPFTAALSEAGVVHHFITASSAA

SEQ ID NO: 7956 - DNA, 978 bp, Vitis vinifera
  CDS (1)..(978)
  misc_feature (84)..(84): w is a or t
atggctcctactttggcctctgcaactggtttagccaaggctgccagcatttccagccgggcatatgtgactttcttggccggwaacggcgactacgtgaagggcgtggtggggctggccaaggggctgagaaaggtgaaaaccgcatacccacttgtggtggcggtactgccggacgtcccggcggagcaccgccgcattctggaggaccagggctgcgtcgtcagggagatcgagccggtgaacccgccggagaaccagacccagttcgccatggcctactacgtcatcaactactccaaactccgcatctgggagtttgtggagtacagtaagatgatatacttggacggagacatacaggtgtttggtaacatagaccatttgttcgatttggacaatgggtatttctatgctgtgatggactgtttctgtgagaagacgtggagcaactcgccgcagtacaagattgggtactgccagcagtgtccggagaaggtgcagtggccggcggagatgggtccagcacctcctctctacttcaacgccggcatgtttgtgtttgagccttgcctctccgtctatgatgatctccttaccactctcaagatcacaactcctacctcctttgccgagcaggactatttgaatatattcttcagggacatctacaggccaattccacccacctacaaccttgttttagccatgctatggcgccacccagagaacattgaccttcaaagaaccaatgttgttcactattgtgctgctggttcaaaaccatggaggtatactgggaaggaggagaacatggagagggaggatataaagatgttggtgaagaagtggtgggatatatacaatgatgagagcttggactacaggaactcatcagcaaatggacagcctttcacggcggtgctttcggaggccggcgaagtccaccactacattaccgccccatcggctgcctag

SEQ ID NO: 7957 - protein, 325 aa, Vitis vinifera
MAPTLASATGLAKAASISSRAYVTFLAGNGDYVKGVVGLAKGLRKVKTAYPLVVAVLPDVPAEHRRILEDQGCVVREIEPVNPPENQTQFAMAYYVINYSKLRIWEFVEYSKMIYLDGDIQVFGNIDHLFDLDNGYFYAVMDCFCEKTWSNSPQYKIGYCQQCPEKVQWPAEMGPAPPLYFNAGMFVFEPCLSVYDDLLTTLKITTPTSFAEQDYLNIFFRDIYRPIPPTYNLVLAMLWRHPENIDLQRTNVVHYCAAGSKPWRYTGKEENMEREDIKMLVKKWWDIYNDESLDYRNSSANGQPFTAVLSEAGEVHHYITAPSAA

SEQ ID NO: 7958 - DNA, 1029 bp, Vitis vinifera
  CDS (1)..(1029)
  misc_feature (67)..(67): r is g or a
  misc_feature (675)..(675): w is a or t
atggctcctgaaatcatctccgcttcgggaaaaccgtccagatttttgaaaccggctagtcttccgracagagcatacgtggccttcttggccggtaacggggactacgtgaaaggtgttgttgggttagccaaggggctgcggaaggtgaaatccgcttacccgcttgtggtggcggtgttaccggacgtgccggtggagcaccgccgagaactggaatcccaggggtgcatcgtcagagagattgagccggtttacccacccgagaaccagacccagttcgccatggcctattacgttatcaattattcaaagctccgtatctgggagttcgtggagtacagtaagatgatatacttggatggggatattcaagtctacgataacattgaccacctctttgagctaccagacggacatttctatgcagtgatggactgtttctgtgagaaaacatggagtcacacgccacagtacaagattggatactgccaacagtgtccggaaaaggttcagtggccggcggagctgggtcagccgccttcactttacttcaacgcaggcatgtttgtgtttgagcccagcctctccacctatgaagatctcttggaaaccctcaggatcacccctgcaaccccttttgcagagcaggatttcttgaatatgtacttcagwgatgtatataagcctattcctctggtctacaatcttgtccttgccatgctgtggcggcatcctgagaatgtagagcttgataaagtgaaagttgttcactactgtgcagcggggtcgaagccatggaggtacacagggaaggaggacaacatgcagagagaggacattaagatgctggtaaacaaatggtgggagatatacaatgacaagtcattggattacaagaagacgaggatgatggcgaatgattacagcagtgttttgccgggggagcaggtgaatttggagccgttcattgcagctctttccgaggtggggcatgttgaatttgtgagagccccttcagcagcctag

SEQ ID NO: 7959 - protein, 342 aa, Vitis vinifera
  misc_feature (225)..(225): The Xaa at location 225 stands for Arg, or Ser.
MAPEIISASGKPSRFLKPASLPBRAYVAFLAGNGDYVKGVVGLAKGLRKVKSAYPLVVAVLPDVPVEHRRELESQGCIVREIEPVYPPENQTQFAMAYYVINYSKLRIWEFVEYSKMIYLDGDIQVYDNIDHLFELPDGHFYAVMDCFCEKTWSHTPQYKIGYCQQCPEKVQWPAELGQPPSLYFNAGMFVFEPSLSTYEDLLETLRITPATPFAEQDFLNMYFXDVYKPIPLVYNLVLAMLWRHPENVELDKVKVVHYCAAGSKPWRYTGKEDNMQREDIKMLVNKWWEIYNDKSLDYKKTRMMANDYSSVLPGEQVNLEPFIAALSEVGHVEFVRAPSAA

SEQ ID NO: 7960 - DNA, 978 bp, Verbascum phoeniceum
  CDS (1)..(978)
atggccccaatcattgggaaaatcccggcccttggatcgagaaaagcatacgttacgtttttagcaggtactggtgattactataagggagtggttggcttagcaaagggtttgagaaaggttaaaagtgcttaccctcttgtggtggcaattttgcccgatgttcccgaggaacaccgtgagattttgaagtcgcaaggttgcattgtgaaggaaatcgagccaatttatccacccgagaaccaaattcaatttgccatggcgtactatgtaatcaactattccaagcttcgcatatggaactttgaggagtatagtaagatggtgtaccttgatgcagatatccaagtttacgagaatatcgatcacctactcgacacaccaaacggctatttctatgctgtaatggattgcttctgtgaggcgacatgggcccactctcgacaattctcgatagggtattgccaacagtgccctaataaggtcacttggcctactgaaatgggctctcctccgccactctatttcaacgcgggaatgttcgtttttgaacctaatcaaaccacatatgaaaatcttcttgaaactctgtgtatcactccaccaacaccatttgcagaacaggatttcttgaatatgttctttgagaaaacatacaaacctatccctttggtatgcaaccttgttctcgcgatgctatggcgccaccctgagaatgttgtgcttgacgacgttaaagttgttcactattgcgctgctggatcgaaaccatggaggtataccggtgtagaagctaacatggatcgagaagacatcaaaatgctggtgaagaaatggtgggacgtttatgatgacgagtctctagatttcaaggccaacgaaaccattgtcgaagatgagaccttctcaaggccatcaataatggctgccatgcctgagcctgcaatatcatacattccagccccttctgctgcttaa

SEQ ID NO: 7961 - protein, 325 aa, Verbascum phoeniceum
MAPIIGKIPALGSRKAYVTFLAGTGDYYKGVVGLAKGLRKVKSAYPLVVAILPDVPEEHREILKSQGCIVKEIEPIYPPENQIQFAMAYYVINYSKLRIWNFEEYSKMVYLDADIQVYENIDHLLDTPNGYFYAVMDCFCEATWAHSRQFSIGYCQQCPNKVTWPTEMGSPPPLYFNAGMFVFEPNQTTYENLLETLCITPPTPFAEQDFLNMFFEKTYKPIPLVCNLVLAMLWRHPENVVLDDVKVVHYCAAGSKPWRYTGVEANMDREDIKMLVKKWWDVYDDESLDFKANETIVEDETFSRPSIMAAMPEPAISYIPAPSAA

SEQ ID NO: 7962 - DNA, 987 bp, Verbascum phoeniceum
  CDS (1)..(987)
atgtctccttcagtgccgtccgatcttctgcctgggaaaatcacaaccgtccattcagagaaggcttatgtaacgtttttagcgggtagtggtgattattggaaaggagtggtaggtttggctaagggtttgagaaaagttaaaagtgcttatccacttgtggttgcaatcttgcccgatgttcccgaggaacatcgtgagattttgagatcacaaggttgtatcgttaaggagatcgagcccatatacccacccgccaaccagattgagttcgctatggcgtactatgtcatcaactattcaaagcttcgtatttggaactttttggagtatagcaagatggtgtacctagatgcagacatccaagtatttgagaacatagatcatcttttggacacaccagatggctacttctatgctgtaatggattgcttttgtgagaagacatggagccattcacctcagtattctgttggctactgtcaacagtgcccagacaaggtcacttggcctgaccacatgggatcacctcctcctttgtacttcaatgctggcatgtttgtctatgagcctaataaagacacttatgagacacttcttgaaaccctacaaattactccaccaacaccctttgctgagcaggatttcttgaacatgttcttcaacccgatctacaaacccattcctcttatttacaaccttgttcttgctatgctttggcaacaccccgagaacgtggaactcgaccaagtcaaagtcgtccactactgcgctgctggatcaaagccatggaggtacactggaaaagaagctaacatggatagagaagacatcaaaatgcttgtcaagaaatggtgggatgtttatgacgacgcgtctctcgattacaatcccgaagaagaagaagagagcttctcaaagccatcaataatgtctgcaatgcctgagcctgcagtttcatacattcctgctccttctgctgcttaa

SEQ ID NO: 7963 - protein, 328 aa, Verbascum phoeniceum
MSPSVPSDLLPGKITTVHSEKAYVTFLAGSGDYWKGVVGLAKGLRKVKSAYPLVVAILPDVPEEHREILRSQGCIVKEIEPIYPPANQIEFAMAYYVINYSKLRIWNFLEYSKMVYLDADIQVFENIDHLLDTPDGYFYAVMDCFCEKTWSHSPQYSVGYCQQCPDKVTWPDHMGSPPPLYFNAGMFVYEPNKDTYETLLETLQITPPTPFAEQDFLNMFFNPIYKPIPLIYNLVLAMLWQHPENVELDQVKVVHYCAAGSKPWRYTGKEANMDREDIKMLVKKWWDVYDDASLDYNPEEEEESFSKPSIMSAMPEPAVSYIPAPSAA

SEQ ID NO: 7964 - DNA, 1011 bp, Capsicum annuum
  CDS (1)..(1011)
atggcacctaatgtttttggtcttgcaaataaggcaactggtttggccaagacaaaaagtttgtctagccgtgcctatgtgacgtttttagctggaaacggtgattactggcaaggtgtagttggcttggttaagggattgcgtaaggcaaaatctgcttacccacttgttgtggcttgtttgcctgacgtccctgaggaacatcgacgtatactcatcaaccaaggttgtattgttcgagagatcgagccagtttatcccccggagaaccaaactcaatttgctatggcttattatgtcatcaactattccaaactccgtatatgggagtttgtggagtatagcaagatgatatacttggatggagatatccaggtgtttgataacatagaccacctttttgacttgccagatggttatttctatgcggtgatggattgtttctgtgagaaaacatggagtcacactccacaatacaaggttggatactgccaacagtgcccagataaggtccagtggactcaagacttgggccctaagccatcactctatttcaatgctggcatgtttgtctatgagccaagtctctccacttatgatgatctcttgaagaccctcaaagttacccctcctaccccatttgctgagcaggatttcttgaacatgtatttcagagatgtatacaagccaattccaaacaattacaacttagtattagctatgttgtggcgtcaccctgagaatgttgatcttgacaaggtaaaagttgttcactactgtgcagcggggtcaaaaccatggaggtacactggcaaagaagagaacatggacagagaagacattaagatgctaatcaaaaaatggtgggatatttacaatgacataacactagattacaagaatgccaacgtgactcctgttgttgatgaccaagttgaagctaacaaattaatgacagcgatatcagagcctgatgttctgcactacataactgctccatctgccgcttag

SEQ ID NO: 7965 - protein, 336 aa, Capsicum annuum
MAPNVFGLANKATGLAKTKSLSSRAYVTFLAGNGDYWQGVVGLVKGLRKAKSAYPLVVACLPDVPEEHRRILINQGCIVREIEPVYPPENQTQFAMAYYVINYSKLRIWEFVEYSKMIYLDGDIQVFDNIDHLFDLPDGYFYAVMDCFCEKTWSHTPQYKVGYCQQCPDKVQWTQDLGPKPSLYFNAGMFVYEPSLSTYDDLLKTLKVTPPTPFAEQDFLNMYFRDVYKPIPNNYNLVLAMLWRHPENVDLDKVKVVHYCAAGSKPWRYTGKEENMDREDIKMLIKKWWDIYNDITLDYKNANVTPVVDDQVEANKLMTAISEPDVLHYITAPSAA

SEQ ID NO: 7966 - DNA, 999 bp, Vitis vinifera
  CDS (1)..(999)
atggctcctactttggcctctgaaactggtttggccaaggcttatagcctttccgacagggcatatgtgacgttcttggccgaaaatggcgactacgtgaaaggcgtggtggggctggccaaggggctgagaaaggtgaaaaccgcatacccacttgtggtggcggtactgccggacgtccaggcggagcaccgccgcattctggaggaccagggctgcgtcgtcagggagatcgagcctgtgaacccgccggagaaccagacccagttcgccatggcctactacgtcatcaactactccaaactccgcatctggaagtttgtggagtacagtaagataatatacttggacggagacatacaggtgtttgataacatagatcatttgtttgatttgggtgatgggcatttccatgctgtgatggactgtttctgtgagagatcgtggagtaactcgccgcagtacaggattgggtactgccagctgtgcccggagaaggtgaagtggccggaggagatgggtccggagcctcctttctacttcaacgccggcatgtttatcttcgagcctaacctctccgtctatgaccatctcctcagcactctagtgatcactcctgctagcacttttgctgagcaggactatttgaatatgttcttcaaagacacctacaagcccattacactaacctacaaccttggtttgcccatgctatggcgccacccagaacacgttgacattgaaagaaccaaagttgttcgctattgtgctgccggttcaaagccatggaagtatactgggcaggaggagaacatggagagggaggatataaagatgttggtgaagaagtggtgggatatatacaatgatgagagcttggattacgggaactcatctgccttggattacaggaactcatctgcagacggaaagccattcacggtggcgctttcagaggccggcgtagtccactacattgccgccccatcggctgcctag

SEQ ID NO: 7967 - protein, 332 aa, Vitis vinifera
MAPTLASETGLAKAYSLSDRAYVTFLAENGDYVKGVVGLAKGLRKVKTAYPLVVAVLPDVQAEHRRILEDQGCVVREIEPVNPPENQTQFAMAYYVINYSKLRIWKFVEYSKIIYLDGDIQVFDNIDHLFDLGDGHFHAVMDCFCERSWSNSPQYRIGYCQLCPEKVKWPEEMGPEPPFYFNAGMFIFEPNLSVYDHLLSTLVITPASTFAEQDYLNMFFKDTYKPITLTYNLGLPMLWRHPEHVDIERTKVVRYCAAGSKPWKYTGQEENMEREDIKMLVKKWWDIYNDESLDYGNSSALDYRNSSADGKPFTVALSEAGVVHYIAAPSAA

SEQ ID NO: 7968 - DNA, 1041 bp, Picea sitchensis
  CDS (1)..(1041)
atgaatccagaaattcctcctgtagatctgctcttcagggctaaggctgcggcggccaagaagaactgtagagcgtacgtgactttcttggctggatgtggcgactacgtgaaaggtgttgtcggtcttgcaaagggtctccggaaggtgaagagcgcatatcctcttgttgttgctgttttggccgatgttccagaggatcatcgcctgcaattgcgcagacagggttgtattgttcgccagattcaaccaatcgacccccccgacaatgaagtgcaattctcaatgccttactatgtcctcaactactccaaactccgtatttgggagtttgaggagtacagcaagatggtatatctggacgcagacatccaagtcttccacaacattgatcacctctttgacatgcgagatggatatttctatgcggttatggattgcttctgcgagaagacatggagtcacactccgcagtacaacatcggatactgccagcagtgcccagaaaaggtgtcgtggcccaccgaattagggcagcggccttctctgtactttaacgctggaatgtttgtgtttgagcccagtcagctgaccttcgattgccttttagagactctcatggccactgtgccaacgcccttcgcagaacaggatttcttgaacatgttttttgagaagatatacaagcctattccgttggtgtacaatctggttctggccatgatgtggcgacatccccagaacgtggacttggacactgtcaaagttgttcactattgtgcagctggatcgaagccgtggaggttcagtggaaatgaggaaaatatggagagggaagatataaagacgttggtgcagaaatggtggaacatatataatgacccctctctggatcacttgggatctggagacacaattccagatccaatttcagaggtggacggaaaatcaaatgatctgcaacaagtggctgctgctaattctttcctggctgcggtgccaacatacccaaacttaatgcctgctccgcctgcagcttaa

SEQ ID NO: 7969 - protein, 346 aa, Picea sitchensis
MNPEIPPVDLLFRAKAAAAKKNCRAYVTFLAGCGDYVKGVVGLAKGLRKVKSAYPLVVAVLADVPEDHRLQLRRQGCIVRQIQPIDPPDNEVQFSMPYYVLNYSKLRIWEFEEYSKMVYLDADIQVFHNIDHLFDMRDGYFYAVMDCFCEKTWSHTPQYNIGYCQQCPEKVSWPTELGQRPSLYFNAGMFVFEPSQLTFDCLLETLMATVPTPFAEQDFLNMFFEKIYKPIPLVYNLVLAMMWRHPQNVDLDTVKVVHYCAAGSKPWRFSGNEENMEREDIKTLVQKWWNIYNDPSLDHLGSGDTIPDPISEVDGKSNDLQQVAAANSFLAAVPTYPNLMPAPPAA

SEQ ID NO: 7970 - DNA, 1038 bp, Picea sitchensis
  CDS (1)..(1038)
atgaatccagaaatttctcctgtagatctgctcttcggggctaaggctgcggcggccaagaagaactgtagagcgtacgtgactttcttggcgggatgtggcgactacgtgaaaggtgttgtcggtcttgcaaagggtttgcgcaatgtgaaaagcgcatatcctcttgttgttgctgttttggccgatgttccagaggatcaccgcctgcaattgcgcagacagggttgtattgttcgccagattcaaccaatcgacccccccgacaatgaagtgcaattctcaatgccttactatgtcctcaactactccaaactccgtatttgggagtttgaggagtacagcaagatggtatatctggacgcagacattcaagtcttcgacaacatcgatcacctctttgacttgcgggatggatatttctatgcggttatggattgcttctgcgagaagacatggagtcatactccgcagtacaagatcggatactgccagcagtgcccagaaaaggtgtcgtggcccatcgaattagggcagcggccttctctgtactttaacgctggaatgttcgtgtttgagcccagtcagctgaccttcgattgccttttagagactctcatggctactgtgccaacgcccttcgcagaacaggatttcttgaacatgttttttgagaagatatacaagcctatccctctggcgtacaatctggttctggccatgatgtggcgacatccccagaacgtggacttggacactgtcaaagttgttcactattgtgcagctggatcgaagccgtggaggttcagtgggaaggaggaaaacatggagagggaagatataaagacgttggtgcagaaatggtgggacatatacaatgacccctctctcgatcacttgggatcaggagacacagttccagatccaatttcagaggctgacggaaaatcaaatgatctgcaacaagtggctgcaaattctttccttgctgagatgccaacatgccccaacttaatgcctgctccgcctgcagcttaa

SEQ ID NO: 7971 - protein, 345 aa, Picea sitchensis
MNPEISPVDLLFGAKAAAAKKNCRAYVTFLAGCGDYVKGVVGLAKGLRNVKSAYPLVVAVLADVPEDHRLQLRRQGCIVRQIQPIDPPDNEVQFSMPYYVLNYSKLRIWEFEEYSKMVYLDADIQVFDNIDHLFDLRDGYFYAVMDCFCEKTWSHTPQYKIGYCQQCPEKVSWPIELGQRPSLYFNAGMFVFEPSQLTFDCLLETLMATVPTPFAEQDFLNMFFEKIYKPIPLAYNLVLAMMWRHPQNVDLDTVKVVHYCAAGSKPWRFSGKEENMEREDIKTLVQKWWDIYNDPSLDHLGSGDTVPDPISEADGKSNDLQQVAANSFLAEMPTCPNLMPAPPAA

SEQ ID NO: 7972 - DNA, 1026 bp, Picea sitchensis
  CDS (1)..(1026)
atggcacctgaggttccttcaggggcgtttggagggtcgaaggtgggtgcccttaccagcgggtataactcgaagagaggatacgttaccttcctggcgggtaatggagactactggaagggcgttgtagggctcgctaaaggccttcgtaaggtcaatagcgcttaccctctcgttgttgccatgttgcctgatgttccagaggagcacagggagattttgaggagccaaggatgtatatgtcgcgagatcgtccctatctaccctcctgaaaatcaagtgcagttcgccatggcctattatgtcatcaactactctaagctacgtatatgggagtttgaagagtacagcaagatggtatacctggacgcagacatccaagtctttgagaacatcgacaatctcttcgacatgccggatggctacttctatgctgtcatggactgtttctgcgagaagacatggagtcacactccacagtataagataggctactgccagcagtgcccagacaaagttcaatggtcctctgaactaggccttcctcctgcgctctatttcaacgctggcatgtttgtcttcgagcctagcaagttaaccttcgacagcctcatcgaaactctcaggattacagctcctactccctttgcagaacaggatttcttaaacatgtatttccagaagatgtacaagcccatccctctcgtttacaacctggttctagcaatgctatggcgacacccagaaaatgtcgatctagacaaagttaaggtcgtccactactgcgcagctggatccaagccctggaggtacacgggcaaggaggcgaacatgcagagggaagatataaaagtattagtgcaaaaatggtgggatgtatatgacgacgagtctctggatttcaaggcagaggattcaattcctgaggccgaaacactttcggacttgcaacaaattacagcgaattcgttattggctgcaattcccacggccgctgccttcattcccactccttctgcagcttga

SEQ ID NO: 7973 - protein, 341 aa, Picea sitchensis
MAPEVPSGAFGGSKVGALTSGYNSKRGYVTFLAGNGDYWKGVVGLAKGLRKVNSAYPLVVAMLPDVPEEHREILRSQGCICREIVPIYPPENQVQFAMAYYVINYSKLRIWEFEEYSKMVYLDADIQVFENIDNLFDMPDGYFYAVMDCFCEKTWSHTPQYKIGYCQQCPDKVQWSSELGLPPALYFNAGMFVFEPSKLTFDSLIETLRITAPTPFAEQDFLNMYFQKMYKPIPLVYNLVLAMLWRHPENVDLDKVKVVHYCAAGSKPWRYTGKEANMQREDIKVLVQKWWDVYDDESLDFKAEDSIPEAETLSDLQQITANSLLAAIPTAAAFIPTPSAA

SEQ ID NO: 7974 - DNA, 1011 bp, Populus trichocarpa
  CDS (1)..(1011)
atggctccaggagtgcccatggatgtgatttcctgcaccggcaaggtttccacggctagcactggctactctaaaagggcctttgtaacatttttagccggaaatggggattatgttaaaggggtagttgggttggcgaagggtttgcgcaaggtgaagagtgcataccctctggtggtagcaatgttgccagatgtgcctgaggaacaccgtgacattttgaggtctcaaggttgcattgttcgtgagattgagcctatttatccacctgagaaccagattcagtttgccatggcctactacgtgatcaactactccaagctccgcatttggaatttcgaggagtacagcaagatgatgtatttggatgctgatatccaagtgttcgagaatatagaccatctatttgacacccaagatggctacttctatgccgtgatggactgcttctgtgagaaaacctggagccactcaccacaacactctatcggttactgccagcagtgcccggaaaaggtgacatggcctgctgagatgggctctcctcctcccttgtacttcaatgctgggatgtttgtctttgagcctagtcgtttgacttatgagagccttcttgaaactctccagattaccccaccaaccccatttgccgagcaagatttcttaaatatgtttttccaaaaaacatacaagccaatccctctaatgtacaacctggttttagccatgttatggcgacatcctgagaatgtggaggtcgaaaaggttaaagtggttcactactgtgctgctggttcaaaaccttggagatatactggcaaggaagctaacatggacagagaggacatcaagatgctagtggcaagatggtgggacatatataataacgagtccctcgatttcaaggctgagaactcagttccagaagaagaaacattgtcgaggtcatccatcttgtcttccaagcctgagcctgccatttcctacatctctgcgccatctgctgcttaa

SEQ ID NO: 7975 - protein, 336 aa, Populus trichocarpa
MAPGVPMDVISCTGKVSTASTGYSKRAFVTFLAGNGDYVKGVVGLAKGLRKVKSAYPLVVAMLPDVPEEHRDILRSQGCIVREIEPIYPPENQIQFAMAYYVINYSKLRIWNFEEYSKMMYLDADIQVFENIDHLFDTQDGYFYAVMDCFCEKTWSHSPQHSIGYCQQCPEKVTWPAEMGSPPPLYFNAGMFVFEPSRLTYESLLETLQITPPTPFAEQDFLNMFFQKTYKPIPLMYNLVLAMLWRHPENVEVEKVKVVHYCAAGSKPWRYTGKEANMDREDIKMLVARWWDIYNNESLDFKAENSVPEEETLSRSSILSSKPEPAISYISAPSAA

SEQ ID NO: 7976 - DNA, 1011 bp, Coptis japonica
  CDS (1)..(1011)
atggcgccagcagttaccgtagatggtttcacaagcactgggaaggttgcgacactgaacactggttattcaaaaagggcctatgtaacgttcctagctggtagtggtgattatgttaagggtgtagtggggttggcaaagggtctacgtaaagtcaagagtgcgtaccctctagtggttgcaatgttgcctgatgtacccgaagaacatcgtaaaatattaaggtctcaaggttgtatccttaaggagattgagccaatctatccacctgaaaaccaaatccagtttgcaatggcttactatgtgatcaattactccaagctacgtatatggaattttgaagagtatagcaaaatggtttatcttgacgccgatattcaagtgtttgagaacatagatcatctctttgacacaccaaacgggtacttcttcgctgtgatggactgtttttgcgagaaaacttggagtcattcaccgcaatactcagttgggtactgccagcaatgccctgataaggtgacatggcctgctgagatggggtctcctcctcccttgtacttcaatgctgggatgtttgtctatgaacctagcagactaactttcgaaagtcttattgaaaatcttagaatcactgctccaacaccctttgcagagcaagatttcttgaacaagttcttcaatcatgtctacaagcccatccctttggtgtacaatttggtcctagccatgttatggcggcaccctgaaaacgttgagcttgagaaggttaaggtggttcactactgtgccgctggatccaagccgtggaggtacactggcgaagaagctaatatggacagagaagatattaaagtgttagtagcaaaatggtgggaagtatacaatgatccctcgctcgatttcaaggctgatgattccgttaccaacagagaggctttttcaagaccattgctcttggcttcaatgccggagcctgcagtttcctacgttcccgcaccttctgctgcttaa

SEQ ID NO: 7977 - protein, 336 aa, Coptis japonica
MAPAVTVDGFTSTGKVATLNTGYSKRAYVTFLAGSGDYVKGVVGLAKGLRKVKSAYPLVVAMLPDVPEEHRKILRSQGCILKEIEPIYPPENQIQFAMAYYVINYSKLRIWNFEEYSKMVYLDADIQVFENIDHLFDTPNGYFFAVMDCFCEKTWSHSPQYSVGYCQQCPDKVTWPAEMGSPPPLYFNAGMFVYEPSRLTFESLIENLRITAPTPFAEQDFLNKFFNHVYKPIPLVYNLVLAMLWRHPENVELEKVKVVHYCAAGSKPWRYTGEEANMDREDIKVLVAKWWEVYNDPSLDFKADDSVTNREAFSRPLLLASMPEPAVSYVPAPSAA

SEQ ID NO: 7978 - DNA, 1029 bp, Zea mays
  CDS (1)..(1029)
atgtctcccgagctgaccggcaagatggccgccaaggccgccgccgccgctgcggcggtgaagcccgcgacgagggcgtacgtgacgttcctggcgggcgacggcgactactggaagggcgtggtgggcctggccaagggcctgcgcaaggtcggctcggcctatcccctggtggtggcccttctgcccgacgtgccggagtcccaccgccgcatcctcgtctcgcagggctgcatcctccgcgagatcgagcccgtgtacccgcctgagaaccagacgcagttcgccatggcgtactacgtcatcaactactccaagctccgcatctgggagttcgtggagtacgagaggatggtgtacctggacgcggacatccaggtgttcgagaacatcgacgagctgttcgagctcgagaaggggtacttctacgcggtgatggactgcttctgcgagaagacgtggagccacaccccgcagtacaggatcggctactgccaacagtgcccggacaaggtggcgtggccgaccaccgagctgggccctccgcccccgctctacttcaacgccggcatgttcgcgcacgagcccagcatggccaccgccaaggcactcctcgacaccctccgcgtcactccgcccacccccttcgcagagcaggacttcctgaacatgttcttcagggaccagtacaggccgatccctaacgtgtacaacctcgtgctcgccatgctctggaggcaccccgagaacgtccagctggagaaggtgaaggtcgtgcactactgcgcggcggggtccaagccgtggaggttcacgggcaaggaggccaacatggacagggaggacatcaagacgctggtgaacaagtggtgggacatctacaacgacgaggcactggacttcaagggcctgcccctctcgcccgccgacgccgacgacgaggtggaggcggtggccaagaagccgctccgcgcggcgctggcggaggccggcacggtcaagtacgtcaccgcgccctcggccgcgtga

SEQ ID NO: 7979 - protein, 342 aa, Zea mays
MSPELTGKMAAKAAAAAAAVKPATRAYVTFLAGDGDYWKGVVGLAKGLRKVGSAYPLVVALLPDVPESHRRILVSQGCILREIEPVYPPENQTQFAMAYYVINYSKLRIWEFVEYERMVYLDADIQVFENIDELFELEKGYFYAVMDCFCEKTWSHTPQYRIGYCQQCPDKVAWPTTELGPPPPLYFNAGMFAHEPSMATAKALLDTLRVTPPTPFAEQDFLNMFFRDQYRPIPNVYNLVLAMLWRHPENVQLEKVKVVHYCAAGSKPWRFTGKEANMDREDIKTLVNKWWDIYNDEALDFKGLPLSPADADDEVEAVAKKPLRAALAEAGTVKYVTAPSAA

SEQ ID NO: 7980 - DNA, 1050 bp, Zea mays
  CDS (1)..(1050)
atggctcccgagctgatgacagccaagatgaccgccaagaaggccgccgcggcggcggcggcggcggcggcggcgaagcctgccacgagggcgtacgtgacgttcctggcgggcgacggcgactactggaagggcgtggtggggctggccaagggcctgcgcaaggtccgctcggcctaccccctggtggtggccgtgctgcccgacgtgcccgagtcccaccgccgcatcctcgtctcgcagggctgcgtcgtccgcgagatcgagcccgtgtacccgcctgagaaccagacgcagttcgccatggcgtactacgtcatcaactactccaagctccgcatctgggagttcgtggagtacgagaggatggtgtacctggacgcggacatccaggtgttcgagaacatcgacggcctgttcgagctcgagaaggggtacttctacgcggtgatggactgcttctgcgagaagacgtggagccacaccccgcagtacaggatcggctactgccagcagtgcccggacaaggtggcgtggccagcggcgaccgccgagctgggccctccgccgtcgctctacttcaacgccggcatgttcgtgcacgagcccagcgtggccaccgccaaggcgctcctcgacaccctccgcgtgactccgcccacccccttcgcagagcaggacttcctgaacatgttcttcagggatcagtacaggccgatccccaacgtgtacaacctcgtgctggccatgctctggaggcaccccgagaacgtgcagctggagaaggtgaaggtcgtgcactactgcgcggcggggtccaagccgtggaggttcacgggcaaggaggcgaacatggacagggaggacatcaacgccctggtgaagaagtggtgggacatctacaacgacgagacgctggacttgaagggcctgccctcgctctcgcccgacgacgacgacgaggtggaggcggtggccaagaagccgcttcgcgcggccctggcggaggccggcacggtcaagtacgtcaccgcgccctcggccgcgtga

SEQ ID NO: 7981 - protein, 349 aa, Zea mays
MAPELMTAKMTAKKAAAAAAAAAAAKPATRAYVTFLAGDGDYWKGVVGLAKGLRKVRSAYPLVVAVLPDVPESHRRILVSQGCVVREIEPVYPPENQTQFAMAYYVINYSKLRIWEFVEYERMVYLDADIQVFENIDGLFELEKGYFYAVMDCFCEKTWSHTPQYRIGYCQQCPDKVAWPAATAELGPPPSLYFNAGMFVHEPSVATAKALLDTLRVTPPTPFAEQDFLNMFFRDQYRPIPNVYNLVLAMLWRHPENVQLEKVKVVHYCAAGSKPWRFTGKEANMDREDINALVKKWWDIYNDETLDLKGLPSLSPDDDDEVEAVAKKPLRAALAEAGTVKYVTAPSAA

SEQ ID NO: 7982 - DNA, 1005 bp, Boea hygrometrica
  CDS (1)..(1005)
atggccccggagattgctaacgccgccgtgagacaggcctcctccggcctatcgaaagcaggcagcttgcagagtcgggcttttgtcacattcttggctggcgatggtgactacgtgaaaggtgtcgtggggctggccaaggggttgaggaaggtggattcagtttatccactggtggtggcggtcctgcctgatgtcccggctgagcaccgccgtattctggtggagcaaggctgcatagtaagggagatcgagcctgtttatccaccggagaaccaaacccagttcgcgatggcttattacgtgatcaactactccaagcttcggatttgggagtttgtggagtacagcaagatgatatacctggatggtgatatccaggtgttcgacaacatcgaccatttgttcgacctggaaaatggctacttttacgcagtaatggactgtttctgcgagaaaacatggagccacacaacgcagtataagattgggtactgccagcagtgccccgagaaagtccagtggccgaaacatgtgggccccaagccctccctctacttcaacgccggcatgtttgttttcgagcccagtcttccgatttatcatgatcttctgcatatactcaagattacacctccgacaccatttgccgagcaggatttcctgaacatgttctttaaggacatttaccggccgatcccgaacgtgtacaacttagtgctggccatgctgtggcgccacccggagaatgtgaatctggaggaggtgaaggtggtgcactactgtgccgcagggtccaagccctggaggtatacaggccaagaggctaacatgcagagagaggacatcaaaatgcttgtaaagaaatggacagaaatttatgaagacgaaacgctggactacactttcgactctgcagtgcaggcggtgccagagaaacagctgacggcagtgctgacggacgccggtggtgttcatttcatcgccacccctccaacggcttga

SEQ ID NO: 7983 - protein, 334 aa, Boea hygrometrica
MAPEIANAAVRQASSGLSKAGSLQSRAFVTFLAGDGDYVKGVVGLAKGLRKVDSVYPLVVAVLPDVPAEHRRILVEQGCIVREIEPVYPPENQTQFAMAYYVINYSKLRIWEFVEYSKMIYLDGDIQVFDNIDHLFDLENGYFYAVMDCFCEKTWSHTTQYKIGYCQQCPEKVQWPKHVGPKPSLYFNAGMFVFEPSLPIYHDLLHILKITPPTPFAEQDFLNMFFKDIYRPIPNVYNLVLAMLWRHPENVNLEEVKVVHYCAAGSKPWRYTGQEANMQREDIKMLVKKWTEIYEDETLDYTFDSAVQAVPEKQLTAVLTDAGGVHFIATPPTA

SEQ ID NO: 7984 - DNA, 1029 bp, Brassica napus
  CDS (1)..(1029)
atggctccggagcttacacaaaccaccaccgttaaatccgccgtgacgataactaaaccgtcaccaccagtccacggtgatcgagcatacgttacatttctagctggaaacggtgactacgtcaaaggagtcgtaggcttagccaaaggactaagaaaagtcaaatcggcgtatccactcgtcgtggcgatattaccagacgtcccggaggagcaccgtcgtgtacttgtggaacaaggttgcattgtccgcgagatcgaacccgtttacccacccgagaaccagacccagtttgccatggcttattacgtcatcaactactccaaactccgtatctggaagtttgtggagtatagtaaaatgttatatttggatggagacattcaagtctacgagaacatcgatcacttgtttgatctccctgatggctatttctacgcggtgatggactgtttctgcgagaaaacgtggagccacacgccgcaatacaagatcggatactgccaacaatgccctgagaaagtccagtggccgaaggaagagcttggtgaaccaccgtctctttacttcaacgccgggatgttcgtgttcgaacctggtctagatacttacgaggatctgctaagaaccttaaagatcactcctccgactcctttcgctgaacaggactttctgaacatgtacttcgagaaaatctacaagccgattcctttagtttacaatctcgtcctagcgatgctatggcgtcatccagaaaatgtggagctcgataaggtcaaggtggttcactactgtgcagcgggttcgaagccatggagatacacagggaaggaagctaatatggagagggaagacatcaaaatgttggttaacaaatggtgggatatctacaatgatgattccttggattacaagaaatctgtcggagaccttgtggaagagtcggatgtggtgaatctgaagccgtttatctccgctcttactgaagctggaccggtcaagtacgtcactgcaccgtccgctgcttga

SEQ ID NO: 7985 - protein, 342 aa, Brassica napus
MAPELTQTTTVKSAVTITKPSPPVHGDRAYVTFLAGNGDYVKGVVGLAKGLRKVKSAYPLVVAILPDVPEEHRRVLVEQGCIVREIEPVYPPENQTQFAMAYYVINYSKLRIWKFVEYSKMLYLDGDIQVYENIDHLFDLPDGYFYAVMDCFCEKTWSHTPQYKIGYCQQCPEKVQWPKEELGEPPSLYFNAGMFVFEPGLDTYEDLLRTLKITPPTPFAEQDFLNMYFEKIYKPIPLVYNLVLAMLWRHPENVELDKVKVVHYCAAGSKPWRYTGKEANMEREDIKMLVNKWWDIYNDDSLDYKKSVGDLVEESDVVNLKPFISALTEAGPVKYVTAPSAA

SEQ ID NO: 7986 - DNA, 1026 bp, Picea sitchensis
  CDS (1)..(1026)
atggcacctgaggttccttcaggggcgtttggagggtcgaaggtgggtgcccttaccagcgggtataactcgaagagaggatacgttaccttcctggcgggtaatggagactactggaagggcgttgtagggctcgctaaaggccttcgtaaggtcaatagcgcttaccctctcgttgttgccatgttgcctgatgttccagaggagcacagggagattttgaggagccaaggatgtatatgtcgcgagatcgtccctatctaccctcctgaaaatcaagtgcagttcgccatggcctattatgtcatcaactactctaagctacgtatatgggagtttgaagagtacagcaagatggtatacctggacgcagacatccaagtctttgagaacatcgacaatctcttcgacatgccggatggctacttctatgctgtcatggactgtttctgcgagaagacatggagtcacactccacagtataagataggctactgccagcagtgcccagacaaagttcaatggtcctctgaactaggccttcctcctgcgctctatttcaacgctggcatgtttgtcttcgagcctagcaagttaaccttcgacagcctcatcgaaactctcaggattacagctcctactccctttgcagaacaggatttcttaaacatgtatttccagaagatgtacaagcccatccctctcgtttacaacctggttctagcaatgctatggcgacacccagaaaatgtcgatctagacaaagttaaggtcgtccactactgcgcagctggatccaagccctggaggtacacgggcaaggaggcgaacatgcagagggaaaatataaaagtattagtgcaaaaatggtgggatgtatatgacgacgagtctctggatttcaaggcagaggattcaattcctgaggccgaaacactttcggacttgcaacaaattacagcgaattcgttattggctgcaattcccacggccgctgccttcattcccactccttctgcagcttga

SEQ ID NO: 7987 - protein, 341 aa, Picea sitchensis
MAPEVPSGAFGGSKVGALTSGYNSKRGYVTFLAGNGDYWKGVVGLAKGLRKVNSAYPLVVAMLPDVPEEHREILRSQGCICREIVPIYPPENQVQFAMAYYVINYSKLRIWEFEEYSKMVYLDADIQVFENIDNLFDMPDGYFYAVMDCFCEKTWSHTPQYKIGYCQQCPDKVQWSSELGLPPALYFNAGMFVFEPSKLTFDSLIETLRITAPTPFAEQDFLNMYFQKMYKPIPLVYNLVLAMLWRHPENVDLDKVKVVHYCAAGSKPWRYTGKEANMQRENIKVLVQKWWDVYDDESLDFKAEDSIPEAETLSDLQQITANSLLAAIPTAAAFIPTPSAA

SEQ ID NO: 7988 - DNA, 1017 bp, Ricinus communis
  CDS (1)..(1017)
atggcccctcatcttgccagtgctaatcttgcagccaataccaactctttggttaagcaagccagcatatctagttgtgcatatgttactttcttggccggcgatggagactatgtgaaaggtgttgttggtttagccaaagggttaagaaaagtcaagagtaagtacccactagtggtggctatcttgcctgatgtcccagaggatcaccgtaaaatcttggtctctcagggttgcatagttaaagaaattgagcctgtttatccacctgagaaccagactcaattcgccatggcttattatgttatcaattactccaagcttcgtatatgggagtttgtggagtatagcaagatgatatatttggatggtgatattcaagtttttgagaacatagaccatctgtttgacttgcaaaatggttacttttatgctgtgatggattgtttttgtgagaagacatggagccactctccacagtacaagatcggatactgccaacagtgtcctgatagagtgaagtggcctgctgaaatgggtcctaagcctccactttactttaatgctggcatgtttgtttttgagcccagtctttccacatatgatgacctcttgaacacagtcaaactcacccctcctaccccatttgctgagcaggatttcttgaacatgttcttcaaggacatttacaggccaattcctccaatttacaacctggtcttggccttgctctggcgccatccagagaacatcgagtttgaaaaggtcaaggttgttcactactgtgcagccggatctaagccatggaggtatactggaaaagaagacaacatggacagagaagatataaagatgctggtgaagaaatggtgggacatatacgaggatgagtcgttagactacaagaatactgttgctgctactggtggtgcaactgaaggtgaactgcagccgttcttagcagctttatcggaggccggcgttgttcattacgttaccgccccatctgctgcttaa

SEQ ID NO: 7989 - protein, 338 aa, Ricinus communis
MAPHLASANLAANTNSLVKQASISSCAYVTFLAGDGDYVKGVVGLAKGLRKVKSKYPLVVAILPDVPEDHRKILVSQGCIVKEIEPVYPPENQTQFAMAYYVINYSKLRIWEFVEYSKMIYLDGDIQVFENIDHLFDLQNGYFYAVMDCFCEKTWSHSPQYKIGYCQQCPDRVKWPAEMGPKPPLYFNAGMFVFEPSLSTYDDLLNTVKLTPPTPFAEQDFLNMFFKDIYRPIPPIYNLVLALLWRHPENIEFEKVKVVHYCAAGSKPWRYTGKEDNMDREDIKMLVKKWWDIYEDESLDYKNTVAATGGATEGELQPFLAALSEAGVVHYVTAPSAA

SEQ ID NO: 7990 - DNA, 1020 bp, Ricinus communis
  CDS (1)..(1020)
atggctcctcatcttaccagtgctaatcttgcagccaataccaactctttggttaagcaagctagcatttctagttgtgcatatgttactttcttggctggtaatggagactatgtgaaaggtgttgttggtttagccaaagggttaagaaaggtcaatagtaagtacccattagtggtggctatcttgcctgatgtcccggaggatcaccgtaaaatcttggtctctcaaggttgtataattaaagaaattgagcccgtttatccaccggagaaccagactcaatttgccatggcttattatgtcatcaattactccaagcttcgtatatgggagtttgtggagtatagcaagatgatatatttggatggtgatattcaagtttttgagaacatagaccatctgtttgacttgcaagatggttacttttatgctgtgatggattgtttctgcgagaagacctggagccactctccacagtacaagatcggatactgccaacagtgtcctgatagagtgaagtggcctgctgaaatgggtcctaagcctccactttacttcaatgctggcatgtttgtttttgagcccagtcttcccacatatgatgacctcttgaacacagtcaaactcacccctcctaccccatttgctgagcaggatttcttgaacatgttcttcaaggacatttacaggccaattcctccaatttacaacctggtcttggccttgctctggcgccatccagagaatattgagctagaaaaggtcaaggttgttcactattgtgcagctgggtctaagccatggaggtatactggaaaagaagagaacatggacagagaggacataaagacgctggtcaagaaatggtgggacatatatgaagatgagtcgttagactacaagaacactgccgctgctgctaccggtggtgcaactgaagctggactgcagccactcctggcagctatgtcagaggccagcgaagttcactatataaccgctccatctgctgcataa

SEQ ID NO: 7991 - protein, 339 aa, Ricinus communis
MAPHLTSANLAANTNSLVKQASISSCAYVTFLAGNGDYVKGVVGLAKGLRKVNSKYPLVVAILPDVPEDHRKILVSQGCIIKEIEPVYPPENQTQFAMAYYVINYSKLRIWEFVEYSKMIYLDGDIQVFENIDHLFDLQDGYFYAVMDCFCEKTWSHSPQYKIGYCQQCPDRVKWPAEMGPKPPLYFNAGMFVFEPSLPTYDDLLNTVKLTPPTPFAEQDFLNMFFKDIYRPIPPIYNLVLALLWRHPENIELEKVKVVHYCAAGSKPWRYTGKEENMDREDIKTLVKKWWDIYEDESLDYKNTAAAATGGATEAGLQPLLAAMSEASEVHYITAPSAA

SEQ ID NO: 7992 - DNA, 1011 bp, Ricinus communis
  CDS (1)..(1011)
atggctcctgagcttgttcatgctgcactaaaacccgccagtttcaccaaacctcccactttgcccagccgggcttatgttactttcttggctggcaatggagattacattaaaggcgttgttgggttggctaaaggtttaagaaaagtcaaaactgcatacccattagtggtggcagtcttacctgatgtccccgaggagcataggaagattctcgagtcacaaggctgtatagtccgagagatcgaacccgtttacccacccgaaaaccagacccagtttgccatggcatattatgtaattaattactctaagctccgtatatgggagtttgtcgagtacagtaagatgatatacttagacggggacatccaggtttttgataacatagaccaccttttcgatttgcctgatggacatttctacgcagtaatggattgcttctgcgaaaaaacatggagccacactccacaatataagatcggctactgccagcagtgccccgacagagtcaagtggcctgccaagttaggtcagcctccatctctctatttcaatgccggaatgtttgtgttcgagcctagcatctccacttaccatgatcttctaaagaccgtccagatcacacctcctaccccctttgcggagcaggatttcttgaacatgtactttagggatatttataagccaattcctgttgtttataatcttgttcttgcaatgttgtggcgtcatccggagaatgttgagcttgacaaggtgaaagttgttcactactgcgcagcgggatctaagccatggagatatactggcaaagaagagaatatggagagggaggacataaagatggtggtgaagaaatggtgggacgtttacaatgatgaatcacttgactataagaaacagccagcggcagatggtgatgctgagccaatgaacttgcagccattcatcgcagctctctacgaggctggtgctgttcaatatgtcacagcaccatcagctgcttga

SEQ ID NO: 7993 - protein, 336 aa, Ricinus communis
MAPELVHAALKPASFTKPPTLPSRAYVTFLAGNGDYIKGVVGLAKGLRKVKTAYPLVVAVLPDVPEEHRKILESQGCIVREIEPVYPPENQTQFAMAYYVINYSKLRIWEFVEYSKMIYLDGDIQVFDNIDHLFDLPDGHFYAVMDCFCEKTWSHTPQYKIGYCQQCPDRVKWPAKLGQPPSLYFNAGMFVFEPSISTYHDLLKTVQITPPTPFAEQDFLNMYFRDIYKPIPVVYNLVLAMLWRHPENVELDKVKVVHYCAAGSKPWRYTGKEENMEREDIKMVVKKWWDVYNDESLDYKKQPAADGDAEPMNLQPFIAALYEAGAVQYVTAPSAA

SEQ ID NO: 7994 - DNA, 957 bp, Ricinus communis
  CDS (1)..(957)
atggagcttatagactctctaaacaaaagggcatacgtaacattcttggctggcaatggggattatgtgaaaggcgtggtaggtttagccaaaggtttaaggaagaccaaaactgcataccctcttgtagtggctgttttgcctgatgtgccagaggagcatcgccagattctcgagtctcagggctgtatcgtcagagagattgagcctgtttacccaccggaaaaccagacccaatttgctatggcttattatgtgatcaactactcaaaactgcgcatttgggagtttgtggagtatgagaagatgatatacttggatggagatattcaagtgtttgagaatattgaccaccttttcgattcaccaagtgggtatttgtatgctgtgatggactgtttctgcgagcagacctggagttactctccacaatataagattgggtattgccagcagtgccctgaaagggttcagtggccaaaagagatgggcttgcctcctccactctatttcaatgctggcatgtttctctttgagcctaaccttttgacctacgatgatctcttggaaaccgtcaaagtcactcctcctactttatttgctgagcaggacttcctgaacaagttcttcaaggatgtctacaagcctattcctccagtgtacaaccttgtcttggctatgctttggcgccatcctgagaatgtggagtttgaaaaagtcaaggttgtccactactgtgcagcgggtgcaaaaccatggaggtacactgggaaggaagaaaacatggacagagaagacataaagatgttggtgaagaaatggtgggatatatatgaggacgagtcattggactacaagaatgctatggctgctgatcaggaaaaacttggaccaataattgctgcattgaccgaggaagaagtggttcatcagaggagtgctccatctgctgcttaa

SEQ ID NO: 7995 - protein, 318 aa, Ricinus communis
MELIDSLNKRAYVTFLAGNGDYVKGVVGLAKGLRKTKTAYPLVVAVLPDVPEEHRQILESQGCIVREIEPVYPPENQTQFAMAYYVINYSKLRIWEFVEYEKMIYLDGDIQVFENIDHLFDSPSGYLYAVMDCFCEQTWSYSPQYKIGYCQQCPERVQWPKEMGLPPPLYFNAGMFLFEPNLLTYDDLLETVKVTPPTLFAEQDFLNKFFKDVYKPIPPVYNLVLAMLWRHPENVEFEKVKVVHYCAAGAKPWRYTGKEENMDREDIKMLVKKWWDIYEDESLDYKNAMAADQEKLGPIIAALTEEEVVHQRSAPSAA

SEQ ID NO: 7996 - DNA, 1008 bp, Ricinus communis
  CDS (1)..(1008)
atggctccaggagtgcctgtagatgtattttcgggcagtggcaaggtctctgcagggtactcaaagggggcttatgtgacatttttagctggtaatggagattatataaaaggtgtggttggattagctaagggtttaagaaaggttagaagtgcataccctcttgttgttgcaatcttaggtgatgttcctgaagagcatcgtgaaatcctgaggtctcaaggttgtatagtacgtgagattgagcctatttatccacctgaaaaccaagttgaatttgccatggcttactatgtcatcaactactccaagctcaggatctggaattttttggagtatagcaagatggtttatttggatgctgatatccaagtgtttgaaaatatagaccatctcttcgacatgcctgatggctacttatatgccgccatggattgcttctgtgagaaaacatggagccactctcgtcaatataagattggctattgccaacagtgcccagatagggttccatggcctgcagatatgggttctcctcctcctttatatttcaatgctggcatgttcgttttcgagcctagcagattgacttatgagaaccttcttcgcactcttgagatcacccctccaacaccctttgctgagcaagatttcttgaatatgtttttcgagaagacatataagccgcttcctctggtttacaacctggtgttagccatgttatggcgccatcctgagaacatagatgtacaaaaggtcaaggttgcccattattgtgctgctggttcaaaaccatggaggtatacaggcaaggaagctaacatggagagagaggatatcaagatgctagtggcaaaatggtggaatatatacaatgacgaatcacttgatttgcagcctgcgacttcagtaactacagcagaagaagaaaccttctcaagaacttctattatggcttccatgcctgaacctatcatttcctacatccctgcaccttctgctgcttga

SEQ ID NO: 7997 - protein, 335 aa, Ricinus communis
MAPGVPVDVFSGSGKVSAGYSKGAYVTFLAGNGDYIKGVVGLAKGLRKVRSAYPLVVAILGDVPEEHREILRSQGCIVREIEPIYPPENQVEFAMAYYVINYSKLRIWNFLEYSKMVYLDADIQVFENIDHLFDMPDGYLYAAMDCFCEKTWSHSRQYKIGYCQQCPDRVPWPADMGSPPPLYFNAGMFVFEPSRLTYENLLRTLEITPPTPFAEQDFLNMFFEKTYKPLPLVYNLVLAMLWRHPENIDVQKVKVAHYCAAGSKPWRYTGKEANMEREDIKMLVAKWWNIYNDESLDLQPATSVTTAEEETFSRTSIMASMPEPIISYIPAPSAA

SEQ ID NO: 7998 - DNA, 978 bp, Medicago falcata
  CDS (1)..(978)
atgtctcctgatatcataactgctgcaaccaacgtcaccaacactcaatctaaggccacaaaacgtgccttcgtcaccttccttgctggaaatggtgattatgtgaagggtgttgttggtttagccaaaggtcttcgtaaggtcaaaaccatgtaccctttagtggttgcagtgttacctgatgttcctcgggaacataggaatattctcacctctcaaggttgtattgttagagagattgtacctgtttaccctcctgagaaccaaacccagtttgctatggcttattatgtcatcaactactccaagctacgtatttgggcttttgaggactatgacaagatgatttaccttgatggtgacatacaagtttttgaaaacattgatcacctatttgacttgccaaacaattatttctatgctgtgatggattgcttttgtgaggcctcttggcgtcacaccaagcagtatgaaattggttactgtcaacagtgccctgacaaggttcaatggcctactaattttggacccaaacctcctctctatttcaatgctggcatgtttgtttatgaaccaaacatggctacttaccatgatcttcttcaaaaacttaaagttactgagccaacttcctttgctgagcaggattttttgaacatgtacttcaatgacaaatacaagccaattccaaatgtttacaatcttgtgctggccatgttgtggcgtcaccctgagaatgttgaacttgagaaagtcaaagtggttcattactgtgcagcgggttctaagccatggaggtacactggtgtggaggagaatatgcagagagaagacataaagatgttggtgaagaaatggtgggatgtgtatgaagatgaaagtttggattacaagcaacctgttaatgcaaatcacttagcttcagcaattttggaagcttatgatttgaaggttgtccccgctccatctgccgcttga

SEQ ID NO: 7999 - protein, 325 aa, Medicago falcata
MSPDIITAATNVTNTQSKATKRAFVTFLAGNGDYVKGVVGLAKGLRKVKTMYPLVVAVLPDVPREHRNILTSQGCIVREIVPVYPPENQTQFAMAYYVINYSKLRIWAFEDYDKMIYLDGDIQVFENIDHLFDLPNNYFYAVMDCFCEASWRHTKQYEIGYCQQCPDKVQWPTNFGPKPPLYFNAGMFVYEPNMATYHDLLQKLKVTEPTSFAEQDFLNMYFNDKYKPIPNVYNLVLAMLWRHPENVELEKVKVVHYCAAGSKPWRYTGVEENMQREDIKMLVKKWWDVYEDESLDYKQPVNANHLASAILEAYDLKVVPAPSAA

SEQ ID NO: 8000 - DNA, 1038 bp, Arabidopsis thaliana
  CDS (1)..(1038)
atgatcaatgcatccgagaaggctcctaaggagagagcctacgtgacgtttttggcaggaaatggagactacgtgaagggagtggtgggattagcaaagggtttgcggaaggtcaaaagtgcgtatcctcttgttgttgctatgttacctgatgtgcctgaagaacatagagagatcttgaggtctcaaggatgcattgtgcgtgagatcgagcctgttcatcctccagatagccaagatgcatacgcaagggcttattacattattaactactcaaaactgcgaatttggaatgtaagtgtgtatatatatagacttcatgaaaacgagagcctccgtttattatctttaaataattttgaagagtacaacaagatgatctacttggacgcagatattcaagtctttggcaatatcgatgacctctttgatatgcaagatggctatttacatggcgtgttgagttgtttctgtgagaaaatatggagttacactcctctctactcgatcggctattgtcaatattgtcctgagaaggtcgtgtggcccgccgagatggaatctgctcctccctctccatacttcaatgccggtatgtttgtatttgagcctaatcctttgacgtatgagagtctccttcagaccctccaggtcacacctcctacaccatttgcggagcaagattttctcaatatgttctttgggaaggtctttaaaccggtatctccggtatacaacctgattttgtctgtgctttggcgccatccggggaaggttgacttggagagtgtcaaagttgttcactactgtccacctggatccaagccatggaggtacacaggagaagaacctaacatggacagagaagacgtcaaaatgttaattaagaaatggtgggatatctacaatgacgagtctcttgattttaaaccgaaaagccctgcagatttggaagcaaccgttttggaatcaacaattatagcttcggtaaccgaagcaccactttcctactctcctgctgcaccttctgccgcttga

SEQ ID NO: 8001 - protein, 345 aa, Arabidopsis thaliana
MINASEKAPKERAYVTFLAGNGDYVKGVVGLAKGLRKVKSAYPLVVAMLPDVPEEHREILRSQGCIVREIEPVHPPDSQDAYARAYYIINYSKLRIWNVSVYIYRLHENESLRLLSLNNFEEYNKMIYLDADIQVFGNIDDLFDMQDGYLHGVLSCFCEKIWSYTPLYSIGYCQYCPEKVVWPAEMESAPPSPYFNAGMFVFEPNPLTYESLLQTLQVTPPTPFAEQDFLNMFFGKVFKPVSPVYNLILSVLWRHPGKVDLESVKVVHYCPPGSKPWRYTGEEPNMDREDVKMLIKKWWDIYNDESLDFKPKSPADLEATVLESTIIASVTEAPLSYSPAAPSAA

SEQ ID NO: 8002 - DNA, 1005 bp, Arabidopsis thaliana
  CDS (1)..(1005)
atggcccctgagatttccgtaaacccgatgtatttatccgaaaaggcgcatcaagcacctccaaggagagcttatgtgacgtttttggcaggaaatggagactacgtgaagggagtggtgggactagcaaagggtttgcgtaaggtcaaaagtgcgtatcctcttgttgttgctatgttacctgatgtgcctgaggaacatagagagatcttgaggtctcaaggctgtgtcgtgcgtgagatcgaacctgtttatcctcaagacaaccaagttgagtttgccatggcttattacgttctcaactactcaaaacttcgtatttggaactttgaagagtacagcaagatgatataccttgacgcagatattcaagtctttgacaatatcgatcacctctttgatttgtctgatgcatatttctatgccgtgatggactgtttctgtgagaaaacatggagccactcgctgcagtattcaattgggtattgtcaacagtgcccggagaaggtcacgtggccagaagatatggaatctccacctcctcctctgtatttcaacgccggtatgtttgtgtttgagcctagtcctttgacttatgagagtctccttcagaccctggagatcacaccaccttcaccgtttgcagaacaagattttctcaatatgttctttgagaaagtgtacaaaccgatccctttggtatacaatctggttttggctatgctttggcgtcacccggagaacgtggagctggagaaagtcaaagttgttcactactgtgcagctggatccaagccatggagatacacaggagaagaagctaacatggacagagaagacatcaagatgttagttgataaatggtgggatgtctataatgatgaatctctcgatttcaaatcgaaaatccctgcagatgcggaagaaaccgttacaaaatcaagcatcctagcttccgttcttgaaccagaaatgacctactttcctgctccttctgctgcttga

SEQ ID NO: 8003 - protein, 334 aa, Arabidopsis thaliana
MAPEISVNPMYLSEKAHQAPPRRAYVTFLAGNGDYVKGVVGLAKGLRKVKSAYPLVVAMLPDVPEEHREILRSQGCVVREIEPVYPQDNQVEFAMAYYVLNYSKLRIWNFEEYSKMIYLDADIQVFDNIDHLFDLSDAYFYAVMDCFCEKTWSHSLQYSIGYCQQCPEKVTWPEDMESPPPPLYFNAGMFVFEPSPLTYESLLQTLEITPPSPFAEQDFLNMFFEKVYKPIPLVYNLVLAMLWRHPENVELEKVKVVHYCAAGSKPWRYTGEEANMDREDIKMLVDKWWDVYNDESLDFKSKIPADAEETVTKSSILASVLEPEMTYFPAPSAA

SEQ ID NO: 8004 - DNA, 1002 bp, Fagopyrum esculentum
  CDS (1)..(1002)
atggcaccagaactcatcacaatcggagccgatcactcgattttgccagcggaatcgttgattccggttgaccgagcttacgtgacgtttctcgccgggaacggagactatgtcaagggagttgtcggattagcaaagggactgaggaaagtgaaggctgcttatcctcttgttgtagcggttttaccggacgttccgctagagcatcgccgactcctggaggcgcagggttgtatcgtaagggaaatcgagccgatatacccgccggaaaacaattgcgagttcgctcacgcatactatgtcatcaactactccaagcttcgcatctgggagtttgtggagtacagtaagatgatatacttggacggggacatacaggtgtaccagaacattgaccacctgtttgaccagccggacggctacttttacgcggtgatggactgtttttgtgagccatcatggagcaagacgattcagtacaagatcggatactgccaacagtgcccggagaaggtagcgtggccgttggaggctggcccgaagccttctctgtacttcaatgccggattctttgtttacgagccgagccttgagacttacaaggatctcattgacactctcaaagtcacgactcctacctcctttgccgagcaggacttcttgaacatgtacttcaaggacaagttcaagccactccccatagactacaacttagtcttagccttcctgtggaggcatccggagaaagttgaccttaaccgagtgaaggtagttcactactgtgcggcggggtctaagccatggaggtacacgggcaaggaagagaacatggacagagaagacatcaaattgcttgtgaaaaaatggtgggatatctacaacgacgagtcattggacctcaagaaaccggtccatttagtgcagcagcccacggaggtgctcaaggcggcgctctcggaggctaggcctgttaaatatgtggctgctccttccgcagcttaa

SEQ ID NO: 8005 - protein, 333 aa, Fagopyrum esculentum
MAPELITIGADHSILPAESLIPVDRAYVTFLAGNGDYVKGVVGLAKGLRKVKAAYPLVVAVLPDVPLEHRRLLEAQGCIVREIEPIYPPENNCEFAHAYYVINYSKLRIWEFVEYSKMIYLDGDIQVYQNIDHLFDQPDGYFYAVMDCFCEPSWSKTIQYKIGYCQQCPEKVAWPLEAGPKPSLYFNAGFFVYEPSLETYKDLIDTLKVTTPTSFAEQDFLNMYFKDKFKPLPIDYNLVLAFLWRHPEKVDLNRVKVVHYCAAGSKPWRYTGKEENMDREDIKLLVKKWWDIYNDESLDLKKPVHLVQQPTEVLKAALSEARPVKYVAAPSAA

SEQ ID NO: 8006 - DNA, 1065 bp, Fagopyrum esculentum
  CDS (1)..(1065)
atgacttccgagatggcgccacagaacataacgaatgcagaaagaggagccgagcaagtgaagccgtcgagccagccaagccgagcctacgtgacattcttagccgggaacggtgactacgtgaagggagttatagggctcgccaaaggcctgaggaaaactcagagcggttacccgcttgtggtggcggttctccctgacgttccgcaggagcaccgccgtatgctggtggcgcaaggctgtataataaaggaaatccagcccgttaacccgcccgataaccagactcagtttgccatggcttattacgtcatcaactactccaagctccgtatatgggagtttatcgagtatagtaagatgatatatcttgatggagacatccaagtttacgacaacatcgaccacctcttcgacctaccagacgggtacttgtacggtgccatggattgcttttgcgagaagacttggagtcattcgcttccatataagattgggtattgccaacagtgcccggacagggtccagtggcccgaaaggctcggcccaaaaccaacactctacttcaatgcagggatgttcatcttcgagcctagcgtttctacttataatgatctccttcatacactcgagatcacccctcctacaccttttgctgagcaggactttttgaatatgtacttcaaggatgtgtacagaccaattccgaacgtttacaacttggtattggctttgttgtggtatcatcctgggttaatgaagcttgatgaggttaaagtcgttcactattgtgccgatggttcaaaaccatggcggtatacagggaagggggataacatggacagggaagacgttaggatgctagtgaagaagtggtgggagatttacgatgatcagtctctcgaccctcagcctaagatggtcgagggcaagaagttcgacaaattagaggagtacagcgagtccctcgaccacccgcccaaggtggcagaggaagataagctagagaagcccatggcagcgatgacaggcttcagctacgtacacgccccgtctgctgcctga

SEQ ID NO: 8007 - protein, 354 aa, Fagopyrum esculentum
MTSEMAPQNITNAERGAEQVKPSSQPSRAYVTFLAGNGDYVKGVIGLAKGLRKTQSGYPLVVAVLPDVPQEHRRMLVAQGCIIKEIQPVNPPDNQTQFAMAYYVINYSKLRIWEFIEYSKMIYLDGDIQVYDNIDHLFDLPDGYLYGAMDCFCEKTWSHSLPYKIGYCQQCPDRVQWPERLGPKPTLYFNAGMFIFEPSVSTYNDLLHTLEITPPTPFAEQDFLNMYFKDVYRPIPNVYNLVLALLWYHPGLMKLDEVKVVHYCADGSKPWRYTGKGDNMDREDVRMLVKKWWEIYDDQSLDPQPKMVEGKKFDKLEEYSESLDHPPKVAEEDKLEKPMAAMTGFSYVHAPSAA

SEQ ID NO: 8008 - DNA, 987 bp, Glycine max
  CDS (1)..(987)
atggctcctaatatcaccactgtcaaaaccaccatcaccgacgctcaagccaaggtcgccaccgatcatggtcgtgcctacgtcaccttcctcgccggaaacggtgactatgtgaaaggtgtcgttggcttggcaaaaggtctgagaaaagtgaagagcatgtaccctctggtggttgcagtgctacccgatgttccccaagatcaccgcaacattctcacctcccaaggttgcattgttagagagattgagcccgtgtaccccccagagaatcaaacccagtttgccatggcatattacgtcatcaactattccaagctacgtatttgggagtttgtggagtacagcaagatgatatacctagacggtgatatccaagtttttgacaacattgaccacttgtttgacttgcctgataactacttctatgcggtgatggactgtttctgtgagccaacttggggccacactaaacaatatcagatcggttactgccagcagtgcccccataaggttcagtggcccactcactttgggcccaaacctcctctctatttcaatgctggcatgtttgtgtatgagcccaatttggctacttaccgtgacctccttcaaacagtccaagtcacccagcccacttcctttgctgaacaggattttttgaacatttacttcaaggacaaatataggccaattcctaatgtctacaatcttgtgctggccatgctgtggcgtcaccctgagaacgttgagcttgacaaagttaaagtggttcactactgtgctgctgggtctaagccttggaggtacactgggaaggaggagaatatggagagagaagatatcaagatgttagtgaaaaagtggtgggatatatatgaggatgagactttggactacaacaatccactcaatgtggataagttcactgcggcacttatggaggttggtgaagtcaagttcgtccgtgccccatctgctgcttaa

SEQ ID NO: 8009 - protein, 328 aa, Glycine max
MAPNITTVKTTITDAQAKVATDHGRAYVTFLAGNGDYVKGVVGLAKGLRKVKSMYPLVVAVLPDVPQDHRNILTSQGCIVREIEPVYPPENQTQFAMAYYVINYSKLRIWEFVEYSKMIYLDGDIQVFDNIDHLFDLPDNYFYAVMDCFCEPTWGHTKQYQIGYCQQCPHKVQWPTHFGPKPPLYFNAGMFVYEPNLATYRDLLQTVQVTQPTSFAEQDFLNIYFKDKYRPIPNVYNLVLAMLWRHPENVELDKVKVVHYCAAGSKPWRYTGKEENMEREDIKMLVKKWWDIYEDETLDYNNPLNVDKFTAALMEVGEVKFVRAPSAA

SEQ ID NO: 8010 - DNA, 978 bp, Medicago sativa
  CDS (1)..(978)
atgtctcctgatatcataactgctgcaaccaacatcaccaacactcaatctaaggccacaaaacgtgccttcgtcaccttccttgctggaaatggtgattatgtgaagggtgttgttggtttagccaaaggtcttcgtaaggtcaaaaccatgtaccctttagtggttgcagtgttacctgatgttcctcaggaacataggaatattctcacctctcaaggttgtattgttagagagattgtacctgtttaccctcctgagaaccaaacccagtttgctatggcttattatgtcatcaactactccaagctacgtatttgggcttttgaggactatgacaagatgatttaccttgatggtgacatacaagtttttgaaaacattgatcacctatttgacttgccaaacaactatttctatgctgtgatggactgtttctgtgaggcctcttggcgtcacaccaagcagtatgaaattggttactgtcaacagtgccctgacaaggttcaatggcctactaattttggacccaaacctcctctctatttcaatgctggcatgtttgtttatgaaccaaacatggctacttaccatgatcttcttcaaaaacttcaagttactgagccaacttcctttgctgagcaggattttttgaacatgtacttcaatgacaaatacaagccaattccaaatgtttacaatcttgttctggccatgttgtggcgtcaccctgagaatgttgaacttgagaaagtcaaagtggttcattactgtgcagcgggttctaagccatggaggtacacaggtgtggaggagaatatgcagagagaagacataaagatgttggtgaagaaatggtgggatgtgtatgaagatgaaagtttggattacaagcaacctgttaatgcaaatcacttagcttcagcaattttggaagcttatgatttgaaggttgtccccgctccatctgccgcttga

SEQ ID NO: 8011 - protein, 325 aa, Medicago sativa
MSPDIITAATNITNTQSKATKRAFVTFLAGNGDYVKGVVGLAKGLRKVKTMYPLVVAVLPDVPQEHRNILTSQGCIVREIVPVYPPENQTQFAMAYYVINYSKLRIWAFEDYDKMIYLDGDIQVFENIDHLFDLPNNYFYAVMDCFCEASWRHTKQYEIGYCQQCPDKVQWPTNFGPKPPLYFNAGMFVYEPNMATYHDLLQKLQVTEPTSFAEQDFLNMYFNDKYKPIPNVYNLVLAMLWRHPENVELEKVKVVHYCAAGSKPWRYTGVEENMQREDIKMLVKKWWDVYEDESLDYKQPVNANHLASAILEAYDLKVVPAPSAA

SEQ ID NO: 8012 - DNA, 996 bp, Cucumis sativus
  CDS (1)..(996)
atgtctccagcagctgccccagaaagtgccattgagtcaaccgacgctcccaagagggcgtacgtgacgttcttggctggtaatggtgactattggaaaggtgtagttggattggcaaagggtctcagaaaggtcaaagccgcctaccctctcattgtagctgtccttcctgatgttcctgaagatcatcggcaaatcctcgagtatcagggttgtatcgtccgtgagatcgaacctgtttaccctccagcaaaccagacccaatttgccatggcttactatgttatcaactactcaaagcttaggatctgggagtttgtggagtatgagaagctgatatatttggacggagacatccaagtgtttgaaaacatagaccatttgtttgaaatgccaagtggatacttctatgcagtgatggattgcttttgtgagaagacatggagtaactctccacaatacaaaattgggtattgccaacaatgccctgacaaagtgaaatggcctgtggaggaaatgggaaacccaccaccactttacttcaatgctggattctttgtgtatgaacctgatcttttcacttacaaggatcttcttgagacttgcaaggccaccactccaactttgtttgctgagcaggactttttgaacatgtacttcaacgacatatacaagcccattcctccaatttacaacctcgtcatggccatgttgtggcgtcatcccgagaacattgacgtcgacaaagtcaaagttgtccattattgtgcagcgggatcgaaaccatggaggtacacgggaaaagaagagaacatggagagggaagacataaaaatgctggtgaagaaatggtgggaagtttatgaagatgaatctttggattaccaaaatgtcctcaaatctgaaactaaacaagaaactaacctcacacctttgatctctgttctgtccgaggctgaagttgtcaaccacatcacagctccttctgctgcttaa

SEQ ID NO: 8013 - protein, 331 aa, Cucumis sativus
MSPAAAPESAIESTDAPKRAYVTFLAGNGDYWKGVVGLAKGLRKVKAAYPLIVAVLPDVPEDHRQILEYQGCIVREIEPVYPPANQTQFAMAYYVINYSKLRIWEFVEYEKLIYLDGDIQVFENIDHLFEMPSGYFYAVMDCFCEKTWSNSPQYKIGYCQQCPDKVKWPVEEMGNPPPLYFNAGFFVYEPDLFTYKDLLETCKATTPTLFAEQDFLNMYFNDIYKPIPPIYNLVMAMLWRHPENIDVDKVKVVHYCAAGSKPWRYTGKEENMEREDIKMLVKKWWEVYEDESLDYQNVLKSETKQETNLTPLISVLSEAEVVNHITAPSAA

SEQ ID NO: 8014 - DNA, 1014 bp, Thellungiella halophila
  CDS (1)..(1014)
atggcacttgagatcaacaacaaacttaccgaaccggtctttgcagccaccgctaacggcggagaaaagagggcttacgtggcttttctcgccggaaacggagacttcgtgaaaggagtggtggctcttgctaaagggctaaggaaagctaagagcaagtatccacttgtcgtggccgtattaccggacgtcccggaggatcaccagaaacagctggtggagcaaggctgtgtcataaaagagatcgagccggtttatccaccggaaaatcaaaccgattttgccatggcttactatgttatcaactactctaagcttcgtatatggaagtttgtggagtacagcaagatgatatacttggacggggacatacaagtgttcgagaatatagaccacttgtttgatctcccgaacggccacttctacgcagccaaggactgtttctgcgagaagacatggagccacacgccacagtacaagatcggttattgccagcagtgtccagacaaggttacatggccagaggcagagcttggtcctaagccgcctttgtatttcaacgccggtatgttcgtttacgagcctaacctctacacttatcaaaacctcttggagactctcaaagtcgttcctccaacctcatttgctgaacaggatttcttgaacatgtacttcaaggacatatacactccaataccaggagtttataacttagtgatggctatgctttggaggcatcctgagaatgtagagcttgagcaagtcaaagttgttcattattgtgctgctggttctaagccttggagattcactggaaaagaagagaatatggagagagaggatatcaaggtgctggttaaaaagtggtgggacatttacaacgacaagtctctcgattacaagaacgttatcggagaaaagggaggaaatcccgatctccataagaagcagttagtggaagctttgtctgaggccggtgtgcttcagtacgtcaaagctccatctgcagcttag

SEQ ID NO: 8015 - protein, 337 aa, Thellungiella halophila
MALEINNKLTEPVFAATANGGEKRAYVAFLAGNGDFVKGVVALAKGLRKAKSKYPLVVAVLPDVPEDHQKQLVEQGCVIKEIEPVYPPENQTDFAMAYYVINYSKLRIWKFVEYSKMIYLDGDIQVFENIDHLFDLPNGHFYAAKDCFCEKTWSHTPQYKIGYCQQCPDKVTWPEAELGPKPPLYFNAGMFVYEPNLYTYQNLLETLKVVPPTSFAEQDFLNMYFKDIYTPIPGVYNLVMAMLWRHPENVELEQVKVVHYCAAGSKPWRFTGKEENMEREDIKVLVKKWWDIYNDKSLDYKNVIGEKGGNPDLHKKQLVEALSEAGVLQYVKAPSAA

SEQ ID NO: 8016 - DNA, 996 bp, Cucumis melo
  CDS (1)..(996)
atgtctcctgcagctgccccagaaagtgccattgagtcaactgacgctcccaagagggcgtacgtgacgttcttagctggtaatggtgactactggaaaggtgtagttggattggcaaagggtctcagaaaggtcaaagccgcctaccctctcattgtcgctgtccttcctgatgttcctgaagatcatcgccaaatcctcgagtatcagggttgtgtcgtccgtgagatcgaacctgtttaccctccggaaaaccagacccagtttgccatggcttactatgttatcaactattcaaagctcaggatctgggagtttgtggagtacgagaagctgatatatttggatggagacatccaagtgttcgaaaacatagaccatttgtttgcaatgccaagtggatacttctacgcagtgatggattgcttctgtgagaagacatggagtaactctccacaatacaaaattgggtattgccaacaatgcccagacaaagtgaaatggcctgtggaggaaatgggaaacccaccaccactttacttcaatgctggattctttgtgtatgaacctgatcttttcacttacaaggatcttcttgagacttgcaaggccactactccaactttgtttgctgagcaggacttcttgaacatgtacttcaacgacatatacaagcccattcctcccatttacaacctagtcatggccatgttgtggcgtcatcctgagaacattgacgttgacaaagtcaaagttgtccactattgtgcagcgggatcgaaaccatggaggtacacgggaaaagaagagaacatggacagggaagacataaaaatgctggtgaagaaatggtgggaagtttatgaagatgaatctttggattaccaaaatgttctcaaatctgaaactaaacaagaaactaacctcacacctttgatctctgttctgtctgaggctgaagttgtcaaccacatcacagctccttctgctgcttaa

SEQ ID NO: 8017 - protein, 331 aa, Cucumis melo
MSPAAAPESAIESTDAPKRAYVTFLAGNGDYWKGVVGLAKGLRKVKAAYPLIVAVLPDVPEDHRQILEYQGCVVREIEPVYPPENQTQFAMAYYVINYSKLRIWEFVEYEKLIYLDGDIQVFENIDHLFAMPSGYFYAVMDCFCEKTWSNSPQYKIGYCQQCPDKVKWPVEEMGNPPPLYFNAGFFVYEPDLFTYKDLLETCKATTPTLFAEQDFLNMYFNDIYKPIPPIYNLVMAMLWRHPENIDVDKVKVVHYCAAGSKPWRYTGKEENMDREDIKMLVKKWWEVYEDESLDYQNVLKSETKQETNLTPLISVLSEAEVVNHITAPSAA

SEQ ID NO: 8018 - DNA, 999 bp, Cucumis melo
  CDS (1)..(999)
atggctcttgaactttctgagaatgtcctgaccactggtgcaagtacggagagggcgtacgtgacgttcttggctggaaatggtgactacgtaaaaggggtgacaggcttggccaaagggttgcggaaggtggccaccgcataccctcttgtggtggcggtgctaccggacgttccgatagaacatcggaaaattttgaaggctcaaggttgcattattcgagaaatcgaacctatttatcctcctgaaaaccaaatccaattcgccatggcctattatgttatcaactactccaagcttcgaatttggaactttgtggagtacaaaaagatgatatatttagatggagacattcaagtataccaaaacattgaccatttattcgaggaagaagatggccatttctacgccgtaatggactgcttttgtgagaagacttggagccattccccacagtacaagattggttactgccagcaatgcccggaccgagtcaagtggccacccgcctccggttccccgcctccactctacttcaatgctggaatgttcgtgttcgaaccgagtcgtgaaacgtacaagtcgctactggagactctacgtgtaacggcaccaactccgtttgcggagcaggatttcctaaacatgttctttgggaaggtttacaagcccatttctgctacatataatttggttttagctatgctgtggcgccatcccgagaacgttcctgatcttcataatgttaaagttgttcattactgtgctgctggatcgaaaccatggaggtatacagggcaagaagcaaacatggaaagagacgacatcaagatgttggtgtcaaaatggtgggacatttacaacgacacgtcgctggatttgaaggaagtcgttaaggaagatgatgaggcccaaatacaagcacggcccaaattttcgatattgggctccattactgagcccaatattgcgtatgtgccagcaccttcggctgcttga

SEQ ID NO: 8019 - protein, 332 aa, Cucumis melo
MALELSENVLTTGASTERAYVTFLAGNGDYVKGVTGLAKGLRKVATAYPLVVAVLPDVPIEHRKILKAQGCIIREIEPIYPPENQIQFAMAYYVINYSKLRIWNFVEYKKMIYLDGDIQVYQNIDHLFEEEDGHFYAVMDCFCEKTWSHSPQYKIGYCQQCPDRVKWPPASGSPPPLYFNAGMFVFEPSRETYKSLLETLRVTAPTPFAEQDFLNMFFGKVYKPISATYNLVLAMLWRHPENVPDLHNVKVVHYCAAGSKPWRYTGQEANMERDDIKMLVSKWWDIYNDTSLDLKEVVKEDDEAQIQARPKFSILGSITEPNIAYVPAPSAA

SEQ ID NO: 8020 - DNA, 957 bp, Solanum lycopersicum
  CDS (1)..(957)
atggctccagaatttgaaagtggaacaaaaatggctactactattcaaaaatcatcatgtgcttatgtgactttcttagctggtaatggtgattatgtgaaaggtgtggttggtttagcgaagggattgataaaagctaaatctatgtatcctttggttgtggcaattttacctgatgtgcctgaggaacacaggatgatattgacgaggcacggttgcatagtgaaggagatagagccactagctccttcattgcaatcgttggataagtatgcacgatcttattacgtgcttaactactccaaacttcggatatgggagtttgtggagtacagtaagatggtgtatttggatggagatatgcaagtttttgagaatatagaccatctatttgagctgcctgataagtatttatacgcggtggcggactgcatatgcgatatgtatggggagccatgtgatgaggttctgccgtggcccaaagagttggggccaaggccatctgtttacttcaatgcaggcatgtttgtctttcagccaaatccgtctgtctatgttcgtctcttgaacacactcaaagttaccccacccacccaatttgctgaacaggactttctgaacatgtactttaaagacgtgtacaagccaattccttatacatacaatatgttgctggccatgctatggcgccacccggagaaaatagaggtgaacaaggcgaaagcagttcactactgttctccaggggctaaaccgtggaaatacactgggaaggaagaacatatggatcgagaggatataaaaatgctagtgaagaaatggtgggacatttataatgacaccacactggatcacaaggcgcagggttccacagttgaagcaaacagattaaggggagcagccttttcggatacgaacataagtgctttatatattactagcccatcagctgcttaa

SEQ ID NO: 8021 - protein, 318 aa, Solanum lycopersicum
MAPEFESGTKMATTIQKSSCAYVTFLAGNGDYVKGVVGLAKGLIKAKSMYPLVVAILPDVPEEHRMILTRHGCIVKEIEPLAPSLQSLDKYARSYYVLNYSKLRIWEFVEYSKMVYLDGDMQVFENIDHLFELPDKYLYAVADCICDMYGEPCDEVLPWPKELGPRPSVYFNAGMFVFQPNPSVYVRLLNTLKVTPPTQFAEQDFLNMYFKDVYKPIPYTYNMLLAMLWRHPEKIEVNKAKAVHYCSPGAKPWKYTGKEEHMDREDIKMLVKKWWDIYNDTTLDHKAQGSTVEANRLRGAAFSDTNISALYITSPSAA

SEQ ID NO: 8022 - DNA, 1086 bp, Arabidopsis thaliana
  CDS (1)..(1086)
atggctcaaatgtcgatgaccgtcgagaagagtatcaaagctgacgtgacggtgagccatgaccgtgtgaaaagggcttacgtcactttccttgctggaaacaaagactactggatgggtgtagttggtctagccaagggacttcgtaaggtgaaatctgcttatcctcttgtggttgcgattctcccggacgtgcctgaggaacaccgtcaaatcctgttggctcagggatgcatcatccgtgagattgaaccggtttatccaccggaaaacaaaaccggttattcaatggcctattacgttatcaactactccaagcttcgtatttgggaggtaaaaaactttcttactatatgtctatatttgtgtttattcatcatccgatcgcatcgtttattttttgttaattttgtggagtatgaaaagatgatttatctagatggagacattcaagtatttagtaacatcgatcatcttttcgatactcctcgtggctacttgtacgctgtcaaagattgcttttgcgagatttcttggtccaaaactcctcaatttaagataggttactgccaacaatgtcctgaaaaggtgacatggcctgttgaaagtcttggttctccaccgccggtatatttcaacgccggtatgttggtttttgaacctaatctcctcacttacgaggatctccttcgtgttgttcaaatcaccactccgacatattttgccgaacaggattttctgaatgaatactttacagacatttacaagcccatcccttcgacctacaaccttgtaatggctatgctttggcgtcatcctgaacacattgaccttgaccaaatcagtgttattcattattgtgcaaatggttcgaagccttggagattcgatgaaactgaagagcatatggatcgtgaggacataaaaatgttggtgaagaaatggtgggatatttatgaagattcgagtttagattacaagaactttgtcgagactgagtccaaactgagtccgatcaatgcaaccttggcttccaaggaatctgttggcgatgtccttattagtcttgccccttccgctgcataa

SEQ ID NO: 8023 - protein, 361 aa, Arabidopsis thaliana
MAQMSMTVEKSIKADVTVSHDRVKRAYVTFLAGNKDYWMGVVGLAKGLRKVKSAYPLVVAILPDVPEEHRQILLAQGCIIREIEPVYPPENKTGYSMAYYVINYSKLRIWEVKNFLTICLYLCLFIIRSHRLFFVNFVEYEKMIYLDGDIQVFSNIDHLFDTPRGYLYAVKDCFCEISWSKTPQFKIGYCQQCPEKVTWPVESLGSPPPVYFNAGMLVFEPNLLTYEDLLRVVQITTPTYFAEQDFLNEYFTDIYKPIPSTYNLVMAMLWRHPEHIDLDQISVIHYCANGSKPWRFDETEEHMDREDIKMLVKKWWDIYEDSSLDYKNFVETESKLSPINATLASKESVGDVLISLAPSAA

SEQ ID NO: 8024 - DNA, 1005 bp, Pisum sativum
  CDS (1)..(1005)
atggcaccggagatcgttcagacctctacgaaaccagttaccggtttcacgaaactgaaacgtgcatacgtaacgtttctcgccggcaacggcgactacgtgaaaggcgtaataggtttggcaaaaggtttacgaaaagttaaaacggcgtacccgctggttgttgccgtgcttccagacgtaccggaggagcaccgtgagatgttggaatctcagggatgtatcgtccgtgagattcaaccggtttacccaccggaaaatcaaactcagtttgctatggcctattacgtcatcaattactccaaactccgaatatgggagtttgtggaatacagcaagatgatatatttggatggagacattcaggtatatgaaaacatagatcatctttttgatctaccagacggttatttctacgctgtgatggattgtttctgtgaaaaaacatggagtcatacaccacagtataagatcgggtactgtcagcagtgtccggagaaggtgcaatggccgaaagaaatgggtgaacctccttccctttacttcaatgctggcatgtttctgtttgagccaagtgttgagacttatgatgatcttttgaaaacttgtcaagttactgctcctactccgtttgcagaccaagatttcttgaacatgtattttaaggatatttataggccaattcctttggtttataatcttgttcttgctatgttgtggcgtcatcctgagaatgttgagcttaggaaagtcaaggttgttcactattgtgcagctggttcaaagccttggaggtatactggaaaagaagagaatatgcagagggaggatataaagatgttggtgcagaaatggttggatatatacagtgattcttcacttgactacaagaagaatttgagtggaaattgtgagacacaaaggaatgatgttgaagagccgtttgtacaggcgttgtcggaggttggtcgtgttcgatatgtcacagcaccttcggcagcttaa

SEQ ID NO: 8025 - protein, 334 aa, Pisum sativum
MAPEIVQTSTKPVTGFTKLKRAYVTFLAGNGDYVKGVIGLAKGLRKVKTAYPLVVAVLPDVPEEHREMLESQGCIVREIQPVYPPENQTQFAMAYYVINYSKLRIWEFVEYSKMIYLDGDIQVYENIDHLFDLPDGYFYAVMDCFCEKTWSHTPQYKIGYCQQCPEKVQWPKEMGEPPSLYFNAGMFLFEPSVETYDDLLKTCQVTAPTPFADQDFLNMYFKDIYRPIPLVYNLVLAMLWRHPENVELRKVKVVHYCAAGSKPWRYTGKEENMQREDIKMLVQKWLDIYSDSSLDYKKNLSGNCETQRNDVEEPFVQALSEVGRVRYVTAPSAA

SEQ ID NO: 8026 - DNA, 1002 bp, Ajuga reptans
  CDS (1)..(1002)
atgggcccagtcgtacctgtggaagccttccgaagcgccgggaagatctcggcccttggcgcgaagaaagggtacgtgacattcttggcaggcaacggtgattacgtcaaaggagtggtgggattggctaaggggttgaggaaggtgaagagtgcttaccctcttgtggtggccatcttgcctgacgtacctgaggagcaccgcgagcttttgaggtctcaaggttgcattgtcaaggaaatcgagcccatttatccaccggccaaccagattcagtttgctatggcctactacgtcatcaactactccaagcttcgtatatggaattttgaggagtacagcaagatggtgtaccttgatgcggacatccaagtttacgaaaacattgatcacctcctcgacacacctgacggctacttctatgccgtaatggactgcttctgtgaaaagacatggagccactcacgacagttctcgattgggtactgccaacagtgcccaaacaaggtcacttggcccgctcaaatgggatcgcctcctccactctacttcaatgctggcatgttcgtcttcgagcccagcaagaccacataccaaaccctgcttcatactctgcgcatcactccacctaccccttttgcagagcaggatttcttgaacatgttcttcgaaccaatctacaaaccaatccccctggtgtacaacctcgtacttgctatgctatggcgccaccctgaaaacgttgagctcgaaaaagttcaagttgtccactactgtgctgctggatcgaagccatggaggtatacaggccaagaagccaacatggacagagaagacatcaaaatgctcgtaaagaaatggtgggatgtttacaacgacgaatccctcgatttcaaggccgaagattcgattgcaggggaagagacgttctcaatgccgtcgttcatagcctctctccctgaaccggcagtatcatacatcccggccccttctgctgcttag

SEQ ID NO: 8027 - protein, 333 aa, Ajuga reptans
MGPVVPVEAFRSAGKISALGAKKGYVTFLAGNGDYVKGVVGLAKGLRKVKSAYPLVVAILPDVPEEHRELLRSQGCIVKEIEPIYPPANQIQFAMAYYVINYSKLRIWNFEEYSKMVYLDADIQVYENIDHLLDTPDGYFYAVMDCFCEKTWSHSRQFSIGYCQQCPNKVTWPAQMGSPPPLYFNAGMFVFEPSKTTYQTLLHTLRITPPTPFAEQDFLNMFFEPIYKPIPLVYNLVLAMLWRHPENVELEKVQVVHYCAAGSKPWRYTGQEANMDREDIKMLVKKWWDVYNDESLDFKAEDSIAGEETFSMPSFIASLPEPAVSYIPAPSAA

SEQ ID NO: 8028 - DNA, 1017 bp, Brassica napus
  CDS (1)..(1017)
atggctccagagctcacacaaaccaccaccgagaaatcagccgtgacgataacaaaaccgtcgtccccagtccacggcggtcgagcctacgtgacgttcctcgccggtaacggtgactacgtgaaaggagtcgttggtttagccaaaggactaagaaaagtcaaatcagcgtatccactcgttgtggcgatactaccagacgtcccggaggagcaccgtcgtatactcgtggaacaaggttgcatcgtccgcgagatcgaaccggtttacccacccgagaaccaaactcagtttgccattgcttattacgtcatcaactattccaaactccgtatctggaagtttgtggagtacagtaaaatgatatatttagatggggacattcaagtttacgagaacattgatcacttgttcgatctccctgatgggtacttttacgcggtgatggactgtttctgtgagaagacatggaaccacacgccgcaatacaagatcgggtactgccaacagtgccctgagaaggtccagtgggcaaaggcggagcttggagagccgccggctctctacttcaacgctggaatgttcgtattcgaacctggcctagatacttacgaggatctgctcaggacccttaaagtcactccccctactcctttcgctgaacaggactttctgaacatgtatttcaagaaaatctacaggccgattcctttggtttacaatcttgtcctagcgatgctatggcgtcatccagaaaatgtagagctcgataaagtcaaggtggttcactactgtgcagcgggttcgaagccatggagatacaccgggaaggaggcgaatatggagagagaagacatcaaaatgttagtgaataaatggtgggacatctacaaggacggttccttggattacaagaaacctgaagcagagtcggatctagtgaatctgaagccgttcatcaacgctcttactgaagctggacgggtcaagtacgtgactgcaccgtccgctgcttga

SEQ ID NO: 8029 - protein, 338 aa, Brassica napus
MAPELTQTTTEKSAVTITKPSSPVHGGRAYVTFLAGNGDYVKGVVGLAKGLRKVKSAYPLVVAILPDVPEEHRRILVEQGCIVREIEPVYPPENQTQFAIAYYVINYSKLRIWKFVEYSKMIYLDGDIQVYENIDHLFDLPDGYFYAVMDCFCEKTWNHTPQYKIGYCQQCPEKVQWAKAELGEPPALYFNAGMFVFEPGLDTYEDLLRTLKVTPPTPFAEQDFLNMYFKKIYRPIPLVYNLVLAMLWRHPENVELDKVKVVHYCAAGSKPWRYTGKEANMEREDIKMLVNKWWDIYKDGSLDYKKPEAESDLVNLKPFINALTEAGRVKYVTAPSAA

SEQ ID NO: 8030 - DNA, 993 bp, Brassica napus
  CDS (1)..(993)
atggcacttgagatcaacaacaaattcaccggaccagtcgctaacggtggagaaaagagagcttacgtgactttcctagctggaaacggagacttcgtgaaaggagtggtgggtcttgctaaagggctaaggaaagttaagagcatgtatccacttgtggtggctgtattgccggacgtaccagaggatcaccggaaacagctggtggagcaaggctgtgtcgttaaagagatcgagccggtttacccaccggagagtcaaaccgagtttgccatggcttattacgttatcaactattctaagcttcgtatttggaagtttgtggagtatagcaagatgatatacttggacggagacatacaagtgttccaaaacatagaccacttgtttgatctcccgagcggccacttctacgcagtcaaagactgtttctgcgagaagacatggagccacaccccacagaacaagataggttattgccaacagtgtccagaaaaggtgacttggccgtcagaacttggtcctcagccacctttgtacttcaacgctggaatgttcgtctacgagcctaatctttacacttatcataatctcttggagactctgaaagttgttcctcccactccttttgcggaacaggatttcttgaatatgtatttcagggacatatacaagccgataccaggaatttataatttggttatggctatgctctggagacatccagagaatgtagagcttgacaaagttaaagttgctcactattgtgctgctgtttctaagccttggaggttcactggaaaagagccgaacatggggagagaagatatcaaaatgttggtcaagaaatggtgggacatatacaacgacgagactcttgattacaagaacatcagtggcgacaaaggaggagacgaccataagaagcagtttgtcaaagctttgtcggaggccggtgtgcttcagtacgtcaaagctccatctgcagcttag

SEQ ID NO: 8031 - protein, 330 aa, Brassica napus
MALEINNKFTGPVANGGEKRAYVTFLAGNGDFVKGVVGLAKGLRKVKSMYPLVVAVLPDVPEDHRKQLVEQGCVVKEIEPVYPPESQTEFAMAYYVINYSKLRIWKFVEYSKMIYLDGDIQVFQNIDHLFDLPSGHFYAVKDCFCEKTWSHTPQNKIGYCQQCPEKVTWPSELGPQPPLYFNAGMFVYEPNLYTYHNLLETLKVVPPTPFAEQDFLNMYFRDIYKPIPGIYNLVMAMLWRHPENVELDKVKVAHYCAAVSKPWRFTGKEPNMGREDIKMLVKKWWDIYNDETLDYKNISGDKGGDDHKKQFVKALSEAGVLQYVKAPSAA

SEQ ID NO: 8032 - DNA, 1023 bp, Triticum aestivum
  CDS (1)..(1023)
atggctcccgagctggccggcaagatggccgccaaggctgccgtggcggcggcgaagcccgcgacgaaggcgtacgtgacgttcttggcgggggcaggggactactggatgggcgtggttgggcttgccaagggcctgcgcaaggttggctcggcctacccactggtggtagccgtgctgcccgacgtgcccgagctccaccgcaagatcctcgtctcccagggctgcatcgtccgcgagatcgcccccgtgtacccgcccgagaaccacacccagtttgccatggcctactacgtcatcaactactccaagctccgcatctgggagtttgtggagtacgagaggatggtgtacctcgacgccgacatccaggtgttcgaaaacatcgacgagctgttcgatctgcccaaggggcacttctacgccgtgatggactgcttctgcgagaagacgtggagccacaccccgcagtaccagatcggctactgccagcagtgtcccgacaaggtgacgtggccggccgccgagatgggcccgccgccggcgctctacttcaacgccggcatgttcgtgcacgagcccagcatggccaccgccaaggcgctccttgacaccctccgcgtgacgccgacgaccccattcgcggagcaggatttcctgaacatgttcttcaaggagcagtacaagccgatcccgctggtctacaaccttgtgctggcgatgctctggaggcacccggagaacgtccagctggagaaggtcaaggtggtgcactactgcgctgcgggatcgaagccatggaggttcacgggcaaagaggagaacatggacagggaggacatcaggatcctcgtcaggaactggtgggacatctacaacgacgacgagagcctcgatttcaagggcctgcccgccctggccgccgacgccgacgagctcgaggcggcggccaagaagccgctccgcgcagcgcttgcggaagccggcaccgtcaagtacgtcgccgcgccctcggctgcgtaa

SEQ ID NO: 8033 - protein, 340 aa, Triticum aestivum
MAPELAGKMAAKAAVAAAKPATKAYVTFLAGAGDYWMGVVGLAKGLRKVGSAYPLVVAVLPDVPELHRKILVSQGCIVREIAPVYPPENHTQFAMAYYVINYSKLRIWEFVEYERMVYLDADIQVFENIDELFDLPKGHFYAVMDCFCEKTWSHTPQYQIGYCQQCPDKVTWPAAEMGPPPALYFNAGMFVHEPSMATAKALLDTLRVTPTTPFAEQDFLNMFFKEQYKPIPLVYNLVLAMLWRHPENVQLEKVKVVHYCAAGSKPWRFTGKEENMDREDIRILVRNWWDIYNDDESLDFKGLPALAADADELEAAAKKPLRAALAEAGTVKYVAAPSAA

SEQ ID NO: 8034 - DNA, 993 bp, Brassica napus
  CDS (1)..(993)
atggcacttgagatcgacaacaaattcaccggaccagtcgctaacggtggagaaaagagagcttacgtgactttcctagctggaaacggagacttcgtgaaaggagtggtgggtcttgctaaagggctaaggaaagttaagagcatgtatccacttgtggtggctgtattgccggacgtaccagaggatcaccggaaacagctggtggagcaaggctgtgtcgttaaagagatcgagccggtttacccaccggagagtcaaaccgagtttgccatggcttattacgttatcaactattctaagcttcgtatttggaagtttgtggagtatagcaagatgatatacttggacggagacatacaagtgttccacaacatagaccacttgtttgatctcccaaacggccacttctacgcagtcaaagactgtttctgcgagaagacatggagccacaccccacagaacaagataggttattgccaacagtgtccagaaaaggtgacttggccggcagaacttggtcctaagccacctttgtacttcaacgctggaatgttcgtctacgagcctaatctttacacttatcataatctcttggagactctgaaagttgttcctcccactccttttgcggaacaggatttcttgaatatgtatttcagggacatatacaagccgataccgggaatttataattgggttatggctatgctttggagacatccagagaatgtagagcttgacaaagttaaagttgctcactattgtgctgctggttctaagcctgggaggttcactggaaaagagccgaacatggggagagaggatatcaaaatgttggtcaagaaatggtgggacatatacaacgacgagactcttgattacaagaacatcagtggcgacaaaggaggagacgaccataagaagcagtttgtcaaagctttgtcggaggccggtgtgcttcagtacgtcaaagctccatctgcagcttag

SEQ ID NO: 8035 - protein, 330 aa, Brassica napus
MALEIDNKFTGPVANGGEKRAYVTFLAGNGDFVKGVVGLAKGLRKVKSMYPLVVAVLPDVPEDHRKQLVEQGCVVKEIEPVYPPESQTEFAMAYYVINYSKLRIWKFVEYSKMIYLDGDIQVFHNIDHLFDLPNGHFYAVKDCFCEKTWSHTPQNKIGYCQQCPEKVTWPAELGPKPPLYFNAGMFVYEPNLYTYHNLLETLKVVPPTPFAEQDFLNMYFRDIYKPIPGIYNWVMAMLWRHPENVELDKVKVAHYCAAGSKPGRFTGKEPNMGREDIKMLVKKWWDIYNDETLDYKNISGDKGGDDHKKQFVKALSEAGVLQYVKAPSAA

SEQ ID NO: 8036 - DNA, 1023 bp, Glycine max
  CDS (1)..(1023)
atggctcctgaacttgtccccaccgttgtgaaatccagtgctgcgttcacgaaacccgcaacccttccaaggcgtgcctacgtgacattcctcgccggaaacggtgactacgtgaaaggggtggttggcctcgccaaagggttgcgaaaggtgaaaaccgcgtacccgttggtggtggctgtcctccccgatgtgccggaggagcaccgtaagatcctggagtctcagggctgcatcgttcgcgagatcgaacccgtttacccacccgaaaaccaaacccagtttgccatggcttattacgtcatcaactactccaagctccgtatatgggagtttgtggagtacagcaagatgatatacttggacggagacattgaggtatatgagaacatagaccacctatttgacctacctgatggtaacttttacgctgtgatggattgtttctgcgagaagacatggagtcacacccctcagtacaaggtgggttactgccagcaatgcccggagaaggtgcggtggcccaccgaattgggtcagcccccttctctttacttcaaccctggcatgttcgtgttcgaacccaacatcgccacctatcatgacctattgaaaacggtgcaagtcaccactcccacttcgttcgcagaacaagatttcttgaacatgtacttcaaggatatttacaagccaatccctttaaattacaatcttgtcctcgccatgctctggcgccacccagaaaacgttaaattagaccaagtcaaggttgttcactattgcgcagcggggtcgaaaccgtggagatatacggggaaggaagagaacatgcagagggaggacataaagatgctggtgaaaaaatggtgggatatctacaatgatgcttcgcttgactacaagccattgatgagtgcaagtgaagctccagcaccggatggtgttgacaatattgaaccattcgtgcaggctctgtcagaggttggtcatgttcaatatgtcactgcgccctcagcagcttaa

SEQ ID NO: 8037 - protein, 340 aa, Glycine max
MAPELVPTVVKSSAAFTKPATLPRRAYVTFLAGNGDYVKGVVGLAKGLRKVKTAYPLVVAVLPDVPEEHRKILESQGCIVREIEPVYPPENQTQFAMAYYVINYSKLRIWEFVEYSKMIYLDGDIEVYENIDHLFDLPDGNFYAVMDCFCEKTWSHTPQYKVGYCQQCPEKVRWPTELGQPPSLYFNPGMFVFEPNIATYHDLLKTVQVTTPTSFAEQDFLNMYFKDIYKPIPLNYNLVLAMLWRHPENVKLDQVKVVHYCAAGSKPWRYTGKEENMQREDIKMLVKKWWDIYNDASLDYKPLMSASEAPAPDGVDNIEPFVQALSEVGHVQYVTAPSAA

SEQ ID NO: 8038 - DNA, 975 bp, Glycine max
  CDS (1)..(975)
atggctcctaatatcaccaccgtcaccgacgctcaagccaaggccgccggcgggcgtggccgtgcctacgtcaccttcctcgccggaaacggtgactatgtgaaaggtgtcgttggcttggccaaaggtctgaggaaggtgaaaagcatgtaccctctggtggttgcagtgttacccgatgttccagaacatcaccgaaacattctcacctcccaaggttgcattgctagagaaattgaacccgtgtaccctcctgagaatcagacgcagttcgccatggcatattacgtcatcaactattccaagctacgtatttgggagtttgtggagttcagcaagatgatatacctagacggtgatatacaagtgtttgacaatattgaccacttgtttgacttgcctgataactacttttatgcggtgatggactgtttttgtgagcccacttggggccacactctgcagtatcaaatcggatactgccagcagtgccctcataaggttcagtggcccactcactttgggcccaagcctcctctctatttcaatgctggcatgtttgtttatgagcccaatctggatacctaccgtgacctccttcaaactgtccaagtcactaagcccacttcctttgctgaacaggattttttgaacatgtacttcaaggacaaatataggccaattcctaatgtctataatcttgtgttggccatgctgtggcgtcaccctgagaacgttgagcttgaaaaagttaaagtggttcactactgtgctgctggatctaagccttggaggtacacagggaaggaggaaaatatggagagagaagatatcaagatgttggtgaagaagtggtgggatatatatgaggatgagactttggactacaacaatccattcaacgtggataggttcactgcggcacttttggaggttggtgaagtcaagttcgtccgtgccccatctgctgcttag

SEQ ID NO: 8039 - protein, 324 aa, Glycine max
MAPNITTVTDAQAKAAGGRGRAYVTFLAGNGDYVKGVVGLAKGLRKVKSMYPLVVAVLPDVPEHHRNILTSQGCIAREIEPVYPPENQTQFAMAYYVINYSKLRIWEFVEFSKMIYLDGDIQVFDNIDHLFDLPDNYFYAVMDCFCEPTWGHTLQYQIGYCQQCPHKVQWPTHFGPKPPLYFNAGMFVYEPNLDTYRDLLQTVQVTKPTSFAEQDFLNMYFKDKYRPIPNVYNLVLAMLWRHPENVELEKVKVVHYCAAGSKPWRYTGKEENMEREDIKMLVKKWWDIYEDETLDYNNPFNVDRFTAALLEVGEVKFVRAPSAA

SEQ ID NO: 8040 - DNA, 969 bp, Hordeum vulgare
  CDS (1)..(969)
atggctcccatgctcaaggggatcgtggaggacgcgcccaagagggcggcgtacgtgaccttcctcgccggctccggcgactactggaagggcgtggtgggcctggccaagggcctccgcgccgtcaactccgcctacccgctcgtggtggccgtgctccccgacgtccccgaggagcaccgccagaagctgctccagcaaggctgcgtcgtccgggagatcgtgcccgtctacccgccggagagccagacccagttcgccatggcctactacgtcatcaactactccaagctccgcatctgggagttcgtggagtacgagaggatggtgtacctggacgcggacatccaggtgtacggcaacatcgaccacctcttcgacctcgacaagggcagcttctacgccgtcatggactgcttctgcgagaagacgtggagccacaccccgcagtacaagatcggctactgccagcagtgcccggaccgggtggcgtggccggagcgcgagctgggcgtgcccccgccgccgctctacttcaacgccggcatgttcgtgcacgagcccagcctcgccaccgccaaggcactcctcgacaggctcgtcgtcaccgaccctacccccttcgccgagcaggacttcctcaacatgttcttcagggacgtatacaagcccatcccgcccgtgtacaacctcgtgctggccatgctctggaggcaccccgagaacgtcgagcttggcaaggtcaaggtcgtgcactactgcgccgcgggttcgaagccatggaggttcaccggcgaggaggcgaacatggacagggaggacatcaagatgcttgtgaagaaatggtgggatatctacaacgacgagagcctggagtacacggccggcgacgaggccaccgacaaatttcacacggcctttgctgaggccggcggcgtgaagtacttccgggcaccctcggccgcgtag

SEQ ID NO: 8041 - protein, 322 aa, Hordeum vulgare
MAPMLKGIVEDAPKRAAYVTFLAGSGDYWKGVVGLAKGLRAVNSAYPLVVAVLPDVPEEHRQKLLQQGCVVREIVPVYPPESQTQFAMAYYVINYSKLRIWEFVEYERMVYLDADIQVYGNIDHLFDLDKGSFYAVMDCFCEKTWSHTPQYKIGYCQQCPDRVAWPERELGVPPPPLYFNAGMFVHEPSLATAKALLDRLVVTDPTPFAEQDFLNMFFRDVYKPIPPVYNLVLAMLWRHPENVELGKVKVVHYCAAGSKPWRFTGEEANMDREDIKMLVKKWWDIYNDESLEYTAGDEATDKFHTAFAEAGGVKYFRAPSAA

SEQ ID NO: 8042 - DNA, 1044 bp, Zea mays
  CDS (1)..(1044)
atggctcccgagctgatgacagccaagatgaccgccaaggccgccgcggcggcggcggcggcggcggcgaagcctgccacgagggcgtacgtgacgttccttgcgggcgacggcgactactggaagggcgtggtggggctggccaagggcctgcgcaaggtccgctcggcctaccccctggtggtggccgtgctgcccgacgtgcccgagtcccaccgccgcatcctcgtctcgcagggctgcgtcgtccgcgagatcgagcccgtgtacccgcctgagaaccagacgcagttcgccatggcgtactacgtcatcaactactccaagctccgcatctgggagttcgtggagtacgagaggatggtgtacctggacgcggacatccaggtgttcgagaacatcgacggcctgttcgagctcgagaaggggtacttctacgcggtgatggactgcttctgcgagaagacgtggagccacaccccgcagtacaggatcggctactgccagcagtgcccggacaaggtggcgtggccagcggcgaccgccgagctgggccctccgccgtcgctctacttcaacgccggcatgttcgtgcacgagcccagcgtggccaccgccaaggcgctcctcgacaccctccgcgtgactccgcccacccccttcgcagagcaggacttcctgaacatgttcttcagggatcagtacaggccgatccccaacgtgtacaacctcgtgctggccatgctctggaggcaccccgagaacgtgcagctggagaaggtgaaggtcgtgcactactgcgcggcggggtccaagccgtggaggttcacgggcaaggaggcgaacatggacagggaggacatcaacgccctggtgaacaagtggtgggacatctacaacgacgagacgctggacttgaagggcctgccctcgctctcgcccgacgacgacgacgaggtggaggcggtggccaagaagccgcttcgcgcggccctggcggaggccggcacggtcaagtacgtcaccgcgccctcggccgcgtga

SEQ ID NO: 8043 - protein, 347 aa, Zea mays
MAPELMTAKMTAKAAAAAAAAAAKPATRAYVTFLAGDGDYWKGVVGLAKGLRKVRSAYPLVVAVLPDVPESHRRILVSQGCVVREIEPVYPPENQTQFAMAYYVINYSKLRIWEFVEYERMVYLDADIQVFENIDGLFELEKGYFYAVMDCFCEKTWSHTPQYRIGYCQQCPDKVAWPAATAELGPPPSLYFNAGMFVHEPSVATAKALLDTLRVTPPTPFAEQDFLNMFFRDQYRPIPNVYNLVLAMLWRHPENVQLEKVKVVHYCAAGSKPWRFTGKEANMDREDINALVNKWWDIYNDETLDLKGLPSLSPDDDDEVEAVAKKPLRAALAEAGTVKYVTAPSAA

SEQ ID NO: 8044 - DNA, 975 bp, Triticum aestivum
  CDS (1)..(975)
atggctcccatgctcaaggggatcgtggaggacgcgccgaagagggcggcgtacgtgaccttcctcgccggctccggcgactactggaagggcgtggtgggcctggccaagggcctccgcgccgtcaactccgcctacccactcgtggtggccgtgctccccgacgtccccgaggaccaccgccgcaagctgctcgaccagggctgcctcgtccgcgagatcgtgcccgtgtacccgccggagagccagacccagttcgccatggcctactacgtcatcaactactccaagctccgcatctgggagttcgtggagtacgagaggatggtgtacctggacgcagacatccaggtgttcgacaacatcgaccacctcttcgacctcgacaagggcagcttctacgccgtcatggactgcttctgcgagaagacgtggagccacaccccgcagcacaagatcggctactgccagcagtgcccggaccgggtggcgtggccggagcgcgagctcggcgtgcccccgccgccgctctacttcaacgctggcatgttcgtgcacgagcccagcctcgccaccgccaaggccctcctcgacaagctcgtcgtcaccgaccccacgcccttcgccgagcaggactttctcaacatgttcttcaagggacgtgtacaaccccatcccgcccgttgtacaacctcgttgctcgccatgctctggaggcaccccgagaacgtcgagctccagaaggtcaaggccgtccactactgcccagcgggctccaagcccggggaggtacaccgggcgaggaaggccaacatggacagggacgaaatcaagatgcttgtgaagaaatggtgggacatctacaacgacgagggcctagactacaaggccggcgaggataccgccaacctgctacgtggagctctggttgaggccggcgccgtgaagtacttcccggcgccctcggccgcgtag

SEQ ID NO: 8045 - protein, 324 aa, Triticum aestivum
MAPMLKGIVEDAPKRAAYVTFLAGSGDYWKGVVGLAKGLRAVNSAYPLVVAVLPDVPEDHRRKLLDQGCLVREIVPVYPPESQTQFAMAYYVINYSKLRIWEFVEYERMVYLDADIQVFDNIDHLFDLDKGSFYAVMDCFCEKTWSHTPQHKIGYCQQCPDRVAWPERELGVPPPPLYFNAGMFVHEPSLATAKALLDKLVVTDPTPFAEQDFLNMFFKGRVQPHPARCTTSLLAMLWRHPENVELQKVKAVHYCPAGSKPGEVHRARKANMDRDEIKMLVKKWWDIYNDEGLDYKAGEDTANLLRGALVEAGAVKYFPAPSAA

SEQ ID NO: 8046 - DNA, 1038 bp, Zea mays
  CDS (1)..(1038)
atggctcccgagctgatgacagccaagatgaccgccaaagccgcggcggcggcggcggcggcgaagcctgccacgagggcgtacgtgacgttcctggcgggcgacggcgactactggaagggcgtggtggggctggccaagggcctccgcaaggtccgctcggcctaccccctggtggtggccgtgctgcccgacgtgcccgagtcccaccgccgcatcctcgtctcgcagggctgcgtcgtccgcgagatcgagcccgtgtacccgcctgagaaccagacgcagttcgccatggcgtactacgtcatcaactactccaagctccgcatctgggagttcgtggagtacgagaggatggtgtacctggacgcggacatccaggtgttcgagaacatcgacggcctgttcgagctcgagaaggggtacttctacgcggtgatggactgcttctgcgagaagacgtggagccacaccccgcagtacaggatcggctactgccagcagtgcccggacaaggtggcgtggccagcggcgaccgccgagctgggccctccgccgtcgctctacttcaacgccggcatgttcgtgcacgagcccagcgtggccaccgccaaggcgctcctcgacaccctccgcgtgactccgcccacccccttcgcagagcaggacttcctgaacatgttcttcagggatcagtacaggccgatccccaacgtgtacaacctcgtgctggccatgctctggaggcaccccgagaacgtgcagctggagaaggtgaaggtcgtgcactactgcgcggcggggtccaagccgtggaggttcacgggcaaggaggcgaacatggacagggaggacatcaacgccctggtgaagaagtggtgggacatctacaacgacgagacgctggacttgaagggcctgccctcgctctcgcccgacgacgacgacgaggtggaggcggtggccaagaagccgcttcgcgcggccctggcggaggccggcacggtcaagtacgtcaccgcgccctcggccgcgtga

SEQ ID NO: 8047 - protein, 345 aa, Zea mays
MAPELMTAKMTAKAAAAAAAAKPATRAYVTFLAGDGDYWKGVVGLAKGLRKVRSAYPLVVAVLPDVPESHRRILVSQGCVVREIEPVYPPENQTQFAMAYYVINYSKLRIWEFVEYERMVYLDADIQVFENIDGLFELEKGYFYAVMDCFCEKTWSHTPQYRIGYCQQCPDKVAWPAATAELGPPPSLYFNAGMFVHEPSVATAKALLDTLRVTPPTPFAEQDFLNMFFRDQYRPIPNVYNLVLAMLWRHPENVQLEKVKVVHYCAAGSKPWRFTGKEANMDREDINALVKKWWDIYNDETLDLKGLPSLSPDDDDEVEAVAKKPLRAALAEAGTVKYVTAPSAA

SEQ ID NO: 8048 - DNA, 1029 bp, Zea mays
  CDS (1)..(1029)
atgtctcccgagctgaccggcaagatggccgccaaggccgccgccgccgctgcggcggtgaagcccgcgacgagggcgtacgtgacgttcctggcgggcaacggcgactactggaagggcgtggtgggcctggccaagggcctgcgcaaggtcggctcggcctatcccctggtggtggcccttctgcccgacgtgccggagtcccaccgccgcatcctcgtctcgcagggctgcatcctccgcgagatcgagcccgtgtacccgcctgagaaccagacgcagttcgccatggcgtactacgtcatcaactactccaagctccgcatctgggagttcgtggagtacgagaagatggtgtacctggacgcggacatccaggtgttcgagaacatcgacgagctgttcgagctcgagaaagggtacttctacgcggtgatggactgcttctgcgaaaagacgtggagccacaccccgcagtacaagatcgggtactgccaacagtgcccggacaaggtgacgtggccgaccaccgagctgggccctccgcccccgctctacttcaatgccggcatgttcgcgcacgagcccagcatggccaccgccaaggcactcctcgacaccctccgcgtcactccgcccacccccttcgcagagcaggacttcctgaacatgttcttcagggaccagtacaggccgatccctaacgtgtacaacctcgtgctcgccatgctctggaggcaccccgagaacgtgcagctggagaaggtgaaggtcgtgcactactgcgcggcggggtccaagccgtggaggttcacgggcaaggaggccaacatggacagggaggacatcaagacgctggtgaacaagtggtgggacatctacaacgacgaggcgctggacttcaagggcctgcccctctcgcccgccgacgccgacgacgaggtggaggcggtggccaagaagccgctccgcgcggcgctggcggaggccggcacggtcaagtacgtcaccgcgccctcggccgcgtga

SEQ ID NO: 8049 - protein, 342 aa, Zea mays
MSPELTGKMAAKAAAAAAAVKPATRAYVTFLAGNGDYWKGVVGLAKGLRKVGSAYPLVVALLPDVPESHRRILVSQGCILREIEPVYPPENQTQFAMAYYVINYSKLRIWEFVEYEKMVYLDADIQVFENIDELFELEKGYFYAVMDCFCEKTWSHTPQYKIGYCQQCPDKVTWPTTELGPPPPLYFNAGMFAHEPSMATAKALLDTLRVTPPTPFAEQDFLNMFFRDQYRPIPNVYNLVLAMLWRHPENVQLEKVKVVHYCAAGSKPWRFTGKEANMDREDIKTLVNKWWDIYNDEALDFKGLPLSPADADDEVEAVAKKPLRAALAEAGTVKYVTAPSAA

SEQ ID NO: 8050 - DNA, 1035 bp, Zea mays
  CDS (1)..(1035)
atgtctcccgagctgaccggcaagatggccgccaaggccgccgccgccgctgcggcggtgaagcccgcgacgagggcgtacgtgacgttcctggcgggcgacggcgactactggaagggcgtggtgggcctggccaagggcctgcgcaaggtcggctcggcctatcccctggtggtggcccttctgcccgacgtgccggagtcccaccgccgcatcctcgtctcgcagggctgcatcctccgcgagatcgagcccgtgtacccgcccgagaaccagacgcagttcgccatggcgtactacgtcatcaactactccaagctccgcatctgggagttcgtggagtacgagaggatggtgtacctggacgcggacatccaggtgttcgagaacatcgacgagctgttcgagctcgagaaggggtacttctacgcggtgatggactgcttctgcgagaagacgtggagccacaccccgcagtacaggatcggctactgccaacagtgcccggacaaggtggcgtggccgaccaccgagctgggccctccgcccccgctctacttcaacgccggcatgttcgcgcacgagcccagcatggccaccgccaaggcactcctcgacaccctccgcgtcactccgcccacccccttcgcagagcaggacttcctgaacatgttcttcagggaccagtacaggccgatccctaacgtgtacaacctcgtgctcgccatgctctggaggcaccccgagaacgtgcagctggagaaggtgaaggtcgtgcactactgcgcggcggggtccaagccgtggaggttcacgggaaaggaggccaacatggacagggaggacatcaagacgctggtgaacaagtggtgggacatctacaacgacgaggcgctggacttcaagggcctgcccctctcgcccgccgacgccgacgccgacgacgaggtggaggctgtggccaagaagccgctccgcgcggcgctggcggaagccggcacggtcaagtacgtcaccgcgccctcggccgcgtga

SEQ ID NO: 8051 - protein, 344 aa, Zea mays
MSPELTGKMAAKAAAAAAAVKPATRAYVTFLAGDGDYWKGVVGLAKGLRKVGSAYPLVVALLPDVPESHRRILVSQGCILREIEPVYPPENQTQFAMAYYVINYSKLRIWEFVEYERMVYLDADIQVFENIDELFELEKGYFYAVMDCFCEKTWSHTPQYRIGYCQQCPDKVAWPTTELGPPPPLYFNAGMFAHEPSMATAKALLDTLRVTPPTPFAEQDFLNMFFRDQYRPIPNVYNLVLAMLWRHPENVQLEKVKVVHYCAAGSKPWRFTGKEANMDREDIKTLVNKWWDIYNDEALDFKGLPLSPADADADDEVEAVAKKPLRAALAEAGTVKYVTAPSAA

SEQ ID NO: 8052 - DNA, 1047 bp, Zea mays
  CDS (1)..(1047)
atggctcccgagctgatgacagccaagatgaccgccaaggccgccgcggcggcggcggcggcggcggcggcgaagcctgccacgagggcgtacgtgacgttcctggcgggcgacggcgactactggaagggcgtggtggggctggccaagggcctccgcaaggtccgctcggcctaccccctggtggtggccgtgctgcccgacgtgcccgagtcccaccgccgcatcctcgtctcgcagggctgcgtcgtccgcgagatcgagcccgtgtacccgcctgagaaccagacgcagttcgccatggcgtactacgtcatcaactactccaagctccgcatctgggagttcgtggagtacgagaggatggtgtacctggacgcggacatccaggtgttcgagaacatcgacggcctgttcgagctcgagaaggggtacttctacgcggtgatggactgcttctgcgagaagacgtggagccacaccccgcagtacaggatcggctactgccagcagtgcccggacaaggtggcgtggccagaggcgaccgccgagctgggccctccgccgtcgctctacttcaacgccggcatgttcgtgcacgagcccagcgtggccaccgccaaggcgctcctcgacaccctccgcgtgactccgcccacccccttcgcagagcaggacttcctgaacatgttcttcagggatcagtacaggccgatccccaacgtgtacaacctcgtgctggccatgctctggaggcaccccgagaacgtgcagctggagaaggtgaaggtcgtgcactactgcgcggcggggtccaagccgtggaggttcacgggcaaggaggcgaacatggacagggaggacatcaacgccctggtgaagaagtggtgggacatctacaacgacgagacgctggacttgaagggcctgccctcgctctcgcccgacgacgacgacgaggtggaggcggtggccaagaagccgcttcgcgcggccctggcggaggccggcacggtcaagtacgtcaccgcgccctcggccgcgtga

SEQ ID NO: 8053 - protein, 348 aa, Zea mays
MAPELMTAKMTAKAAAAAAAAAAAKPATRAYVTFLAGDGDYWKGVVGLAKGLRKVRSAYPLVVAVLPDVPESHRRILVSQGCVVREIEPVYPPENQTQFAMAYYVINYSKLRIWEFVEYERMVYLDADIQVFENIDGLFELEKGYFYAVMDCFCEKTWSHTPQYRIGYCQQCPDKVAWPEATAELGPPPSLYFNAGMFVHEPSVATAKALLDTLRVTPPTPFAEQDFLNMFFRDQYRPIPNVYNLVLAMLWRHPENVQLEKVKVVHYCAAGSKPWRFTGKEANMDREDINALVKKWWDIYNDETLDLKGLPSLSPDDDDEVEAVAKKPLRAALAEAGTVKYVTAPSAA

SEQ ID NO: 8054 - DNA, 21 bp, Artificial sequence
  primer
atggcacctgagatgaacaac

SEQ ID NO: 8055 - DNA, 22 bp, Artificial sequence
  primer
ctaagccgcggatggagctttg

SEQ ID NO: 8056 - protein, 394 aa, Artificial sequence
  consensus sequence
  Variant (2)..(2): Xaa in position 2 is any amino acid
  Variant (4)..(6): Xaa in position 4 to 6 is any amino acid
  Variant (7)..(29): Xaa in position 7 to 29 is any or no amino acid
  Variant (39)..(39): Xaa in position 39 is any amino acid
  Variant (43)..(43): Xaa in position 43 is any amino acid
  Variant (57)..(59): Xaa in position 57 to 59 is any amino acid
  Variant (66)..(66): Xaa in position 66 is any amino acid
  Variant (72)..(73): Xaa in position 72 to 73 is any amino acid
  Variant (76)..(77): Xaa in position 76 to 77 is any amino acid
  Variant (79)..(80): Xaa in position 79 to 80 is any amino acid
  Variant (84)..(85): Xaa in position 84 to 85 is any amino acid
  Variant (94)..(94): Xaa in position 94 is any amino acid
  Variant (99)..(99): Xaa in position 99 is any amino acid
  Variant (117)..(117): Xaa in position 117 is any amino acid
  Variant (118)..(142): Xaa in position 118 to 142 is any or no amino acid
  Variant (147)..(147): Xaa in position 147 is any amino acid
  Variant (150)..(150): Xaa in position 150 is any amino acid
  Variant (154)..(154): Xaa in position 154 is any amino acid
  Variant (159)..(160): Xaa in position 159 to 160 is any amino acid
  Variant (167)..(170): Xaa in position 167 to 170 is any amino acid
  Variant (172)..(172): Xaa in position 172 is any amino acid
  Variant (187)..(188): Xaa in position 187 to 188 is any amino acid
  Variant (192)..(192): Xaa in position 192 is any amino acid
  Variant (201)..(201): Xaa in position 201 is any amino acid
  Variant (204)..(204): Xaa in position 204 is any amino acid
  Variant (207)..(209): Xaa in position 207 to 209 is any amino acid
  Variant (210)..(212): Xaa in position 210 to 212 is any or no amino acid
  Variant (214)..(215): Xaa in position 214 to 215 is any amino acid
  Variant (216)..(216): Xaa in position 216 is any or no amino acid
  Variant (218)..(218): Xaa in position 218 is any amino acid
  Variant (228)..(228): Xaa in position 228 is any amino acid
  Variant (231)..(233): Xaa in position 231 to 233 is any amino acid
  Variant (235)..(236): Xaa in position 235 to 236 is any amino acid
  Variant (237)..(237): Xaa in position 237 is any or no amino acid
  Variant (240)..(240): Xaa in position 240 is any amino acid
  Variant (242)..(244): Xaa in position 242 to 244 is any amino acid
  Variant (246)..(246): Xaa in position 246 is any amino acid
  Variant (249)..(249): Xaa in position 249 is any amino acid
  Variant (259)..(259): Xaa in position 259 is any amino acid
  Variant (261)..(262): Xaa in position 261 to 262 is any amino acid
  Variant (263)..(263): Xaa in position 263 is any or no amino acid
  Variant (265)..(265): Xaa in position 265 is any amino acid
  Variant (269)..(270): Xaa in position 269 to 270 is any amino acid
  Variant (271)..(271): Xaa in position 271 is any or no amino acid
  Variant (286)..(287): Xaa in position 286 to 287 is any amino acid
  Variant (288)..(288): Xaa in position 288 is any or no amino acid
  Variant (290)..(291): Xaa in position 290 to 291 is any amino acid
  Variant (307)..(307): Xaa in position 307 is any amino acid
  Variant (309)..(309): Xaa in position 309 is any amino acid
  Variant (311)..(311): Xaa in position 311 is any amino acid
  Variant (313)..(313): Xaa in position 313 is any amino acid
  Variant (316)..(316): Xaa in position 316 is any amino acid
  Variant (322)..(322): Xaa in position 322 is any amino acid
  Variant (325)..(325): Xaa in position 325 is any amino acid
  Variant (329)..(329): Xaa in position 329 is any amino acid
  Variant (332)..(332): Xaa in position 332 is any amino acid
  Variant (334)..(335): Xaa in position 334 to 335 is any amino acid
  Variant (336)..(336): Xaa in position 336 is any or no amino acid
  Variant (339)..(351): Xaa in position 339 to 351 is any amino acid
  Variant (352)..(376): Xaa in position 352 to 376 is any or no amino acid
  Variant (378)..(384): Xaa in position 378 to 384 is any amino acid
  Variant (385)..(389): Xaa in position 385 to 389 is any or no amino acid
MXPXXXXXXXXXXXXXXXXXXXXXXXXXXRAYVTFLAGXGDYXKGVVGLAKGLRKVXXXYPLVVAXLPDVPXXHRXXLXXQGCXXREIEPVYPXPENQXQFAMAYYVINYSKLRIWXXXXXXXXXXXXXXXXXXXXXXXXXXFVEYXKMXYLDXDIQVXXNIDHLFXXXXGXFYAVMDCFCEKTWSXXPQYXIGYCQQCPXKVXWPXXXXXXGXXXPXLYFNAGMFVXEPXXXTXXXLLXTXXXTXPTXFAEQDFLNMXFXXXYXPIPXXXYNLVLAMLWRHPENXXXLXXVKVVHYCAAGSKPWRXTXGXEXNMXREDIKXLVXKWWXIYXDXXXLDXXXXXXXXXXXXXXXXXXXXXXXXXXXXXXXXXXXXXXEXXXXXXXXXXXXAPSAA

SEQ ID NO: 8057 - protein, 29 aa, Artificial sequence
  protein pattern
  Variant (2)..(2): Xaa in position 2 is any amino acid
  Variant (4)..(5): Xaa in position 4 to 5 is any amino acid
  Variant (7)..(7): Xaa in position 7 is Asp, Glu, Gly, Asn or Gln
  Variant (9)..(9): Xaa in position 9 is Asp or Glu
  Variant (10)..(10): Xaa in position 10 is Asp or Asn
  Variant (11)..(11): Xaa in position 11 is Ile or Val
  Variant (13)..(13): Xaa in position 13 is any amino acid
  Variant (16)..(16): Xaa in position 16 is any or no amino acid
  Variant (18)..(18): Xaa in position 18 is any or no amino acid
  Variant (20)..(20): Xaa in position 20 is any amino acid
  Variant (21)..(21): Xaa in position 21 is Ala, Asp, Glu, Gly or Asn
  Variant (22)..(22): Xaa in position 22 is any amino acid
  Variant (24)..(24): Xaa in position 24 is any amino acid
  Variant (26)..(26): Xaa in position 26 is any amino acid
  Variant (27)..(27): Xaa in position 27 is Ala, Ser or Thr
  Variant (29)..(29): Xaa in position 29 is Asp, Glu or Asn
GXEXXMXRXXXKXLVXKXWXXXYXDXXLX

SEQ ID NO: 8058 - protein, 59 aa, Artificial sequence
  protein pattern
  Variant (2)..(2): Xaa in position 2 is any amino acid
  Variant (3)..(3): Xaa in position 3 is any or no amino acid
  Variant (10)..(10): Xaa in position 10 is Ala, Cys, Asp, Asn, Ser or Thr
  Variant (14)..(14): Xaa in position 14 is any amino acid
  Variant (18)..(18): Xaa in position 18 is any amino acid
  Variant (26)..(26): Xaa in position 26 is any amino acid
  Variant (27)..(27): Xaa in position 27 is Ala, Thr or Val
  Variant (28)..(28): Xaa in position 28 is any amino acid
  Variant (29)..(29): Xaa in position 29 is Ala, Ser or Thr
  Variant (30)..(30): Xaa in position 30 is any amino acid
  Variant (31)..(31): Xaa in position 31 is His or Tyr
  Variant (34)..(34): Xaa in position 34 is Ile, Met or Val
  Variant (36)..(36): Xaa in position 36 is Ala or Pro
  Variant (37)..(37): Xaa in position 37 is Ile, Leu, Met or Val
  Variant (39)..(39): Xaa in position 39 is Ala, Gly or Pro
  Variant (43)..(44): Xaa in position 43 to 44 is any amino acid
  Variant (47)..(48): Xaa in position 47 to 48 is any amino acid
  Variant (50)..(51): Xaa in position 50 to 51 is any amino acid
  Variant (55)..(55): Xaa in position 55 is Ile, Leu or Val
  Variant (56)..(56): Xaa in position 56 is Ala, Ile, Leu or Val
  Variant (57)..(57): Xaa in position 57 is Lys or Arg
  Variant (58)..(58): Xaa in position 58 is Glu or Gln
AXXVTFLAGXGDYXKGVXGLAKGLRXXXXXXPLXVXXLXDVPXXHRXXLXXQGCXXXXI

SEQ ID NO: 8059 - protein, 21 aa, Artificial sequence
  protein pattern
  Variant (2)..(3): Xaa in position 2 to 3 is any amino acid
  Variant (4)..(4): Xaa in position 4 is Ser or Thr
  Variant (5)..(5): Xaa in position 5 is any amino acid
  Variant (8)..(8): Xaa in position 8 is any amino acid
  Variant (9)..(9): Xaa in position 9 is Ile or Val
  Variant (11)..(11): Xaa in position 11 is any amino acid
  Variant (15)..(15): Xaa in position 15 is any amino acid
  Variant (17)..(17): Xaa in position 17 is any amino acid
  Variant (18)..(18): Xaa in position 18 is Glu, Lys or Arg
  Variant (20)..(20): Xaa in position 20 is any amino acid
WXXXXQYXXGXCQQXPXXVXW

SEQ ID NO: 8060 - protein, 21 aa, Artificial sequence
  protein pattern
  Variant (3)..(3): Xaa in position 3 is Ala, Asp, Glu or Gln
  Variant (4)..(4): Xaa in position 4 is Asn or Ser
  Variant (6)..(6): Xaa in position 6 is any amino acid
  Variant (7)..(7): Xaa in position 7 is Asp, Glu, Gln or Arg
  Variant (11)..(11): Xaa in position 11 is Ala or Pro
  Variant (15)..(15): Xaa in position 15 is Ile or Leu
PPXXQXXFAMXYYVXNYSKLR

SEQ ID NO: 8061 - protein, 20 aa, Artificial sequence
  protein pattern
  Variant (4)..(6): Xaa in position 4 to 6 is any or no amino acid
  Variant (10)..(10): Xaa in position 10 is Leu or Met
  Variant (15)..(15): Xaa in position 15 is His or Arg
  Variant (18)..(18): Xaa in position 18 is Asp or Glu
  Variant (19)..(19): Xaa in position 19 is any amino acid
  Variant (20)..(20): Xaa in position 20 is Ile or Val
PIPXXXNLVXAMLWXHPXXX

SEQ ID NO: 8062 - protein, 16 aa, Artificial sequence
  protein pattern
  Variant (2)..(2): Xaa in position 2 is any or no amino acid
  Variant (4)..(4): Xaa in position 4 is Ala, Pro or Ser
  Variant (13)..(13): Xaa in position 13 is Ala, Leu or Val
  Variant (14)..(14): Xaa in position 14 is Phe, His or Tyr
PXPXLYFNAGMFXXEP

SEQ ID NO: 8063 - protein, 15 aa, Artificial sequence
  protein pattern
  Variant (2)..(2): Xaa in position 2 is any or no amino acid
  Variant (4)..(4): Xaa in position 4 is any amino acid
  Variant (13)..(13): Xaa in position 13 is any amino acid
  Variant (14)..(14): Xaa in position 14 is Phe or Tyr
PXTXFAEQDFLNXXF

SEQ ID NO: 8064 - DNA, 396 bp, Arabidopsis thaliana
  CDS (1)..(396)
atgaagctacagcaaaattgtgacttggaacttcgtctttttcccacttcttatgattctgattcttcagatacaacctctgttgtagaatcaaccagttctggaaatccacaaccaaatgaagaatctcaaagaataacaattttctacaatggaaaaatgtgtttttcttcagatgttacccatcttcaggcaagatcgataatatcgatcgcaagcagagaaatgaaaaccaagtcatcctcaaacgggtcggatcctccaaacaagtcgacctcatttcatcataatcagcttccaaatccaaaagcatcaatgaaaaaatctctccaaagttttcttcagaaacggaaaattcgaattcaagctacttcaccgtaccattcacgacgataa

SEQ ID NO: 8065 - protein, 131 aa, Arabidopsis thaliana
MKLQQNCDLELRLFPTSYDSDSSDTTSVVESTSSGNPQPNEESQRITIFYNGKMCFSSDVTHLQARSIISIASREMKTKSSSNGSDPPNKSTSFHHNQLPNPKASMKKSLQSFLQKRKIRIQATSPYHSRR

SEQ ID NO: 8066 - DNA, 405 bp, Glycine max
  CDS (1)..(405)
atgagaaagaattgcaagttggaacttcgcctttttcctccctccctctccgatcttcgccccatgatggaagcagaagtgagtgatagcccacaacaacaggaccctcaccatcaacagcaacaacaactacaacatccgctgaccattttctatgatggcaagatttgtgtctcagatgtcacagagcttcaggccagatccatattaatgctagcaaataaagagacggagagaagggtgatgacaccaactgggtcagaaccatcttcaccaatattactgcaatcacctcataataacatgtatagccccagcactggactttccatgaaaagatcactgcagaggtttctccagaagaggaagaatcgtgtccaagaaacatccccataccatcactag

SEQ ID NO: 8067 - protein, 134 aa, Glycine max
MRKNCKLELRLFPPSLSDLRPMMEAEVSDSPQQQDPHHQQQQQLQHPLTIFYDGKICVSDVTELQARSILMLANKETERRVMTPTGSEPSSPILLQSPHNNMYSPSTGLSMKRSLQRFLQKRKNRVQETSPYHH

SEQ ID NO: 8068 - DNA, 453 bp, Glycine max
  CDS (1)..(453)
atgaggaagaattgcaacttggagcttcgccttttccctccttccctctccgatcttcgccccatgatggaagcagaagttagtgagagaccccaacaacaggtcgcccaccatcaacagcaacagcaaccacaaccacaacatccgctgaccattttctatgatggcaagatttcagtttcagatgtcacagagcttcaggccagatccatattaatgctagcaaataaagagatggagaaaagagtgatgacaccaacggggtcagaaccatcttcaccaatattactgcaatcacctcataacatgtatagccccggcactggactttccatgaaaagatcactgcagaggtttctccagaagagaaagaatcgtgtccaagaaacatccccataccatcacgagctaattaatgttaaattatcaaaatcatcaagggaaaacaaatga

SEQ ID NO: 8069 - protein, 150 aa, Glycine max
MRKNCNLELRLFPPSLSDLRPMMEAEVSERPQQQVAHHQQQQQPQPQHPLTIFYDGKISVSDVTELQARSILMLANKEMEKRVMTPTGSEPSSPILLQSPHNMYSPGTGLSMKRSLQRFLQKRKNRVQETSPYHHELINVKLSKSSRENK

SEQ ID NO: 8070 - DNA, 417 bp, Glycine max
  CDS (1)..(417)
atgaggaggaactgcaacttggaacttgccctttttcttccctctgattctggcccccgccaccaccactcaatggttgaagaagctagtgaaataagcccaatccaaaatttcttccatcaccaccaccgccaggaacagcaacagcaacagccgctcaccattttctatgatggaaatatttgtgttgcggatgtcacagagcttcaggccaaatcgattttattgcttgcaaatagaaaattggaggaaagagtgaggacaccaactgggtcagagccatcttcaccagcagtgatgcaatctaacaatcaattgtatagtcctggcactggcctttccatgagaaaatcgttgcaaaggttccttcagaagagaaagaatcgggtccaagaagcatcgccataccatcactag

SEQ ID NO: 8071 - protein, 138 aa, Glycine max
MRRNCNLELALFLPSDSGPRHHHSMVEEASEISPIQNFFHHHHRQEQQQQQPLTIFYDGNICVADVTELQAKSILLLANRKLEERVRTPTGSEPSSPAVMQSNNQLYSPGTGLSMRKSLQRFLQKRKNRVQEASPYHH

SEQ ID NO: 8072 - DNA, 402 bp, Glycine max
  CDS (1)..(402)
atgaggaggaactgcaacttggaactcgccctttttcctccctctgattctggcccccccatggttgacaacgttgaagaagaggctagtgaaatcagcccaatgcaaaatttgttccaccgccaggaacagcaacagccgctcaccattttctatgatggaaagatttgtgttgcggatgtcacagagcttcaggccaaatcgattttaatgcttgcaaatagaaaattggaggaaagagtgaggacaccaactgggtcagagccatcttcaccaacagtgatgcaatctaataatcaattgtatagtcctggcactggcccttccatgagaaaatcgttgcaaaggttccttcagaagagaaggaatcgggtccaagaagcatcgccataccgtcactag

SEQ ID NO: 8073 - protein, 133 aa, Glycine max
MRRNCNLELALFPPSDSGPPMVDNVEEEASEISPMQNLFHRQEQQQPLTIFYDGKICVADVTELQAKSILMLANRKLEERVRTPTGSEPSSPTVMQSNNQLYSPGTGPSMRKSLQRFLQKRRNRVQEASPYRH

SEQ ID NO: 8074 - DNA, 447 bp, Arabidopsis thaliana
  CDS (1)..(447)
atgatcatcatcatcaaaaactgcgacaagcctttactcaatttcaaagagatggagatgcaaacaaaatgcgacttggaacttcgccttcttacttcttcttatgattctgatttccatagctcgttggacgaatcaagcagctctgaaatttcacaaccaaagcaagaatctcagatattaaccattttctacaacgggcacatgtgtgtttcttcagatcttacccatcttgaggctaacgctatactatcgctagcgagtagagatgtggaagagaaatctttatccttgagaagttcagacggttcggatcctccaacaatcccaaacaattcgactcgatttcattatcaaaaggcctctatgaagagatctcttcacagttttcttcagaaacgaagtcttcggattcaagcaacttccccttaccaccgttaccgatag

SEQ ID NO: 8075 - protein, 148 aa, Arabidopsis thaliana
MIIIIKNCDKPLLNFKEMEMQTKCDLELRLLTSSYDSDFHSSLDESSSSEISQPKQESQILTIFYNGHMCVSSDLTHLEANAILSLASRDVEEKSLSLRSSDGSDPPTIPNNSTRFHYQKASMKRSLHSFLQKRSLRIQATSPYHRYR

SEQ ID NO: 8076 - DNA, 366 bp, Vitis vinifera
  CDS (1)..(366)
atgaagagcaggaactgcaatttggaactaagccttcttccctccactgcttaccgtcacaaaatgatgatggagatgggaagaggaagcccacaagagcagcagcagcagcagcagctgaccattttctatgacgggagggtttgcgtatgtgaagttacagagcttcaggctagagccataatacttactgcaagtagagaagtggagacgaaaaccccaactgcctcagacgtgaccatggtctcgccatctctgcaatcccagctgtacagccctactggcctttcaatgaagagatcgctgcgaagcttcctccagaagcgaaaaaataggattgaagccacctccccatacggtcattag

SEQ ID NO: 8077 - protein, 121 aa, Vitis vinifera
MKSRNCNLELSLLPSTAYRHKMMMEMGRGSPQEQQQQQQLTIFYDGRVCVCEVTELQARAIILTASREVETKTPTASDVTMVSPSLQSQLYSPTGLSMKRSLRSFLQKRKNRIEATSPYGH

SEQ ID NO: 8078 - DNA, 384 bp, Vitis vinifera
  CDS (1)..(384)
atgaagagaaggaactgcaatttggagcttcggcttcttccccccaacactgattattcaagcccccagcaccaccacaacatgatgatggagacgggaagaggaagcccacaggagcaacaacaacagcagcagcttaccattttctataacggaaggatctgcgtttgtgatgttacagagcttcaggctagagccatcttactgcttgcaagtagagaaatggaggaaaaaacaagaaccccgactgcctcagacgcgacctcgccatctctgcattctcagctgtatagcgctactggcctttccatgaagagatcgctgcaacgcttcctccagaagcgaaagaataggatggaagcaacctccccctaccatcgctag

SEQ ID NO: 8079 - protein, 127 aa, Vitis vinifera
MKRRNCNLELRLLPPNTDYSSPQHHHNMMMETGRGSPQEQQQQQQLTIFYNGRICVCDVTELQARAILLLASREMEEKTRTPTASDATSPSLHSQLYSATGLSMKRSLQRFLQKRKNRMEATSPYHR

SEQ ID NO: 8080 - DNA, 384 bp, Vitis vinifera
  CDS (1)..(384)
atgaagagaagcaactgcaatttggaggttcggcttcttccccccaacactgattattcaagcccccagcaccaccataacatgatgatggagacgggaagaggaagcccacaggagcaacagcaacggcagcagcttactattttctataacggaaggatctgcgtttgtgatgttacagagcttcaggctagagccatcctacagcttgcaagtagagaaatggaggaaaaaacaagaaccccgactgcctcagacgcgatctcgtcgtctctgcattctcagctgtatagccctactggcctttccatgaagagatcgctgcaacgcttcctccagaagcgaaagaataggatggaagcaacctccccctaccatcgctag

SEQ ID NO: 8081 - protein, 127 aa, Vitis vinifera
MKRSNCNLEVRLLPPNTDYSSPQHHHNMMMETGRGSPQEQQQRQQLTIFYNGRICVCDVTELQARAILQLASREMEEKTRTPTASDAISSSLHSQLYSPTGLSMKRSLQRFLQKRKNRMEATSPYHR

SEQ ID NO: 8082 - DNA, 432 bp, Vitis vinifera
  CDS (1)..(432)
atggagtttacccccaatctaagaaagcaaaacaacttcccctctgcccttcaagaatcaatcaagatggagagtaacaagcccatgaatctggaacttccactgtttccctccactgctcacacttcttcaattcccactatgagaggaggaggaggaggaggaggaagcccccaagagcaacagcaacggcagcagcttaccatcttctacaacggaaggatttgcgtttctgatgttacagagcttcgggctagagcaattatactggctgcaagtagagaaatggaggaaaggaagagagccccgctgtcgccatccatgcaatctcagctctgtggcccttcgggtgtttcaatgaagagatcgctccatcggttccttcagaagcgaaagaataggagggaagctatgtccccatacaatcattaa

SEQ ID NO: 8083 - protein, 143 aa, Vitis vinifera
MEFTPNLRKQNNFPSALQESIKMESNKPMNLELPLFPSTAHTSSIPTMRGGGGGGGSPQEQQQRQQLTIFYNGRICVSDVTELRARAIILAASREMEERKRAPLSPSMQSQLCGPSGVSMKRSLHRFLQKRKNRREAMSPYNH

SEQ ID NO: 8084 - DNA, 363 bp, Populus trichocarpa
  CDS (1)..(363)
atgaggagggatagcaacttggatctttgcctttctccaatggcgccttcttcatctttgccgtcggctagttcccatcaaaacttaatggatgagccggcaatgcgccaacaacatctcacaatcttctacaatggaaggattagtgtttgtgatgtgactgaatttcaggctagagcaataatatggctagcaagtcgagaaaaggaagagagaagtaacactacaagatccaaccaagcaccgaaacctctgcattctcagctccatagccctcctggtctttcattgaagagatctctccaaaggttcttgcaaaagagaaagaagagggccgaagcgatctccccatatagacaatga

SEQ ID NO: 8085 - protein, 120 aa, Populus trichocarpa
MRRDSNLDLCLSPMAPSSSLPSASSHQNLMDEPAMRQQHLTIFYNGRISVCDVTEFQARAIIWLASREKEERSNTTRSNQAPKPLHSQLHSPPGLSLKRSLQRFLQKRKKRAEAISPYRQ

SEQ ID NO: 8086 - DNA, 450 bp, Populus trichocarpa
  CDS (1)..(450)
atgaagagaaactgcaatctcgaactccgcctccatactccagcggattccgacaaccaccaccaccgttaccaacccctggtggaggcgtcgaatgagagccgacaattagaacttgaacaacaagagcagaagcagctaactattttttacaatgggagggttttagtttgtgatgttgcagaactgcaggctagagcaatcctaatgcttgcaagtcgagaaatggaggatagattgcgaagcccagtcgggtcggagccatctgcttcctcaccgatctcaccatctcagctttacagtccggttggtcttccaatgaagagatcactacaaaggttcctcaagaagcgaaagcatcggatccaagcaactttcccttgcaaagttaaaaacgagttaacgcagactggaagattgaggaactttgtctcgagagaagatcaatga

SEQ ID NO: 8087 - protein, 149 aa, Populus trichocarpa
MKRNCNLELRLHTPADSDNHHHRYQPLVEASNESRQLELEQQEQKQLTIFYNGRVLVCDVAELQARAILMLASREMEDRLRSPVGSEPSASSPISPSQLYSPVGLPMKRSLQRFLKKRKHRIQATFPCKVKNELTQTGRLRNFVSREDQ

SEQ ID NO: 8088 - DNA, 384 bp, Vitis vinifera
  CDS (1)..(384)
  misc_feature (12)..(12): s is g or c
  misc_feature (172)..(172): s is g or c
atgaagagaagsaactgcaatttggaggttcggcttcttccccccaacactgattattcaagcccccagcaccaccataacatgatgatggagacgggaagaggaagcccacaggagcaacagcaacggcagcagcttactattttctataacggaaggatctgcgtttgtsatgttacagagcttcaggctagagccatcctacagcttgcaagtagagaaatggaggaaaaaacaagaaccccgactgcctcagacgcgatctcgtcgtctctgcattctcagctgtatagccctactggcctttccatgaagagatcgctgcaacgcttcctccagaagcgaaagaataggatggaagcaacctccccctaccatcgctag

SEQ ID NO: 8089 - protein, 127 aa, Vitis vinifera
  misc_feature (4)..(4): The Xaa at location 4 stands for Arg, or Ser.
  misc_feature (58)..(58): The Xaa at location 58 stands for Asp, or His.
MKRXNCNLEVRLLPPNTDYSSPQHHHNMMMETGRGSPQEQQQRQQLTIFYNGRICVCXVTELQARAILQLASREMEEKTRTPTASDAISSSLHSQLYSPTGLSMKRSLQRFLQKRKNRMEATSPYHR

SEQ ID NO: 8090 - DNA, 495 bp, Ricinus communis
  CDS (1)..(495)
atggtgaaaaatgcaaccgagaaagaaagaaaagaaaaggaaaagcgaagaaaagaaagttccgataaatggatgagaaggaactgcagtcttgaactccgccctgttcctttctccgattcgggccacaaccaccgggagcagcaggcaatgtcagtttcttttctccttgtttcttctttctttctttcggtcatattaagtgaaagcccacaggagagacagcagctaactattttctacaatgggagggtttgcgtctgttatgttacagagctccaagctagagccatactgtcgctcgcaagtcgagagatggaagataaaatgaagacttcattactcggaacgccgaccggccggtcagaatttgtttcgccattgccatctccgctgtgtagccctagcaccggtctatccatgaagagatcaatccaacgtttcctccagaagaggaagcatagggctcaggcaacttctccttacaattattaa

SEQ ID NO: 8091 - protein, 164 aa, Ricinus communis
MVKNATEKERKEKEKRRKESSDKWMRRNCSLELRPVPFSDSGHNHREQQAMSVSFLLVSSFFLSVILSESPQERQQLTIFYNGRVCVCYVTELQARAILSLASREMEDKMKTSLLGTPTGRSEFVSPLPSPLCSPSTGLSMKRSIQRFLQKRKHRAQATSPYNY

SEQ ID NO: 8092 - DNA, 420 bp, Ricinus communis
  CDS (1)..(420)
atgaggcgaaactgcaatcttgaactccgcctttttcccttctccgatcccgatgaccacctccagcattcgtcatcgatggaggatttttcaaacaaaagcccacgccaagaaggccagcagcagcagcagctaactattttctacaatggcaacgtttgcgtttgtgatgttacagattttcaggctagagcaatcctgctgttagcaagtaaagaaatggagcataaaccaagaagatcaccatcaggatcgtcgtcagaacctgcatcaccaacgttgccatctccgatttacagcccgaataacggtctatcaatgaagaggtcattgcagcggtttcttcagaagcgaaaccatcggatccaagctacatgcccttacagcattaatcggcgaataacaccgttgattaattaa

SEQ ID NO: 8093 - protein, 139 aa, Ricinus communis
MRRNCNLELRLFPFSDPDDHLQHSSSMEDFSNKSPRQEGQQQQQLTIFYNGNVCVCDVTDFQARAILLLASKEMEHKPRRSPSGSSSEPASPTLPSPIYSPNNGLSMKRSLQRFLQKRNHRIQATCPYSINRRITPLIN

SEQ ID NO: 8094 - DNA, 393 bp, Brassica napus
  CDS (1)..(393)
atggagaaaaactgcgacttggaacttcgtctctttccaacatcttcttatgatgaatcagatacctctgtggtagaatcaagaagctctggaaactcactaccaaaagaggaagaatctcagaggataacaattttctacaatggaaaaatgtgtgtttcttcgaatgttacccatcttcaggctaaatctataatatcgatcgcgagtagagagatggaagagaggtcatcctcaaacaggtcggatcctcggaacaggttgacccgattacatcatcatcagcttccaaatccaaaggcttctatgaaaagatctctccaaagttttcttcagaaacggaggattcgaattcaagcagcttcaccttaccatcagcattcacgacgatag

SEQ ID NO: 8095 - protein, 130 aa, Brassica napus
MEKNCDLELRLFPTSSYDESDTSVVESRSSGNSLPKEEESQRITIFYNGKMCVSSNVTHLQAKSIISIASREMEERSSSNRSDPRNRLTRLHHHQLPNPKASMKRSLQSFLQKRRIRIQAASPYHQHSRR

SEQ ID NO: 8096 - DNA, 393 bp, Brassica napus
  CDS (1)..(393)
atggagaaaaactgcgacttggaacttcgtctctttccaacatcttcttatgatgaatcagatacctctgtggtagaatcaagaagctctggaaactcactaccaaaagaggaagaatctcagaggataacaattttctacaatggaaaaatgtgtgtttcttcgaatgttacccatcttcaggctaaatctataatatcgatcgcgagtagagagatggaagagaggtcatcctcaaacgggtcggatcctcggaacaggttgacaagattacatcatcatcagcttccaaatccaaaggcttctatgaaaagatctctccaaagttttcttcagaaacggaggattcgaattcaagcagcttcaccttaccatcagcattcacgacgatag

SEQ ID NO: 8097 - protein, 130 aa, Brassica napus
MEKNCDLELRLFPTSSYDESDTSVVESRSSGNSLPKEEESQRITIFYNGKMCVSSNVTHLQAKSIISIASREMEERSSSNGSDPRNRLTRLHHHQLPNPKASMKRSLQSFLQKRRIRIQAASPYHQHSRR

SEQ ID NO: 8098 - DNA, 20 bp, Artificial sequence
  primer
atgaagctacagcaaaattg

SEQ ID NO: 8099 - DNA, 21 bp, Artificial sequence
  primer
ttatcgtcgtgaatggtacgg

SEQ ID NO: 8100 - protein, 144 aa, Artificial sequence
  consensus sequence
  Variant (2)..(3): Xaa in position 2 to 3 is any amino acid
  Variant (4)..(5): Xaa in position 4 to 5 is any or no amino acid
  Variant (8)..(8): Xaa in position 8 is any amino acid
  Variant (12)..(12): Xaa in position 12 is any amino acid
  Variant (14)..(14): Xaa in position 14 is any amino acid
  Variant (16)..(22): Xaa in position 16 to 22 is any amino acid
  Variant (23)..(38): Xaa in position 23 to 38 is any or no amino acid
  Variant (40)..(43): Xaa in position 40 to 43 is any amino acid
  Variant (44)..(55): Xaa in position 44 to 55 is any or no amino acid
  Variant (57)..(57): Xaa in position 57 is any amino acid
  Variant (63)..(63): Xaa in position 63 is any amino acid
  Variant (65)..(66): Xaa in position 65 to 66 is any amino acid
  Variant (69)..(70): Xaa in position 69 to 70 is any amino acid
  Variant (71)..(71): Xaa in position 71 is any or no amino acid
  Variant (74)..(74): Xaa in position 74 is any amino acid
  Variant (78)..(79): Xaa in position 78 to 79 is any amino acid
  Variant (81)..(83): Xaa in position 81 to 83 is any amino acid
  Variant (85)..(85): Xaa in position 85 is any amino acid
  Variant (88)..(88): Xaa in position 88 is any amino acid
  Variant (90)..(106): Xaa in position 90 to 106 is any amino acid
  Variant (107)..(116): Xaa in position 107 to 116 is any or no amino acid
  Variant (118)..(120): Xaa in position 118 to 120 is any amino acid
  Variant (121)..(121): Xaa in position 121 is any or no amino acid
  Variant (129)..(129): Xaa in position 129 is any amino acid
  Variant (135)..(136): Xaa in position 135 to 136 is any amino acid
  Variant (138)..(141): Xaa in position 138 to 141 is any amino acid
MXXXXNCXLELXLXPXXXXXXXXXXXXXXXXXXXXXXXPXXXXXXXXXXXXXXXXQXLTIFYXGXXCVXXXVTXLQAXXIXXXAXREXEXXXXXXXXXXXXXXXXXXXXXXXXXXXPXXXXSMKRSLQXFLQKRXXRXXXXSPY

SEQ ID NO: 8101 - protein, 15 aa, Artificial sequence
  protein pattern
  Variant (5)..(5): Xaa in position 5 is Asp or Asn
  Variant (7)..(7): Xaa in position 7 is any amino acid
  Variant (8)..(8): Xaa in position 8 is Ile, Met or Val
  Variant (10)..(13): Xaa in position 10 to 13 is any or no amino acid
  Variant (15)..(15): Xaa in position 15 is Cys, Ser or Thr
TIFYXGXXCXXXXVX

SEQ ID NO: 8102 - protein, 24 aa, Artificial sequence
  protein pattern
  Variant (3)..(3): Xaa in position 3 is any or no amino acid
  Variant (5)..(5): Xaa in position 5 is any or no amino acid
  Variant (8)..(8): Xaa in position 8 is any amino acid
  Variant (9)..(9): Xaa in position 9 is Arg or Ser
  Variant (15)..(16): Xaa in position 15 to 16 is any amino acid
  Variant (18)..(18): Xaa in position 18 is any amino acid
  Variant (19)..(19): Xaa in position 19 is Glu or Gln
  Variant (20)..(20): Xaa in position 20 is Ala or Glu
  Variant (21)..(21): Xaa in position 21 is any amino acid
  Variant (22)..(22): Xaa in position 22 is Cys or Ser
SMXKXSLXXFLQKRXXRXXXXXPY

SEQ ID NO: 8103 - protein, 20 aa, Artificial sequence
  protein pattern
  Variant (3)..(3): Xaa in position 3 is Lys or Arg
  Variant (4)..(4): Xaa in position 4 is Ala or Ser
  Variant (6)..(6): Xaa in position 6 is Ile or Leu
  Variant (7)..(7): Xaa in position 7 is any amino acid
  Variant (8)..(8): Xaa in position 8 is Ile or Leu
  Variant (10)..(10): Xaa in position 10 is Asn or Ser
  Variant (11)..(11): Xaa in position 11 is Lys or Arg
  Variant (12)..(12): Xaa in position 12 is Glu or Lys
  Variant (13)..(13): Xaa in position 13 is any amino acid
  Variant (14)..(14): Xaa in position 14 is Glu or Lys
  Variant (15)..(15): Xaa in position 15 is any amino acid
  Variant (16)..(16): Xaa in position 16 is Lys or Arg
  Variant (17)..(19): Xaa in position 17 to 19 is any amino acid
  Variant (20)..(20): Xaa in position 20 is Asn, Pro, Ser or Thr
QAXXIXXXAXXXXXXXXXXX

SEQ ID NO: 8104 - DNA, 663 bp, Arabidopsis thaliana
  CDS (1)..(663)
atggcgtcttcttcagcgacgctctctctctgctctactttctctgctcattgcaatgtcaattctcgccgttctagcactatcctctgttctctctctaaaccttcgcttaatttggctaaacctctgactggatttctttctccttccactgcgtcgacgtctcgaaccgcattcaccgtcgctccgaaattcgcggaatcagtcgtcgaagctgaaccggagactaccgatatcgaagctgtggtggtttccgatgtttcggaggttactgaggaaaaagctaaacgagaagagattttcgctgttattatggttggtggacgccaatacatagtgtttccagggagatatctctacactcagaggctaaaagatgcaaatgttgatgaccagattgttctcaacaaagtgttgcttgttggaacaaagacacacacttacattggcaagccggttgtgaccaatgccactgtacatgctgttgtggaaagtcaaggtttgaatgataaagtggtagtcttcaagtacaagcctaagaagaagtaccgtagaaatatcggtcacagacagccgaatacgaggattaggattaccggaatcacagggtatgaagagtatccagcctcgcccaatgttgcagttggagaagtaaatctttga

SEQ ID NO: 8105 - protein, 220 aa, Arabidopsis thaliana
MASSSATLSLCSTFSAHCNVNSRRSSTILCSLSKPSLNLAKPLTGFLSPSTASTSRTAFTVAPKFAESVVEAEPETTDIEAVVVSDVSEVTEEKAKREEIFAVIMVGGRQYIVFPGRYLYTQRLKDANVDDQIVLNKVLLVGTKTHTYIGKPVVTNATVHAVVESQGLNDKVVVFKYKPKKKYRRNIGHRQPNTRIRITGITGYEEYPASPNVAVGEVNL

SEQ ID NO: 8106 - DNA, 645 bp, Oryza sativa
  CDS (1)..(645)
atggccaccgcgacgctgcccctccgcctcctcgcctccaaaaccctagccttcccctccgccccgtccctcccggcctcgcgatgctccctccccgtcgccgcgtccgcgccccgccgctgctggcggctcctcgcttccgccgaggagccggcgcccgcacccgtggaggccgaggccgaggcggaggtggtagaggaggaggaggttgaagaagaggaggctgcggtgccggagcctgtggaggcgcagatcgcagccgcgggcgccgggaaggacgccgacatcttcgccgttgtcatgattgggtcgagacagtacattgtgatgcctggaaggtatatatacacgcagaggctgaaaggcgccaatgtcaatgatcagataatattaaacaaggtattactggtatcaactagagacaaggcttacattggcatgccagtggtgaccaatgctgctgttcatgcagtggttgaggaacagggacgggatgataaagtgatagtcttcaaatataagaagaagaagaagtaccagaggaaacttggtcacagacagccaaacacaaggttaagaattaccggcataagtggatacgaggacttccctgctgacccgatacttgagtatgttccagcttaa

SEQ ID NO: 8107 - protein, 214 aa, Oryza sativa
MATATLPLRLLASKTLAFPSAPSLPASRCSLPVAASAPRRCWRLLASAEEPAPAPVEAEAEAEVVEEEEVEEEEAAVPEPVEAQIAAAGAGKDADIFAVVMIGSRQYIVMPGRYIYTQRLKGANVNDQIILNKVLLVSTRDKAYIGMPVVTNAAVHAVVEEQGRDDKVIVFKYKKKKKYQRKLGHRQPNTRLRITGISGYEDFPADPILEYVPA

SEQ ID NO: 8108 - DNA, 642 bp, Glycine max
  CDS (1)..(642)
atggccactgccactgtttcaatttcaactttatgcgctactttcggaacccattgcgccatttcccacaacccaaaacctctattttctcaacctttcaatctcaatcactttccttctaactcttacaagctcgctttctcgcctcgctcacctctttcaccccttcccaaggcctctgaatccgcggtagccgaaaccgaacccggttcggccgagcccgaaccggcccaaatttccccggcccaacctccctcctgggaacccggtctcttcgctgtcgtaatgattggcggacgccaatatattgttcacccggggcgacatcttactgttcagaggttaaaaggtgctaatgttaatgataagattgccttacacaaggttttactggttggcactgatacatcttgctacattgggaaaccaattgtaacaaatgctgtagtatacgcaacggtggaagagcagggtctagaccctaaagtaattgtcttcaaatataaaaagaagaaacattatcgcagaaacattggacacagacagccaaatacacgtatacggataaatagcattatgggctatgaaaactacccaaaagttactatggacgatatcaaatcagacgaacccgaatcatga

SEQ ID NO: 8109 - protein, 213 aa, Glycine max
MATATVSISTLCATFGTHCAISHNPKPLFSQPFNLNHFPSNSYKLAFSPRSPLSPLPKASESAVAETEPGSAEPEPAQISPAQPPSWEPGLFAVVMIGGRQYIVHPGRHLTVQRLKGANVNDKIALHKVLLVGTDTSCYIGKPIVTNAVVYATVEEQGLDPKVIVFKYKKKKHYRRNIGHRQPNTRIRINSIMGYENYPKVTMDDIKSDEPES

SEQ ID NO: 8110 - DNA, 642 bp, Glycine max
  CDS (1)..(642)
atggccactgccactgtttcaatttcaacactatgcgctaccttcggaacccattgcgccatttcccacgaccctaaacctcttttttctcaacctttcagtctcaatcgctttccttctacctcttacaagctcactttatcgcctcgctcacctatttcaacccttcctaaggtctctgaatccgcggttgccgaaaccgaaaccggttcgtccgagcccgaaccggaccaaattgtcccggctcagcctccctcctgggaacccggtctcttcgctgtcgtaatgattggtggacgccaatatattgttcacccggggcgacatcttactgttcagaggttgaaaggtgctaatgttaatgataagattgccttacacaaggttttactggttggcactgatacatcttgctacattgggaaaccaattgtaacaaatgctgtagtatatgcaacagtggaagagcagggtctagaccccaaagtaattgtcttcaaatataaaaagaagaaacactatcgcagaaacattgggcacagacagccaaatacacgtatacggataaatagcattatgggctatgagaactacccaaaagttactatggacgacatcaaatcagacgaacccggatcatga

SEQ ID NO: 8111 - protein, 213 aa, Glycine max
MATATVSISTLCATFGTHCAISHDPKPLFSQPFSLNRFPSTSYKLTLSPRSPISTLPKVSESAVAETETGSSEPEPDQIVPAQPPSWEPGLFAVVMIGGRQYIVHPGRHLTVQRLKGANVNDKIALHKVLLVGTDTSCYIGKPIVTNAVVYATVEEQGLDPKVIVFKYKKKKHYRRNIGHRQPNTRIRINSIMGYENYPKVTMDDIKSDEPGS

SEQ ID NO: 8112 - DNA, 696 bp, Zea mays
  CDS (1)..(696)
atgatccctggcctctcatcctccgaaaactccactccttcgtcatccatgcgtcccctccccgccgcggccatggccaccgcgacgctgcccctccgcctcctcccctccaaaacgctgactctctccactctcccctccctgcgccgctccctctccgtcgccgctttggagccccggcgctggcgcctccgagccgccgccgaggaggcgcctgaggccgtggaggttgagttcgtggagcccgagacggaggctgaggagaaacccgcggtaccggagcccatcgaggctcagctggccgccgcgggggccgggaaggacgcggacatcttcgctgttgtcatgattggttcaagacagtacatagtgatgccgggcaggtatatatacacacagagactgaaaggtgccaatgtcaatgatcagatcatattaaacaaggtgctactggtgtcaactagagaaaaagcttacattgggatgccagtggtgaccaatgctgctgttcacgcagtggttgaagaacagggacgggatgataaagttatagtgttcaagtacaagaagaagaagaagtaccagaggaaacttggtcacagacagccaaacacaaggttaagaatcacaggcataagtggatacgaagagtaccctgctgacccaatacttgaccctgctgcagctttaaattaa

SEQ ID NO: 8113 - protein, 231 aa, Zea mays
MIPGLSSSENSTPSSSMRPLPAAAMATATLPLRLLPSKTLTLSTLPSLRRSLSVAALEPRRWRLRAAAEEAPEAVEVEFVEPETEAEEKPAVPEPIEAQLAAAGAGKDADIFAVVMIGSRQYIVMPGRYIYTQRLKGANVNDQIILNKVLLVSTREKAYIGMPVVTNAAVHAVVEEQGRDDKVIVFKYKKKKKYQRKLGHRQPNTRLRITGISGYEEYPADPILDPAAALN

SEQ ID NO: 8114 - DNA, 624 bp, Ostreococcus lucimarinus CCE9901
  CDS (1)..(624)
atgtctcgccacgtcgcgcgtcgcgcgttctctctcgcgacgtccgtcgcgcccgcgcgcgccgcgcgcgccgcgaccgcgccgtcgacgtcgttcgcgcgcgccgtcgccgccttcgccccgtcgtcgtcgtcgccgtcgccctcgccgccgctcgcgcgcgcgttcgcgagcggactcacgatcaacggcggcgtcacccccgccgtggacgccgtgccggaatccatcgtcctcgtgccgcgcgaggaggcgccggcgatcgacgccgagcgcggcgtcgaggtgcgccctaaagacgtcttcggcgtcgtcgaggtgcggtcgcatcagttcaaggtgtccccggacgacttgatattcgtggataagataaaggacgtcgaggtgaacgatgtggtgaggttgccgcgggtgctgatgctggggagcaagacgcgaacggtgatcgggcggccgacggtgccaggggcggaggttctcgcgttggtcgaggagcacgtgcgggacgggaagaagtttatattcaagaagaagcggcggaagaattatcgacggatgaatgggtacagagcgcagctcacgggattgagagtgttggaggttaggggcattgaggagtag

SEQ ID NO: 8115 - protein, 207 aa, Ostreococcus lucimarinus CCE9901
MSRHVARRAFSLATSVAPARAARAATAPSTSFARAVAAFAPSSSSPSPSPPLARAFASGLTINGGVTPAVDAVPESIVLVPREEAPAIDAERGVEVRPKDVFGVVEVRSHQFKVSPDDLIFVDKIKDVEVNDVVRLPRVLMLGSKTRTVIGRPTVPGAEVLALVEEHVRDGKKFIFKKKRRKNYRRMNGYRAQLTGLRVLEVRGIEE

SEQ ID NO: 8116 - DNA, 630 bp, Vitis vinifera
  CDS (1)..(630)
atggcttccgcaacacttgccttcttctcctcttctctcacacccactgcaacactctccctcaagcacaaatcctcagcaccaaaaaagactctttctttctccaattttggctttctttctcctcacagtcttactctctcttcaagacggccgccttctccccttcccaaatcatccgaattcgaaccgtcagtcatcgaagtggagtctagtgaacctaattccgaagctctccaagtggtcgaagagccgccgcccgaactgcctaagcgcgaggagatttttgctgtggttatgattgggtctcgccaatacattgttttccctggtcggtatatctatactcagaggctcaaaggtgctgatgtcaatgataagattatcctgaacagggtgttgcttgtcggcaccaaaacaagtacttacattggaaaaccagtggttccaaatgctgctgtgcatgctgtagttgaagagcagggattaaatcctaaagtcatggtcttcaagtacaagaagaaaaagaactatcgcagaaacatcggtcatcgacagccaaacacacggataaggattacgggcatcacgggctatcaagactccccagctgttacccttgattcatag

SEQ ID NO: 8117 - protein, 209 aa, Vitis vinifera
MASATLAFFSSSLTPTATLSLKHKSSAPKKTLSFSNFGFLSPHSLTLSSRRPPSPLPKSSEFEPSVIEVESSEPNSEALQVVEEPPPELPKREEIFAVVMIGSRQYIVFPGRYIYTQRLKGADVNDKIILNRVLLVGTKTSTYIGKPVVPNAAVHAVVEEQGLNPKVMVFKYKKKKNYRRNIGHRQPNTRIRITGITGYQDSPAVTLDS

SEQ ID NO: 8118 - DNA, 621 bp, Populus trichocarpa
  CDS (1)..(621)
atggctgcttcttcttctacagcactaatggctctctgttcttcgttaaccactcaatgcaaaatctccaaaagccaaaaccctcctctctccaaaaccctttgtctctctaaacccaattttgggtctttctcaaacaccactaagaagctctcctctcctcttattttctctaaaagacctacattttttgccaggcccaaagctaaccctgagcctgctgccacgcagattgttgaggttgctaaggaagagccaactaagcgtgaggagatttttgctgttgttatggtaggatctcgccagtatattgttataccagggcgatggctctatgttcagaggctaaaaggtgcaaatgtcaatgacaagatagttttgaataaggtgttacttgtgggaacaagaacaagtgcctatattggaaaaccagtggtgactaatgcttctgttcatgccgtagttgaagagcagggattagatgctaaaaagattgtcttcaaatataagaggaagaagaactataggagaaatattggtcatcgacagccaaatactcggataaggataacaggcatcactggctatcaagacttcccagtatctactcttgattcataa

SEQ ID NO: 8119 - protein, 206 aa, Populus trichocarpa
MAASSSTALMALCSSLTTQCKISKSQNPPLSKTLCLSKPNFGSFSNTTKKLSSPLIFSKRPTFFARPKANPEPAATQIVEVAKEEPTKREEIFAVVMVGSRQYIVIPGRWLYVQRLKGANVNDKIVLNKVLLVGTRTSAYIGKPVVTNASVHAVVEEQGLDAKKIVFKYKRKKNYRRNIGHRQPNTRIRITGITGYQDFPVSTLDS

SEQ ID NO: 8120 - DNA, 684 bp, Populus trichocarpa
  CDS (1)..(684)
atggctacttcttcctccacaacacttgtagctctctgttcttctttaaccactcaatgcaaaatctccaatgcacaaaacccacctctctctaaatccctttgcctctccaaacccaattctgggtctttctcaaagaccactcagaatttatcctcctcttctcttattttctctaaaagacccacattttttgccaatcctcccaagttttctgaatctgaagctcttgttgttgaagcagagcctgaagtacccgtgtcagaggctaaccctgagcctgctgccacgcagatggttgaggttgctaaggaagagccacccaagcgtgaggagatttttgctgttgttatggtaggatctcgccagtacattgttatcccggggcgatggctctatgtgcagaggctaaaaggtgctaatgtcaatgataaggtaaatctgaataaggtgttacttgtgggaacaagaacaagtgcctatattggaaaaccagtggtgactaatgctactgttcatgctgtagttgaagagcagggattagatgctaaaaagattgtcttcaaatataagaagaagaaaaactacaggagaaatatcggtcaccgacagccaaatactcggataaggataacaggtatcactggctatcaagactaccctgtatctactcttgattcatag

SEQ ID NO: 8121 - protein, 227 aa, Populus trichocarpa
MATSSSTTLVALCSSLTTQCKISNAQNPPLSKSLCLSKPNSGSFSKTTQNLSSSSLIFSKRPTFFANPPKFSESEALVVEAEPEVPVSEANPEPAATQMVEVAKEEPPKREEIFAVVMVGSRQYIVIPGRWLYVQRLKGANVNDKVNLNKVLLVGTRTSAYIGKPVVTNATVHAVVEEQGLDAKKIVFKYKKKKNYRRNIGHRQPNTRIRITGITGYQDYPVSTLDS

SEQ ID NO: 8122 - DNA, 645 bp, Oryza sativa subsp. indica
  CDS (1)..(645)
atggccaccgcgacgctgcccctccgcctcctcgcctccaaaaccctacccttcccctccgccccgtccctcccggcctcgcgatgctccctccccgtcgccgcgtccgcgccccgccgctgctggcggctcctcgcttccgccgaggagccggcgcccgcacccgtggaggccgaggccgaggcggaggcggtagaggaggaggaggttgaagaagaggaggctgcgttgccggagcctgtggaggcgcagatcgcagccgcgggcgccgggaaggacgccgacatcttcgccgttgtcatgattgggtcgagacagtacattgtgatgcctggaaggtatatatacacgcagaggctgaaaggcgccaatgtcaatgatcagataatattaaacaaggtattactggtatcaactagagacaaggcttacattggcatgccagtggtgaccaatgctgctgttcatgcagtggttgaggaacagggacgggatgataaagtgatagtcttcaaatataagaagaagaagaagtaccagaggaaacttggtcacagacagccaaacacaaggttaagaattaccggcataagtggatacgaggacttccctgctgacccgatacttgagtatgttccagcttaa

SEQ ID NO: 8123 - protein, 214 aa, Oryza sativa subsp. indica
MATATLPLRLLASKTLPFPSAPSLPASRCSLPVAASAPRRCWRLLASAEEPAPAPVEAEAEAEAVEEEEVEEEEAALPEPVEAQIAAAGAGKDADIFAVVMIGSRQYIVMPGRYIYTQRLKGANVNDQIILNKVLLVSTRDKAYIGMPVVTNAAVHAVVEEQGRDDKVIVFKYKKKKKYQRKLGHRQPNTRLRITGISGYEDFPADPILEYVPA

SEQ ID NO: 8124 - DNA, 917 bp, Populus trichocarpa
  CDS (71)..(748)
gagcttcaaagccaaaactagagaatagcacaaaagggggagagcttttttctgctctcacttctccaaaatggctgcttcttcttctacagcactaatggctctctgttcttcgttaaccactcaatgcaaaatctccaaaagccaaaaccctcctctctccaaaaccctttgtctctctaaacccaattttgggtctttctcaaacaccactaagaagctctcctctcctcttattttctctaaaagacctacattttttgccaggcccaaagtctctgaatctgaagctcctgttgttgaagcagagactgaagtacctgtgtcagaggctaaccctgagcctgctgccacgcagattgttgaggttgctaaggaagagccaactaagcgtgaggagatttttgctgttgttatggtaggatctcgccagtatattgttataccagggcgatggctctatgttcagaggctaaaaggtgcaaatgtcaatgacaagatagttttgaataaggtgttacttgtgggaacaagaacaagtgcctatattggaaaaccagtggtgactaatgcttctgttcatgccgtagttgaagagcagggattagatgctaaaaagattgtcttcaaatataagaggaagaagaactataggagaaatattggtcatcgacagccaaatactcggataaggataacaggcatcactggctatcaagacttcccagtatctactcttgattcataagatttcccgcggagttttggatgaatgcttgaagttcagctcttgatactttgtgaagttgctcttttacttttggtgttgttgtaattccccttaaagggcaatgatgttgaattatgagaatcgattttgcataaatgaattatttgcagtaaaaaaaaaaaaaaaa

SEQ ID NO: 8125 - protein, 225 aa, Populus trichocarpa
MAASSSTALMALCSSLTTQCKISKSQNPPLSKTLCLSKPNFGSFSNTTKKLSSPLIFSKRPTFFARPKVSESEAPVVEAETEVPVSEANPEPAATQIVEVAKEEPTKREEIFAVVMVGSRQYIVIPGRWLYVQRLKGANVNDKIVLNKVLLVGTRTSAYIGKPVVTNASVHAVVEEQGLDAKKIVFKYKRKKNYRRNIGHRQPNTRIRITGITGYQDFPVSTLDS

SEQ ID NO: 8126 - DNA, 624 bp, Zea mays
  CDS (1)..(624)
atggccaccgcgacgctgcccctccgcctcctcccctccaaaacgctgactctctccactctcccctccctgcgccgctccctctccgtcgccgctttggagccccggcgctggcgcctccgagccgccgccgaggaggcgcctgaggccgtggaggttgagttcgtggagcccgagacggaggctgaggagaaacccgcggtaccggagcccatcgaggctcagctggccgccgcgggggccgggaaggacgcggacatcttcgctgttgtcatgattggttcaagacagtacatagtgatgccgggcaggtatatatacacacagagactgaaaggtgccaatgtcaatgatcagatcatattaaacaaggtgctactggtgtcaactagagaaaaagcttacattgggatgccagtggtgaccaatgctgctgttcacgcagtggttgaagaacagggacgggatgataaagttatagtgttcaagtacaagaagaagaagaagtaccagaggaaacttggtcacagacagccaaacacaaggttaagaatcacaggcataagtggatacgaagagtaccctgctgacccaatacttgaccctgctgcagctttaaattaa

SEQ ID NO: 8127 - protein, 207 aa, Zea mays
MATATLPLRLLPSKTLTLSTLPSLRRSLSVAALEPRRWRLRAAAEEAPEAVEVEFVEPETEAEEKPAVPEPIEAQLAAAGAGKDADIFAVVMIGSRQYIVMPGRYIYTQRLKGANVNDQIILNKVLLVSTREKAYIGMPVVTNAAVHAVVEEQGRDDKVIVFKYKKKKKYQRKLGHRQPNTRLRITGISGYEEYPADPILDPAAALN

SEQ ID NO: 8128 - DNA, 645 bp, Ricinus communis
  CDS (1)..(645)
atggcaaccacttgtacaacactatctctctgctcatcatttactgctcaatgcacaatctctaatcacaagcaaaacccaaattttatttcgaaaacccacttttcctctaatcctaaaattgggcctttcaccaaatcccacaagcttaccacaagaccctcttttttacccattctaaaatcatctgaatccgatgctcccgtccttgaggttgaggatgctaatgcacctgagttacagcctgaacctgctccttttgtcgaggttgctaaggaggaaaccaagcgtgaggagatttttgctgttgttatggttggggggcgccagtatattgttattcctgggcgctttatctatgttcagaggctgaaaggtgcaaatgtgaatgataaggttgctttgaataaggttctacttgtgggaacaagaaccaccacatatattgggaaaccagtagtgactaatgctgttgttcatgctgtagttgaagagcagggattaaatcccaaggttgttgtttttaagtataagaagaagaaaaactatcggagaaatattggtcatcggcagccaaatacacggataaggataacaggcatcacaggctaccaagactatccagcagttacccttgattcgtag

SEQ ID NO: 8129 - protein, 214 aa, Ricinus communis
MATTCTTLSLCSSFTAQCTISNHKQNPNFISKTHFSSNPKIGPFTKSHKLTTRPSFLPILKSSESDAPVLEVEDANAPELQPEPAPFVEVAKEETKREEIFAVVMVGGRQYIVIPGRFIYVQRLKGANVNDKVALNKVLLVGTRTTTYIGKPVVTNAVVHAVVEEQGLNPKVVVFKYKKKKNYRRNIGHRQPNTRIRITGITGYQDYPAVTLDS

SEQ ID NO: 8130 - DNA, 923 bp, Zea mays
  CDS (13)..(657)
ctttcgtcatccatgacttccctccccgccgcggtcatggccaccgcgacgacgctgcccctaggcctcctcccctccaaaacgctgaccctctcccctctcccttctgcgcgccgatccctctccatcgccgccgtggagccccggcgctggctcctccgagccgccgctgaggaggcgcctgaggccgtggaggttgagttcgtggagcccgacgcggaggcggaggaggagcccgcggtaccggagcccgtagaggcgcagctcgccgccgcgggggctgggaaggacgccgacatcttcgctgttgtcatgattggttcaagacaatacattgtgatgccgggcaggtatatatacacacagagactgaaaggtgccaatgtcaatgatcagatcatattaaacaaggtgctactggtgtcaactagagaaaaagcttacattggcatgccagtggtgaccaacgctgctgttcacgcagtggttgaagaacagggacgtgatgataaagttatagtcttcaagtacaagaagaagaagaagtaccagaggaaacttggtcacagacagccaaacacaaggttaagaatcacaggcataagtggatacgaagagtaccctgctgacccaatacttgaccctgctgcagcttaagctaaattgtaagttatgtagttacaaatcggctggtagtacagtagcatgcaagttttgttcttgtttactttttttttctctggaaggaacacttttcatcaaaattttaccttgttttgtgttccaaatgctgccagtcaacaagtggttccatgtatttatttcatgagctcttattcttgttccttttcaacttgtgtgtgctagccactagccagttgtattacatgacattccataaagaagagatttctttttactac

SEQ ID NO: 8131 - protein, 214 aa, Zea mays
MTSLPAAVMATATTLPLGLLPSKTLTLSPLPSARRSLSIAAVEPRRWLLRAAAEEAPEAVEVEFVEPDAEAEEEPAVPEPVEAQLAAAGAGKDADIFAVVMIGSRQYIVMPGRYIYTQRLKGANVNDQIILNKVLLVSTREKAYIGMPVVTNAAVHAVVEEQGRDDKVIVFKYKKKKKYQRKLGHRQPNTRLRITGISGYEEYPADPILDPAAA

SEQ ID NO: 8132 - DNA, 645 bp, Ostreococcus tauri
  CDS (1)..(645)
atgtccctccgacgagccgccctgcgcgtcgtcaccgcggtcgagcgcgcgtgcgcccccgcgtgcgcccgcacgtcgtccacgcgcgcgcgcgcggcgctctggtcgtcgtcgtcgtcgccaccgctcgagccgccctcgaccgcgatcgcatccgcgggcgcgcgcgtgcgcgtgcgaacgtacgcgagcggactcaccgtggacggcggcgtcacaccagccgtggaggcggtcccgacgtccatcgcgcgcgcgccgagcgacgaggcgtggacgagagatctcgcgcgcgggacggaggcgcggcgcaaggaggtcttcggcgtggtgcagattcggtcgcatcagttcaaggtgtcgccggatgatttgatatacgtggataaagtgaaggacgtggaggtgaacgacgtggtgacgctgccgcgggtgctgatgctcgggaataagagcgagacggtgatcgggcggccgacggtgccgggggcggaggtggtggcgctcgtggaggagcacgtgcgggatgggaagaagctgatattcaagaagaagcgaagaaagaatcacaggcggatgaatggatatagggcgcagctcaccggtttgcgcgtgttggagatcagagggatcgaggaggcgtga

SEQ ID NO: 8133 - protein, 214 aa, Ostreococcus tauri
MSLRRAALRVVTAVERACAPACARTSSTRARAALWSSSSSPPLEPPSTAIASAGARVRVRTYASGLTVDGGVTPAVEAVPTSIARAPSDEAWTRDLARGTEARRKEVFGVVQIRSHQFKVSPDDLIYVDKVKDVEVNDVVTLPRVLMLGNKSETVIGRPTVPGAEVVALVEEHVRDGKKLIFKKKRRKNHRRMNGYRAQLTGLRVLEIRGIEEA

SEQ ID NO: 8134 - DNA, 771 bp, Spinacia oleracea
  CDS (1)..(771)
atggcgtctgcaactttagcattctcttgttcctcactctgtgcaacactgaaacttcctcaaaatctaaacccacttcttttgaatgttccacctctctctaaacccttttccggcgtagtttcaccgccctctctatctcggctgtctcttctccccgtcgccgccaaacgacgccgatttcaggaaattccagaagagttgaaggcggaatttgaagaattccaaaggccccccaaccaaaagccccaattatctgatgttctgccagacgattttcaggctcctgagcctggtacccctgaatacaacgatattatcaaccaattccttcccaaaaaaggccctcctcctccccgtgaagagatttttgctgttgttgtgattggttctagacagtacattgtcattcctggaagatggatttacacccagaggctcaaaggtgctactgtcaatgataagattgttctgaacaaagttttgctagtgggaactaaagctagcacctacataggaacacctatcgtcacaaatgctgcagtacatgctgttgtagaagaacagttgctggatgacaaggttatcgtcttcaagtataagaagaagaagaactatagacgaaatattggtcatagacagcccatcacccgtataaagataacaggaatcactggttatgaagattacccagcttctacactagaagcagaggtagaggcaaaggaagaggcagaggcagaggcagaggcagaggcagttccagtttaa

SEQ ID NO: 8135 - protein, 256 aa, Spinacia oleracea
MASATLAFSCSSLCATLKLPQNLNPLLLNVPPLSKPFSGVVSPPSLSRLSLLPVAAKRRRFQEIPEELKAEFEEFQRPPNQKPQLSDVLPDDFQAPEPGTPEYNDIINQFLPKKGPPPPREEIFAVVVIGSRQYIVIPGRWIYTQRLKGATVNDKIVLNKVLLVGTKASTYIGTPIVTNAAVHAVVEEQLLDDKVIVFKYKKKKNYRRNIGHRQPITRIKITGITGYEDYPASTLEAEVEAKEEAEAEAEAEAVPV

SEQ ID NO: 8136 - DNA, 642 bp, Oryza sativa
  CDS (1)..(642)
atggccactgccactgtttcaatttcaactttatgcgctactttcggaacccattgcgccatttcccacaacccaaaacctctattttctcaacctttcaatctcaatcactttccttctaactcttacaagctcgctttctcgcctcgctcacctctttcaccccttcccaaggcctctgaatccgcggtagccgaaaccgaacccggttcggccgagcccgaaccggcccaaatttccccggcccaacctccctcctgggaacccggtctcttccctgtcgtaatgattggcggacgccaatatattgttcacccggggcgacatcttactgttcagaggttaaaaggtgctaatgttaatgataagattgccttacacaaggttttactggttggcactgatacatcttgctacattgggaaaccaattgtaacaaatgctgtagtatacgcaacggtggaagagcagggtctagaccctaaagtaattgtcttcaaatataaaaagaagaaacattatcgcagaaacattggacacagacagccaaatacacgtatacggataaatagcattatgggctatgaaaactacccaaaagttactatggacgatatcaaatcagacgaacccgaatcatga

SEQ ID NO: 8137 - protein, 213 aa, Oryza sativa
MATATVSISTLCATFGTHCAISHNPKPLFSQPFNLNHFPSNSYKLAFSPRSPLSPLPKASESAVAETEPGSAEPEPAQISPAQPPSWEPGLFPVVMIGGRQYIVHPGRHLTVQRLKGANVNDKIALHKVLLVGTDTSCYIGKPIVTNAVVYATVEEQGLDPKVIVFKYKKKKHYRRNIGHRQPNTRIRINSIMGYENYPKVTMDDIKSDEPES

SEQ ID NO: 8138 - DNA, 612 bp, Brassica napus
  CDS (1)..(612)
atggcttctccctcagcgacgctttctctgtgctctgctttctctgctcattgcagtgtcgctccaccgcgctcgctctctaagccttcattgagtctggctagacctacaattgggtttctttctacttccgctgcgtctacgtctcgacccgcgttccccgccgctccgaaattcgccgaatcagccgtcgtggctgaaccggagactaccgatattgaagctgtggtggtctcagaggataagcctaaacgagaagagatcttcgccgttgttatggttggtggacgccaatacattgttttcccagggagatatctctacactcagcggctcaaagatgctaatgttgatgatcagattgttttgaacaaagtgttgcttgtcggcacaaagacacatacttacatcggcaaaccggttgttaccaatgctactgtgcatgctgttgtggaaaatcaaggtctgaatgataaagtagtcgtcttcaagtacaagcccaagaagaaataccgcagaaatatcggtcaccgacagccaaatacgaggattaggattacaggaatcacagggtacgaagagtatccagcgtcacccaacgttgctgtttaa

SEQ ID NO: 8139 - protein, 203 aa, Brassica napus
MASPSATLSLCSAFSAHCSVAPPRSLSKPSLSLARPTIGFLSTSAASTSRPAFPAAPKFAESAVVAEPETTDIEAVVVSEDKPKREEIFAVVMVGGRQYIVFPGRYLYTQRLKDANVDDQIVLNKVLLVGTKTHTYIGKPVVTNATVHAVVENQGLNDKVVVFKYKPKKKYRRNIGHRQPNTRIRITGITGYEEYPASPNVAV

SEQ ID NO: 8140 - DNA, 636 bp, Glycine max
  CDS (1)..(636)
atggccactgccactgtttcaatttcaacactatgcgctaccttcggaacccattgcgccatttcccacgaccctaaacctcttttttctcaacctttcagtctcaatcgctttccttctacctcttacaagctcactttatcgcctcgctcacctatttcaacccttcctaaggtctctgaatccgcggttgccgaaaccgaaaccggttcgtccgagcccgaaccggaccaaattgtcccggctcagcctccctcctgggaacccggtctcttcgctgtcgtaatgattggtggacgccaatatattgttcacccggggcgacatcttactgttcagaggttgaaaggtgctaatgttaatgataagattgccttacacaaggttttactggttggcactgatacatcttgctacattgggaaaccaattgtaacaaatgctgtagtatatgcaacagtggaagagcagggtctagaccccaaagtaattgtcttcaaatataaaaagaagaaacactatcgcagaaacattgggcacagacagccaaatacacgtatacggataaatagcattatgggctatgagaactacccaaaagttactatggacgacatcaaatcagacgaaccctga

SEQ ID NO: 8141 - protein, 211 aa, Glycine max
MATATVSISTLCATFGTHCAISHDPKPLFSQPFSLNRFPSTSYKLTLSPRSPISTLPKVSESAVAETETGSSEPEPDQIVPAQPPSWEPGLFAVVMIGGRQYIVHPGRHLTVQRLKGANVNDKIALHKVLLVGTDTSCYIGKPIVTNAVVYATVEEQGLDPKVIVFKYKKKKHYRRNIGHRQPNTRIRINSIMGYENYPKVTMDDIKSDEP

SEQ ID NO: 8142 - DNA, 609 bp, Hordeum vulgare
  CDS (1)..(609)
atggccaccgccacgctccctctccgcctcctcccctccagaaccccactcctccacgccgccgccttcctccctgcgagcacctccctctccttaaccgcgcccgcgacccgcaactggcgcatcttcgccgccgccgaggaggcgcccgctccggtggaagccgaggtggaggaggtggtagaggatgccgcggttccggagcctgttgaggtgcagctggctgctgctggcgcggggaaggatgccgacatcttcgccgttgtcatgattgggtccagacaatacattgtgatgcccggtcggtatatatacacgcagaggctgaaagacgccaatgtcaatgatcagatcattttgaacaaggtactactagtgtcaactagagacaaagcttatattggcatgccagtggtgaccaatgctgctgttcatgcaattgttgaagaacagggactggacgataaagtgattgttttcaagttcaagaagaagaagaagtaccagaggaaagctggtcacagacagccaaatacgaggttaagaattaccggcataagtggatatgaggaataccctgctgatccaatacttcaagttccagcttaa

SEQ ID NO: 8143 - protein, 202 aa, Hordeum vulgare
MATATLPLRLLPSRTPLLHAAAFLPASTSLSLTAPATRNWRIFAAAEEAPAPVEAEVEEVVEDAAVPEPVEVQLAAAGAGKDADIFAVVMIGSRQYIVMPGRYIYTQRLKDANVNDQIILNKVLLVSTRDKAYIGMPVVTNAAVHAIVEEQGLDDKVIVFKFKKKKKYQRKAGHRQPNTRLRITGISGYEEYPADPILQVPA

SEQ ID NO: 8144 - DNA, 678 bp, Linum usitatissimum
  CDS (1)..(678)
atggcgtccacctcttacgcactctcactctgctcttccttcaatgcccactgcaaaatcaactcctcccaccaccaaaaccttcactcaatctcaaagcccctctcttttgccaatcccagttgtgggtccttcttcaaacttccgcaaaggctcaccttctcttctaatcatcttcccttggttgtgaccaaagtctctgaaattgaagctccatccgtcaccgaaccggatactccagcccccgactccgaggttatagccgagccaacccagattgtcgatgttgctaaggaagaagctaaacgtgaagagattttcgctgttgttatggtgggcggacgacaatacattgtaatccctggaagatttctctatgttcagaggttgaaaggcgcaaatgtcaatgataagatcgccttaaacaaggtgttgctagtgggaacaaaaacgactacctacatagggaaacctgtagtaacaaatgcagttgttcatgctgtagttgaagagcagggattgaacaagaaagtcatcgtcttcaagtataagaagaagaagaactacaggaggaagattggccacagacagccaaacacaagaatcagaattacaggcatcaccggatttgaaaactacccaggtgccaccctcgaatcagtagctgcttcaagttga

SEQ ID NO: 8145 - protein, 225 aa, Linum usitatissimum
MASTSYALSLCSSFNAHCKINSSHHQNLHSISKPLSFANPSCGSFFKLPQRLTFSSNHLPLVVTKVSEIEAPSVTEPDTPAPDSEVIAEPTQIVDVAKEEAKREEIFAVVMVGGRQYIVIPGRFLYVQRLKGANVNDKIALNKVLLVGTKTTTYIGKPVVTNAVVHAVVEEQGLNKKVIVFKYKKKKNYRRKIGHRQPNTRIRITGITGFENYPGATLESVAASS

SEQ ID NO: 8146 - DNA, 609 bp, Triticum aestivum
  CDS (1)..(609)
atggccaccgccacgctccctctccgcctcctcccctcgagaaccccactcctccacaccgccgccttcctccctgcgagcacctctctctccgtcaccgcgtccgcgccccgcaactggcgcatcttcgccgccgccgaggaggcgcccgctccggtggaagccgaggcggaggaggtggtagaggatgccgcggttccggagcctgttgaggtgcagctggctgctgctggcgcggggaaggacgccgacatcttcgccgttgtcatgattgggtccagacaatacattgtgatgccaggtcggtacatatacacacagaggctgaaagacgccaatgtcaatgatcagatcattttgaacaaggtactactggtgtcaactagagacaaagcttatattggcatgccagtggtgaccaatgctgctgttcatgcaattgttgaagaacagggactggacgataaagtgattgttttcaagttcaagaagaagaagaagtaccagaggaaagctggtcacagacagccaaatacgaggttaagaattaccggcataagtggatatgaggaattccctgctgatccaatacttcaagttccagcttaa

SEQ ID NO: 8147 - protein, 202 aa, Triticum aestivum
MATATLPLRLLPSRTPLLHTAAFLPASTSLSVTASAPRNWRIFAAAEEAPAPVEAEAEEVVEDAAVPEPVEVQLAAAGAGKDADIFAVVMIGSRQYIVMPGRYIYTQRLKDANVNDQIILNKVLLVSTRDKAYIGMPVVTNAAVHAIVEEQGLDDKVIVFKFKKKKKYQRKAGHRQPNTRLRITGISGYEEFPADPILQVPA

SEQ ID NO: 8148 - DNA, 20 bp, Artificial sequence
  primer
atggcgtcttcttcagcgac

SEQ ID NO: 8149 - DNA, 21 bp, Artificial sequence
  primer
tcaaagatttacttctccaac

SEQ ID NO: 8150 - protein, 219 aa, Artificial sequence
  consensus sequence
  Variant (2)..(58): Xaa in position 2 to 58 is any amino acid
  Variant (59)..(84): Xaa in position 59 to 84 is any or no amino acid
  Variant (86)..(97): Xaa in position 86 to 97 is any amino acid
  Variant (98)..(111): Xaa in position 98 to 111 is any or no amino acid
  Variant (117)..(117): Xaa in position 117 is any amino acid
  Variant (119)..(119): Xaa in position 119 is any amino acid
  Variant (125)..(125): Xaa in position 125 is any amino acid
  Variant (129)..(132): Xaa in position 129 to 132 is any amino acid
  Variant (137)..(137): Xaa in position 137 is any amino acid
  Variant (143)..(143): Xaa in position 143 is any amino acid
  Variant (145)..(145): Xaa in position 145 is any amino acid
  Variant (147)..(147): Xaa in position 147 is any amino acid
  Variant (153)..(153): Xaa in position 153 is any amino acid
  Variant (155)..(158): Xaa in position 155 to 158 is any amino acid
  Variant (162)..(162): Xaa in position 162 is any amino acid
  Variant (164)..(164): Xaa in position 164 is any amino acid
  Variant (169)..(169): Xaa in position 169 is any amino acid
  Variant (171)..(171): Xaa in position 171 is any amino acid
  Variant (173)..(173): Xaa in position 173 is any amino acid
  Variant (179)..(181): Xaa in position 179 to 181 is any amino acid
  Variant (183)..(184): Xaa in position 183 to 184 is any amino acid
  Variant (190)..(190): Xaa in position 190 is any amino acid
  Variant (193)..(193): Xaa in position 193 is any amino acid
  Variant (195)..(195): Xaa in position 195 is any amino acid
  Variant (197)..(198): Xaa in position 197 to 198 is any amino acid
  Variant (207)..(207): Xaa in position 207 is any amino acid
  Variant (210)..(211): Xaa in position 210 to 211 is any amino acid
  Variant (213)..(213): Xaa in position 213 is any amino acid
  Variant (216)..(218): Xaa in position 216 to 218 is any amino acid
LXXXXXXXXXXXXXXXXXXXXXXXXXXXXXXXXXXXXXXXXXXXXXXXXXXXXXXXXXXXXXXXXXXXXXXXXXXXXXXXXXXXEXXXXXXXXXXXXXXXXXXXXXXXXXXFAVVMXGXRQYIVXPGRXXXXQRLKXANVNDXIXLXKVLLVXTXXXXYIGXPXVTNAXVXAXVEEQGXXXKXXVFKYKXKKXYXRXXGHRQPNTRXRIXXIXGYXXXP

SEQ ID NO: 8151 - protein, 58 aa, Artificial sequence
  protein pattern
  Variant (3)..(3): Xaa in position 3 is any amino acid
  Variant (5)..(5): Xaa in position 5 is Ile or Val
  Variant (10)..(10): Xaa in position 10 is Ala, Ser, Thr or Val
  Variant (12)..(12): Xaa in position 12 is His or Tyr
  Variant (14)..(14): Xaa in position 14 is any amino acid
  Variant (17)..(17): Xaa in position 17 is Glu, Asn or Ser
  Variant (20)..(20): Xaa in position 20 is any amino acid
  Variant (21)..(21): Xaa in position 21 is Asp or Asn
  Variant (22)..(22): Xaa in position 22 is any amino acid
  Variant (24)..(24): Xaa in position 24 is any amino acid
  Variant (25)..(25): Xaa in position 25 is Ile or Val
  Variant (29)..(29): Xaa in position 29 is Phe or Tyr
  Variant (31)..(31): Xaa in position 31 is any amino acid
  Variant (34)..(34): Xaa in position 34 is any amino acid
  Variant (36)..(36): Xaa in position 36 is Gln or Arg
  Variant (38)..(38): Xaa in position 38 is any amino acid
  Variant (39)..(39): Xaa in position 39 is Ala, Ile or Leu
  Variant (48)..(48): Xaa in position 48 is Ile or Leu
  Variant (51)..(51): Xaa in position 51 is Asn or Thr
  Variant (52)..(52): Xaa in position 52 is Gly or Ser
  Variant (54)..(54): Xaa in position 54 is any amino acid
  Variant (56)..(56): Xaa in position 56 is Phe or Tyr
  Variant (57)..(57): Xaa in position 57 is Glu or Gln
  Variant (58)..(58): Xaa in position 58 is Asp, Glu or Asn
IGXPXVTNAXVXAXVEXQGXXXKXXVFKXKXKKXYXRXXGHRQPNTRXRIXXIXGXXX

SEQ ID NO: 8152 - DNA, 384 bp, Arabidopsis thaliana
  CDS (1)..(384)
atggcttcttctttccacagcggagccaagcagagcagcttcggtgctgtcagagtcggccagaaaactcagttcgtcgtcgtttctcaacgcaagaagtcgttgatctacgccgctaaaggtgacggcaacatcctcgatgacctcaacgaggccacaaagaaagcttcagatttcgtgacggataaaacaaaagaggcattagcagatggtgagaaagcgaaagactacgttgttgaaaaaaacagtgaaaccgcagatacattgggtaaagaagctgagaaagctgcggcgtatgtggaggagaaaggaaaagaagccgcaaacaaggcggcagagttcgcggagggtaaagcaggagaggctaaggatgccacaaagtag

SEQ ID NO: 8153 - protein, 127 aa, Arabidopsis thaliana
MASSFHSGAKQSSFGAVRVGQKTQFVVVSQRKKSLIYAAKGDGNILDDLNEATKKASDFVTDKTKEALADGEKAKDYVVEKNSETADTLGKEAEKAAAYVEEKGKEAANKAAEFAEGKAGEAKDATK

SEQ ID NO: 8154 - DNA, 750 bp, Arabidopsis thaliana
  CDS (127)..(546)
atcgatctataaaacgatactattggagattagattcttctcatctcactttgttcatctaaaaactcctcctttcatttccaaacaaaaacttctttttattctcacatcttaaagatctctctcatggcgatgtctttctcaggagctgttctcactggtatggcttcttctttccacagcggagccaagcagagcagcttcggcgctgtcagagtcggccagaaaactcagttcgtcgtcgtttctcaacgcaagaagtcgttgatctacgccgctaaaggtgacggcaacatcctcgatgacctcaacgaggccacaaagaaagcttcagatttcgtgacggataaaacaaaagaggcattagcagatggtgagaaagcgaaagactacgttgttgaaaagaacagtgaaaccgcagatacattgggtaaagaagctgagaaagcttcagcgtatgtggaggagaaaggaaaagaagccgcaaacaaggcggctgagttcgcagagggtaaagcaggagaggctaaggatgccacaaagtagggtcttacctaatcagttaatttcaagcacttaaactcgtagatatattgatccatatcctctctcttcatgtttaatagtacttacaataagatgagtctgttgtaatttctattaatttcacatcacaactgaaataagatatggtatccacagtcaccgtcacattctttaatgttttgcaaaatattcaatagacaaatt

SEQ ID NO: 8155 - protein, 139 aa, Arabidopsis thaliana
MAMSFSGAVLTGMASSFHSGAKQSSFGAVRVGQKTQFVVVSQRKKSLIYAAKGDGNILDDLNEATKKASDFVTDKTKEALADGEKAKDYVVEKNSETADTLGKEAEKASAYVEEKGKEAANKAAEFAEGKAGEAKDATK

SEQ ID NO: 8156 - DNA, 750 bp, Arabidopsis thaliana; identical to SEQ ID NO: 8154
  CDS (133)..(546)

SEQ ID NO: 8157 - protein, 137 aa, Arabidopsis thaliana
MSFSGAVLTGMASSFHSGAKQSSFGAVRVGQKTQFVVVSQRKKSLIYAAKGDGNILDDLNEATKKASDFVTDKTKEALADGEKAKDYVVEKNSETADTLGKEAEKASAYVEEKGKEAANKAAEFAEGKAGEAKDATK

SEQ ID NO: 8158 - DNA, 750 bp, Arabidopsis thaliana; identical to SEQ ID NO: 8154
  CDS (163)..(546)

SEQ ID NO: 8159 - protein, 127 aa, Arabidopsis thaliana
MASSFHSGAKQSSFGAVRVGQKTQFVVVSQRKKSLIYAAKGDGNILDDLNEATKKASDFVTDKTKEALADGEKAKDYVVEKNSETADTLGKEAEKASAYVEEKGKEAANKAAEFAEGKAGEAKDATK

SEQ ID NO: 8160 - DNA, 426 bp, Arabidopsis thaliana
  CDS (1)..(426)
atggcgatgtctttatcaggagctgttctcagtggcatgggttcttctttccacaacgtaggagcaaagcagagtggtgttggtaccgtcagagttggccggaagagtgagctcgtcgtcgttgctcagcgcaagaagtcgttgatatacgccgttaaaagtgacggcaacatcctcgatgacctcaacgaagccacaaagaaagcttctgatttcgtgacggataagacgaaggaggccttggcggatggcgagaaaacaaaagactacattgttgagaaaaccattgaagccaatgaaactgcgactgaggaagctaagaaagctttggattatgtgactgagaaaggaaaagaagccggaaacaaggcggctgagttcgtagagggtaaagcagaagaggctaagaatgccacaaagtcctga

SEQ ID NO: 8161 - protein, 141 aa, Arabidopsis thaliana
MAMSLSGAVLSGMGSSFHNVGAKQSGVGTVRVGRKSELVVVAQRKKSLIYAVKSDGNILDDLNEATKKASDFVTDKTKEALADGEKTKDYIVEKTIEANETATEEAKKALDYVTEKGKEAGNKAAEFVEGKAEEAKNATKS

SEQ ID NO: 8162 - DNA, 420 bp, Arabidopsis thaliana
  CDS (1)..(420)
atggcgatgtctttctcaggagctgttctcactggtatggcttcttctttccacagcggagccaagcagagcagcttcggcgctgtcagagtcggccagaaaactcagttcgtcgtcgtttctcaacgcaagaagtcgttgatctacgccgctaaaggtgacggcaacatcctcgatgacctcaacgaggccacaaagaaagcttcagatttcgtgacggataaaacaaaagaggcattagcagatggtgagaaagcgaaagactacgttgttgaaaaaaacagtgaaaccgcagatacattgggtaaagaagctgagaaagctgcggcgtatgtggaggagaaaggaaaagaagccgcaaacaaggcggcagagttcgcggagggtaaagcaggagaggctaaggatgccacaaagtag

SEQ ID NO: 8163 - protein, 139 aa, Arabidopsis thaliana
MAMSFSGAVLTGMASSFHSGAKQSSFGAVRVGQKTQFVVVSQRKKSLIYAAKGDGNILDDLNEATKKASDFVTDKTKEALADGEKAKDYVVEKNSETADTLGKEAEKAAAYVEEKGKEAANKAAEFAEGKAGEAKDATK

SEQ ID NO: 8164 - DNA, 423 bp, Chorispora bungeana
  CDS (1)..(423)
atggcgatgtcattttcaggagctgttctcagtggaattggttctactttccaaagcggaggagtcaagacaccaagcgttggcttcgtcggagttggcaagaaacttgagttcgtcgccgtctctcagcgcaagaagtcgtcgttgatctacgccgagaaagatggcaacatcctcgatgaccttaacgaagccacaaagaaagcttcggatttcgcgacggagaagacaaaagaattgttgaaagatggtgaaaaagcaaaagattacgttgatgagaaaaactctgaaaatacagagaaagcggttgaggaaggtaaaaaagcatccgagtacgtgcaggagaaactgaaggaagccggaaacagcgcggctgagttcgtagagggtaaagctggagatgctaaggatgccaccaagtag

SEQ ID NO: 8165 - protein, 140 aa, Chorispora bungeana
MAMSFSGAVLSGIGSTFQSGGVKTPSVGFVGVGKKLEFVAVSQRKKSSLIYAEKDGNILDDLNEATKKASDFATEKTKELLKDGEKAKDYVDEKNSENTEKAVEEGKKASEYVQEKLKEAGNSAAEFVEGKAGDAKDATK

SEQ ID NO: 8166 - DNA, 423 bp, Thellungiella salsuginea
  CDS (1)..(423)
atggcgatgtctttctcaggagctgttctcagcgggattggctcttctttccacaacggaggagccaagcagagcagcgttggcgccgtcggatttggccggaaaactgagctcgtcgttgtcgctcagcgcaagaagtcgttgatctacgccgttaaagatgacggcaacatcctcgatgacattaacgaagccacaaagaaagcttcggattacgtgacggagaagacaaaggaggcgttgaaagatggagagaaagcaaaagattacgttgttgagaaaaacgttgaagccaaagatacggcggcggaagaagctcagaaagctttggattatgtgacggagaaaggaaaagaggccggaaacaaagcggctgagtttgcagagggtaaagcaggagaggctaaggatgccacaaagtag

SEQ ID NO: 8167 - protein, 140 aa, Thellungiella salsuginea
MAMSFSGAVLSGIGSSFHNGGAKQSSVGAVGFGRKTELVVVAQRKKSLIYAVKDDGNILDDINEATKKASDYVTEKTKEALKDGEKAKDYVVEKNVEAKDTAAEEAQKALDYVTEKGKEAGNKAAEFAEGKAGEAKDATK

SEQ ID NO: 8168 - DNA, 423 bp, Draba draboides
  CDS (1)..(423)
atggcgatgtctttctccggagctcttcttagtgggattggttcttctttccataccggaggagctaagcttaacggcattagcgccatcaaagttagccggaaaactgagcttgtcgtcggtgcacagcgcaagaagtcgttaatttacgccactaaagatgacggcaacatcctcgatgacctcaacgaagccacaaagaaagcttcggattatgtgaccgagaagacaaaggaggcgttgaaagatggcgagaaagcaaaagattacgtcgttgagaaaaacactgaagtcaaagataccgctgaggatgaagctaagaatgttttggattatgtgacggaaaaaggaaaagaagccggaaacaaagcggctgagttcgtagagggtaaagcaggagaggctaaggatgccacaaagtag

SEQ ID NO: 8169 - protein, 140 aa, Draba draboides
MAMSFSGALLSGIGSSFHTGGAKLNGISAIKVSRKTELVVGAQRKKSLIYATKDDGNILDDLNEATKKASDYVTEKTKEALKDGEKAKDYVVEKNTEVKDTAEDEAKNVLDYVTEKGKEAGNKAAEFVEGKAGEAKDATK

SEQ ID NO: 8170 - DNA, 423 bp, Draba alpina
  CDS (1)..(423)
atggcgatgtctttctccggagctcttcttagtgggattggttcttctttccataccggaggagctaagcttaacggcattagcgccatcaaagttagccggaaaactgagcttgtcgtcgttgcacagcgcaagaagtcgttaatttacgccactaaagatgacggcaacatcctcgatgacctcaacgaagccacaaagaaagcttcggattatgtgaccgagaagacaaaggaggcgttgaaagatggcgagaaagcaaaagattacgtcgttgagaaaaacactgaagtcaaagataccgctgaggatgaagctaagaatgttttggattatgtgacggaaaaaggaaaagaagccggaaacaaagcggctgagttcgtagagggtaaagcaggagaggctaaggatgccacaaagtag

SEQ ID NO: 8171 - protein, 140 aa, Draba alpina
MAMSFSGALLSGIGSSFHTGGAKLNGISAIKVSRKTELVVVAQRKKSLIYATKDDGNILDDLNEATKKASDYVTEKTKEALKDGEKAKDYVVEKNTEVKDTAEDEAKNVLDYVTEKGKEAGNKAAEFVEGKAGEAKDATK

SEQ ID NO: 8172 - DNA, 417 bp, Draba alpina
  CDS (1)..(417)
atggcgatgtctttctcaggagctcttctcagtgggattactacttcttaccacaccagaggagccaagcttagcagctttaacaccgttaaacttggccggaaaactgagctcgttgtcgtcgctcagcgcaagaagtcattgatctacgcaggtgatggcaacatccttgatgacctcaacgacgccacaaagaaagctacagaattcgtgacggacaagactaatgaggcaatgaaagatgacgagaaagcaaaagactacgttgttgagaaaaccggtgaatccacagatactgcaggggaggaagctaagaaagcttcggagcatgtgacggagaaaagcaaagaagccggaaactcggcggctgagttggcagaggataaatcaggagaggctaaggatgccacaaagtag

SEQ ID NO: 8173 - protein, 138 aa, Draba alpina
MAMSFSGALLSGITTSYHTRGAKLSSFNTVKLGRKTELVVVAQRKKSLIYAGDGNILDDLNDATKKATEFVTDKTNEAMKDDEKAKDYVVEKTGESTDTAGEEAKKASEHVTEKSKEAGNSAAELAEDKSGEAKDATK

SEQ ID NO: 8174 - DNA, 417 bp, Draba draboides
  CDS (1)..(417)
atggcgatgtctttctcaggagctcttctcagtgggattactacttcttaccacaccagaggagccaagcttagcagctttaacaccgttaaacttggccggaaaactgagctcgttgtcgtcgctcagcgcaagaagtcattgatctacgcaggtgatggcaacatccttgatgacctcaacgacgccacaaagaaagctacagaattcgtgacggacaagactaatgaggcaatgaaagatggcgagaaagcaaaagactacgttgttgagaaaaccggtgaatccacagatactgcaggggaggaagctaagaaagcttcggagcatgtgacggagaaaagcaaagaagccggaaactcggcggctgagttggcagaggataaatcaggagaggctaaggatgccacaaagtag

SEQ ID NO: 8175 - protein, 138 aa, Draba draboides
MAMSFSGALLSGITTSYHTRGAKLSSFNTVKLGRKTELVVVAQRKKSLIYAGDGNILDDLNDATKKATEFVTDKTNEAMKDGEKAKDYVVEKTGESTDTAGEEAKKASEHVTEKSKEAGNSAAELAEDKSGEAKDATK

SEQ ID NO: 8176 - DNA, 390 bp, Brassica rapa subsp. pekinensis
  CDS (1)..(390)
atggctatgtcactctcaggagctgttctcagtgggattaattcttctttccccagcggcgtagccaagcagagcggcgttggcgccgtcagatttggccggaaaactgagctcgttgtcgtcgctcagcgcaagaagtcgttgatctacgccgagaaaggtgatggaaacattctcgatgacatcaatgaggccacaaagagagcttcagattacgtgacagacaagacaaaggaggcgttgaaagatggagaggaagcaaaagactacgttgatgagaaaaacgttgaagccaaagacactgcattggatgaagctcagaaagttttggattatgtgaaggaaaaaggaaacgaagcaggagaggataaggacactacaaaggcatga

SEQ ID NO: 8177 - protein, 129 aa, Brassica rapa subsp. pekinensis
MAMSLSGAVLSGINSSFPSGVAKQSGVGAVRFGRKTELVVVAQRKKSLIYAEKGDGNILDDINEATKRASDYVTDKTKEALKDGEEAKDYVDEKNVEAKDTALDEAQKVLDYVKEKGNEAGEDKDTTKA

SEQ ID NO: 8178 - DNA, 420 bp, Arabidopsis thaliana
  CDS (1)..(420)
atgtctttatcaggagctgttctcagtggcatgggttcttctttccacaacgtaggagcaaagcagagtggtgttggtaccgtcagagttggccggaagagtgagctcgtcgtcgttgctcagcgcaagaagtcgttgatatacgccgttaaaagtgacggcaacatcctcgatgacctcaacgaagccacaaagaaagcttctgatttcgtgacggataagacgaaggaggccttggcggatggcgagaaaacaaaagactacattgttgagaaaaccattgaagccaatgaaactgcgactgaggaagctaagaaagctttggattatgtgactgagaaaggaaaagaagccggaaacaaggcggctgagttcgtagagggtaaagcagaagaggctaagaatgccacaaagtcctga

SEQ ID NO: 8179 - protein, 139 aa, Arabidopsis thaliana
MSLSGAVLSGMGSSFHNVGAKQSGVGTVRVGRKSELVVVAQRKKSLIYAVKSDGNILDDLNEATKKASDFVTDKTKEALADGEKTKDYIVEKTIEANETATEEAKKALDYVTEKGKEAGNKAAEFVEGKAEEAKNATKS

SEQ ID NO: 8180 - DNA, 429 bp, Brassica oleracea
  CDS (1)..(429)
atggctatgtcactctcaggatcagctgttctcagtgggattggttcttctttctccagcggcgcagccaagcagagcggcgttggcgccgtcggttttggccggaaaactgagttcgtcgtcgtcgctcagcgcaagaagtcgttgatctacgccgataaaggtgacggcaacattctggatgacctcaatgaagccacaaagagagcttcggattacgcgacggagaagacaaatgaggcgttgaaacatggcgaggaagcaaaagactacgttgttgataagaacgttgaagccaaagacactgcagtggatgaagctcagaaagctttggattatgtgaaggcaaaaggaaacgaagctgggaacaaagttgccgagtttgttgagggtaaagcaggagaggctaaggacgccacaaaagcatga

SEQ ID NO: 8181 - protein, 142 aa, Brassica oleracea
MAMSLSGSAVLSGIGSSFSSGAAKQSGVGAVGFGRKTEFVVVAQRKKSLIYADKGDGNILDDLNEATKRASDYATEKTNEALKHGEEAKDYVVDKNVEAKDTAVDEAQKALDYVKAKGNEAGNKVAEFVEGKAGEAKDATKA

SEQ ID NO: 8182 - DNA, 390 bp, Brassica rapa subsp. chinensis
  CDS (1)..(390)
atggcgatgtctttctcaggagctgttctcagtgggattaattcttctttccccagcggcgtagccaagcagagcggcgttggcgccgtcagatttggccggaaaactgagctcgttgtcgtcgctcagcgcaagaagtcgttgatctacgccgagaaaggtgatggaaacattctcgatgacatcaatgaggccacaaagagagcttcagattacgtgacagacaagacaaaggaggcgttgaaagatggagagaaagcaaaagactacgttgatgagaaaaacgttgaagccaaagacactgcattggatgaagctcagaaagttttggattatgtgaaggaaaaaggaaacgaagcaggagaggctaaggacactacaaaggcatga

SEQ ID NO: 8183 - protein, 129 aa, Brassica rapa subsp. chinensis
MAMSFSGAVLSGINSSFPSGVAKQSGVGAVRFGRKTELVVVAQRKKSLIYAEKGDGNILDDINEATKRASDYVTDKTKEALKDGEKAKDYVDEKNVEAKDTALDEAQKVLDYVKEKGNEAGEAKDTTKA

SEQ ID NO: 8184 - DNA, 408 bp, Brassica napus
  CDS (1)..(408)
atggcgatgtcattctcaggagctgttctcagtgggattaattcttctttccccagcggcgtagccaagaagagcggcgtagccaagcagagcggcgttggcgccgtcagatttggccggaaaactgagctcgttgtcgtcgctcagcgcaagaagtcgttgatctacgccgagaaaggtgatggaaacattctcgatgacatcaatgaggccacaaagagagcttcagattacgtgacagacaagacaaaggaggcgttgaaagatggagagaaagcaaaagactacgttgatgagaaaaacgttgaagccaaagacactgcattggatgaagctcagaaagttttggattatgtgaaggaaaaaggaaacgaagcaggagaggataaggacactacaaaggcatga

SEQ ID NO: 8185 - protein, 135 aa, Brassica napus
MAMSFSGAVLSGINSSFPSGVAKKSGVAKQSGVGAVRFGRKTELVVVAQRKKSLIYAEKGDGNILDDINEATKRASDYVTDKTKEALKDGEKAKDYVDEKNVEAKDTALDEAQKVLDYVKEKGNEAGEDKDTTKA

SEQ ID NO: 8186 - DNA, 429 bp, Brassica napus
  CDS (1)..(429)
atggctatgtcactctcaggatcagctgttctcagtgggattggttcttctttctccagcggcgcagccaagcagagcggcgttggcgccgtcggttttggccggaaaactgagttcgtcgtcgtcgctcagcgcaagaagtcgttgatctacgccgataaaggtgacggcaacattctggatgacctcaatgaagccacaaagagagcttcggattacgcgacggagaagacaaatgaggcgttgaaacatggcgaggaagcaaaagactacgttgttgataagaacgttgaagacaaagacactgcagtggatgaagctcagaaagctttggattatgtgaaggcaaaaggaaacgaagctgggaacaaagttgccgagtttgttgagggtaaagcaggagaggctaaggacgccacaaaagcatga

SEQ ID NO: 8187 - protein, 142 aa, Brassica napus
MAMSLSGSAVLSGIGSSFSSGAAKQSGVGAVGFGRKTEFVVVAQRKKSLIYADKGDGNILDDLNEATKRASDYATEKTNEALKHGEEAKDYVVDKNVEDKDTAVDEAQKALDYVKAKGNEAGNKVAEFVEGKAGEAKDATKA

SEQ ID NO: 8188 - DNA, 429 bp, Brassica napus
  CDS (1)..(429)
atggctatgtcactctcaggatcagctgttctcattgggattggttcttctttctccagcggcatagccaagcagagcggcgttggcgccgtcggttttggccggaaaactgagctcgtcgtcgtcgctcagcgcaagaagtcgttgatctacgccgataaaggtgacggcaacattctggatgacctcaatgaagccacaaagagagcttcggattacgcgacggagaagacaaaggaggcgttgaaaaatggcgagaaagcaaaagactacgttgttgataagaacgttgaagccaaagacactgcagtggatgaagctcagaaagctttggattatgtgaaggcaaaaggaaacgaagctgggaacaaagttgccgagtttgttgagggtaaagcaggagaggctaaggacgccacaaaagcatga

SEQ ID NO: 8189 - protein, 142 aa, Brassica napus
MAMSLSGSAVLIGIGSSFSSGIAKQSGVGAVGFGRKTELVVVAQRKKSLIYADKGDGNILDDLNEATKRASDYATEKTKEALKNGEKAKDYVVDKNVEAKDTAVDEAQKALDYVKAKGNEAGNKVAEFVEGKAGEAKDATKA

SEQ ID NO: 8190 - DNA, 420 bp, Capsella bursa-pastoris
  CDS (1)..(420)
atgtctttctcaggagctgttctcatgagtggcatgggttcttctttccacagcggagtaaccaagcagagtagcgttggcgccgtcggagttggccggaagagtgaactcgtcgtcgttgctcagcgcaagaagtcgttgatatacgccgtcaaaggtgacggcaacatcctcgatgaccttaacgaagccacaaagaaagcttcggatttcatgacggagaagacaaaggaagctttggtggatggtgagaaagcaaaagactacgttgttgagaaaaccatcgaagccaatgatacggcgacagaggaagcaaagaaagcttttgattatgtgacagagaaaggcaaagaagccggaaacaaggcggctgagttcgtagagggtaaagctggagaggctaaggatgccaccaagtag

SEQ ID NO: 8191 - protein, 139 aa, Capsella bursa-pastoris
MSFSGAVLMSGMGSSFHSGVTKQSSVGAVGVGRKSELVVVAQRKKSLIYAVKGDGNILDDLNEATKKASDFMTEKTKEALVDGEKAKDYVVEKTIEANDTATEEAKKAFDYVTEKGKEAGNKAAEFVEGKAGEAKDATK

SEQ ID NO: 8192 - DNA, 390 bp, Brassica napus
  CDS (1)..(390)
atggcgatgtcattctcaggagctgttctcagtgggattaattcttctttccccagcggcgtagccaagcagagcggcgttggcgccgtcagatttggccggaaaactgagctcgttgtcgtcgctcagcgcaagaagtcgttgatctacgccgagaaaggtgatggaaacattctcgatgacatcaatgaggccacaaagagagcttcagattacgtgacagacaagacaaaggaggcgttgaaagatggagagaaagcaaaagactacgttgatgagaaaaacgctgaagccaaagacactgcattggatgaaactcagaaagttttggattatgtgaaggaaaaaggaaacgaagcaggagaggctaaggacaccacaaaggcatga

SEQ ID NO: 8193 - protein, 129 aa, Brassica napus
MAMSFSGAVLSGINSSFPSGVAKQSGVGAVRFGRKTELVVVAQRKKSLIYAEKGDGNILDDINEATKRASDYVTDKTKEALKDGEKAKDYVDEKNAEAKDTALDETQKVLDYVKEKGNEAGEAKDTTKA

SEQ ID NO: 8194 - DNA, 426 bp, Chorispora bungeana
  CDS (1)..(426)
atggcgatgtctttctcaggagctactgttctcagtgggattggttctactttccaaagcggaggagtcaagacaccaagcgttggcttcgtcggagttggcaagaaacttgagttcgtcgccgtctctcagcgcaagaagtcgtcgttgatctacgccgagaaagatggcaacatcctcgatgaccttaacgaagccacaaagaaagcttcggatttcgcgacggagaagacaaaagaattgttgaaagatggtgaaaaagcaaaagattacgttgatgagaaaaactctgaaaatacagagaaagcggttgaggaaggtaaaaaagcatccgagtacgtgcaggagaaactgaaggaagccggaaacagcgcggctgagttcgtagagggtaaagctggagaggctaaggacgccacaaagtag

SEQ ID NO: 8195 - protein, 141 aa, Chorispora bungeana
MAMSFSGATVLSGIGSTFQSGGVKTPSVGFVGVGKKLEFVAVSQRKKSSLIYAEKDGNILDDLNEATKKASDFATEKTKELLKDGEKAKDYVDEKNSENTEKAVEEGKKASEYVQEKLKEAGNSAAEFVEGKAGEAKDATK

SEQ ID NO: 8196 - DNA, 420 bp, Arabis pumila
  CDS (1)..(420)
atggcgatgtctttctcaggagctgttctcactggcatgggttcttctttccacagtggagccaagcagaccagcattggtgctgtcggagttagccggaagactcaattcgtcgtcgtctctcagcgcaagaagtcgttgttctacgccgctaaaggtgatgggaacatcctcgatgacctcaacgaggccacaaagaaagcttcagatttcgtgacggataaaacaaaagaggcgttagcagatggcgagaaagcaaaggactacgttgttgagaaaacaagtgaaaacacagacacattgactaaagaagctgagaaagcttcggagtatgtgtcggagaaaggcaaagaagccgcaaacagcgcggctgagttcgctgagggtaaagctggagaggctaaggatgccacaaagtag

SEQ ID NO: 8197 - protein, 139 aa, Arabis pumila
MAMSFSGAVLTGMGSSFHSGAKQTSIGAVGVSRKTQFVVVSQRKKSLFYAAKGDGNILDDLNEATKKASDFVTDKTKEALADGEKAKDYVVEKTSENTDTLTKEAEKASEYVSEKGKEAANSAAEFAEGKAGEAKDATK

SEQ ID NO: 8198 - DNA, 579 bp, Brassica napus
  CDS (1)..(579)
atgtcgatgtctatttctggagctatgcttagtggggtgggctcttcgttattgatcaacggaagcaagagaagcggcggcgtaggcggtggatctatgagtgttggccggaagaatgcgaccattacaccgcagagaaacaagtcatgggtcctagccgccgtgaaaggtgatggaaaatcaaagaacgaccccaaatggctagatgatgcctcacagaaagctggcgagttcgtgaaggacatggggagtgaagtggggcacgtgactgctcagaaaggacaagaagttaaagatcatatagagagtgcaagaaactatattgttgagaaagctggtgaagcgatggacacggtggctgaaaatgctaagaaagcttctgagtttgtgacggataaaggcaaagagaccaaggaagaaactgttttaataactgaaaaggctaaagatttcattgttgaaaaagctggtgaagccaaagattcggcgacggatatgcgcaagaaaacggctaagtacgttggagataaagcagcagaggctaaagaagctatatttcctccaaaaaccgaagaatag

SEQ ID NO: 8199 - protein, 192 aa, Brassica napus
MSMSISGAMLSGVGSSLLINGSKRSGGVGGGSMSVGRKNATITPQRNKSWVLAAVKGDGKSKNDPKWLDDASQKAGEFVKDMGSEVGHVTAQKGQEVKDHIESARNYIVEKAGEAMDTVAENAKKASEFVTDKGKETKEETVLITEKAKDFIVEKAGEAKDSATDMRKKTAKYVGDKAAEAKEAIFPPKTEE

SEQ ID NO: 8200 - DNA, 20 bp, Artificial sequence
  primer
atggcttcttctttccacag

SEQ ID NO: 8201 - DNA, 20 bp, Artificial sequence
  primer
ctactttgtggcatccttag

SEQ ID NO: 8202 - protein, 169 aa, Artificial sequence
  consensus sequence
  Variant (3)..(3): Xaa in position 3 is any amino acid
  Variant (6)..(7): Xaa in position 6 to 7 is any amino acid
  Variant (8)..(8): Xaa in position 8 is any or no amino acid
  Variant (10)..(10): Xaa in position 10 is any amino acid
  Variant (12)..(13): Xaa in position 12 to 13 is any amino acid
  Variant (17)..(18): Xaa in position 17 to 18 is any amino acid
  Variant (19)..(24): Xaa in position 19 to 24 is any or no amino acid
  Variant (26)..(26): Xaa in position 26 is any amino acid
  Variant (29)..(32): Xaa in position 29 to 32 is any amino acid
  Variant (34)..(34): Xaa in position 34 is any amino acid
  Variant (35)..(36): Xaa in position 35 to 36 is any or no amino acid
  Variant (38)..(39): Xaa in position 38 to 39 is any amino acid
  Variant (41)..(41): Xaa in position 41 is any amino acid
  Variant (43)..(44): Xaa in position 43 to 44 is any amino acid
  Variant (45)..(45): Xaa in position 45 is any or no amino acid
  Variant (49)..(49): Xaa in position 49 is any amino acid
  Variant (55)..(55): Xaa in position 55 is any amino acid
  Variant (60)..(60): Xaa in position 60 is any amino acid
  Variant (62)..(62): Xaa in position 62 is any amino acid
  Variant (70)..(70): Xaa in position 70 is any amino acid
  Variant (71)..(73): Xaa in position 71 to 73 is any or no amino acid
  Variant (79)..(79): Xaa in position 79 is any amino acid
  Variant (83)..(84): Xaa in position 83 to 84 is any amino acid
  Variant (86)..(86): Xaa in position 86 is any amino acid
  Variant (89)..(89): Xaa in position 89 is any amino acid
  Variant (92)..(95): Xaa in position 92 to 95 is any amino acid
  Variant (97)..(97): Xaa in position 97 is any amino acid
  Variant (100)..(106): Xaa in position 100 to 106 is any amino acid
  Variant (114)..(114): Xaa in position 114 is any amino acid
  Variant (117)..(118): Xaa in position 117 to 118 is any amino acid
  Variant (120)..(121): Xaa in position 120 to 121 is any amino acid
  Variant (124)..(126): Xaa in position 124 to 126 is any amino acid
  Variant (129)..(129): Xaa in position 129 is any amino acid
  Variant (131)..(133): Xaa in position 131 to 133 is any amino acid
  Variant (136)..(136): Xaa in position 136 is any amino acid
  Variant (140)..(140): Xaa in position 140 is any amino acid
  Variant (143)..(143): Xaa in position 143 is any amino acid
  Variant (144)..(159): Xaa in position 144 to 159 is any or no amino acid
  Variant (161)..(162): Xaa in position 161 to 162 is any amino acid
  Variant (167)..(167): Xaa in position 167 is any amino acid
MSXSGXXXLXGXXSSFXXXXXXXXGXAKXXXXGXXXVXXGXKXXXVVVXQRKKSXLIYAXKXDGNILDDXXXXNEATKXASDXXTXKTXEAXXXXLXDGXXXXXXXEKAKDYVXEKXXEXXDTXXXEAXKXXXYVXEKGXEAXXXXXXXXXXXXXXXXXKXXEAKDXTK

SEQ ID NO: 8203 - protein, 30 aa, Artificial sequence
  protein pattern
  Variant (8)..(8): Xaa in position 8 is Ile or Leu
  Variant (14)..(14): Xaa in position 14 is Lys or Arg
  Variant (18)..(18): Xaa in position 18 is Phe or Tyr
  Variant (19)..(19): Xaa in position 19 is Ala or Val
  Variant (21)..(21): Xaa in position 21 is Asp or Glu
  Variant (24)..(27): Xaa in position 24 to 27 is any or no amino acid
  Variant (29)..(29): Xaa in position 29 is Asp, Glu or His
  Variant (30)..(30): Xaa in position 30 is Ala or Gly
DGNILDDXNEATKXASDXXTXKTXXXXKXX

SEQ ID NO: 8204 - protein, 12 aa, Artificial sequence
  protein pattern
  Variant (3)..(3): Xaa in position 3 is Gly or Val
  Variant (4)..(4): Xaa in position 4 is Ala or Ser
VVXXQRKKSLIY

SEQ ID NO: 8205 - protein, 32 aa, Artificial sequence
  protein pattern
  Variant (2)..(2): Xaa in position 2 is Ile or Val
  Variant (3)..(3): Xaa in position 3 is Asp or Val
  Variant (4)..(4): Xaa in position 4 is Asp or Glu
  Variant (6)..(6): Xaa in position 6 is Asn or Thr
  Variant (7)..(7): Xaa in position 7 is any amino acid
  Variant (9)..(9): Xaa in position 9 is Ala, Asp, Asn, Ser, Thr or Val
  Variant (10)..(10): Xaa in position 10 is any amino acid
  Variant (11)..(11): Xaa in position 11 is Asp or Glu
  Variant (13)..(13): Xaa in position 13 is Ala or Leu
  Variant (14)..(14): Xaa in position 14 is any amino acid
  Variant (15)..(15): Xaa in position 15 is Asp, Glu or Lys
  Variant (18)..(18): Xaa in position 18 is any or no amino acid
  Variant (20)..(23): Xaa in position 20 to 23 is any amino acid
  Variant (24)..(24): Xaa in position 24 is any or no amino acid
  Variant (26)..(26): Xaa in position 26 is any amino acid
  Variant (27)..(27): Xaa in position 27 is Ala or Glu
  Variant (29)..(29): Xaa in position 29 is Gly or Ser
  Variant (30)..(30): Xaa in position 30 is any amino acid
YXXXKXXEXXXTXXXEAXKXXXXXVXXKXXEA

SEQ ID NO: 8206 - DNA, 1407 bp, Arabidopsis thaliana
  CDS (1)..(1407)
atgggaacggtttgcgaatctgtagcgacggcgaaatcttcgacggcggtgatgagctccattccgccttttctgagcaaaacgtacgatatggttgacgatccattgacggacgacgtggtgtcttggagcagcggaaacaacagcttcgtggtttggaacgtgcctgagttcgccaaacagtttctaccaaagtatttcaagcacaacaatttctccagcttcgtcagacagctcaatacttatggttttagaaaagttgatccagaccgctgggagtttgcaaacgagggctttttaagaggccaaaagcaaatactaaagagtattgtccggcgaaaacctgcacaagtgcagcctccacaacaacctcaagttcagcactcatctgtgggtgcgtgcgttgaagtgggcaaatttggactcgaagaggaagtggaaagacttcagcgcgataagaacgtccttatgcaggaacttgtaaggttgaggcagcaacaacaagttaccgaacatcatctgcagaatgtggggcagaaagttcatgtgatggagcagaggcagcaacagatgatgtcctttctagcaaaggctgtccaaagtccaggtttcttaaaccaattttctcagcagagtaatgaagcaaaccaacacatttctgaaagcaacaaaaagaggaggctacctgttgaggaccagatgaattctggcagtcatggggttaatggtcttagccgccagattgtgagatatcagtcatcgatgaacgatgcaacaaacactatgcttcaacagatacagcagatgagtaatgcacctagccatgaatctctctcaagcaataatggtagctttcttttgggcgatgttccaaattctaacatttcagacaatgggagctcctcaaatggatcacctgaagttacattggcagatgtttcatccattcctgcaggcttctatcctgcaatgaagtaccacgagccttgtgaaacaaatcaagtcatggagaccaatttgcctttttctcaaggtgatctcttacctccaacgcaaggagcagcagcttctgggagctcaagttcggatcttgttggatgcgagacagataatggagagtgtttggatccaataatggctgttttggatggcgcactcgaactagaagctgataccttaaatgagttgcttcctgaagtccaagattctttttgggaacagttcattggtgagagcccagtgattggtgagacagatgagttaatctcaggatcagtggaaaatgaactgatattggagcaactagagttacaatcaaccctgagtaatgtgtggagcaagaatcaacaaatgaaccatcttactgaacagatgggacttctcacatcagatgctctcagaaaatga

SEQ ID NO: 8207 - protein, 468 aa, Arabidopsis thaliana
MGTVCESVATAKSSTAVMSSIPPFLSKTYDMVDDPLTDDVVSWSSGNNSFVVWNVPEFAKQFLPKYFKHNNFSSFVRQLNTYGFRKVDPDRWEFANEGFLRGQKQILKSIVRRKPAQVQPPQQPQVQHSSVGACVEVGKFGLEEEVERLQRDKNVLMQELVRLRQQQQVTEHHLQNVGQKVHVMEQRQQQMMSFLAKAVQSPGFLNQFSQQSNEANQHISESNKKRRLPVEDQMNSGSHGVNGLSRQIVRYQSSMNDATNTMLQQIQQMSNAPSHESLSSNNGSFLLGDVPNSNISDNGSSSNGSPEVTLADVSSIPAGFYPAMKYHEPCETNQVMETNLPFSQGDLLPPTQGAAASGSSSSDLVGCETDNGECLDPIMAVLDGALELEADTLNELLPEVQDSFWEQFIGESPVIGETDELISGSVENELILEQLELQSTLSNVWSKNQQMNHLTEQMGLLTSDALRK

SEQ ID NO: 8208 - DNA, 1407 bp, Arabidopsis thaliana; identical to SEQ ID NO: 8206
  CDS (52)..(1407)

SEQ ID NO: 8209 - protein, 451 aa, Arabidopsis thaliana
MSSIPPFLSKTYDMVDDPLTDDVVSWSSGNNSFVVWNVPEFAKQFLPKYFKHNNFSSFVRQLNTYGFRKVDPDRWEFANEGFLRGQKQILKSIVRRKPAQVQPPQQPQVQHSSVGACVEVGKFGLEEEVERLQRDKNVLMQELVRLRQQQQVTEHHLQNVGQKVHVMEQRQQQMMSFLAKAVQSPGFLNQFSQQSNEANQHISESNKKRRLPVEDQMNSGSHGVNGLSRQIVRYQSSMNDATNTMLQQIQQMSNAPSHESLSSNNGSFLLGDVPNSNISDNGSSSNGSPEVTLADVSSIPAGFYPAMKYHEPCETNQVMETNLPFSQGDLLPPTQGAAASGSSSSDLVGCETDNGECLDPIMAVLDGALELEADTLNELLPEVQDSFWEQFIGESPVIGETDELISGSVENELILEQLELQSTLSNVWSKNQQMNHLTEQMGLLTSDALRK

SEQ ID NO: 8210 - DNA, 1407 bp, Arabidopsis thaliana
  CDS (1)..(1407)
atgggaacggtttgcgaatctgtagcgacggcgaaatcttcgacggcggtgatgagctccattccgccttttctgagcaaaacgtacgatatggttgacgatccattgacggacgacgtggtgtcttggagcagcggaaacaacagcttcgtggtttggaacgtgcctgagttcgccaaacagtttctaccaaagtatttcaatcacaacaatttctccagcttcgtcagacagctcaatacttatggttttagaaaagttgatccagaccgctgggagtttgcaaacgagggctttttaagaggccaaaagcaaatactaaagagtattgtccggcgaaaacctgcacaagtgcagcctccacaacaacctcaagttcagcactcatctgtgggtgcgtgcgttgaagtgggcaaatttggactcgaagaggaagtggaaagacttcagcgcgataagaacgtccttatgcaggaacttgtaaggttgaggcagcaacaacaagttaccgaacatcatctgcagaatgtggggcagaaagttcatgtgatggagcagaggcagcaacagatgatgtcctttctagcaaaggctgtccaaagtccaggtttcttaaaccaattttctcagcagagtaatgaagcaaaccaacacatttctgaaagcaacaaaaagaggaggctacctgttgaggaccagatgaattctggcagtcatggggttaatggtcttagccgccagattgtgagatatcagtcatcgatgaacgatgcaacaaacactatgcttcaacagatacagcagatgagtaatgcacctagccatgaatctctctcaagcaataatggtagctttcttttgggcgatgttccaaattctaacatttcagacaatgggagctcctcaaatggatcacctgaagttacattggcagatgtttcatccattcctgcaggcttctatcctgcaatgaagtaccacgagccttgtgaaacaaatcaagtcatggagaccaatttgcctttttctcaaggtgatctcttacctccaacgcaaggagcagcagcttctgggagctcaagttcggatcttgttggatgcgagacagataatggagagtgtttggatccaataatggctgttttggatggcgcactcgaactagaagctgataccttaaatgagttgcttcctgaagtccaagattctttttgggaacagttcattggtgagagcccagtgattggtgagacagatgagttaatctcaggatcagtggaaaatgaactgatattggagcaactagagttacaatcaaccctgagtaatgtgtggagcaagaatcaacaaatgaaccatcttactgaacagatgggacttctcacatcagatgctctcagaaaatga

SEQ ID NO: 8211 - protein, 468 aa, Arabidopsis thaliana
MGTVCESVATAKSSTAVMSSIPPFLSKTYDMVDDPLTDDVVSWSSGNNSFVVWNVPEFAKQFLPKYFNHNNFSSFVRQLNTYGFRKVDPDRWEFANEGFLRGQKQILKSIVRRKPAQVQPPQQPQVQHSSVGACVEVGKFGLEEEVERLQRDKNVLMQELVRLRQQQQVTEHHLQNVGQKVHVMEQRQQQMMSFLAKAVQSPGFLNQFSQQSNEANQHISESNKKRRLPVEDQMNSGSHGVNGLSRQIVRYQSSMNDATNTMLQQIQQMSNAPSHESLSSNNGSFLLGDVPNSNISDNGSSSNGSPEVTLADVSSIPAGFYPAMKYHEPCETNQVMETNLPFSQGDLLPPTQGAAASGSSSSDLVGCETDNGECLDPIMAVLDGALELEADTLNELLPEVQDSFWEQFIGESPVIGETDELISGSVENELILEQLELQSTLSNVWSKNQQMNHLTEQMGLLTSDALRK

SEQ ID NO: 8212 - DNA, 1521 bp, Oryza sativa
  CDS (1)..(1521)
atggaggccgccgttgctgctgcggctgcggccgccggggcggtgacgacggcggtcgcgcctccgcccggcgcggcggtcagcaacggggtggcgaccgcgccgccgccgttcctgatgaagacgtacgagatggtggacgacccggccaccgatgccgtcgtctcatggggccccgggaacaacagcttcgttgtgtggaacacccccgagttcgcgcgcgacctcctccccaagtacttcaagcacagcaacttctcctccttcgtcaggcagctcaacacctacggatttaggaaagttgatccagataggtgggagtttgcaaacgaaggttttcttagaggacaaaagcatctactgaagaccatcaacagaaggaaaccaactcatggaaacaaccaagttcagcagcctcagttgccagctgctcctgtacctgcttgcgtagaagtggggaagtttgggatggaagaagagattgagatgctcaaaagggataaaaatgttttaatgcaggaacttgtcaggctgagacaacaacagcagacaacagatcatcagctgcagactttgggcaagcgtcttcaaggaatggagcaacggcaacaacaaatgatgtctttcctggctaaggcaatgcatagtcctggcttcctagcacaatttgtacagcaaaacgaaaacagcagaagaagaatagttgctagtaacaaaaagaggaggctaccaaagcaggatggttcgttggactctgaaagtgcttcattggatggacaaatagtaaaatatcaacctatgatcaatgaagcagccaaagcgatgctaaggaagatcctaaagctagattcttcacatagatttgaatccatgggcaattcagataatttccttcttgagaattatatgccaaatggtcaaggtcttgacagctcttcatcaactcggaattctggtgttacccttgcagaggtcccagctaactcaggtttgccatatgtagctacaagctctggactttcagctatttgttcaacttcgactcctcagattcagtgcccagttgttttggacaacggcatacccaaagaagttccaaacatgagtgcggtgccttctgttccgaaggctgtggctccaggcccaactgatatcaatattctggaattcccagatttgcaagatatagtagctgaagaaaatgttgatattcctggagggggctttgaaatgcctggtcctgagggtgtattctctttgcctgaagaaggtgatgatagtgttcccattgagactgatgagattttgtacaacgatgacacccagaaacttcctgctatcattgattctttctgggaacagttcctggtggctagccctctatctgttgataatgatgaagtcgattcaggtgtactagaccaaaaggaaacacaacaggggaatggatggaccaaagctgaaaacatggctaaccttacagaacagatgggcctcctgtcatcacaccatacaggatga

SEQ ID NO: 8213 - protein, 506 aa, Oryza sativa
MEAAVAAAAAAAGAVTTAVAPPPGAAVSNGVATAPPPFLMKTYEMVDDPATDAVVSWGPGNNSFVVWNTPEFARDLLPKYFKHSNFSSFVRQLNTYGFRKVDPDRWEFANEGFLRGQKHLLKTINRRKPTHGNNQVQQPQLPAAPVPACVEVGKFGMEEEIEMLKRDKNVLMQELVRLRQQQQTTDHQLQTLGKRLQGMEQRQQQMMSFLAKAMHSPGFLAQFVQQNENSRRRIVASNKKRRLPKQDGSLDSESASLDGQIVKYQPMINEAAKAMLRKILKLDSSHRFESMGNSDNFLLENYMPNGQGLDSSSSTRNSGVTLAEVPANSGLPYVATSSGLSAICSTSTPQIQCPVVLDNGIPKEVPNMSAVPSVPKAVAPGPTDINILEFPDLQDIVAEENVDIPGGGFEMPGPEGVFSLPEEGDDSVPIETDEILYNDDTQKLPAIIDSFWEQFLVASPLSVDNDEVDSGVLDQKETQQGNGWTKAENMANLTEQMGLLSSHHTG

SEQ ID NO: 8214 - DNA, 1329 bp, Glycine max
  CDS (1)..(1329)
atggagggagcatcgaggaatggtagtgtttgtgtggcaccgtttctgagcaagacatacgacatggtcgatgatccttccaccgactcggtggtgtcgtggggcaaaaacaacaacaccttcgttgtttggaacgttccccaattcaccacagacatcttgcccaaacattttaagcacaacaacttctccagcttcgtcagacagttgaatacttatggtttcagaaaggttgacccagatcgatgggaatttgcaaatgaaggatttttaagaggtgaaaaacaacttttaaaaagtatcagtaggcggaaatctgctcatgtaaatggtagtcaacaaccatctcaagtgcataaatcagctgttagagcatgtgttgaagtggggaaatttgggtttgaggaagaggtggaaagactgaaaagggataagaatgttcttatgcaggaacttgttaggttgagacagaaacagcaagggactgataaccaattgaaaaatgttgggcaacgtgtgcagtcaatggagcagcgtcagcagcaaatgatgtcattcctggcaaaggctatgcagagcccatgcttcatagctcaatttgttcagcagcagaatgaaagtagtaaacatatccctgggagcaataaaaagaggaggctccagcgacaagaagaagatagtttagccaccaaggatctccatagttctcttgaaggacacactgtcaagtatcagagttccataaatgaggctgcaaaagcattatttctccagatattgcaaataaacaattctacaacacaatcatcaattaagagccctgatgttttccttattgatgatgttccttctgccattgcatcagatagcagtagttcatccactcaggtttctaatgtgatggttccacctatatctgagctgacatctatggaagtaggatcacagtttcctctcaattggatggagacagaaagcagtttattgaatcatgatctgaatgttatgggggctgatactaggaacatgggggagatagatatgatgtcaactgttttagatgaggcagatgaagctaatcatttttcacctgacacagatggaatttctaaactcccagaaatcagtgatgaattctgggaacttcttttaaggccaagcccacttacagaaggcacagaggaaactaaatgtagctctctaggatgtggtttgactgatgatcagggtttgccttcagaaatggaaaataagcaggaaaattttgataagatactacatgttgaccatcttactcaacagatgggactacatgcattggattactaa

SEQ ID NO: 8215 - protein, 442 aa, Glycine max
MEGASRNGSVCVAPFLSKTYDMVDDPSTDSVVSWGKNNNTFVVWNVPQFTTDILPKHFKHNNFSSFVRQLNTYGFRKVDPDRWEFANEGFLRGEKQLLKSISRRKSAHVNGSQQPSQVHKSAVRACVEVGKFGFEEEVERLKRDKNVLMQELVRLRQKQQGTDNQLKNVGQRVQSMEQRQQQMMSFLAKAMQSPCFIAQFVQQQNESSKHIPGSNKKRRLQRQEEDSLATKDLHSSLEGHTVKYQSSINEAAKALFLQILQINNSTTQSSIKSPDVFLIDDVPSAIASDSSSSSTQVSNVMVPPISELTSMEVGSQFPLNWMETESSLLNHDLNVMGADTRNMGEIDMMSTVLDEADEANHFSPDTDGISKLPEISDEFWELLLRPSPLTEGTEETKCSSLGCGLTDDQGLPSEMENKQENFDKILHVDHLTQQMGLHALDY

SEQ ID NO: 8216 - DNA, 1395 bp, Glycine max
  CDS (1)..(1395)
atggagggagcatcgtggaatagtagtgtttgtgtggcaccgtttctgagcaagacctacgacatggttgatgatccttccaccgacttagtggtgtcgtggggcgaaaacaacaactcctttgttgtttggaacgttccccaattcgccacagacatcttgcccaatcattttaagcacaacaacttctccagcttcgtcagacagttgaatacttatggttttagaaaggttgacccagatcgatgggaatttgcaaatgaaggatttttaagaggtgaaaaacaacttttaaaaagtatcagtaggcggaaatctgctcatgtaaatggtagtcaacaagcatctcaagtgcataaatcagctgctggagcatgtgttgaagtggggaaatttgggcttgaggaagaggtggaaagactgaaaagggataagaatgttcttatgcaggaacttgttaggttgagacagaaacagcaagggactgataaccaattgcaaaatgttgggcaacgtgtgcagtcaatggagcagcgtcagcagcaaatgatgtcattcctggctaaggccatgcagagcccaggcttcttagctcaatttgttcagcagcagaatgaaagtagtaaacatatccctgggagcaataaaaagaggaggctccagcgacaagaagaagatagtttagccaccaaggatctccatagttctcttgatggacacattgtcaagtaccagagttccataaatgaggctgcaaaagcattatttcgccagatattgcaaataaacaattctacaacacaatcatcaattaagaaccctgatgttttccttattgatgatattccttctgccattgcatcagatagcagtagttcatccactcaggtttctaatgtgatggttccacctatatctgagctgacgtctatggaagtaggatcacagtttcctctcagttgtatgcccagtaacatatctgaggtgcagtcttcacctgctgttttgggtttctgtagaagtcaggggatggagacagaaagcagtttattgaatcatgagctgaatgttatgggggctgatactaggaacatgggggagatagatatgatgtcaactgttttagatgaggcagacgaagctgatcatttttcacctgacacagatggaatttctaaactcccagaaatcagtgatgaattctgggaactgtttttaaggccaagcccacttacagaagacacagaggaaactaaatgtagctctctaggatgtggtttgactgaagatcagggtttgccttcagaaatgggaaataagcaggaaaattttgatacaatacaacatgttgactgtcttactcaacagatgggacttcatgcattggagtactga

SEQ ID NO: 8217 - protein, 464 aa, Glycine max
MEGASWNSSVCVAPFLSKTYDMVDDPSTDLVVSWGENNNSFVVWNVPQFATDILPNHFKHNNFSSFVRQLNTYGFRKVDPDRWEFANEGFLRGEKQLLKSISRRKSAHVNGSQQASQVHKSAAGACVEVGKFGLEEEVERLKRDKNVLMQELVRLRQKQQGTDNQLQNVGQRVQSMEQRQQQMMSFLAKAMQSPGFLAQFVQQQNESSKHIPGSNKKRRLQRQEEDSLATKDLHSSLDGHIVKYQSSINEAAKALFRQILQINNSTTQSSIKNPDVFLIDDIPSAIASDSSSSSTQVSNVMVPPISELTSMEVGSQFPLSCMPSNISEVQSSPAVLGFCRSQGMETESSLLNHELNVMGADTRNMGEIDMMSTVLDEADEADHFSPDTDGISKLPEISDEFWELFLRPSPLTEDTEETKCSSLGCGLTEDQGLPSEMGNKQENFDTIQHVDCLTQQMGLHALEY

SEQ ID NO: 8218 - DNA, 1533 bp, Glycine max
  CDS (1)..(1533)
atggacggaagagcgagcagcagcgtgggcggagaagcatcgccagctccagcaccggtgccgataacgaatgcgaacgcgccgccgcctttcttgagcaagacatacgagatggtagaggacccttcgacggactcgatagtgtcgtggagtccaacgaacaacagtttcgtggtttggaaccctcccgagttcgccagagatctcttgcccaaacacttcaagcacaacaacttctccagcttcgttcgccaattaaacacctacggatttaggaaggtagatccagatcgctgggaatttgcaaatgagggatttttgaggggtcaaaagcacttgcttaagactataactcggcggaaacctgcccatggtcataatcaacaggcacagcaagcacatggacagagttcatctgttggggcttgtgttgaagttgggaagtttggacttgaggaagaggttgagattctcaagagagataagaatgtgctcatgcaagagcttgtgagattgaggcagcagcaacaggctactgataaccagctgcagagtatggttcagcgccttcaaggaatggagcaacgacagcaacaaatgatgtcattccttgcaaaggctgttcagagtcctggttttttagctcaatttgtacaacagcaaaatgagagtagtagacgcataacggaggcaaataaaaaacgccggcttaagcaggagggtattggtgaaatggaacatactgctgcttctgatggccaaattgttaaatatcaacctctgataaatgaagcagcaaaagcaatgctgaggcaaatgatgaaattggatacttctcgactagaatcttttagtaataacgctgataattacttgattggtgatcattcatcatcatccggtgcaacggacaggggaaactctttgagccggacttctggagtaacacttcaagtggtccctctgactacaatccagtcttctcacattccatctgcaacagggataggggatgacccttcaacaggaaaatctgagattctatctactcctcaagttgtagcctgtgatgaagttacgaaagctcagtactctaatgtaaatgtttcggttggagaatctaatgcacctgctatccctgttactcaaacagatgaaatcatgcgggacctctctacaataccagacatagtggcaggaaatattcttgatattcctcaagaaaattatatggcacctgagacaggcggtgaaggatatatggatcctacttcatttggagtgaatgtgtcattgcccattgattttgatagtatttcacctgaagcagacattgatgatttgttgaacaatcctcacttttgggatgatattttgcgaactccagtgtcagaggagattgatacgaatgatgctgaagtattcaaggagaatgaggtgcagccaatggaaaatggattggacaaatcacaaaatatggaccaacttactgagcagatgggcctactttcttctgatgccaaaagaatttga

SEQ ID NO: 8219 - protein, 510 aa, Glycine max
MDGRASSSVGGEASPAPAPVPITNANAPPPFLSKTYEMVEDPSTDSIVSWSPTNNSFVVWNPPEFARDLLPKHFKHNNFSSFVRQLNTYGFRKVDPDRWEFANEGFLRGQKHLLKTITRRKPAHGHNQQAQQAHGQSSSVGACVEVGKFGLEEEVEILKRDKNVLMQELVRLRQQQQATDNQLQSMVQRLQGMEQRQQQMMSFLAKAVQSPGFLAQFVQQQNESSRRITEANKKRRLKQEGIGEMEHTAASDGQIVKYQPLINEAAKAMLRQMMKLDTSRLESFSNNADNYLIGDHSSSSGATDRGNSLSRTSGVTLQVVPLTTIQSSHIPSATGIGDDPSTGKSEILSTPQVVACDEVTKAQYSNVNVSVGESNAPAIPVTQTDEIMRDLSTIPDIVAGNILDIPQENYMAPETGGEGYMDPTSFGVNVSLPIDFDSISPEADIDDLLNNPHFWDDILRTPVSEEIDTNDAEVFKENEVQPMENGLDKSQNMDQLTEQMGLLSSDAKRI

SEQ ID NO: 8220 - DNA, 1473 bp, Glycine max
  CDS (1)..(1473)
atggacggcggcgggtccactccggcggcgccgattccgaacgcgaacgcgccgccgccttttctgagcaagacctacgacatggtggaggacccttccaccgacgcgatcgtgtcgtggagcgcaacgaacaacagcttcatcgtgtgggaccctccgcagtttgccagagaccttttgcccaaatacttcaaacacaacaacttctccagcttcgttagacagttaaacacttacggtttcaggaaggttgatccagatcgctgggaatttgcaaatgagggttttttgaagggtcaaaagcacttgcttaggagtattacacgacgaaaacctgcccatggtcaaaatcatcaacagcctcagcaaccgcatggacagagttcatcggtaggggcatgtgtagaagttgggaagtttgggcttgaggaagaggttgagaggcttaaaagagataagaatgtgctcatgcaagagcttgtgaggttgaggcagcagcaacagaccactgataaccagctgcaaacaatggttcagcgccttcagggaatggagcaacgacagcagcaaatgatgtcattccttgccaaagctgtccagagccctggcttctttgctcagtttgtacaacagcaaaatgacagcaataggcgcataactgaagtcaacaaaaagcgtcggcttaaacaggaaggtatggctgaaacagagcatgctgctactccagatggacaaattattaaatatcaacctatggtgaatgaagcagcaaaagcaatgcttaggcagatcatgaaatgggatacttcttgtgtagaatctttgaataaaaattctgataactacgtgattggtgatgcttcatcatcttccagtggaatggacagtagcagctcttcaggctggacttctggagtaactcttaaagaggtctctccagcttcggtgcagtcttcacatgttccagctgcaactgggactcaagggcatgtcccctcaaccgttaaacctgaaattttatctgtaccacaagcagtagcttctgaaaaagttatgaaagatggagcacatgatccaccttctatccctgtgtctcaagcagatgtaatgatccctgatcttcctccaataacagagatggtgacaggaaatattcttgatattcctgaagaaaattatatggcaactgagacagatgagggatacatggattcttcattgggggctggtgggtcatttcccattgatttcgaaggtatttcacctgatgcagacattgatgatttgttagccaatcctatttgggatgaaattttgcaaacttcagttccagaggatatcgataccaatgtggctgaagcatccaaagggaatgaggtccaaccaatggaaaatggatggggcaaaactcaacatatggatcaccttacagagcagatgggtcttctttcttccgatgcaaaaagagtttga

SEQ ID NO: 8221 - protein, 490 aa, Glycine max
MDGGGSTPAAPIPNANAPPPFLSKTYDMVEDPSTDAIVSWSATNNSFIVWDPPQFARDLLPKYFKHNNFSSFVRQLNTYGFRKVDPDRWEFANEGFLKGQKHLLRSITRRKPAHGQNHQQPQQPHGQSSSVGACVEVGKFGLEEEVERLKRDKNVLMQELVRLRQQQQTTDNQLQTMVQRLQGMEQRQQQMMSFLAKAVQSPGFFAQFVQQQNDSNRRITEVNKKRRLKQEGMAETEHAATPDGQIIKYQPMVNEAAKAMLRQIMKWDTSCVESLNKNSDNYVIGDASSSSSGMDSSSSSGWTSGVTLKEVSPASVQSSHVPAATGTQGHVPSTVKPEILSVPQAVASEKVMKDGAHDPPSIPVSQADVMIPDLPPITEMVTGNILDIPEENYMATETDEGYMDSSLGAGGSFPIDFEGISPDADIDDLLANPIWDEILQTSVPEDIDTNVAEASKGNEVQPMENGWGKTQHMDHLTEQMGLLSSDAKRV

SEQ ID NO: 8222 - DNA, 1404 bp, Zea mays
  CDS (1)..(1404)
atgaagacctacgaggtggtggacgacccggccacggacgacgtcatatcctggggccccgggaacaacagcttcatcgtctggaacacgcccgagttcgcccgggacctcctgcccaagtacttcaagcacagcaacttctcctccttcgtcaggcagctcaacacctacgggtttagaaaggttgatccagacagatgggaatttgcaaatgagggttttctgagaggacagaagcatctgctgaagactatcaacagaaggaaaccatccttgcaggggaacagccaaccacagcaacctcagtcgcagaacgctcctgtgccttcctgtgtagaggttggtaagtttgggttggaggaagagattgaacggctgaagagggataagaatgttcttatgcaagagcttgtcaggctgagacagcaacagcaaacaactgaccatcagctgcagactttgggcaagcgtcttcaagggatggagtcacggcagcaacagatgatgtctttcctggctaaagcaatgcaaagtcctggtttcctagcgcagtttgtacagcaaaatgagaagagcagaagaagaatagtagcggcgaacaagaaaaggcggctgcccaggcaagatggtggcctagactccgaaagtgctgctgcttcgttggacggtcaaatcatcaagtatcagcctctgatcaacgaagcagccaaagcaatgctaaggaagatactaaagctagattcttcgcataggttggaatctatgggcaattcagagaatggcaattttctgctggagaattatatgccaggcgctcaagcctttgagagctcttcgtcaacaagaaactctggggtcaccctttcagaggtttcagctaacccaggtttgccgtatggcggcggcggcggcacgagctctgggctgtcagccatctgccctcctgaaatccagtgcccagttgtgatggacaacatgtcgtctaaccaagtgcccagcatgagtgctgtgcctcctgtttcgaaggctacaattgacatgggtattcctgaattctcagctctggcagacttggtgaatgaaggctccgtcgatatccctggaggggcctttgagatgcctggtcctgagtttcctctgccagaaggcgatgacagtgtccccatcgagaccgatgagaccatgtacaacaacaacgacgagactcagagccttccaggcatcatcgactccttctgggagcagttcctggtaggcagccctctctctgccgataacgatgaagttgattcggggtcgccacaggagaacggatggagcaaagtggggaacatcggtgatcttacagaacagatgggccttctgtcatcaacaaatcaccgcgactcagggaatgggctgtag

SEQ ID NO: 8223 - protein, 467 aa, Zea mays
MKTYEVVDDPATDDVISWGPGNNSFIVWNTPEFARDLLPKYFKHSNFSSFVRQLNTYGFRKVDPDRWEFANEGFLRGQKHLLKTINRRKPSLQGNSQPQQPQSQNAPVPSCVEVGKFGLEEEIERLKRDKNVLMQELVRLRQQQQTTDHQLQTLGKRLQGMESRQQQMMSFLAKAMQSPGFLAQFVQQNEKSRRRIVAANKKRRLPRQDGGLDSESAAASLDGQIIKYQPLINEAAKAMLRKILKLDSSHRLESMGNSENGNFLLENYMPGAQAFESSSSTRNSGVTLSEVSANPGLPYGGGGGTSSGLSAICPPEIQCPVVMDNMSSNQVPSMSAVPPVSKATIDMGIPEFSALADLVNEGSVDIPGGAFEMPGPEFPLPEGDDSVPIETDETMYNNNDETQSLPGIIDSFWEQFLVGSPLSADNDEVDSGSPQENGWSKVGNIGDLTEQMGLLSSTNHRDSGNGL

SEQ ID NO: 8224 - DNA, 1395 bp, Zea mays
  CDS (1)..(1395)
atgaagacgtacgagatggtggacgacccggccacggacggcgtcgtgtcctggggccccgggaacaacagcttcatcgtctggaacacgcccgagttcgcccgagacctcctgcccaagtacttcaagcacagcaacttctcctcgttcgtcaggcagctcaacacctacgggtttagaaaggttgatccagacagatgggaatttgcaaatgagggttttctgagaggacaaaaacatctgctgaagactatcaacagaaggaaaccatccttgcagggtaacagccaaccacagcaacctcagttgcagaacgctcctgtgccttcgtgtgtagaggtgggtaagtttgggttggaggaagagattgaacggctgaaaagggacaagaatgttcttatgcaagagcttgtaaggctgagacagcaacagcaaacaactgaccatcagctccagactttgggcaagcgtcttcaagggatggagtcacggcagcaacagatgatgtctttcctggccaaagcaatgcaaagtcctggtttcctagcacagtttgtacagcgaaatgagaacagcaggaggagaatagtagctgcgaacaagaaaaggcggctgcccaagcaagatggtggactcgagtccgaaagttctgctgcttcgttagacggtcaaattatcaagtatcagccttcgatcaacgaagcagccaaagcaatgctaaggaagatcctaaacgtagattcttcgcataggtttgaatctatgggcaattcagataatagtaataataataatattctgctggaggattatatgccggccgcccaagcttttgagagctcttcgtcgacaagaaattctggggtcacccttgcagaggttccagcaaactcaggcttggcgtatgtcggcacgagctcggctatctgttctcctccagcggcccctgaaatgcagtgcccagtggtgctggataacaaggcgtacaagcaagtggccagcatgagtgctgtgcctcctgtttcaagtgacatgggtattattccggaattctcagatctggcagacttggtctctgtggatattcttggaggggcctttgagatgatgcctggtcctgagttccccctgccagaagaaggtgatgatgggaccaccatgtacaacaacaacgacgaggaggctcagagccttccaggcatcatcaactccatctgggagcagttcctggtaggcagccctctatctaccgataatgaggaagttgattcagcaggcggactatatgcgcaggaggatggatggagcaaagtggggaacatcgctaatcttacagaacagatgggacttgtatcatcaacaaatcaccgggactcagggaatgggctgtactag

SEQ ID NO: 8225 - protein, 464 aa, Zea mays
MKTYEMVDDPATDGVVSWGPGNNSFIVWNTPEFARDLLPKYFKHSNFSSFVRQLNTYGFRKVDPDRWEFANEGFLRGQKHLLKTINRRKPSLQGNSQPQQPQLQNAPVPSCVEVGKFGLEEEIERLKRDKNVLMQELVRLRQQQQTTDHQLQTLGKRLQGMESRQQQMMSFLAKAMQSPGFLAQFVQRNENSRRRIVAANKKRRLPKQDGGLESESSAASLDGQIIKYQPSINEAAKAMLRKILNVDSSHRFESMGNSDNSNNNNILLEDYMPAAQAFESSSSTRNSGVTLAEVPANSGLAYVGTSSAICSPPAAPEMQCPVVLDNKAYKQVASMSAVPPVSSDMGIIPEFSDLADLVSVDILGGAFEMMPGPEFPLPEEGDDGTTMYNNNDEEAQSLPGIINSIWEQFLVGSPLSTDNEEVDSAGGLYAQEDGWSKVGNIANLTEQMGLVSSTNHRDSGNGLY

SEQ ID NO: 8226 - DNA, 1458 bp, Arabidopsis thaliana
  CDS (1)..(1458)
atggatgtgagcaaagtaaccacaagcgacggcggaggagattcaatggagactaagccatctcctcaacctcagcctgcggcgattctaagttcaaacgcgcctcctccgtttctgagcaagacctatgatatggttgatgatcacaatacagattcgattgtctcttggagtgctaataacaacagttttatcgtttggaaaccaccggagttcgctcgcgatcttcttcctaagaactttaagcataataatttctccagcttcgttagacagcttaatacctatggtttcaggaaggttgacccagatagatgggaatttgcgaatgaaggttttttaagaggtcagaagcacttgctacaatcaataactaggcgaaaacctgcccatggacagggacagggacatcagcgatctcagcactcgaatggacagaactcatctgttagcgcatgtgttgaagttggcaaatttggtctcgaagaagaagttgaaaggcttaaaagagataagaacgtccttatgcaagaactcgtcagattaagacagcagcaacagtccactgataaccaacttcaaacgatggttcagcgtctccagggcatggagaatcggcaacaacaattaatgtcattccttgcaaaggcagtacaaagccctcattttctatctcaattcttacagcagcagaatcagcaaaacgagagtaataggcgcatcagtgataccagtaagaagcggagattcaagcgagacggcattgtccgtaataatgattctgctactcctgatggacagatagtgaagtatcaacctccaatgcacgagcaagccaaagcaatgtttaaacagcttatgaagatggaaccttacaaaaccggcgatgatggtttccttctaggtaatggtacgtctactaccgagggaacagagatggagacttcatcaaaccaagtatcgggtataactcttaaggaaatgcctacagcttctgagatacagtcatcatcaccaattgaaacaactcctgaaaatgtttcggcagcatcagaagcaaccgagaactgtattccttcacctgatgatctaactcttcccgacttcactcatatgctaccggaaaataattcagagaagcctccagagagtttcatggaaccaaacctgggaggttctagtccattactagatccagatctgttgatcgatgattctttgtccttcgacattgacgactttccaatggattctgatatagaccctgttgattacggtttactcgaacgcttactcatgtcaagcccggttccagataatatggattcaacaccagtggacaatgaaacagagcaggaacaaaatggatgggacaaaactaagcatatggataatctgactcaacagatgggtctcctctctcctgaaaccttagatctctcaaggcaaaatccttga

SEQ ID NO: 8227 - protein, 485 aa, Arabidopsis thaliana
MDVSKVTTSDGGGDSMETKPSPQPQPAAILSSNAPPPFLSKTYDMVDDHNTDSIVSWSANNNSFIVWKPPEFARDLLPKNFKHNNFSSFVRQLNTYGFRKVDPDRWEFANEGFLRGQKHLLQSITRRKPAHGQGQGHQRSQHSNGQNSSVSACVEVGKFGLEEEVERLKRDKNVLMQELVRLRQQQQSTDNQLQTMVQRLQGMENRQQQLMSFLAKAVQSPHFLSQFLQQQNQQNESNRRISDTSKKRRFKRDGIVRNNDSATPDGQIVKYQPPMHEQAKAMFKQLMKMEPYKTGDDGFLLGNGTSTTEGTEMETSSNQVSGITLKEMPTASEIQSSSPIETTPENVSAASEATENCIPSPDDLTLPDFTHMLPENNSEKPPESFMEPNLGGSSPLLDPDLLIDDSLSFDIDDFPMDSDIDPVDYGLLERLLMSSPVPDNMDSTPVDNETEQEQNGWDKTKHMDNLTQQMGLLSPETLDLSRQNP

SEQ ID NO: 8228 - DNA, 1488 bp, Arabidopsis thaliana
  CDS (1)..(1488)
atgtttgtaaatttcaaatacttctctttctttatccgtacgaaaatggacggtgttaccggcggaggaacgaatatcggcgaggctgtgacggcgccaccaccgcggaatccgcatccagcgactttacttaatgcgaactctttaccgccccctttccttagcaagacgtatgacatggtggaagatccggcgacggacgcgattgtctcatggagtccgacgaacaatagcttcattgtttgggatccaccggagttttctcgtgatcttctacctaaatacttcaaacacaacaatttctccagctttgttcgccagttaaacacctatggttttaggaaagtggatccagatcgatgggaatttgctaatgaaggtttcttaagaggtcaaaaacatctattgaagaagataagccggagaaaatctgttcagggacatggtagtagtagtagtaatccacaatctcagcaattatctcagggtcaaggttcaatggctgcattatcttcatgtgttgaggttgggaaatttgggttagaggaagaagttgaacagcttaaaagagacaaaaacgtgttgatgcaggaactcgttaagttacgccagcagcaacaaacaacagataataaacttcaggttttggttaaacatcttcaggttatggagcagaggcaacaacagattatgtctttccttgctaaagctgtacagaatcctactttcctctctcagtttatacagaagcagactgatagtaatatgcatgtaaccgaggccaataagaagcggagactcagagaggatagtactgctgctactgagagtaatagtcatagccatagcttggaagcatcagatggacagatagttaagtatcagccacttagaaacgattcaatgatgtggaacatgatgaaaacagatgataagtatccgtttcttgacgggttctcatctccaaaccaggtatcaggagtcactcttcaagaggtactacccataacttcaggacagtcacaggcatatgcatctgtaccatcaggacagcctttatcatacttaccctctacttcaacttctctcccggataccataatgccagagacttcccagataccacaattgacacgagagagtatcaacgacttccctacagaaaacttcatggatacagagaagaatgttccagaggcattcatctctccaagcccattccttgatggtggttcagtcccgattcagcttgagggaatacccgaagaccccgagattgatgaactaatgagtaactttgaattccttgaagaatatatgccagaaagcccagtttttggagatgcaactacactagagaacaacaacaacaacaacaacaacaacaacaacaacaacaacaacaacaacaacaacaacacaaatggtagacatatggataagcttatagaagaattgggtcttctcacatcagaaacagaacactag

SEQ ID NO: 8229 - protein, 495 aa, Arabidopsis thaliana
MFVNFKYFSFFIRTKMDGVTGGGTNIGEAVTAPPPRNPHPATLLNANSLPPPFLSKTYDMVEDPATDAIVSWSPTNNSFIVWDPPEFSRDLLPKYFKHNNFSSFVRQLNTYGFRKVDPDRWEFANEGFLRGQKHLLKKISRRKSVQGHGSSSSNPQSQQLSQGQGSMAALSSCVEVGKFGLEEEVEQLKRDKNVLMQELVKLRQQQQTTDNKLQVLVKHLQVMEQRQQQIMSFLAKAVQNPTFLSQFIQKQTDSNMHVTEANKKRRLREDSTAATESNSHSHSLEASDGQIVKYQPLRNDSMMWNMMKTDDKYPFLDGFSSPNQVSGVTLQEVLPITSGQSQAYASVPSGQPLSYLPSTSTSLPDTIMPETSQIPQLTRESINDFPTENFMDTEKNVPEAFISPSPFLDGGSVPIQLEGIPEDPEIDELMSNFEFLEEYMPESPVFGDATTLENNNNNNNNNNNNNNNNNNNNTNGRHMDKLIEELGLLTSETEH

SEQ ID NO: 8230 - DNA, 1446 bp, Arabidopsis thaliana
  CDS (1)..(1446)
atggaatcggttcccgaatccgtaccatcgccgaactcgaatacaccgtcaataccaccgccggtgaactccgtaccgcctttcttgagtaaaacctacgacatggttgatgatccgttgaccaatgaggtcgtttcgtggagcagcgggaacaacagcttcgtcgtctggagtgccccggagttctcgaaggtgctcttgcccaagtatttcaagcacaacaacttctccagcttcgtcagacagttaaatacttatggtttcagaaaagttgatcctgaccgatgggaatttgcaaatgaaggatttcttagaggccgaaaacaactactgaagagtattgtcaggagaaaaccttcgcatgtgcagcagaatcagcaacaaactcaagttcagagctcatctgttggtgcttgtgtcgaggtggggaagtttggaatagaagaagaagtggaaagacttaagcgggataagaatgttcttatgcaagaactcgtcaggttaaggcagcaacagcaagctactgaaaaccaactgcagaatgtgggacagaaagttcaggtgatggagcaaaggcaacaacaaatgatgtcgtttttagcaaaggctgttcaaagtccaggtttcttaaaccagttagtacaacagaataataatgatggcaacagacaaattccaggaagcaacaaaaagaggagacttcctgtagatgagcaggagaatcgtggtgacaatgtggctaatggtcttaaccgccagattgttagatatcagccgtcgataaacgaagcagcacaaaatatgcttcgacagttcttaaatactagtacctcacctcggtatgaatcagtttcaaacaatcctgacagtttcctattgggtgatgttcccagttctacctctgtagacaatgggaacccttcaagtagagtttctggagtaacattggccgagttttcacccaacacagttcagtcagcaacgaatcaagtacccgaagcaagtttggctcatcatcctcaagctggtctggttcagccaaatataggtcaaagtccggctcaaggagcagcacctgcagactcttggagccctgaatttgatttagttggatgcgagacagatagtggagagtgttttgatccaataatggctgttttagatgagtcagaaggcgatgcaatttctcctgaaggtgagggcaagatgaatgagttactggagggagtccctaagctgcccggaatccaagatccattctgggaacagttcttttctgttgaactcccagcgattgcagatacagacgatattctatcaggatcagtggagaataatgacttggtattggaacaagaaccaaacgagtggacccgtaatgaacaacaaatgaagtatcttactgaacaaatgggactgctttcctcagaagcacagaggaaataa

SEQ ID NO: 8231 - protein, 481 aa, Arabidopsis thaliana
MESVPESVPSPNSNTPSIPPPVNSVPPFLSKTYDMVDDPLTNEVVSWSSGNNSFVVWSAPEFSKVLLPKYFKHNNFSSFVRQLNTYGFRKVDPDRWEFANEGFLRGRKQLLKSIVRRKPSHVQQNQQQTQVQSSSVGACVEVGKFGIEEEVERLKRDKNVLMQELVRLRQQQQATENQLQNVGQKVQVMEQRQQQMMSFLAKAVQSPGFLNQLVQQNNNDGNRQIPGSNKKRRLPVDEQENRGDNVANGLNRQIVRYQPSINEAAQNMLRQFLNTSTSPRYESVSNNPDSFLLGDVPSSTSVDNGNPSSRVSGVTLAEFSPNTVQSATNQVPEASLAHHPQAGLVQPNIGQSPAQGAAPADSWSPEFDLVGCETDSGECFDPIMAVLDESEGDAISPEGEGKMNELLEGVPKLPGIQDPFWEQFFSVELPAIADTDDILSGSVENNDLVLEQEPNEWTRNEQQMKYLTEQMGLLSSEAQRK

SEQ ID NO: 8232 - DNA, 1224 bp, Physcomitrella patens subsp. patens
  CDS (1)..(1224)
atggtggatgatcccgccactgatcccgtggtctcttggagtgccggcaacaatagctttatagtatggaaccctcctgatttcgctcaagagcttttgccgaaatattttaagcacaacaacttttccagcttcgttcggcaacttaacacttacggattccgtaaggtcgatccggatcgttgggagtttgctaatgagggcttcctgcgcggtaggcgagatcttctacgaagtatccatcggcgcaaacccgcaacacattcccagcaatcagtacaacaacaacaacaacaacagcatcagcaaagcgagcagggccctgtaggaccctgtgtagaagttggaaagtttgggcttgaaggagaaattgaaaggctaaagagggataaaaacgtattgatgatggaattggtacgtctgagacaacagcagcagaatacagaacgagacttgcaggcaatgggccaacgcctgctaaccaccgagaatcggcagcaacatatgatgtcttttcttgccaaagccatgcagaatccaagttttttggctcaacttatgcaacaatctgagaacaagagactcgcagcaactgtacgaaaaaaacgacgacttcctaaacaagattctagtggagatgattcagctaactcggattccccagctgataaccaaatagtggcttttcattccaacggaaacgctgatagtaatggagctcgggccatgattatgcaattttttaattcaacagatgctgcatcgtcacctagtcttgacagtggtccccttgaggctttgtttagggatctaggctccgctccttccggtacagacgtaggtacactcgcgagccgacaatcaggtgtgacactcactgaaatgaatataccagggcttggtgattctttacctggacctgttattagaagtggagaaatcaagcctgatggtctttctggagaatctatggaatttaatgctgatggaggcagagctccttcagagggagaagaagtaatttctaaccttggcagtccagccgtctcagctgcaaacgatatattttgggagcaattcttaaaaactgatggagatgagattgtggaagattcagttgaagttttagctggagaagatgttggagaagtgaaaaactggtggagcaagaagccaagtgttgaacagctctctgttcaaatggggcagcttgcacctggatag

SEQ ID NO: 8233 - protein, 407 aa, Physcomitrella patens subsp. patens
MVDDPATDPVVSWSAGNNSFIVWNPPDFAQELLPKYFKHNNFSSFVRQLNTYGFRKVDPDRWEFANEGFLRGRRDLLRSIHRRKPATHSQQSVQQQQQQQHQQSEQGPVGPCVEVGKFGLEGEIERLKRDKNVLMMELVRLRQQQQNTERDLQAMGQRLLTTENRQQHMMSFLAKAMQNPSFLAQLMQQSENKRLAATVRKKRRLPKQDSSGDDSANSDSPADNQIVAFHSNGNADSNGARAMIMQFFNSTDAASSPSLDSGPLEALFRDLGSAPSGTDVGTLASRQSGVTLTEMNIPGLGDSLPGPVIRSGEIKPDGLSGESMEFNADGGRAPSEGEEVISNLGSPAVSAANDIFWEQFLKTDGDEIVEDSVEVLAGEDVGEVKNWWSKKPSVEQLSVQMGQLAPG

SEQ ID NO: 8234 - DNA, 1539 bp, Vitis vinifera
  CDS (1)..(1539)
atggcggcgtcttcggcaatctcctcggcagcgtcgatctcgaatctgccgccgccgttcctcagcaagacctacgacatggtagacgatcgggccaccgactcggtggtatcgtggagtagcggcaacaacagctttgttgtctggaatgttccggagttctctagagaccttttgcccaagtacttcaagcacaataatttctccagctttgtgaggcagttgaatacttatggatttaggaaggtggatccagaccgctgggaatttgcaaatgagggttttctaagaggtcaaaaacaccttttgaagagtattagtaggcgaaaatccactcatgtacatactcataatcaacaactacaacaacaacaacaacaacaacaacaaactcaagtgcaaagctcatcgggagcatgtgttgaggtagggaagtttgggcttgaagaagaggttgagcggcttaaaagagataagaatgttcttatgcaagaacttgttaggttgaggcagcagcagcaaacaactgatcaccagttgcaaactgttgggcagcgtgttcaagatatggagcaacggcagcaacaaatgatgtcattccttgcaaaagctgtacaaagccctggtttcttagctcagctggtacagcagcagaatgatagcaaaaggcgcattacaggtgtcaataagaaaaggagacttccaaagcaggaggaagagatccattctgctaagcatgctaccactgctccagatgggcgggttgtcaagtaccagcctctaatgaatgaggctgcaaaagcaatgttgcgacagatcttgaagatgaatgcgactccaaggcgagagccttccattaaccctgatgctttcctaattgatgatgttccatcctccaatgcattagatagtttgagctcatcaagtcgggtttcaggagtgacccttgcagaagttccactaacatctggtcagtcttacttgccagtggagtcagcatattcatccaatcatctatcagctggcatctctgagacccagtcttcccccactgtcatgactgactcagtaaaagcagctcaattcccagaagtcaatgtacctaattctcaggaagatactgtcttgactgacttcactcaaatggaaggaatcattccagaaagcacggttgaaatccctaatgttggcatggttggcactgaaactgggagtccagggtatatggatccaatggcaggcattttagatggggtagttcctgcagaaactgatgagttctcgcttgattccaatgtagatagcttgctggatgggatacccaagcttcccagcattaatgatgctttctgggaacagtttcttgcagcaagcccactcactggtgacacagatgagattcattcaagcatgctggaagataatgtggtcaatgtacatgagttacagccaggggtgaacggatggaataatacccagcatatggatcatcttacagaacgaatgggccttcttgcatcaaaggccaaggggatgtga

SEQ ID NO: 8235 - protein, 512 aa, Vitis vinifera
MAASSAISSAASISNLPPPFLSKTYDMVDDRATDSVVSWSSGNNSFVVWNVPEFSRDLLPKYFKHNNFSSFVRQLNTYGFRKVDPDRWEFANEGFLRGQKHLLKSISRRKSTHVHTHNQQLQQQQQQQQQTQVQSSSGACVEVGKFGLEEEVERLKRDKNVLMQELVRLRQQQQTTDHQLQTVGQRVQDMEQRQQQMMSFLAKAVQSPGFLAQLVQQQNDSKRRITGVNKKRRLPKQEEEIHSAKHATTAPDGRVVKYQPLMNEAAKAMLRQILKMNATPRREPSINPDAFLIDDVPSSNALDSLSSSSRVSGVTLAEVPLTSGQSYLPVESAYSSNHLSAGISETQSSPTVMTDSVKAAQFPEVNVPNSQEDTVLTDFTQMEGIIPESTVEIPNVGMVGTETGSPGYMDPMAGILDGVVPAETDEFSLDSNVDSLLDGIPKLPSINDAFWEQFLAASPLTGDTDEIHSSMLEDNVVNVHELQPGVNGWNNTQHMDHLTERMGLLASKAKGM

SEQ ID NO: 8236 - DNA, 1446 bp, Populus trichocarpa
  CDS (1)..(1446)
atggcgtcacagtcgaatgcgccgccgccatttctaagtaagacttacgacatggtagacgatccggcgacagacgcggtggtgtcttggagttcgacgaataatagttttgtggtttggaatccgccggagttcgctcgcgatcttttgccgaagtatttcaagcataataatttctccagctttgttaggcaactgaacacttacggttttcgaaaggtggatccagaccgttgggaatttgccaatgaaggatttttgaggggtcagaagcacctgcttaggattatcagtcggcgaaaacctgcccacgggcatgctaatcaacagccacaacaaccgcatggacagaactcatcagttgccgcctgtgttgaggttgggaaatttgggctcgaggaagaggtggagaggcttaagagggacaagaatgtccttatgcaagaacttgttaggttgaggcagcagcaacagtccacagatagccagttgcaaaccatggtacagcgacttcaaggaatggagcagcgtcagcaacagatgatgtcattcctggccaaggcgatgaacagcccaggcttcttggctcagtttgtacagcagcaaaatgacaacaataggcgcataacggaagccaataaaaaacgaaggctcaagcaggaggatgttcctgagaatgagggttctggttctcatgatgggcagattgtgaagtatcagcctctgatgaatgaggcagcccaagcaatgcttaggcagattatgaaaatggatgcttcttctaagttggaatcttatgacaataatcttggtgcaaaagacagtggaagctcttcgagccacacatcaggagtgactcttcaagaggttctgccaacttcagggcaatccgctcatataccagcagcttttgggatttccaggcagggcccatcggctccaatatctgaaatacaatcttccctgcaaattgctagttctgaaaaggttacagcttctcagtttccggatataagtatgccggttggagcacagggggcaacctccatacctattcctcaggcagatgtgatcatgccccatgtttctcaaatgcttgaaatggtaccagaaaatgttgctgatatcccttgtgaagattacatggaaccagagacatgcaatgatggattcatagatctagcttcattaggaattaatggaatacccatagatattgataacatttcccctgatcctgatattgatgctttgcttgataattctagcttctgggatgaccttcttgtgcagagtccagagcatgaggatattgaatcaagttctgtagagggtaaagccaatggaaatgatgtgcagccaaatgcaaacgggtgggacaaagctcagcatgtggatcagctgacagaacaaatggagcttctgacatcagacaagaagctttaa

SEQ ID NO: 8237 - protein, 481 aa, Populus trichocarpa
MASQSNAPPPFLSKTYDMVDDPATDAVVSWSSTNNSFVVWNPPEFARDLLPKYFKHNNFSSFVRQLNTYGFRKVDPDRWEFANEGFLRGQKHLLRIISRRKPAHGHANQQPQQPHGQNSSVAACVEVGKFGLEEEVERLKRDKNVLMQELVRLRQQQQSTDSQLQTMVQRLQGMEQRQQQMMSFLAKAMNSPGFLAQFVQQQNDNNRRITEANKKRRLKQEDVPENEGSGSHDGQIVKYQPLMNEAAQAMLRQIMKMDASSKLESYDNNLGAKDSGSSSSHTSGVTLQEVLPTSGQSAHIPAAFGISRQGPSAPISEIQSSLQIASSEKVTASQFPDISMPVGAQGATSIPIPQADVIMPHVSQMLEMVPENVADIPCEDYMEPETCNDGFIDLASLGINGIPIDIDNISPDPDIDALLDNSSFWDDLLVQSPEHEDIESSSVEGKANGNDVQPNANGWDKAQHVDQLTEQMELLTSDKKL

SEQ ID NO: 8238 - DNA, 1419 bp, Populus trichocarpa
  CDS (1)..(1419)
atgattagaatggatagtgggaataataacacgaacacggtgcctccatttctaagcaagacctacgacatggtagacgacccgtcgacggattcagtggtgtcatggagtagcagcaataacagttttgtggtctggaatgtcccagagtttcaaacagatcttttgcctaaatacttcaagcacagtaacttctccagctttgtcaggcaattgaatacttacggtttcaggaaggttgatcctgatcgctttgaatttgcaaatgaggggttcttaaggggccaaaaacaccttctgaggagtatatctaggaaaaaacctgttcatggtaacctaccacctcaagttcagagctcttcggttaccacatgcgttgaggttgggaagtttgggctcgaggaagaggttgaaagacttaaacgagacaaaaatgttctcatgcaggaacttgttagactgaggcagcagcagcaagccacagatcaccagttgcacactgtgggccaacgtgtacagggaatggagcagcgacagcaacaaatgatgtcattccttgcgaaggccatgcagaatccaggcttcttaagtcagcttgtacagcagcaaaatgaaagcaacagacgcattgctggtgccagtaaaaagaggagacttccaaggcaggaggaagagaatttggctggtgtgcaatgcaaaacatctcctaatgggcagattatcaagttccattcttcaatgaatgaagcagcaaaagcaatgttgcaccagatcctgaagatgaactcatcacctaggctggaaccatcgatgaacaattctggtcccttactgatcggtaatcatccttcttccaatggattagacagtgggagctcttcaactcggatgtcaggagtgatgctttcagaggtccaatctcctgcttctgtagcaaccgactatgttaaaacagattatactgctgagatgggcatgcataattctgggcaaaataccatcctgcccaacttcactgcaatgacaggaattgtgcccggaggctctgctggaggtcctaacatgaatattgcagggtctgagaaggggaatgcagagttttttgacaccatgtcatctgtgttggatgcgccagtgcccatagaaactgaagctctctctcccagccaggatgaggaagtctttctggatggaaaccataagcttcctggcattaatgatgtgttctgggaacaatttcttacagcaagcccgctcaatggggagacagatgaaattaattcaagctctccagaaagtagcatgagcaaggagcaggaattgcaatcatggcaggacaatggatgggacaatattcaacatatgaatcgtctagctgaacaaatggggcttcttacaccggaaagcttaaaagggtga

SEQ ID NO: 8239 - protein, 472 aa, Populus trichocarpa
MIRMDSGNNNTNTVPPFLSKTYDMVDDPSTDSVVSWSSSNNSFVVWNVPEFQTDLLPKYFKHSNFSSFVRQLNTYGFRKVDPDRFEFANEGFLRGQKHLLRSISRKKPVHGNLPPQVQSSSVTTCVEVGKFGLEEEVERLKRDKNVLMQELVRLRQQQQATDHQLHTVGQRVQGMEQRQQQMMSFLAKAMQNPGFLSQLVQQQNESNRRIAGASKKRRLPRQEEENLAGVQCKTSPNGQIIKFHSSMNEAAKAMLHQILKMNSSPRLEPSMNNSGPLLIGNHPSSNGLDSGSSSTRMSGVMLSEVQSPASVATDYVKTDYTAEMGMHNSGQNTILPNFTAMTGIVPGGSAGGPNMNIAGSEKGNAEFFDTMSSVLDAPVPIETEALSPSQDEEVFLDGNHKLPGINDVFWEQFLTASPLNGETDEINSSSPESSMSKEQELQSWQDNGWDNIQHMNRLAEQMGLLTPESLKG

SEQ ID NO: 8240 - DNA, 1455 bp, Populus trichocarpa
  CDS (1)..(1455)
atggcgtcccagtcaaattctccgccgccatttctgagtaagacttacgacatggtagacgacccggagaccgacgccgtggtgtcttggagttcgacgaataatagttttgtggtttggaatccgccggagttcgctcgcgatcttttgccgaagtattttaagcataataacttctccagctttgttaggcaacttaatacatacggttttcgaaaggtggatccagaccgttgggaattcgccaatgaaggatttttgaggggtcagaagcacctgcttaggactatcagtcggcgaaaacctgcccatggacatactaatcaacagccgcaacaagctcgtggacagaactcaactgttggcgcttgtgttgaggttggaaaatttgggcttgaggaagaggtagagaggcttaagagggacaagaatgttcttatgcaagaacttgttaggttgaggcagcagcaacagtccacggatagccagttgcaaaccatggtgcagcgacttcaagggatggagcagcgtcagcaacagatgatgtcattcctggcaaaggctatgcagagcccgggcttcctggctcagtttgtacagcagcaaaatgaaagcagcaggcgcataacagaagccaacaaaaaacgaaggctcaagcctgaggatgtttctgagaatgagggttctagtgctcctgatggacagattgtgaagtatcagcctcagatgaacgaggcagccaaagcaatgctcaggcaggtcatgaaaatggatgctccttctaggttggaatcttatgacaccaatcttgatggcttcctgattggtaatggttcaccatcatctagtgcaaaagacagcggaagctcttcaagccgcatgtcaggagtgactcttcaagaggtcccagcagcttcagggatttccggacatggccccatggctgccatatctgaaatacaatcttccccacacattgctagctcagaaaaggctacagcttctcagtttccggaaagtatactggttggaggacaaggagcaccctccatacctattccacaggcagatataatcatgccccaggtttctcaaaagccagaaatggtgccagaaattattgctgatattcctggtgaagattacatggaaccagagacaagcagtgatgtgttcctagatccagcttcacttggaattaatgatacaatacccatagatattgacaacatctcccctgatcctgatatcgatgctttgcttgataattctagcttctgggatgaccttcttgcgcagagtccagtgcctgaggatattgaatcaagttctgtggagggtaaagccaatggaaatgatgtacatcaaattataaacgggtgggacaaagctcagcatatggatcagctgacagaacaaatgggacttctctcatcagatcgcaagcagctttaa

SEQ ID NO: 8241 - protein, 484 aa, Populus trichocarpa
MASQSNSPPPFLSKTYDMVDDPETDAVVSWSSTNNSFVVWNPPEFARDLLPKYFKHNNFSSFVRQLNTYGFRKVDPDRWEFANEGFLRGQKHLLRTISRRKPAHGHTNQQPQQARGQNSTVGACVEVGKFGLEEEVERLKRDKNVLMQELVRLRQQQQSTDSQLQTMVQRLQGMEQRQQQMMSFLAKAMQSPGFLAQFVQQQNESSRRITEANKKRRLKPEDVSENEGSSAPDGQIVKYQPQMNEAAKAMLRQVMKMDAPSRLESYDTNLDGFLIGNGSPSSSAKDSGSSSSRMSGVTLQEVPAASGISGHGPMAAISEIQSSPHIASSEKATASQFPESILVGGQGAPSIPIPQADIIMPQVSQKPEMVPEIIADIPGEDYMEPETSSDVFLDPASLGINDTIPIDIDNISPDPDIDALLDNSSFWDDLLAQSPVPEDIESSSVEGKANGNDVHQIINGWDKAQHMDQLTEQMGLLSSDRKQL

SEQ ID NO: 8242 - DNA, 1488 bp, Vitis vinifera
  CDS (1)..(1488)
atggagggagcaagcggcagtagcagcgccgtgaatagtggtggtggtggtggtgctccgcctcctcatccgattccgaattcgaatgcgccgccaccgttccttagcaagacctacgatatggtcgatgatcctgccactaattcgatcgtgtcctggagtccaaccaacaatagcttcgtggtttggaaccctcccgagttcgcaagagaccttttaccgaagtacttcaagcacaacaatttttcgagctttgtgaggcagttgaacacatatggattcaggaaggttgatccagaccgttgggaatttgcaaatgagggatttttgaggggtcaaaaacacctattgaggagtataaatcggcgaaaacctgcccatggacataatcttcaacagccacagcaatcacattcacagggttcatcagtaggagcttgtgtagaggtgggcaagtttgggttggaggaagaggtagaaaggcttaaaagggacaaaaatgtgcttatgcaggaacttgtcaggttgaggcaacagcaacagacaactgataaccagttgcagaccatggtgcagcgccttcagggaatggagcagcgacagcaacaaatgatgtctttcctggcaaaggctgtgcagagccctggctttttggcgcagtttgtacagcagcaaaatgagagcaacagacgcataactgaggccaacaagaaacggaggctcaagcgggaagatattgctgagggtgagcattctgctgctccttctgatggccagattgttaagtaccagccattaatgaatgaggccactaaagcaatgctcaggcagatggtgaaaatggatacttctgcctttagcaacgattctgataatttcttgattggtgatgtttcctcatcatccaatggagttgagaaagggggctcttcaacctgtgtatcgggtgtgactcttcaagaggtcccaccaacttctttgccagttgcttcgggagttccaagtcatgaccccccctcagctcctatatctgaaattcaatctcccccagatatatgcgcactggttggggcacaagaagcagtgcccatctctattgccctgccagatgtaatattgcccgagttatctcaaataccagaaatgttgccgaaaagtattgtggacattcacaaagatgattatgtgggaccccaatcagggaatgttgaattcatggatcctatttcattgggaattgatggagcaatgccgatagatatcgacaacatctctgctgatcctgacatagatgccttgctagatgcaagttctaacttttgggaggacctccttgtggacaatgatgaggttgaatcaactccacttgaggacactaccaagggaaatgaaatgcagccatcagaaaatggatgggacaaggtgcagcatatggcaaagcttacagaacagatgggccttcttacatcggatacaaaaaggatttga

SEQ ID NO: 8243 - protein, 495 aa, Vitis vinifera
MEGASGSSSAVNSGGGGGAPPPHPIPNSNAPPPFLSKTYDMVDDPATNSIVSWSPTNNSFVVWNPPEFARDLLPKYFKHNNFSSFVRQLNTYGFRKVDPDRWEFANEGFLRGQKHLLRSINRRKPAHGHNLQQPQQSHSQGSSVGACVEVGKFGLEEEVERLKRDKNVLMQELVRLRQQQQTTDNQLQTMVQRLQGMEQRQQQMMSFLAKAVQSPGFLAQFVQQQNESNRRITEANKKRRLKREDIAEGEHSAAPSDGQIVKYQPLMNEATKAMLRQMVKMDTSAFSNDSDNFLIGDVSSSSNGVEKGGSSTCVSGVTLQEVPPTSLPVASGVPSHDPPSAPISEIQSPPDICALVGAQEAVPISIALPDVILPELSQIPEMLPKSIVDIHKDDYVGPQSGNVEFMDPISLGIDGAMPIDIDNISADPDIDALLDASSNFWEDLLVDNDEVESTPLEDTTKGNEMQPSENGWDKVQHMAKLTEQMGLLTSDTKRI

SEQ ID NO: 8244 - DNA, 1491 bp, Vitis vinifera
  CDS (1)..(1491)
atggagggagcaagcggcagtagcagcgccgtgaatagtggtggtggtggtggtggtgctccgcctcctcatccgattccgaattcgaatgcgccgccaccgttccttagcaagacctacgatatggtcgatgatcctgccactaattcgatcgtgtcctggagtccaaccaacaatagcttcgtggtttggaaccctcccgagttcgcaagagaccttttaccgaagtacttcaagcacaacaatttttcgagctttgtgaggcagttgaacacatatggattcaggaaggttgatccagaccgttgggaatttgcaaatgagggatttttgaggggtcaaaaacacctattgaggagtataaatcggcgaaaacctgcccatggacataatcttcaacagccacagcaatcacattcacagggttcatcagtaggagcttgtgtagaggtgggcaagtttgggttggaggaagaggtagaaaggcttaaaagggacaaaaatgtgcttatgcaggaacttgtcaggttgaggcaacagcaacagacaactgataaccagttgcagaccatggtgcagcgccttcagggaatggagcagcgacagcaacaaatgatgtctttcctggcaaaggctgtgcagagccctggctttttggcgcagtttgtacagcagcaaaatgagagcaacagacgcataactgaggccaacaagaaacggaggctcaagcgggaagatactgctgagggtgagcattctgctgctccttctgatggccagattgttaagtaccagccattaatgaatgaggccactaaagcaatgctcaggcagatggtgaaaatggatacttctgcctttagcaacgattctgataatttcttgattggtgatgtttcctcatcatccaatggagttgagaaagggggctcttcaacctgtgtatcgggtgtgactcttcaagaggtcccaccaacttctttgccagttgcttcgggagttccaagtcatgaccccccctcagctcctatatctgaaattcaatctcccccagatatatgcgcactggttggggcacaagaagcagtgcccatctctattgccctgccagatgtaatattgcccgagttatctcaaataccagaaatgttgccgaaaagtattgtggacattcacaaagatgattatgtgggaccccaatcagggaatgttgaattcatggatcctatttcattgggaattgatggagcaatgccgatagatatcgacaacatctctgctgatcctgacatagatgccttgctagatgcaagttctaacttttgggaggacctccttgtggacaatgatgaggttgaatcaactccacttgaggacactaccaagggaaatgaaatgcagccatcagaaaatggatgggacaaggcgcagcatatggcaaagcttacagaacagatgggccttcttacatcggatacaaaaaggatttga

SEQ ID NO: 8245 - protein, 496 aa, Vitis vinifera
MEGASGSSSAVNSGGGGGGAPPPHPIPNSNAPPPFLSKTYDMVDDPATNSIVSWSPTNNSFVVWNPPEFARDLLPKYFKHNNFSSFVRQLNTYGFRKVDPDRWEFANEGFLRGQKHLLRSINRRKPAHGHNLQQPQQSHSQGSSVGACVEVGKFGLEEEVERLKRDKNVLMQELVRLRQQQQTTDNQLQTMVQRLQGMEQRQQQMMSFLAKAVQSPGFLAQFVQQQNESNRRITEANKKRRLKREDTAEGEHSAAPSDGQIVKYQPLMNEATKAMLRQMVKMDTSAFSNDSDNFLIGDVSSSSNGVEKGGSSTCVSGVTLQEVPPTSLPVASGVPSHDPPSAPISEIQSPPDICALVGAQEAVPISIALPDVILPELSQIPEMLPKSIVDIHKDDYVGPQSGNVEFMDPISLGIDGAMPIDIDNISADPDIDALLDASSNFWEDLLVDNDEVESTPLEDTTKGNEMQPSENGWDKAQHMAKLTEQMGLLTSDTKRI

SEQ ID NO: 8246 - DNA, 1497 bp, Oryza sativa subsp. japonica
  CDS (1)..(1497)
atggaggccgccgttgctgctgcggctgcggccgccggggcggtgacgacggcggtcgcgcctccgcccggcgcggcggtcagcaacggggtggcgaccgcgccgccgccgttcctgatgaagacgtacgagatggtggacgacccggccaccgatgccgtcgtctcatggggccccgggaaccaaaagcttcgttgtgtgaaacaaccccgagttcgcgcgcgacctcctccccaggtacttcaagcacaggcaacttctcctggatttaggaaagttgatccagataggtgggagtttgcaaacgaaggttttcttagaggacaaaagcatctactgaagaccatcaacagaaggaaaccaactcatggaaacaaccaagttcagcagcctcagttgccagctgctcctgtacctgcttgcgtagaagtggggaagtttgggatggaagaagagattgagatgctcaaaagggataaaaatgttttaatgcaggaacttgtcaggctgagacaacaacagcagacaacagatcatcagctgcagactttgggcaagcgtcttcaaggaatggagcaacggcaacaacaaatgatgtctttcctggctaaggcaatgcatagtcctggcttcctagcacaatttgtacagcaaaacgaaaacagcagaagaagaatagttgctagtaacaaaaagaggaggctaccaaagcaggatggttcgttggactctgaaagtgcttcattggatggacaaatagtaaaatatcaacctatgatcaatgaagcagccaaagcgatgctaaggaagatcctaaagctagattcttcacatagatttgaatccatgggcaattcagataatttccttcttgagaattatatgccaaatggtcaaggtcttgacagctcttcatcaactcggaattctggtgttacccttgcagaggtcccagctaactcaggtttgccatatgtagctacaagctctggactttcagctatttgttcaacttcgactcctcagattcagtgcccagttgttttggacaacggcatacccaaagaagttccaaacatgagtgcggtgccttctgttccgaaggctgtggctccaggcccaactgatatcaatattctggaattcccagatttgcaagatatagtagctgaagaaaatgttgatattcctggagggggctttgaaatgcctggtcctgagggtgtattctctttgcctgaagaaggtgatgatagtgttcccattgagactgatgagattttgtacaacgatgacacccagaaacttcctgctatcattgattctttctgggaacagttcctggtggctagccctctatctgttgataatgatgaagtcgattcaggtgtactagaccaaaaggaaacacaacaggggaatggatggaccaaagctgaaaacatggctaaccttacagaacagatgggcctcctgtcatcacaccatacaggatga

SEQ ID NO: 8247 - protein, 498 aa, Oryza sativa subsp. japonica
MEAAVAAAAAAAGAVTTAVAPPPGAAVSNGVATAPPPFLMKTYEMVDDPATDAVVSWGPGNQKLRCVKQPRVRARPPPQVLQAQATSPGFRKVDPDRWEFANEGFLRGQKHLLKTINRRKPTHGNNQVQQPQLPAAPVPACVEVGKFGMEEEIEMLKRDKNVLMQELVRLRQQQQTTDHQLQTLGKRLQGMEQRQQQMMSFLAKAMHSPGFLAQFVQQNENSRRRIVASNKKRRLPKQDGSLDSESASLDGQIVKYQPMINEAAKAMLRKILKLDSSHRFESMGNSDNFLLENYMPNGQGLDSSSSTRNSGVTLAEVPANSGLPYVATSSGLSAICSTSTPQIQCPVVLDNGIPKEVPNMSAVPSVPKAVAPGPTDINILEFPDLQDIVAEENVDIPGGGFEMPGPEGVFSLPEEGDDSVPIETDEILYNDDTQKLPAIIDSFWEQFLVASPLSVDNDEVDSGVLDQKETQQGNGWTKAENMANLTEQMGLLSSHHTG

SEQ ID NO: 8248 - DNA, 1509 bp, Medicago sativa
  CDS (1)..(1509)
atggatggagcaagcggcgcaagtggcggcggagagggttcaaccacccagataccggcgccgacaccgatgcaaaacgcgaacgcgccgccaccgtttttgagcaaaacgtatgacatggtggatgatccttcaacggatgcgatagtttcatggagcgcaaccaacaacagtttcgttgtttgggacccacctgaattcgctagggaccttttgccgaagttcttcaagcataacaatttctcaagctttgtgagacagttgaatacttatggtttcaggaaggttgacccagatcgttgggaatttgcaaatgagggctttttgaggggtcaaaagcaattgcttaagagtattagtcgaagaaaacctgcccatggtcatactcaacaacaggctcagcaaccgcatggacagagttcatcagtaggggcatgtgtagaagtcggcaaatttgggcttgaggaagaggttgagaggcttaaaagagataagaatgttctcatgcaagagcttgtgaggttgagacagcagcaacaaaccactgacggccagctgcaaacaatggttcagcgccttcaaggaatggagcaacgacaacagcaaatgatgtcattccttgccaaagccgtccaaagccctggtttctttgctcagtttgtgcaacaacaaaatgacagcaataggcgcattactgaagtcaacaaaaagcgtcggctcaagcaggatggtattgctgaaacaacagagcaagctacccctcctgatggacaaattgttaaatatcaacctatgatgaatgaaacagcaaaagcaatgctaaggaagatcatgaaatgggatactccgcgtgtagaatctttcaataaaaaccctgataattacttgattggtgatggtacttcaccatccagtgcaatggacagtagtagctctacaagctggaactcgggagtaactcttcaagaggttcctccatcttcagtgcagtctactcaaattccagtgtcaacagggactcaaggacacatcccctcagcagaaaaacctgaaattctatctgtacctcaagctgcagcatctgcaaatgttatgaaggatggaacacatgcagcatcgactatcccgacttctcaagcagatgttataatgcctgatataccttcagtaccagagattgtacctaaaagtattcttgatatacctgaagacaattatatggctcccgagacagatgatggatttatggatccgagttcacttggatcattacccattgatttggattgtctttcacccggtgcagacattgatgatttgttaagcaattctatttgggatgatcttctgcaaactccaattccagaggattttgaggccaacattgacgaaatatccagagggaatgaggtgcagccaacagaaaatggctgggacaataatactcagcccctggatcaactaacagagcagatgggtcttctttcttctgatgccaaaagaatttaa

SEQ ID NO: 8249 - protein, 502 aa, Medicago sativa
MDGASGASGGGEGSTTQIPAPTPMQNANAPPPFLSKTYDMVDDPSTDAIVSWSATNNSFVVWDPPEFARDLLPKFFKHNNFSSFVRQLNTYGFRKVDPDRWEFANEGFLRGQKQLLKSISRRKPAHGHTQQQAQQPHGQSSSVGACVEVGKFGLEEEVERLKRDKNVLMQELVRLRQQQQTTDGQLQTMVQRLQGMEQRQQQMMSFLAKAVQSPGFFAQFVQQQNDSNRRITEVNKKRRLKQDGIAETTEQATPPDGQIVKYQPMMNETAKAMLRKIMKWDTPRVESFNKNPDNYLIGDGTSPSSAMDSSSSTSWNSGVTLQEVPPSSVQSTQIPVSTGTQGHIPSAEKPEILSVPQAAASANVMKDGTHAASTIPTSQADVIMPDIPSVPEIVPKSILDIPEDNYMAPETDDGFMDPSSLGSLPIDLDCLSPGADIDDLLSNSIWDDLLQTPIPEDFEANIDEISRGNEVQPTENGWDNNTQPLDQLTEQMGLLSSDAKRI

SEQ ID NO: 8250 - DNA, 1509 bp, Medicago sativa
  CDS (1)..(1509)
atggatggagcaagcggcggaagtggcggcggagagggttcaaccacccaaataccggcgccgacaccgatgctaaacgcgaacgcgccgccaccgtttttgagcaaaacttatgacatggtggatgatccttcaacagatgcgatagtttcatggagcgcaaccaacaacagtttcgttgtttgggacccacccgaattcgctagggaccttttgccgaagttcttcaagcataacaatttctcaagctttgtgagacagttgaatacttatggtttcaggaaggttgacccagatcgttgggaatttgcaaatgagggctttttgaggggtcaaaagcaattgcttaagagtattagtcgaagaaaacctgcccatggtcatactcaacaacaggctcagcaaccgcatggacagagttcatcagtaggggcatgtgtagaagtcggcaaatttgggcttgaggaagaggttgagaggcttaaaagagataagaatgttctcatgcaagagcttgtgaggttgagacagcagcaacaaaccactgacggccagctgcaaacaatggttcagcgccttcaaggaatggagcaacgacaacagcaaatgatgtcattccttgccaaagccgtccaaagccctggtttctttgctcagtttgtgcaacaacaaaatgacagcaataggcgcattactgaagtcaacaaaaagcgtcggctcaagcaggatggtattgctgaaacaacagagcaagctacccctcctgatggacaaattgttaaatatcaacctatgatgaatgaaacagcaaaagcaatgctaaggaagatcatgaaatgggatactccgcgtgtagaatctttcaataaaaaccctgataattacttgattggtgatggtacttcaccatccagtgcaatggacagtagtagctctacaagctggaactcgggagtaactcttcaagaggttcctccatcttcagtgcagtctactcaaattccagtgtcaacagggactcaaggacacatcccctcagcagaaaaacctgaaattctatctgtacctcaagctgcagcatctgcaaatgttatgaaggatggaacacatgcagcatcgactatcccgacttctcaagcagatgttataatgcctgatataccttcagtaccagagattgtgcctaaaagtattcttgatatacctgaagacaattatatggctcccgagacagatgatggatttatggatccgagttcacttggatcattacccattgatttggattgtctttcacccggtgcagacattgatgatttgttaagcaattctatttgggatgatcttctgcaaactccaattccagaggattttgaggccaacattgacgaaatatccagagggaatgaggtgcagccaacagaaaatggctgggacaataatactcagcccctggatcaactaacagagcagatgggtcttctttcttctgatgccaaaagaatttaa

SEQ ID NO: 8251 - protein, 502 aa, Medicago sativa
MDGASGGSGGGEGSTTQIPAPTPMLNANAPPPFLSKTYDMVDDPSTDAIVSWSATNNSFVVWDPPEFARDLLPKFFKHNNFSSFVRQLNTYGFRKVDPDRWEFANEGFLRGQKQLLKSISRRKPAHGHTQQQAQQPHGQSSSVGACVEVGKFGLEEEVERLKRDKNVLMQELVRLRQQQQTTDGQLQTMVQRLQGMEQRQQQMMSFLAKAVQSPGFFAQFVQQQNDSNRRITEVNKKRRLKQDGIAETTEQATPPDGQIVKYQPMMNETAKAMLRKIMKWDTPRVESFNKNPDNYLIGDGTSPSSAMDSSSSTSWNSGVTLQEVPPSSVQSTQIPVSTGTQGHIPSAEKPEILSVPQAAASANVMKDGTHAASTIPTSQADVIMPDIPSVPEIVPKSILDIPEDNYMAPETDDGFMDPSSLGSLPIDLDCLSPGADIDDLLSNSIWDDLLQTPIPEDFEANIDEISRGNEVQPTENGWDNNTQPLDQLTEQMGLLSSDAKRI

SEQ ID NO: 8252 - DNA, 1686 bp, Medicago sativa
  CDS (1)..(1686)
atggatggagcaagcggcggaagtggcggcggagagggttcaaccacccaaataccggcgccgacaccgatgctaaacgcgaacgcgccgccaccgtttttgagcaaaacttatgacatggtggatgatccttcaacagatgcgatagtttcatggagcgcaaccaacaacagtttcgttgtttgggacccacccgaattcgctagggaccttttgccgaagttcttcaagcataacaatttctcaagctttgtgagacagttgaatacttatggtttcaggaaggttgacccagatcgttgggaatttgcaaatgagggctttttgaggggtcaaaagcaattgcttaagagtattagtcgaagaaaacctgcccatggtcatactcaacaacaggctcagcaaccgcatggacagagttcatcagtaggggcatgtgtagaagtcggcaaatttgggcttgaggaagaggttgagaggcttaaaagagataagaatgttctcatgcaagagcttgtgaggttgagacagcagcaacaaaccactgacggccagctgcaaacaatggttcagcgccttcaaggaatggagcaacgacaacagcaaatgatgtcattccttgccaaagccgtccaaagccctggtttctttgctcagtttgtgcaacaacaaaatgacagcaataggcgcattactgaagtcaacaaaaagcgtcggctcaagcaggatggtattgctgaaacaacagagcaagctacccctcctgatggacaaattgttaaatatcaacctatgatgaatgaaacagcaaaagcaatgctaaggaagatcatgaaatgggatactccgcgtgtagaatctttcaataaaaaccctgataattacttgattggtgatggtacttcaccatccagtgcaatggacagtagtagctctacaagctggaactcgggagtaactcttcaagaggttcctccatcttcagtgcagtctactcaaattccaatcatgaaatgggatactccgcgtgtagaatctttcaataaaaaccctgataattacttgattggtgatggtacttcaccatccagtgcaatggacagtagtagctctacaagctggaactcgggagtaactcttcaagaggttcctccatcttcagtgcagtctactcaaattccaatgtcaacagggactcaaggacacatcccctcagcagaaaaacctgaaattctatctgtacctcaagctgcagcatctgcaaatgttatgaaggatggaacacatgcagcatcgactatcccgacttctcaagcagatgttataatgcctgatataccttcagtaccagagattgtgcctaaaagtattcttgatatacctgaagacaattatatggctcccgagacagatgatggatttatggatccgagttcacttggatcattacccattgatttggattgtctttcacccggtgcagacattgatgatttgttaagcaattctatttgggatgatcttctgcaaactccaattccagaggattttgaggccaacattgacgaaatatccagagggaatgaggtgcagccaacagaaaatggctgggacaataatactcagcccctggatcaactaacagagcagatgggtcttctttcttctgatgccaaaagaatttaa

SEQ ID NO: 8253 - protein, 561 aa, Medicago sativa
MDGASGGSGGGEGSTTQIPAPTPMLNANAPPPFLSKTYDMVDDPSTDAIVSWSATNNSFVVWDPPEFARDLLPKFFKHNNFSSFVRQLNTYGFRKVDPDRWEFANEGFLRGQKQLLKSISRRKPAHGHTQQQAQQPHGQSSSVGACVEVGKFGLEEEVERLKRDKNVLMQELVRLRQQQQTTDGQLQTMVQRLQGMEQRQQQMMSFLAKAVQSPGFFAQFVQQQNDSNRRITEVNKKRRLKQDGIAETTEQATPPDGQIVKYQPMMNETAKAMLRKIMKWDTPRVESFNKNPDNYLIGDGTSPSSAMDSSSSTSWNSGVTLQEVPPSSVQSTQIPIMKWDTPRVESFNKNPDNYLIGDGTSPSSAMDSSSSTSWNSGVTLQEVPPSSVQSTQIPMSTGTQGHIPSAEKPEILSVPQAAASANVMKDGTHAASTIPTSQADVIMPDIPSVPEIVPKSILDIPEDNYMAPETDDGFMDPSSLGSLPIDLDCLSPGADIDDLLSNSIWDDLLQTPIPEDFEANIDEISRGNEVQPTENGWDNNTQPLDQLTEQMGLLSSDAKRI

SEQ ID NO: 8254 - DNA, 1509 bp, Medicago sativa
  CDS (1)..(1509)
atggatggagcaagcggcggcagtggcggcggagagggttcaaccacccaaataccggcgccgacaccgatgcaaaacgcgaacgcgccgccaccgtttttgagcaaaacgtatgatatggtggatgatccttcaacggatgcgatagtttcatggagcgcaaccaacaacagtttcgttgtttgggacccacccgaattcgctagggaccttttgccgaagttcttcaagcataacaatttctcaagctttgtgagacagttgaatacttatggtttcaggaaggttgacccagatcgttgggaatttgcaaatgagggctttttgaggggtcaaaagcaattgcttaagagtattagtcgaagaaaacctgcccatggtcatactcaacaacaggctcagcaaccgcatggacagagttcatcagtaggggcatgtgtagaagtcggcaaatttgggcttgaggaagaggttgagaggcttaaaagagataagaatgttctcatgcaagagcttgtgaggttgagacagcagcaacaaaccactgacggccagctgcaaacaatggttcagcgccttcaaggaatggagcaacgacaacagcaaatgatgtcattccttgccaaagccgtccaaagccctggtttctttgctcagtttgtgcaacaacaaaatgacagcaataggcgcattactgaagtcaacaaaaagcgtcggctcaagcaggatggtattgctgaaacaacagagcaagctacccctcctgatggacaaattgttaaatatcaacctatgatgaatgaaacagcaaaagcaatgctaaggaagatcatgaaatgggatactccgcgtgtagaatctttcaataaaaaccctgataattacttgattggtgatggtacttcaccatccagtgcaatggacagtagtagctctacaagctggaactcgggagtaactcttcaagaggttcctccatcttcagtgcagtctactcaaattccagtgtcaacagggactcaaggacacatcccctcagcagaaaaacctgaaattctatctgtacctcaagctgcagcatctgcaaatgttatgaaggatggaacacatgcagcatcgactatcccgacttctcaagcagatgttataatgcctgatataccttcagtaccagagattgtgcctaaaagtattcttgatatacctgaagacaattatatggctcccgagacagatgatggatttatggatccgagttcacttggatcattacccattgatttggattgtctttcacccggtgcagacattgatgatttgttaagcaattctatttgggatgatcttctgcaaactccaattccagaggattttgaggccaacattgacgaaatatccagagggaatgaggtgcagccaacagaaaatggctgggacaataatactcagcccctggatcaactaacagagcagatgggtcttctttcttctgatgccaaaagaatttaa

SEQ ID NO: 8255 - protein, 502 aa, Medicago sativa
MDGASGGSGGGEGSTTQIPAPTPMQNANAPPPFLSKTYDMVDDPSTDAIVSWSATNNSFVVWDPPEFARDLLPKFFKHNNFSSFVRQLNTYGFRKVDPDRWEFANEGFLRGQKQLLKSISRRKPAHGHTQQQAQQPHGQSSSVGACVEVGKFGLEEEVERLKRDKNVLMQELVRLRQQQQTTDGQLQTMVQRLQGMEQRQQQMMSFLAKAVQSPGFFAQFVQQQNDSNRRITEVNKKRRLKQDGIAETTEQATPPDGQIVKYQPMMNETAKAMLRKIMKWDTPRVESFNKNPDNYLIGDGTSPSSAMDSSSSTSWNSGVTLQEVPPSSVQSTQIPVSTGTQGHIPSAEKPEILSVPQAAASANVMKDGTHAASTIPTSQADVIMPDIPSVPEIVPKSILDIPEDNYMAPETDDGFMDPSSLGSLPIDLDCLSPGADIDDLLSNSIWDDLLQTPIPEDFEANIDEISRGNEVQPTENGWDNNTQPLDQLTEQMGLLSSDAKRI

SEQ ID NO: 8256 - DNA, 1509 bp, Medicago sativa
  CDS (1)..(1509)
atggatggagcaagcggcgcaagtggcggcggagagggttcaaccacccagataccggcgccgacaccgatgcaaaacgcgaacgcgccgccaccgtttttgagcaaaacttatgacatggtggatgatccttcaacggatgcgatagtttcatggagcgcaaccaacaacagtttcgttgtttgggacccacccgaattcgctagggaccttttgccgaagttcttcaagcataacaatttctcaagctttgtgagacagttgaatacttatggtttcaggaaggttgacccagatcgttgggaatttgcaaatgagggctttttgaggggtcaaaagcaattgcttaagagtattagtcgaagaaaacctgcccatggtcatactcaacaacaggctcagcaaccgcatggacagagttcatcagtaggggcatgtgtagaagtcggcaaatttgggcttgaggaagaggttgagaggcttaaaagagataagaatgttctcatgcaagagcttgtgaggttgagacagcagcaacaaaccactgacggccagctgcaaacaatggttcagcgccttcaaggaatggagcaacgacaacagcaaatgatgtcattccttgccaaagccgtccaaagccctggtttctttgctcagtttgtgcaacaacaaaatgacagcaataggcgcattactgaagtcaacaaaaagcgtcggctcaagcaggatggtattgctgaaacaacagagcaagctacccctcctgatggacaaattgttaaatatcaacctatgatgaatgaaacagcaaaagcaatgctaaggaagatcatgaaatgggatactccgcgtgtagaatctttcaataaaaaccctgataattacttgattggtgatggtacttcaccatccagtgcaatggacagtagtagctctacaagctggaactcgggagtaactcttcaagaggttcctccatcttcagtgcagtctactcaaattccaatgtcaacagggactcaaggacacatcccctcagcagaaaaacctgaaattctatctgtacctcaagctgcagcatctgcaaatgttatgaaggatggaacacatgcagcatcgactatcccgacttctcaagcagatgttataatgcctgatataccttcagtaccagagattgtgcctaaaagtattcttgatatacctgaagacaattatatggctcccgagacagatgatggatttatggatccgagttcacttggatcattacccattgatttggattgtctttcacccggtgcagacattgatgatttgttaagcaattctatttgggatgatcttctgcaaactccaattccagaggattttgaggccaacattgacgaaatatccagagggaatgaggtgcagccaacagaaaatggctgggacaataatactcagcccctggatcaactaacagagcagatgggtcttctttcttctgatgccaaaagaatttaa

SEQ ID NO: 8257 - protein, 502 aa, Medicago sativa
MDGASGASGGGEGSTTQIPAPTPMQNANAPPPFLSKTYDMVDDPSTDAIVSWSATNNSFVVWDPPEFARDLLPKFFKHNNFSSFVRQLNTYGFRKVDPDRWEFANEGFLRGQKQLLKSISRRKPAHGHTQQQAQQPHGQSSSVGACVEVGKFGLEEEVERLKRDKNVLMQELVRLRQQQQTTDGQLQTMVQRLQGMEQRQQQMMSFLAKAVQSPGFFAQFVQQQNDSNRRITEVNKKRRLKQDGIAETTEQATPPDGQIVKYQPMMNETAKAMLRKIMKWDTPRVESFNKNPDNYLIGDGTSPSSAMDSSSSTSWNSGVTLQEVPPSSVQSTQIPMSTGTQGHIPSAEKPEILSVPQAAASANVMKDGTHAASTIPTSQADVIMPDIPSVPEIVPKSILDIPEDNYMAPETDDGFMDPSSLGSLPIDLDCLSPGADIDDLLSNSIWDDLLQTPIPEDFEANIDEISRGNEVQPTENGWDNNTQPLDQLTEQMGLLSSDAKRI

SEQ ID NO: 8258 - DNA, 1299 bp, Brassica oleracea
  CDS (1)..(1299)
atggatggtgttaccggcggagactcaaaaagcggcgaggctacgacggcgccgccgctccgaaatccgcatccggcgacgttgcttggcacgaacgctttacctcctccgttcctcagcaagacgtacgacatggtggaagatccggcgagcgacgcgatcgtctcgtggagcccggcgaacaatagcttcgtcgtgtgggatccgccggagttttctcgctcccttctccccagatacttcaaacacaacaatttctccagcttcgttcgtcagttgaacacctatggtttcaggaaagtggatccagatcggtgggagtttgcgaacgaaggtttcttgagaggtcaaaagcatctcttgaagacgataagccggagaaaatctactcagggacatggtagtagtagtagtagtaatccacaatctcatcagggtcacatggcttcgttatcttcatgcgttgaggttgggaagtttggtctcgaggaagaggttgaacagcttaaaagagacaagaacgtgctgatgcaggagctagtgaagttacgccagcagcaacaatcaacggacagcaagcttcagtctatggtcaagagtctccagacgatggagcagaggcagcagcagatcatgtctttccttgctaaagctgttcagaatccaactttcctctctcagtttatacagaagcagacggatagtggtaatatgcatgtgaccgaggctagtaagaagcggagactcactgaggatgctgctgctgcttctgatggacagatagttaagtatcagcctattagaagtgattcaacaatgtctatgatgtggaacatgatgaacactgatgagaagttcccgttttcgccaaaccgggactctggagtcacttttcaagaggtattactgcccacaacttcaggacaatcacaagcatatgcacccatatcctctgcttcaacttccttaatgccaatgattcctcccatgccacaagagagcatcagtgactcacctacagaaaactacatgaatgcagagaaggatgtttcagaggcattcatctctcctagccctttccttgacggtggttcagtaccgaatcagcttgagggattacctcaagaccttgatattgatgaactgatgagtaactgtgatatctttgaagagtatctggcacaaagcccagtttttggagatgagacaacactagagagcagcgacgcaaatggtgggcatgtggataagcttatagaggagttgggtcatctcacttcagagacaaagcaactgtga

SEQ ID NO: 8259 - protein, 432 aa, Brassica oleracea
MDGVTGGDSKSGEATTAPPLRNPHPATLLGTNALPPPFLSKTYDMVEDPASDAIVSWSPANNSFVVWDPPEFSRSLLPRYFKHNNFSSFVRQLNTYGFRKVDPDRWEFANEGFLRGQKHLLKTISRRKSTQGHGSSSSSNPQSHQGHMASLSSCVEVGKFGLEEEVEQLKRDKNVLMQELVKLRQQQQSTDSKLQSMVKSLQTMEQRQQQIMSFLAKAVQNPTFLSQFIQKQTDSGNMHVTEASKKRRLTEDAAAASDGQIVKYQPIRSDSTMSMMWNMMNTDEKFPFSPNRDSGVTFQEVLLPTTSGQSQAYAPISSASTSLMPMIPPMPQESISDSPTENYMNAEKDVSEAFISPSPFLDGGSVPNQLEGLPQDLDIDELMSNCDIFEEYLAQSPVFGDETTLESSDANGGHVDKLIEELGHLTSETKQL

SEQ ID NO: 8260 - DNA, 1509 bp, Medicago sativa
  CDS (1)..(1509)
atggatggagcaagcggcggaagtggcggcggagagggttcaaccacccaaataccggcgccgacaccgatgctaaacgcgaacgcgccgccaccgtttttgagcaaaacttatgacatggtggatgatccttcaacagatgcgatagtttcatggagcgcaaccaacaacagtttcgttgtttgggacccacccgaattcgctagggaccttttgccgaagttcttcaagcataacaatttctcaagctttgtgagacagttgaatacttatggtttcaggaaggttgacccagatcgttgggaatttgcaaatgagggctttttgaggggtcaaaagcaattgcttaagagtattagtcgaagaaaacctgcccatggtcatactcaacaacaggctcagcaaccgcatggacagagttcatcagtaggggcatgtgtagaagtcggcaaatttgggcttgaggaagaggttgagaggcttaaaagagataagaatgttctcatgcaagagcttgtgaggttgagacagcagcaacaaaccactgacggccagctgcaaacaatggttcagcgccttcaaggaatggagcaacgacaacagcaaatgatgtcattccttgccaaagccgtccaaagccctggtttctttgctcagtttgtgcaacaacaaaatgacagcaataggcgcattactgaagtcaacaaaaagcgtcggctcaagcaggatggtattgctgaaacaacagagcaagctacccctcctgatggacaaattgttaaatatcaacctatgatgaatgaaacagcaaaagcaatgctaaggaagatcatgaaatgggatactccgcgtgtagaatctttcaataaaaaccctgataattacttgattggtgatggtacttcaccatccagtgcaatggacagtagtagctctacaagctggaactcgggagtaactcttcaagaggttcctccatcttcagtgcagtctactcaaattccaatgtcaacagggactcaaggacacatcccctcagcagaaaaacctgaaattctatctgtacctcaagctgcagcatctgcaaatgttatgaaggatggaacacatgcagcatcgactatcccgacttctcaagcagatgttataatgcctgatataccttcagtaccagagattgtgcctaaaagtattcttgatatacctgaagacaattatatggctcccgagacagatgatggatttatggatccgagttcacttggatcattacccattgatttggattgtctttcacccggtgcagacattgatgatttgttaagcaattctatttgggatgatcttctgcaaactccaattccagaggattttgaggccaacattgacgaaatatccagagggaatgaggtgcagccaacagaaaatggctgggacaataatactcagcccctggatcaactaacagagcagatgggtcttctttcttctgatgccaaaagaatttaa

SEQ ID NO: 8261 - protein, 502 aa, Medicago sativa
MDGASGGSGGGEGSTTQIPAPTPMLNANAPPPFLSKTYDMVDDPSTDAIVSWSATNNSFVVWDPPEFARDLLPKFFKHNNFSSFVRQLNTYGFRKVDPDRWEFANEGFLRGQKQLLKSISRRKPAHGHTQQQAQQPHGQSSSVGACVEVGKFGLEEEVERLKRDKNVLMQELVRLRQQQQTTDGQLQTMVQRLQGMEQRQQQMMSFLAKAVQSPGFFAQFVQQQNDSNRRITEVNKKRRLKQDGIAETTEQATPPDGQIVKYQPMMNETAKAMLRKIMKWDTPRVESFNKNPDNYLIGDGTSPSSAMDSSSSTSWNSGVTLQEVPPSSVQSTQIPMSTGTQGHIPSAEKPEILSVPQAAASANVMKDGTHAASTIPTSQADVIMPDIPSVPEIVPKSILDIPEDNYMAPETDDGFMDPSSLGSLPIDLDCLSPGADIDDLLSNSIWDDLLQTPIPEDFEANIDEISRGNEVQPTENGWDNNTQPLDQLTEQMGLLSSDAKRI

SEQ ID NO: 8262 - DNA, 1533 bp, Glycine max
  CDS (1)..(1533)
atggacggaagagcgagcagcagcgtgggcggagaagcatcgccagctccagcaccggtgccgataacgaatgcgaacgcgccgccgcctttcttgagcaagacatacgagatggtagaggacccttcgacggactcgatagtgtcgtggagtccaacgaacaacagtttcgtggtttggaaccctcccgagttcgccagagatctcttgcccaaacacttcaagcacaacaacttctccagcttcgttcgccaattaaacacctacggatttaggaaggtagatccagatcgctgggaatttgcaaatgagggatttttgaggggtcaaaagcacttgcttaagactataactcggcggaaacctgcccatggtcataatcaacaggcacagcaagcacatggacagagttcatctgttggggcttgtgttgaagttgggaagtttggacttgaggaagaggttgagattctcaagagagataagaatgtgctcatgcaagagcttgtgagattgaggcagcagcaacaggctactgataaccagctgcagagtatggttcagcgccttcaaggaatggagcaacgacagcaacaaatgatgtcattccttgcaaaggctgttcagagtcctggttttttagctcaatttgtacaacagcaaaatgagagtagtagacgcataacggaggcaaataaaaaacgccggcttaagcaggagggtattggtgaaatggaacatactgctgcttctgatggccaaattgttaaatatcaacctctgataaatgaagcagcaaaagcaatgctgaggcaaatgatgaaattggatacttctcgactagaatcttttagtaataacgctgataattacttgattggtgatcattcatcatcatccggtgcaacggacaggggaaactctttgagccggacttctggagtaacacttcaagtggtccctctgactacaatccagtcttctcacattccatctgcaacggggataggggatgacccttcaacaggaaaatctgagattctatctactcctcaagttgtagcctgtgatgaagttacgaaagctcagtactctaatgtaaatgtttcggttggagaatctaatgcacctgctatccctgctactcaaacagatgaaatcatgcgggacctctctacaataccagacatagtggcaggaaatattcttgatattcctcaagaaaattatatggcacctgagacaggcggtgaaggatatatggatcctacttcatttggagtgaatgtgtcattgcccattgattttgatagtatttcacctgaagcagacattgatgatttgttgaacaatcctcacttttgggatgatattttgcgaactccagtgtcagaggagattgatacgaatgatgctgaagtattcaaggagaatgaggtgcagccaatggaaaatggattggacgaatcacaaaatatggaccaacttactgagcagatgggcctactttcttctgatgccaaaagaatttga

SEQ ID NO: 8263 - protein, 510 aa, Glycine max
MDGRASSSVGGEASPAPAPVPITNANAPPPFLSKTYEMVEDPSTDSIVSWSPTNNSFVVWNPPEFARDLLPKHFKHNNFSSFVRQLNTYGFRKVDPDRWEFANEGFLRGQKHLLKTITRRKPAHGHNQQAQQAHGQSSSVGACVEVGKFGLEEEVEILKRDKNVLMQELVRLRQQQQATDNQLQSMVQRLQGMEQRQQQMMSFLAKAVQSPGFLAQFVQQQNESSRRITEANKKRRLKQEGIGEMEHTAASDGQIVKYQPLINEAAKAMLRQMMKLDTSRLESFSNNADNYLIGDHSSSSGATDRGNSLSRTSGVTLQVVPLTTIQSSHIPSATGIGDDPSTGKSEILSTPQVVACDEVTKAQYSNVNVSVGESNAPAIPATQTDEIMRDLSTIPDIVAGNILDIPQENYMAPETGGEGYMDPTSFGVNVSLPIDFDSISPEADIDDLLNNPHFWDDILRTPVSEEIDTNDAEVFKENEVQPMENGLDESQNMDQLTEQMGLLSSDAKRI

SEQ ID NO: 8264 - DNA, 1584 bp, Solanum lycopersicum
  CDS (1)..(1584)
atggagccgaattcttatggcagcgggaaggctgctgtcggtgacggagtaggagcgccaatgttgcagacggcgccggcgccggcgccgatacccagtgcgaatgcgccgccgccgtttctggtgaagacgtatgatatggtggatgatccgagtacggataagatcgtgtcgtggagtcctacgaataatagttttgtggtttgggatcctccggagtttgctaaagacctacttccgaagtactttaagcataataacttctccagctttgttcggcagctgaatacttatggttttagaaaggttgatccagaccgctgggaatttgctaatgagggattcttaagaggtcagaagcacctgcttaaaagtataagtcgacgtaaacctgctcatggacatgctcaacaacagcagcagccacatggaaatgctcaacaacagatgcagccacctggacacagtgcatccgttggggcttgtgtcgaggttgggaaatttgggcttgaagaagaggttgagaggctgaaaagggacaagaacgtgcttatgcaagagctggttaggctcagacaacagcagcaagccactgacaatcagttgcaagggatggtgcagcgccttcaaggtatggagctgcgacaacaacaaatgatgtcgttcctggcaaaagctgtcaacaggcctggattcttggcacagtttgttcagcagcaaaatgagagtaataagcgaatagctgaaggcagcaagaaacgaaggattaagcaggatattgaatcacaggatccatccgttactcctgcggatggacagattgttaagtaccaacctgggataaatgaggcagcaaaggcaatgttgagggagctttcaaaactagattcatctcctagattagataacttcagcaacagtcctgaaagtttcctgattggtgatggttcaccacagtctaatgcatcttcaggtcgtgtttcgggagtcactcttcaggaggtcccaccaacttctgggaagcccttgctgaatacagcttcagcaattgcaggtcaaagtttgttgccagccacttctgagatgcagtcatctcatcttggcacatgttccgaaatcatcaacaatcaattgtcaaacataatcccgttggtaggaggtgaagatttgcatcctggttcactttctgcatccgatatgattatgcctgagttatcacagttgcaaggaattttgcctgaaaacaatacagatgtgattggatgtgattctttcatggatactagtgcagttgagggaaaagtgggactagatattattggtagttgtttgtctcctggtgctgatattgactggcagagtggtttgctggatgaaatagaagagtttcctagtgtgggtgaccctttctgggaaaagtttctccaaagcccttgttcccctgatgctgcaatggatgatgatatttcaaacacaagtgaaaccaaaccacaaataaatggatgggataaaactcagaacatggaacatcttactgaacaaatgggggctactaatatcaaacaacaaaaacatatgatctaa

SEQ ID NO: 8265 - protein, 527 aa, Solanum lycopersicum
MEPNSYGSGKAAVGDGVGAPMLQTAPAPAPIPSANAPPPFLVKTYDMVDDPSTDKIVSWSPTNNSFVVWDPPEFAKDLLPKYFKHNNFSSFVRQLNTYGFRKVDPDRWEFANEGFLRGQKHLLKSISRRKPAHGHAQQQQQPHGNAQQQMQPPGHSASVGACVEVGKFGLEEEVERLKRDKNVLMQELVRLRQQQQATDNQLQGMVQRLQGMELRQQQMMSFLAKAVNRPGFLAQFVQQQNESNKRIAEGSKKRRIKQDIESQDPSVTPADGQIVKYQPGINEAAKAMLRELSKLDSSPRLDNFSNSPESFLIGDGSPQSNASSGRVSGVTLQEVPPTSGKPLLNTASAIAGQSLLPATSEMQSSHLGTCSEIINNQLSNIIPLVGGEDLHPGSLSASDMIMPELSQLQGILPENNTDVIGCDSFMDTSAVEGKVGLDIIGSCLSPGADIDWQSGLLDEIEEFPSVGDPFWEKFLQSPCSPDAAMDDDISNTSETKPQINGWDKTQNMEHLTEQMGATNIKQQKHMI

SEQ ID NO: 8266 - DNA, 1584 bp, Solanum peruvianum
  CDS (1)..(1584)
atggagccaaattcttctggcagcgggaaggctgctgtcggtgacggaggaggaggaggagctccgatgttacagccggcgccggcgccggcgccgatgcccagtgcgaatgcgccgccgccgtttctggtgaagacttatgatatggtggatgatccgagtacggataagatcgtgtcgtggagtcctacgaataatagttttgtggtttgggatcctccggagtttgctaaggacctacttcccaagtactttaagcataataacttttccagctttgttcggcagctgaatacttatggttttagaaaggttgatccagaccgctgggaatttgctaatgagggattcttaagaggtcagaagcacctgcttaaaagtataagtcggcgtaaacctgctcatggacatgctcaacaacagcagcagccacatggacatgctcaacaacagatgcagccacctggacacagtgcatccgttggggcttgtgtcgaggttgggaaatttgggcttgaagaagaggttgagaggctgaaaagggacaagaacgtgcttatgcaagagctggttaggctcagacaacagcagcaatccactgacaatcagttgcaagggatggtgcagcgccttcaaggtatggagctgcgacaacaacaaatgatgtcgttcctggcaaaagctgtcaacagccctggattcttggcacagtttgttcagcagcaaaatgagagtaataagcgaatagctgaaggcagcaagaaacgaaggattaagcaggacattgaatcacaggatccatccgttactcctgcggatggacagattgtaaagtaccaacctgggataaatgaggcagcaaaggcaatgttgagggagctttcaaaactagattcatctcctagattagagaacttcagcaacagtcctgaaagtttcctgattggtgatggttcaccacagtctaatgcatcttcaggtcgtgtttcaggagtcactcttcaggaggtcccaccaacttctgggaagcccttgctgaatacagcttcagcaattgcaggtcaaagtttgttgccagccacttctgagatgcagtcatctcatcttggcacatgttccgaaatcatcaataatcagttgtcaaacataatcccgttggtaggaggtgaagatttgcatcctggttcactttctgcatccgatatgattatgcctgagttatcacagttgcaaggaattttgcctgaaaacaatacagatgtgattggatgtgattctttcatggatactattgcagttgaggggaaaatgggactagatattggtagtttgtctccaggtgctgatattgactggcagagtggtttgctggatgaaatacaagagtttcctagtgtgggtgaccctttttgggagaagtttctccaaagcccttcttcccctgatgctgcaatggatgatgatatttcaaacacaagtgaaaccaaaccacaaataaatggatgggataaaactcagaacatggaacatcttactgaacaaatgggggctactaatatcaaacaacaaaaacatatgatctaa

SEQ ID NO: 8267 - protein, 527 aa, Solanum peruvianum
MEPNSSGSGKAAVGDGGGGGAPMLQPAPAPAPMPSANAPPPFLVKTYDMVDDPSTDKIVSWSPTNNSFVVWDPPEFAKDLLPKYFKHNNFSSFVRQLNTYGFRKVDPDRWEFANEGFLRGQKHLLKSISRRKPAHGHAQQQQQPHGHAQQQMQPPGHSASVGACVEVGKFGLEEEVERLKRDKNVLMQELVRLRQQQQSTDNQLQGMVQRLQGMELRQQQMMSFLAKAVNSPGFLAQFVQQQNESNKRIAEGSKKRRIKQDIESQDPSVTPADGQIVKYQPGINEAAKAMLRELSKLDSSPRLENFSNSPESFLIGDGSPQSNASSGRVSGVTLQEVPPTSGKPLLNTASAIAGQSLLPATSEMQSSHLGTCSEIINNQLSNIIPLVGGEDLHPGSLSASDMIMPELSQLQGILPENNTDVIGCDSFMDTIAVEGKMGLDIGSLSPGADIDWQSGLLDEIQEFPSVGDPFWEKFLQSPSSPDAAMDDDISNTSETKPQINGWDKTQNMEHLTEQMGATNIKQQKHMI

SEQ ID NO: 8268 - DNA, 1329 bp, Brassica napus
  CDS (1)..(1329)
atggaatcggttcaatccgcaccgtcagcgaactcaaactcgccgtctatccctccgccggtgagctcagtgccaccgtttctgagcaaaacctacgacatggttgatgacccttcgaccaatgaggtcgtgtcctggagcagcgggaacaacagcttcgtcgtctggaacgtccctgagttctccaaagtgctcttgcctaagcatttcaagcacaataatttctccagcttcgttaggcagttaaatacatacggattcagaaaagttgatccagatcaatgggaatttgcaaatgaagggtttttaagaggccaaaagcaactactaaagggcattgtaaggagaaagcctcagaatcagcaacaaactcaagttcagaactcatctgttagcgcttgtgtggaggtggggaagtttggaatagaagaagaagtggaaagactcaagcgtgacaagaacgtgcttatgcaagagcttgtgaggctgaggcagcagcaacaagctacggaacaccagctgcagaacgtgggacagaaagttcaggtgatggagcagaggcaacaacagacgatgtcgtttctggcaaaggcggttcagagtccgggattcttgaaccagttggtgcagcagaatagtgatggcaacaagcatattcagggaagcaacaaaaagaggagacttcctggagatgaagaggagagttgtggagagcttaaccgtcagattgttaagtaccagccgtctataaacgaagcagcacaaactatgcttagacaggtcttgaatagaagtagctcaccggtttcaaacaatcctgagagtttcctcttgagtgatgctcccagttctaactctcccaactcagctcactcagcaatgaatcaagtacacgaggcaggtttggtggatcattctcaagctggtccaagtccaagccaaggagtagcagcagctgcagcttcttggaaccctgaatctgagttagttggactggagacaggtgatggagtgtgtttcgatccaataatggctgctttaggtggctcgctggaaatagaaagcgatgaagtttctcctgtaggtgagggagagatgactgagatagagaacgaggtccctaagctgccaggagtccaagattcattctgggaacagttctttgctgatgaaaccgcggtgattggtgagggagacgtcattatttcagaagcagtggagaactgtgagatggtaatggagcaagaaccgaaggagtggaagcaacaagaaatgaaccatcttactgaacaaatggaacttctttcttcagaagcacagaggaaatga

SEQ ID NO: 8269 - protein, 442 aa, Brassica napus
MESVQSAPSANSNSPSIPPPVSSVPPFLSKTYDMVDDPSTNEVVSWSSGNNSFVVWNVPEFSKVLLPKHFKHNNFSSFVRQLNTYGFRKVDPDQWEFANEGFLRGQKQLLKGIVRRKPQNQQQTQVQNSSVSACVEVGKFGIEEEVERLKRDKNVLMQELVRLRQQQQATEHQLQNVGQKVQVMEQRQQQTMSFLAKAVQSPGFLNQLVQQNSDGNKHIQGSNKKRRLPGDEEESCGELNRQIVKYQPSINEAAQTMLRQVLNRSSSPVSNNPESFLLSDAPSSNSPNSAHSAMNQVHEAGLVDHSQAGPSPSQGVAAAAASWNPESELVGLETGDGVCFDPIMAALGGSLEIESDEVSPVGEGEMTEIENEVPKLPGVQDSFWEQFFADETAVIGEGDVIISEAVENCEMVMEQEPKEWKQQEMNHLTEQMELLSSEAQRK

SEQ ID NO: 8270 - DNA, 1488 bp, Brassica napus
  CDS (1)..(1488)
atggatcgcggtaacagaaccagtaccaacggaggcgaaggaggatctgtaacaatggaatcaacggaaattcagccatctcctcaaccgcagcctgtggcggtcctaactggaaacgcgcctcctccgttcctgagcaagacctatgacatggttgacgatcccgcaaccgattcgattgtgtcgtggagtgcgaacaacaacagtttcatcgtatgggatccaccacagttcgctaaagatcttcttcccaagaacttcaagcacaataatttctccagcttcgtcaggcagcttaacacctacggtttccggaaggttgaccctgataaatgggaatttgcgaatgaaggttttctaagaggtcagaagcacttgcttaaaacaataactcggcgaaaacctgcacacggacatggacatcagcaatctcagcactcgattgggcagaactcatctgtaagctcatgtgttgaagttggcaaatttggtctcaaagaagaggttgagaggcttaaaagagataagaacgtccttatgcaagaactcgtcagattaagacagcagcaacaatccactgataaccaacttcaaacgatggtccagcgtctccagggcatggagaatcggcaacaacagttaatgtcgttccttgcaaaggcagttcaaagccctcattttctatctcagttcctacagcagcagaaccagcaaaacgagggtagtaggcgaattagtgataccagtaagaagcggagattcaagcgagatggcattgtcagtaataataaggattctgcttctcctgatggacagatagtgaagtatcaacctccaatgcacgagcaggcaaaggcaatgtttagtcagcttatgaagatggaaccttacaaagccggcgatgatggtttccttctaggtaacagtactactactactactagtacagaaggaacagagatggagatttcagcgaacaacataacgggtatatctcttcaggagataccaacagcttctgagatacaatcatcatcatcaccaagtggagcaactccggaaaacgttacagtagctgagtttccaacgcctgacgaagcaattccctcacctgatgtcctgtctctacccgaatttgctgatatgctgcaggagaatatcgccgaggtgcctccagagaatttcttggaaacaaacatggaagatttgagtcctatcctagattcagatctgttcaataatgatgatttaccctttgacattgacgacattctgagggaccccgatttagaaccttcggttgatgattatgcttcactctttcaagacattctcatgtcaagccctgttccagatgatatggaagtaacaccagtggatgatagaaccaaggacagtgagacagagcagaaacagatggataatctgacccaacaaatgggtctcctctcgcctgaaaccatagatctctcgaggcaaaatccgtga

SEQ ID NO: 8271 - protein, 495 aa, Brassica napus
MDRGNRTSTNGGEGGSVTMESTEIQPSPQPQPVAVLTGNAPPPFLSKTYDMVDDPATDSIVSWSANNNSFIVWDPPQFAKDLLPKNFKHNNFSSFVRQLNTYGFRKVDPDKWEFANEGFLRGQKHLLKTITRRKPAHGHGHQQSQHSIGQNSSVSSCVEVGKFGLKEEVERLKRDKNVLMQELVRLRQQQQSTDNQLQTMVQRLQGMENRQQQLMSFLAKAVQSPHFLSQFLQQQNQQNEGSRRISDTSKKRRFKRDGIVSNNKDSASPDGQIVKYQPPMHEQAKAMFSQLMKMEPYKAGDDGFLLGNSTTTTTSTEGTEMEISANNITGISLQEIPTASEIQSSSSPSGATPENVTVAEFPTPDEAIPSPDVLSLPEFADMLQENIAEVPPENFLETNMEDLSPILDSDLFNNDDLPFDIDDILRDPDLEPSVDDYASLFQDILMSSPVPDDMEVTPVDDRTKDSETEQKQMDNLTQQMGLLSPETIDLSRQNP

SEQ ID NO: 8272 - DNA, 1416 bp, Linum usitatissimum
  CDS (1)..(1416)
atggatgaggcatccactaaaggagatagccccgacactttgactaccagtgttggcggtggaggaggaaagcagaaggccggaggagcacgagcagcaccggtgccgatgactgcacagtctaacgtgccgccgcctttccttagcaagacgtatgacatggtggatgaccctgcttccgactctatcgtgtcctggagttccacgaataacagcttcgtagtgtggaatccgcctgagttcgctcgcgacctccttcccaagtatttcaagcataacaacttctccagcttcgttaggcagctcaatacttatggtttccggaaagtggatccagatagatgggaattcgcgaatgagggattcttgagagggcaaaagcacttgcttaagagcataaaccgtcggaaaccagcacatggacataaccagcagcaagtgcaaccatcacatggacagatttcatccgttgcttcttgtgtggaggttggtaaatttgggctcgaagaggaagtcgagaggctcaagagggacaaaaatgtacttatgcaggaacttgttcggttaaaacagcagcaacagtctactgatggccagatgcagaccatggtaaagcggcttcaagggatggagcagaggcagcaacaaatgatgtcatttttggctaaggctttgcagagccctggattcttttctcagtttgtacaacagcaaaatgaaaacaataggcgtataacagaaactaacaaaaaacggaggctcaagcaagacaggaccaccgagaatgagtcttctactgttcccgacgggcagattgttaagtaccagccatctactaacgaggctgcaaatgtaatgctcaggcagataatgaatggggattcttcttcgaggtcagaatgttacaacaatagttttgatggcttcactggtggcaatgtttcatcacccagtgccatagacagtggaaactctccaactcgaggatcagtggttagactccaggaagttccagcaacttcagggtcaggggtaatgcccgagctttctcaaatgccggaaatggttcctgaaagtatgaatgatgatattccaggggacggttacatggaaccagatacaggtgatgattgcttcgtacagtcttcattaggtatggatggaatgataccctttgatcttggtatcatacctcctgatcttgaagataatcttgatgcatttctatctcgcgagttctgggatgaccttgtccaaagcccgattcctgatgacatcgaatcaagttctatggacaataaagcttcgagtgatgatgtacaaccaatggagaaggaatgggagaagaccgagcacgtggatcagttgactgagcaaatggggcatctctcatcagaagcaaagaagctgctctag

SEQ ID NO: 8273 - protein, 471 aa, Linum usitatissimum
MDEASTKGDSPDTLTTSVGGGGGKQKAGGARAAPVPMTAQSNVPPPFLSKTYDMVDDPASDSIVSWSSTNNSFVVWNPPEFARDLLPKYFKHNNFSSFVRQLNTYGFRKVDPDRWEFANEGFLRGQKHLLKSINRRKPAHGHNQQQVQPSHGQISSVASCVEVGKFGLEEEVERLKRDKNVLMQELVRLKQQQQSTDGQMQTMVKRLQGMEQRQQQMMSFLAKALQSPGFFSQFVQQQNENNRRITETNKKRRLKQDRTTENESSTVPDGQIVKYQPSTNEAANVMLRQIMNGDSSSRSECYNNSFDGFTGGNVSSPSAIDSGNSPTRGSVVRLQEVPATSGSGVMPELSQMPEMVPESMNDDIPGDGYMEPDTGDDCFVQSSLGMDGMIPFDLGIIPPDLEDNLDAFLSREFWDDLVQSPIPDDIESSSMDNKASSDDVQPMEKEWEKTEHVDQLTEQMGHLSSEAKKLL

SEQ ID NO: 8274 - DNA, 1533 bp, Glycine max
  CDS (1)..(1533)
atggacggaagagcgagcagcagcgtgggcggagaagcatcgccagctccagcaccggtgccgataacgaatgcgaacgcgccgccgcctttcttgagcaagacatacgagatggtagaggacccttcgacggactcgatagtgtcgtggagtccaacgaacaacagtttcgtggtttggaaccctcccgagttcgccagagatctcttgcccaaacacttcaagcacaacaacttctccagcttcgttcgccaattaaacacctacggatttaggaaggtagatccagatcgctgggaatttgcaaatgagggatttttgaggggtcaaaagcacttgcttaagactataactcggcggaaacctgcccatggtcataatcaacaggcacagcaagcacatggacagagttcatctgttggggcttgtgttgaagttgggaagtttggacttgaggaagaggttgagattctcaagagagataagaatgtgctcatgcaagagcttgtgagattgaggcagcagcaacaggctactgataaccagctgcagagtatggttcagcgccttcaaggaatggagcaacgacagcaacaaatgatgtcattccttgcaaaggctgttcagagtcctggttttttagctcaatttgtacaacagcaaaatgagagtagtagacgcataacggaggcaaataaaaaacgccggcttaagcaggagggtattggtgaaatggaacatactgctgcttctgatggccaaattgttaaatatcaacctctgataaatgaagcagcaaaagcaatgctgaagcaaatgatgaaattggatacttctcgactagaatcttttagtaataacgctgataattacttgattggtgatcattcatcatcatccggtgcaacagacaggggaaactctttgagccggacttctggagtaacacttcaagtggtccctctgactacaatccagtcttctcacattccatctacaacagggataggggatgacccttcaacaagaaaatctaaaattctatctactcctcaagttgtagcctgtgataaagttacgaaagctcagtactctaatgtaaatatttcagttgaaaaatctaatacacctactatccctattactcaaacagataaaatcatacaagacctctctacaataccagacatagtggcaggaaatattcttgatattcctcaagaaaattatatggcacctgagacaggcggtgaaggatatatggatcctacttcatttggagtgaatgtgtcattgcccattgattttgatagtatttcacctgaagcagacattgatgatttgttgaacaatcctcacttttgggatgatattttgcgaactccagtgtcagaggagattgatacgaatgatgctgaagtattcaaggagaatgaggtgcagccaatggaaaatggattggacaaatcacaaaatatggaccaacttactgagcagatgggcctactttcttctgatgccaaaagaatttga

SEQ ID NO: 8275 - protein, 510 aa, Glycine max
MDGRASSSVGGEASPAPAPVPITNANAPPPFLSKTYEMVEDPSTDSIVSWSPTNNSFVVWNPPEFARDLLPKHFKHNNFSSFVRQLNTYGFRKVDPDRWEFANEGFLRGQKHLLKTITRRKPAHGHNQQAQQAHGQSSSVGACVEVGKFGLEEEVEILKRDKNVLMQELVRLRQQQQATDNQLQSMVQRLQGMEQRQQQMMSFLAKAVQSPGFLAQFVQQQNESSRRITEANKKRRLKQEGIGEMEHTAASDGQIVKYQPLINEAAKAMLKQMMKLDTSRLESFSNNADNYLIGDHSSSSGATDRGNSLSRTSGVTLQVVPLTTIQSSHIPSTTGIGDDPSTRKSKILSTPQVVACDKVTKAQYSNVNISVEKSNTPTIPITQTDKIIQDLSTIPDIVAGNILDIPQENYMAPETGGEGYMDPTSFGVNVSLPIDFDSISPEADIDDLLNNPHFWDDILRTPVSEEIDTNDAEVFKENEVQPMENGLDKSQNMDQLTEQMGLLSSDAKRI

SEQ ID NO: 8276 - DNA, 1539 bp, Zea mays
  CDS (1)..(1539)
atgcagggcggtgtcatggcgcccccagtcacggcgcacgcggtggcggtggcgcccccggtcacggcgcacgctgcggcggcggcgggcaacggcagcgccaccgccgcgccgccgccaccgttcctcatgaagacctacgaggtggtggacgacccggccacggacgacgtcatatcctggggccccgggaacaacagcttcatcgtctggaacacgcccgagttcgcccgggacctcctgcccaagtacttcaagcacagcaacttctcctccttcgtcaggcagctcaacacctacgggtttagaaaggttgatccagacagatgggaatttgcaaatgagggttttctgagaggacagaagcatctgctgaagactatcaacagaaggaaaccatccttgcaggggaacagccaaccacagcaacctcagtcgcagaacgctcctgtgccttcctgtgtagaggttggtaagtttgggttggaggaagagattgaacggctgaagagggataagaatgttcttatgcaagagcttgtcaggctgagacagcaacagcaaacaactgaccatcagctgcagactttgggcaagcgtcttcaagggatggagtcacggcagcaacagatgatgtctttcctggctaaagcaatgcaaagtcctggtttcctagcacagtttgtacagcaaaatgagaagagcagaagaagaatagtagcggcgaacaagaaaaggcggctgcccaggcaagatggtggcctagactccgaaagtgctgctgcttcgttggacggtcaaattatcaagtatcagcctctgatcaacgaagcagccaaagcaatgctaaggaagatactaaagctagattcttcgcataggttggaatctatgggcaattcagagaatggtaattttctgctggagaattatatgccaggcgctcaagcctttgagagctcttcgtcaacaagaaactctggggtcaccctttcagaggtttcagctaacccaggtttgccatatggcggcggaggcggtggcggcacgagctctgggctgtcagccatctgccctcctgaaatccagtgcccagttgtgatggacaacatgtcgtctaaccaagtggccagcatgagtgctgtgcctcctgtttcgaaggctacaattgacatgggtattcctgaattctcagctctggcagacttggtgaatgaaggctccgtcgatatccctggaggggcctttgagatgcctggtcctgagtttcctctgccagaaggcgatgacagtgtccccatcgagaccgatgagaccatgtacaacaacaacgacgagactcagagccttccaggcatcatcgactccttctgggagcagttcctggtaggcagccctctctctgccgataacgatgaagttgattcggggtcgccacaggagaacggatggagcaaagtggggaacatcggtgatcttacagaacagatgggccttctgtcatcaacaaatcaccgcgactcagggaatgggctgtag

SEQ ID NO: 8277 - protein, 512 aa, Zea mays
MQGGVMAPPVTAHAVAVAPPVTAHAAAAAGNGSATAAPPPPFLMKTYEVVDDPATDDVISWGPGNNSFIVWNTPEFARDLLPKYFKHSNFSSFVRQLNTYGFRKVDPDRWEFANEGFLRGQKHLLKTINRRKPSLQGNSQPQQPQSQNAPVPSCVEVGKFGLEEEIERLKRDKNVLMQELVRLRQQQQTTDHQLQTLGKRLQGMESRQQQMMSFLAKAMQSPGFLAQFVQQNEKSRRRIVAANKKRRLPRQDGGLDSESAAASLDGQIIKYQPLINEAAKAMLRKILKLDSSHRLESMGNSENGNFLLENYMPGAQAFESSSSTRNSGVTLSEVSANPGLPYGGGGGGGTSSGLSAICPPEIQCPVVMDNMSSNQVASMSAVPPVSKATIDMGIPEFSALADLVNEGSVDIPGGAFEMPGPEFPLPEGDDSVPIETDETMYNNNDETQSLPGIIDSFWEQFLVGSPLSADNDEVDSGSPQENGWSKVGNIGDLTEQMGLLSSTNHRDSGNGL

SEQ ID NO: 8278 - DNA, 20 bp, Artificial sequence
  primer
atgggaacggtttgcgaatc

SEQ ID NO: 8279 - DNA, 20 bp, Artificial sequence
  primer
tcattttctgagagcatctg

SEQ ID NO: 8280 - protein, 568 aa, Artificial sequence
  consensus sequence
  Variant (5)..(5): Xaa in position 5 is any amino acid
  Variant (9)..(9): Xaa in position 9 is any amino acid
  Variant (15)..(15): Xaa in position 15 is any amino acid
  Variant (18)..(19): Xaa in position 18 to 19 is any amino acid
  Variant (24)..(25): Xaa in position 24 to 25 is any amino acid
  Variant (30)..(30): Xaa in position 30 is any amino acid
  Variant (33)..(34): Xaa in position 33 to 34 is any amino acid
  Variant (38)..(40): Xaa in position 38 to 40 is any amino acid
  Variant (45)..(45): Xaa in position 45 is any amino acid
  Variant (84)..(84): Xaa in position 84 is any amino acid
  Variant (87)..(88): Xaa in position 87 to 88 is any amino acid
  Variant (90)..(90): Xaa in position 90 is any amino acid
  Variant (95)..(97): Xaa in position 95 to 97 is any amino acid
  Variant (98)..(103): Xaa in position 98 to 103 is any or no amino acid
  Variant (105)..(111): Xaa in position 105 to 111 is any amino acid
  Variant (112)..(121): Xaa in position 112 to 121 is any or no amino acid
  Variant (123)..(124): Xaa in position 123 to 124 is any amino acid
  Variant (160)..(160): Xaa in position 160 is any amino acid
  Variant (163)..(163): Xaa in position 163 is any amino acid
  Variant (167)..(170): Xaa in position 167 to 170 is any amino acid
  Variant (172)..(172): Xaa in position 172 is any amino acid
  Variant (174)..(174): Xaa in position 174 is any amino acid
  Variant (177)..(177): Xaa in position 177 is any amino acid
  Variant (190)..(190): Xaa in position 190 is any amino acid
  Variant (196)..(197): Xaa in position 196 to 197 is any amino acid
  Variant (200)..(200): Xaa in position 200 is any amino acid
  Variant (203)..(208): Xaa in position 203 to 208 is any amino acid
  Variant (209)..(212): Xaa in position 209 to 212 is any or no amino acid
  Variant (214)..(216): Xaa in position 214 to 216 is any amino acid
  Variant (223)..(230): Xaa in position 223 to 230 is any amino acid
  Variant (231)..(242): Xaa in position 231 to 242 is any or no amino acid
  Variant (252)..(253): Xaa in position 252 to 253 is any amino acid
  Variant (256)..(256): Xaa in position 256 is any amino acid
  Variant (257)..(259): Xaa in position 257 to 259 is any or no amino acid
  Variant (262)..(273): Xaa in position 262 to 273 is any amino acid
  Variant (274)..(302): Xaa in position 274 to 302 is any or no amino acid
  Variant (304)..(307): Xaa in position 304 to 307 is any amino acid
  Variant (309)..(367): Xaa in position 309 to 367 is any amino acid
  Variant (372)..(373): Xaa in position 372 to 373 is any amino acid
  Variant (375)..(427): Xaa in position 375 to 427 is any amino acid
  Variant (428)..(501): Xaa in position 428 to 501 is any or no amino acid
  Variant (503)..(507): Xaa in position 503 to 507 is any amino acid
  Variant (508)..(509): Xaa in position 508 to 509 is any or no amino acid
  Variant (511)..(513): Xaa in position 511 to 513 is any amino acid
  Variant (515)..(538): Xaa in position 515 to 538 is any amino acid
  Variant (539)..(560): Xaa in position 539 to 560 is any or no amino acid
PPFLXKTYXMVDDPXTDXXVSWSXXNNSFXVWXXPEFXXXLLPKXFKHNNFSSFVRQLNTYGFRKVDPDRWEFANEGFLRGQKXLLXXIXRRKPXXXXXXXXXQXXXXXXXXXXXXXXXXXVXXCVEVGKFGLEEEVERLKRDKNVLMQELVRLRQQQQXTDXQLQXXXXRXQXMEXRQQQMMSFLAKAXQSPGFXXQFXQQXXXXXXXXXXIXXXNKKRRLXXXXXXXXXXXXXXXXXXXXDGQIVKYQPXXNEXXXXMLXXXXXXXXXXXXXXXXXXXXXXXXXXXXXXXXXXXXXXXXXSXXXXSXXXXXXXXXXXXXXXXXXXXXXXXXXXXXXXXXXXXXXXXXXXXXXXXXXXXXXXXXXXGVTLXXVXXXXXXXXXXXXXXXXXXXXXXXXXXXXXXXXXXXXXXXXXXXXXXXXXXXXXXXXXXXXXXXXXXXXXXXXXXXXXXXXXXXXXXXXXXXXXXXXXXXXXXXXXXXXXXXXXXXXXXXXXXXXXXXLXXXXXXXWXXXLXXXXXXXXXXXXXXXXXXXXXXXXXXXXXXXXXXXXXXXXXXXXXXLTEQMGLL

SEQ ID NO: 8281 - protein, 42 aa, Artificial sequence
  protein pattern
  Variant (3)..(3): Xaa in position 3 is any amino acid
  Variant (7)..(7): Xaa in position 7 is any or no amino acid
  Variant (9)..(9): Xaa in position 9 is any or no amino acid
  Variant (39)..(39): Xaa in position 39 is Lys or Arg
  Variant (41)..(41): Xaa in position 41 is Glu, Gln or Arg
  Variant (42)..(42): Xaa in position 42 is Lys or Arg
PKXFKHXNXFSSFVRQLNTYGFRKVDPDRWEFANEGFLXGXX

SEQ ID NO: 8282 - protein, 60 aa, Artificial sequence
  protein pattern
  Variant (9)..(9): Xaa in position 9 is Ile, Leu or Met
  Variant (10)..(10): Xaa in position 10 is Glu or Lys
  Variant (13)..(13): Xaa in position 13 is Ile or Val
  Variant (15)..(15): Xaa in position 15 is any amino acid
  Variant (17)..(17): Xaa in position 17 is any amino acid
  Variant (36)..(36): Xaa in position 36 is any or no amino acid
  Variant (38)..(40): Xaa in position 38 to 40 is any amino acid
  Variant (41)..(41): Xaa in position 41 is any or no amino acid
  Variant (43)..(43): Xaa in position 43 is Gly, Asn, Ser or Thr
  Variant (44)..(44): Xaa in position 44 is Leu, Met or Val
  Variant (45)..(45): Xaa in position 45 is Gly or Val
  Variant (46)..(46): Xaa in position 46 is any amino acid
  Variant (47)..(47): Xaa in position 47 is Lys or Arg
  Variant (48)..(48): Xaa in position 48 is Leu or Val
  Variant (49)..(49): Xaa in position 49 is any amino acid
  Variant (50)..(50): Xaa in position 50 is Asp, Gly or Val
  Variant (53)..(53): Xaa in position 53 is any amino acid
  Variant (58)..(58): Xaa in position 58 is any amino acid
CVEVGKFGXXEEXEXLXRDKNVLMQELVRLRQQQQXTXXXXQXXXXXXXXMEXRQQQXMS

SEQ ID NO: 8283 - protein, 29 aa, Artificial sequence
  protein pattern
  Variant (4)..(4): Xaa in position 4 is Asp or Glu
  Variant (7)..(7): Xaa in position 7 is Asp or Glu
  Variant (10)..(10): Xaa in position 10 is any amino acid
  Variant (11)..(11): Xaa in position 11 is Ser or Thr
  Variant (12)..(12): Xaa in position 12 is Asp or Asn
  Variant (13)..(13): Xaa in position 13 is any amino acid
  Variant (14)..(14): Xaa in position 14 is Ile or Val
  Variant (18)..(18): Xaa in position 18 is Gly or Ser
  Variant (19)..(19): Xaa in position 19 is any amino acid
  Variant (20)..(20): Xaa in position 20 is Ala, Gly, Asn, Ser or Thr
  Variant (25)..(25): Xaa in position 25 is any or no amino acid
  Variant (27)..(27): Xaa in position 27 is any or no amino acid
  Variant (29)..(29): Xaa in position 29 is Asp, Asn or Ser
KTYXMVXDPXXXXXVSWXXXNNSFXVXWX

SEQ ID NO: 8284 - protein, 21 aa, Artificial sequence
  protein pattern
  Variant (6)..(6): Xaa in position 6 is Met or Val
  Variant (7)..(7): Xaa in position 7 is any amino acid
  Variant (10)..(10): Xaa in position 10 is any amino acid
  Variant (12)..(12): Xaa in position 12 is Phe, Ile or Leu
  Variant (13)..(13): Xaa in position 13 is Ala, Asn or Ser
  Variant (15)..(15): Xaa in position 15 is Phe or Leu
  Variant (16)..(16): Xaa in position 16 is any amino acid
  Variant (19)..(19): Xaa in position 19 is any or no amino acid
  Variant (21)..(21): Xaa in position 21 is Asp, Glu, Asn, Gln or Ser
FLAKAXXSPXFXXQXXQQXNX

SEQ ID NO: 8285 - protein, 15 aa, Artificial sequence
  protein pattern
  Variant (2)..(2): Xaa in position 2 is Lys or Arg
  Variant (5)..(5): Xaa in position 5 is Pro or Ser
  Variant (6)..(8): Xaa in position 6 to 8 is any amino acid
  Variant (9)..(9): Xaa in position 9 is Asp or Glu
  Variant (10)..(10): Xaa in position 10 is Ala, Gln, Ser or Thr
  Variant (11)..(11): Xaa in position 11 is Ala or Thr
  Variant (12)..(12): Xaa in position 12 is any amino acid
  Variant (13)..(13): Xaa in position 13 is Ala, Asn, Ser, Thr or Val
  Variant (14)..(14): Xaa in position 14 is Leu or Met
  Variant (15)..(15): Xaa in position 15 is Phe, Leu or Met
VXYQXXXXXXXXXXX

SEQ ID NO: 8286 - protein, 13 aa, Artificial sequence
  protein pattern
  Variant (2)..(2): Xaa in position 2 is any amino acid
  Variant (3)..(3): Xaa in position 3 is Ala, Glu or Gly
  Variant (4)..(4): Xaa in position 4 is Ala, Ser, Thr or Val
  Variant (5)..(5): Xaa in position 5 is Asn or Ser
  Variant (11)..(12): Xaa in position 11 to 12 is any amino acid
  Variant (13)..(13): Xaa in position 13 is Asp, Glu or Gln
IXXXXKKRRLXXX

SEQ ID NO: 8287 - DNA, 933 bp, Arabidopsis thaliana
  CDS (1)..(933)
atggcgacggtacaattgtccacccaatttagctgccaaaccagagtttcaatctcaccgaactctaaatctatctccaagcctccgtttctggtaccggtgacctcaattattcaccgcccgatgatctccaccggaggaatcgctgtttccccccgtagagttttcaaagtccgagccacagatacgggagagataggatcagctctattggcggcggaggaagcaattgaagacgtggaagagacggagcggctaaagagatcgctcgtggattcgttgtacggaacagatcgaggtttaagcgcatcgagcgaaaccagagctgaaatcggagatctaatcacacagctcgagtctaagaaccctactccagctccgacggaagctcttttccttctcaacggcaaatggatcctcgcctacacatcgttcgtgaatttgttcccgttgctatcacgaggaatcgtaccgttaataaaagtcgatgagatctctcaaaccattgattcagataacttcaccgtccagaactctgttcgtttcgctggtcctttaggtacaaactcgattagcaccaacgctaaattcgaaatccgaagccctaaacgcgtccagattaagtttgagcaaggcgtaattgggacgcctcagctaacggattctattgagataccggaatatgtagaggttcttggtcaaaagattgatcttaacccgatcagagggttacttacctcggtgcaagacacagcctcgtctgtggctagaaccatatcaagccaaccaccgttgaaattctctttgccggcggacaatgcgcagtcttggctactcacgacttatctagacaaagacattcggatctctagaggagacggtggaagtgtctttgtgcttatcaaagaaggaagctctctcttgaatccttga

SEQ ID NO: 8288 - protein, 310 aa, Arabidopsis thaliana
MATVQLSTQFSCQTRVSISPNSKSISKPPFLVPVTSIIHRPMISTGGIAVSPRRVFKVRATDTGEIGSALLAAEEAIEDVEETERLKRSLVDSLYGTDRGLSASSETRAEIGDLITQLESKNPTPAPTEALFLLNGKWILAYTSFVNLFPLLSRGIVPLIKVDEISQTIDSDNFTVQNSVRFAGPLGTNSISTNAKFEIRSPKRVQIKFEQGVIGTPQLTDSIEIPEYVEVLGQKIDLNPIRGLLTSVQDTASSVARTISSQPPLKFSLPADNAQSWLLTTYLDKDIRISRGDGGSVFVLIKEGSSLLNP

SEQ ID NO: 8289 - DNA, 1149 bp, Zea mays
  CDS (1)..(1149)
atggctcccctcttcgccgcggcgtcccacgcgtccctcctccccctctcctccctcgaccgccccgccgccggccacctagtccgtggcaccctcaggccccacacctcgagcctccgcctgcgccgccccccgggggcaaccgggcgcggccgcgggcgtggccgagggggcatcccagacgagtggggcgagcgctcgccgccggacaaccccgagccccccgcgcagcccgatcctcccatcgacgaagacgagtggggccgcgacgactctgccgagggcaactcacgccctatcgtcgtcgacgagtggggcgagcccggggtgcctgagcccgagccgccctccgccgcggacccgcctagcccctccgcagacgacgactggggaaaggagccggaggcgccggcgccggcccctgctccggcggcggaggaggacgagcaggaggtgaagagggaggagctcaagcggtgcctggtggacacggtgtacggctccgacctcggcttccgggcgtccacggaggtcagaggtgaggtcgtcgagctagtcacccagctcgaggcggttaaccctactactgctcccgtcgagtcgccggatctcctcgacggcaactggatcctcatatatacagcatattctgagcttctgcctattctagctgctggggcaacacctttggtcaaagtaaagcagatatcccaagaaattgactccaaaatcatgacgatagtcaatgcttcgacccttacgactccattcgcttcattttcattcagcgcaaccgcctctttcgaggttcaaagcccatcaaggatagaggtccaatttaaggaggggagctttcagcctccgacaatatcatcatccgtggatctacctcaacaagttgatatatttgggcagaagatcagcctggggccagtccagcaggcactgaatccattgcagcaagcatttgctagcattgctgggtccatttctgggcagccacccctcaaggtaccaattcccggcaacaacagagctcgatcctggctcttgactacctacctggacaaagacttaaggatctcgagaggcgatggaggcttgtttattcttgccaaagaggggagccctttgctagatcaattgtaa

SEQ ID NO: 8290 - protein, 382 aa, Zea mays
MAPLFAAASHASLLPLSSLDRPAAGHLVRGTLRPHTSSLRLRRPPGATGRGRGRGRGGIPDEWGERSPPDNPEPPAQPDPPIDEDEWGRDDSAEGNSRPIVVDEWGEPGVPEPEPPSAADPPSPSADDDWGKEPEAPAPAPAPAAEEDEQEVKREELKRCLVDTVYGSDLGFRASTEVRGEVVELVTQLEAVNPTTAPVESPDLLDGNWILIYTAYSELLPILAAGATPLVKVKQISQEIDSKIMTIVNASTLTTPFASFSFSATASFEVQSPSRIEVQFKEGSFQPPTISSSVDLPQQVDIFGQKISLGPVQQALNPLQQAFASIAGSISGQPPLKVPIPGNNRARSWLLTTYLDKDLRISRGDGGLFILAKEGSPLLDQL

SEQ ID NO: 8291 - DNA, 960 bp, Oryza sativa
  CDS (1)..(960)
atggcggggtcgtcgtccctcagcacgctctccctctgcacgcagtcgccatcaccgtcaccggtggcgtccgcccgcctcgtggcaccggctgtcctcggtttcgccggggccccgcggttcccgacgctgcgggccgcgccacggcggctgacggcgcgggcggtggccggggacgccgaggacgagtgggggaaggagccggcggcggaccagggcggtgccgccgcggcggtggccgaggcgcccgcggatgtgccggtgacgagcgaggtcgcggagctcaaggcgaagctgaaggaggcgctgtacggtacggagcgcggcctgcgcgcgtccagcgagacgcgcgcggaggtggtcgagctcatcacgcagctcgaggcccgcaaccccacgccggcgcccaccgaggcgctcaccctcctcaacggcaagtggatcctcgcgtacacctcattttcacagctattcccactattggggtctggtagtttgcctcagcttgtcaaggtggaagaaatatcacaaactattgattctgagaacttcacggttcagaattgcatcaagttttcaggacctttagcaacaacttcagtgtctaccaatgccaaatttgaagttcgaagtcccaaacgtgtacagatcaaatttgatgaaggcattatcggcactccacaattgactgattctattgtactacctgagaagtttgagttatttgggcagaatattgacctgaccccattgaagggcatattttcatcaattgaaaatgcagcatcctcagttgctagaaccatctctggtcaacctccactaaagataccaattaggactgacaatgctgagtcttggttgctcacaacctaccttgatgatgagcttagaatctccagaggtgatggcagcagcatctttgtactgtttaaggaaggaagcaccctcctatattaa

SEQ ID NO: 8292 - protein, 319 aa, Oryza sativa
MAGSSSLSTLSLCTQSPSPSPVASARLVAPAVLGFAGAPRFPTLRAAPRRLTARAVAGDAEDEWGKEPAADQGGAAAAVAEAPADVPVTSEVAELKAKLKEALYGTERGLRASSETRAEVVELITQLEARNPTPAPTEALTLLNGKWILAYTSFSQLFPLLGSGSLPQLVKVEEISQTIDSENFTVQNCIKFSGPLATTSVSTNAKFEVRSPKRVQIKFDEGIIGTPQLTDSIVLPEKFELFGQNIDLTPLKGIFSSIENAASSVARTISGQPPLKIPIRTDNAESWLLTTYLDDELRISRGDGSSIFVLFKEGSTLLY

SEQ ID NO: 8293 - DNA, 1125 bp, Oryza sativa
  CDS (1)..(1125)
atggccatgcctcccccgctcttcgccgccgcctcccacgcctccctcctcctcccctcccccaccatccacagctccaccggatctcgccgccccttccgcctccccctccgctcctcccgccgcccgcccgtcgcagcagcagctgcctctggcgtccccgacgagtggggcgaccgctcgccctccgcgcccgagccgccctcccagcccgacccccccatcgacgacgacgagtggggccgcgacgacccctccgcctccgggaactctcgccccgtcctcgtcaccgacgagtggggcgagccgggtgtgcccgagccccaatccacctccgccgccgacccccctaccaacgacgacgagtggggtggggatccggcgccaccgccaccgccacctcctgtgccggaggaagacaacgaggaggaaaggcgggaggagctcaagcgctgcttggtggacactgtgtacggctccgacctgggcttccgggcgtcctccgaggtgaggggggaggtgctagagctcgtcacccagctcgaggccaccaatcccacgcccgagcccgtccaggccacccacctcctcgccggcaactggatcctcatatatacagcgtattctgagcttctacctatcctagcagttggtgcagcaccattgttcaaagtcgatgagatatcgcaagaaattgacacaaatagcatgaccatagtcaatgcctcaactatctcaagtccattcgcttcgttttctttcagtgccactgcttcttttgatgtacagagtccatcaaggatagaggtccaattcaaagagggaagctttcagccaccgaagatatcatcatcggtagacctacctgcagaggttgatatatttgggcagaagatcagcttgggcccagtccagcaggtgctgaaccctctgcagcaagcctttgcaagtattgcaggatccatttctgggcagccacccctcaagttacccatccctggcaacaacagggcccggtcttggctgctgacgacctacctagacaaggacctcaggatctccagaggtgatggaggtctcttcattcttgtcaaagagggtagccctctactagatcaattatag

SEQ ID NO: 8294 - protein, 374 aa, Oryza sativa
MAMPPPLFAAASHASLLLPSPTIHSSTGSRRPFRLPLRSSRRPPVAAAAASGVPDEWGDRSPSAPEPPSQPDPPIDDDEWGRDDPSASGNSRPVLVTDEWGEPGVPEPQSTSAADPPTNDDEWGGDPAPPPPPPPVPEEDNEEERREELKRCLVDTVYGSDLGFRASSEVRGEVLELVTQLEATNPTPEPVQATHLLAGNWILIYTAYSELLPILAVGAAPLFKVDEISQEIDTNSMTIVNASTISSPFASFSFSATASFDVQSPSRIEVQFKEGSFQPPKISSSVDLPAEVDIFGQKISLGPVQQVLNPLQQAFASIAGSISGQPPLKLPIPGNNRARSWLLTTYLDKDLRISRGDGGLFILVKEGSPLLDQL

SEQ ID NO: 8295 - DNA, 1113 bp, Glycine max
  CDS (1)..(1113)
atggttcagatatcagtttcggtggtttcactctatcgccacccagttccgatggctctcctcgccgtcacttcgcgcgctcccttcctcttctccccaaaccctaaaccactttctccatcctctttctactcccacctctctctctctcctcgctctcccaggttcccttctctccgcttccgctctgccaccggagacgccagcgacgccggcaagcccgccggtaagatctccgacgagtggggcgaggactacgatcccgaggccgaagcattgacctccaagcttcccgactcggaccctcccaaggacgaggacgagtggcaggaaggaggggcgcccgacgccggcggctacgtcgacggcgggaacggaactccggtcaccggagctgaggatccggcggaggaggaggtggacgataagttggaggcgctgaagcgtgctttggtggatactttgtatgggaccgagttagggattcgggccgggtcggaggttcgagctgaggtatccgaattggtgagtcagttggaagcggcgaatcctacactcgcccccgtggaagaacctgcccttctcaatgggaattgggtgttgctgtacactgcatcttctgaactgttgcctcttctagccgcgggaagattgcctttgttgaaggtggacaagattacacaaacaattgatactagtagctccactattataaactccacaacattgtctagcccttttgcatccttgtctttcagtgcatctgcctcatttgaagttcgaacccctacgagaattcaggttacatttaaagaaggttcaatacaacctccagagataaagtctaatgttgaactaccagaaaatgtagacatttttggccaaaagcttagcctacagcctctgcaacaatcccttggcccacttcagggtctggtggaaaacatatcgcgtgtcatttctggtcagccacctcttaagattcccatccctggcgaaaggacaagctcctggcttcttactacatatcttgataaggacttgcgaatatcaaggggggatggtggtcttttcgttcttgccagagaagggagtccacttcttgatcagtag

SEQ ID NO: 8296 - protein, 370 aa, Glycine max
MVQISVSVVSLYRHPVPMALLAVTSRAPFLFSPNPKPLSPSSFYSHLSLSPRSPRFPSLRFRSATGDASDAGKPAGKISDEWGEDYDPEAEALTSKLPDSDPPKDEDEWQEGGAPDAGGYVDGGNGTPVTGAEDPAEEEVDDKLEALKRALVDTLYGTELGIRAGSEVRAEVSELVSQLEAANPTLAPVEEPALLNGNWVLLYTASSELLPLLAAGRLPLLKVDKITQTIDTSSSTIINSTTLSSPFASLSFSASASFEVRTPTRIQVTFKEGSIQPPEIKSNVELPENVDIFGQKLSLQPLQQSLGPLQGLVENISRVISGQPPLKIPIPGERTSSWLLTTYLDKDLRISRGDGGLFVLAREGSPLLDQ

SEQ ID NO: 8297 - DNA, 939 bp, Glycine max
  CDS (1)..(939)
atggcgtctctctctcacctcaacaaactcctctgcatgccgccgctcaactcttcaccctctacttcgccaccgcgcagcagcgtcggagtttcgaccaaatctgtcggaaggccgaggatggtcgccgatttcgcgaggccggtggggcgtgtccgagcggtgacgagcgacgacgagtggggcccggagaaggaggaggaggcatacggcggaggagtggcggtggaggagaaaccgacggagacggaaacggagaagctgaagaaggctttggtggattcgttttatggcacggatcttggactgaaagcaacgagtgaaacgagagcagagatcgttgaactcatcactcagctagaggccaagaaccctaaccctgctcccactgacgccttgactctcctcaacggaaaatggattctcgcgtatacgtcctttgcaggtttattcccattgttgtcaagtggaacactaccattggtcaaggtagaggaaatatctcagactattgacacgctgaattttaccgtccaaaactctgttcagttcgctggtcctttggccaccacctcaattagtactaatgccaaattcgatgttcgaagtccaaaacgtgtgcagataaaatttgaggaaggcataattggcactccacagcttacggactcactagagataccagaaaatgtggaacttctgggtcaaaagattgaccttacacctttcaaaggaatccttacctctgtccaagacacagcctcatcggtggtgaaaacaatttcaagtaggcctcccttgaagatcccaatttccaacagcaatgctcagtcctggttactcactacataccttgacgaagaattacgtatctcaaggggtgatggtggcagtgtgtttgttctcatcaaagagggaagctctcttttgacaagataa

SEQ ID NO: 8298 - protein, 312 aa, Glycine max
MASLSHLNKLLCMPPLNSSPSTSPPRSSVGVSTKSVGRPRMVADFARPVGRVRAVTSDDEWGPEKEEEAYGGGVAVEEKPTETETEKLKKALVDSFYGTDLGLKATSETRAEIVELITQLEAKNPNPAPTDALTLLNGKWILAYTSFAGLFPLLSSGTLPLVKVEEISQTIDTLNFTVQNSVQFAGPLATTSISTNAKFDVRSPKRVQIKFEEGIIGTPQLTDSLEIPENVELLGQKIDLTPFKGILTSVQDTASSVVKTISSRPPLKIPISNSNAQSWLLTTYLDEELRISRGDGGSVFVLIKEGSSLLTR

SEQ ID NO: 8299 - DNA, 921 bp, Glycine max
  CDS (1)..(921)
atggcgtctctctctcacctcaacaaactcctctgcatgcccccgctcaactcttcaccctctatttcgccaccacgcagcagcgtcggaatttggaccaaacctgtcggaaggccgaggctactggtgcgtgtccgagcggtcacgagcgacgacgagtgggggccggagaaggaggaggcgtacggcggcggcgtagcggtggaggagaaaccgacgaagtcggagacggagacggagaagctgaagaaggccttggtggattcgttttatggcaccgatcgtggactgaaagcaacgagcgaaacgagagcggagatcgttgaactcatcacacagctcgaggccaagaaccctaaccctgttcccaccgacgccttgactcttctcaacggaaaatggattctcgcgtatacatcctttgcaggtttattcccattgttgtcaagtggaacactaccattggtcaaggtagaggaaatatcccagattattgactcgctgaattttaccgtccaaaactctgttcagttcgctggtcctttggccaccacctcaattagtactaatgccaaatttgatgttcgaagtccaaaacgtgtgcagataaagtttgaggaaggcataattggcactccacagcttacggactcattagagataccggaaaatgtggaatttctgggtcaaaagattgaccttacacttttcaaaggcatccttacctctgtccaagacacagccacatcggtagtgaaaacaatttcaagtaggcctcccttgaagatcccaatttccaacagcaatgctcagtcctggttactcaccacatacctcgacgaagaattgcgtatctcaaggggcgatggtggcagtgtgtttgttcttatcaaagaaggaagctctcttttgacaagataa

SEQ ID NO: 8300 - protein, 306 aa, Glycine max
MASLSHLNKLLCMPPLNSSPSISPPRSSVGIWTKPVGRPRLLVRVRAVTSDDEWGPEKEEAYGGGVAVEEKPTKSETETEKLKKALVDSFYGTDRGLKATSETRAEIVELITQLEAKNPNPVPTDALTLLNGKWILAYTSFAGLFPLLSSGTLPLVKVEEISQIIDSLNFTVQNSVQFAGPLATTSISTNAKFDVRSPKRVQIKFEEGIIGTPQLTDSLEIPENVEFLGQKIDLTLFKGILTSVQDTATSVVKTISSRPPLKIPISNSNAQSWLLTTYLDEELRISRGDGGSVFVLIKEGSSLLTR

SEQ ID NO: 8301 - DNA, 1149 bp, Zea mays
  CDS (1)..(1149)
  misc_feature (1101)..(1101): s is g or c
atggctcccctcttcgccgcggcgtcccacgcgtccctcctccccctctcctccctcgaccgccccgccgccggccacctagtccgtggcaccctcaggccccgcacctcgagcctccgcctgcgccgccccccgggggcaaccgggcgcggccgcgggcgtggccgagggggcatcccagacgagtggggcgagcgctcgccgccggccaaccccgagccccccgcgcagcccgatcctcccatcgacgaagacgagtggggccgcgacgactctgccgacggcaactcacgccctatcgtcgtcgacgagtggggcgagcccggggtgcctgagcccgagccgccctccgccgcggacccgcctagcccctccgcagacgacgactggggaaaggagccggaggcgccggcgccggcccctgctccggcggcggaggaggacgagcaggaggtgaagagggaggagctcaagcggtgcctggtggacacggtgtacggctccgacctcggcttccgggcgtccacggaggtcagaggtgaggtcgtcgagctagtcacccagctcgaggcggttaaccctactactgctcccgtcgactcgccggatctcctcgacggcaactggatcctcatatatacagcatattccgagcttctgcctattctagctgctggggcaacacctttggtcaaagtaaagcagatatcccaagaaattgactccaaaatcatgacgatagtcaatgcttcgacccttacgactccattcgcttcattttcattcagcgcaaccgcctctttcgaggttcaaagcccatcaaggatagaggtccaatttaaggaggggagctttcagcctccggcaatatcatcatccgtggatctacctcaacaagttgatatatttgggcagaagatcagcctggggccagtccagcaggcactgaatccattgcagcaagcatttgctagcattgctgggtccatttctgggcagccacccctcaaggtaccaattcctggcaacaacagagctcgatcctggctcttgactacctacctggacaaagacttaaggatctcgagaggcgatggaggsttgtttattcttgccaaagaggggagccctttgctagatcaattgtaa

SEQ ID NO: 8302 - protein, 382 aa, Zea mays
MAPLFAAASHASLLPLSSLDRPAAGHLVRGTLRPRTSSLRLRRPPGATGRGRGRGRGGIPDEWGERSPPANPEPPAQPDPPIDEDEWGRDDSADGNSRPIVVDEWGEPGVPEPEPPSAADPPSPSADDDWGKEPEAPAPAPAPAAEEDEQEVKREELKRCLVDTVYGSDLGFRASTEVRGEVVELVTQLEAVNPTTAPVDSPDLLDGNWILIYTAYSELLPILAAGATPLVKVKQISQEIDSKIMTIVNASTLTTPFASFSFSATASFEVQSPSRIEVQFKEGSFQPPAISSSVDLPQQVDIFGQKISLGPVQQALNPLQQAFASIAGSISGQPPLKVPIPGNNRARSWLLTTYLDKDLRISRGDGGLFILAKEGSPLLDQL

SEQ ID NO: 8303 - DNA, 957 bp, Zea mays
  CDS (1)..(957)
atggcgtcctccgcgttcctcaacgctctcgtcctccgatcgccatcaccgtcgctctcgtcctcgtctaaccgccgcagcaccggcgccttcgcgttcccgaacccaccgcgcttcccatgcctgcgttctgcgcgtcgactcgtccttgcgagggcggcggcagcgccggcgccgggcgatggccccgaggacgagtgggggccggagcccgagggcggttccgctgtcacgggggccgcggtggcggaggcgccggaggcgagagaggtcgcggagctcaaggcgcagctaaaggacgcgctgtacggcacggagcggggcctgcgggcgtccagcgagtcacgagccaaagtgctggagctcatcacgcagctcgagacgcgcaaccccacgccggctcctacggaggcgcttacgctccttaacgggaagtggatcctcgcgtacacatcattttcccaactattcccactattggggtttggtaatctgcctcagctggtgaaggtggaggaaatatcacaaaccattgattctgagaacttcacagtgcaaaactgtatcaagttttcaggacctttggctacaacctcagttgccactaatgcaaaatttgaaattagaagccccaagcgtgtgcagatcaaatttgatgaagggattgttggtacaccacagttgaccgactccattgtgctaccagagaagtttgagttatttggacagaacatcgacctgagtccactgaaaggcatattttcttccatcgaaaatgcagcatcctcggttgcaaagaccatatctgagcagcctccgctcaaaataccgatcaggacaaacaatgctgaatcgtggttgcttacgacataccttgacgaagagctcaggatctccagaggcgatggcagcagcatctttgtgctgttcaaggagggaagtactcttctatactga

SEQ ID NO: 8304 - protein, 318 aa, Zea mays
MASSAFLNALVLRSPSPSLSSSSNRRSTGAFAFPNPPRFPCLRSARRLVLARAAAAPAPGDGPEDEWGPEPEGGSAVTGAAVAEAPEAREVAELKAQLKDALYGTERGLRASSESRAKVLELITQLETRNPTPAPTEALTLLNGKWILAYTSFSQLFPLLGFGNLPQLVKVEEISQTIDSENFTVQNCIKFSGPLATTSVATNAKFEIRSPKRVQIKFDEGIVGTPQLTDSIVLPEKFELFGQNIDLSPLKGIFSSIENAASSVAKTISEQPPLKIPIRTNNAESWLLTTYLDEELRISRGDGSSIFVLFKEGSTLLY

SEQ ID NO: 8305 - DNA, 945 bp, Zea mays
  CDS (1)..(945)
atggcgggatcagcgttgctcaacgctctcgtcctccgcgcgccatccccgtcgctctcgtcctcgtctaaggtccgcagcgccggcgcctttgtgttctcgaacccaccgcgcttcccatccctgcgttctgagcgccgcgtcgcccttccgcgggcggcggcgggcggtgaccccgaggacgagtgggtgccggagcctgagggtgggtccgctgtcactgggaccgcggtggctgaggcgccggaggcgggagaggtcgcagagctcaaggcgcagctaaaggatgcgctgtacggcacagagcggggcctgcgggcgtccagcgagtcgcgggccaaggtgttggagctcatcacgcagctcgagacgcgcaaccccacgccggcgcctaccgaagcgctgacgctcctcaacggcaagtggatcctcgcgtacacatcattttcccaactgttcccactgttggagtttggaaagctgcctgcgctcgtgaaggtggaggaaatatcacagaccattgattccaagaacttcacagtgcaaaactgtatcaagttttcaggacctttggctacaacctcagtttccaccaatgcaaaatttgaaattagaagccccaagcgcgtgcagatcaaatttgatgaaggcattgttgggacaccacagttgaccgactccgttgtgctaccggagaagtttgaaatatttggacagaacatcgacctgagtccactgaaaggcatattttcttcgatcgaaaatgcagcatcctcggttgcaaagaccctatctggccagcctccactgaaaataccgatcagggcaaacaacgcagaatcgtggttgcttacgacctaccttgacgaagagctcaggatctccagaggcgacggcggcggcatctttgtgctgttcaaggagggaagtactcttctaaactga

SEQ ID NO: 8306 - protein, 314 aa, Zea mays
MAGSALLNALVLRAPSPSLSSSSKVRSAGAFVFSNPPRFPSLRSERRVALPRAAAGGDPEDEWVPEPEGGSAVTGTAVAEAPEAGEVAELKAQLKDALYGTERGLRASSESRAKVLELITQLETRNPTPAPTEALTLLNGKWILAYTSFSQLFPLLEFGKLPALVKVEEISQTIDSKNFTVQNCIKFSGPLATTSVSTNAKFEIRSPKRVQIKFDEGIVGTPQLTDSVVLPEKFEIFGQNIDLSPLKGIFSSIENAASSVAKTLSGQPPLKIPIRANNAESWLLTTYLDEELRISRGDGGGIFVLFKEGSTLLN

SEQ ID NO: 8307 - DNA, 1131 bp, Arabidopsis thaliana
  CDS (1)..(1131)
atggctacgctcttcaccgtcgctcgtccttcttcactcctctatgtttcctccataaatccaagcaagaccttctctccttctatctccctaaaacttaactctctctctttctcttttggttatcgtcccaagccactccggttttctaaaatccgatcttctctgccctcggaatctgaatcggaatccgacctagatgcgtctgcagttacagatgaatggggtgagaaacctggagatgcaaatgagcccgactctcagccagataatgtgaccgtgaatgtgattacggacgaatggggcgagaaatccggacccgaacttgaggaatccgggacccggtttatggaatcggatcctccaaggaacgaagacgagtggggaggagaaattggaggagaaactgaagccgacgctggaaatggaagtgcggtgtctgacccgacttgggagctgaaaaggtgtttggcggattcggtgtacggaactgaattaggtttcaaagctgggtcagaagtccgagcggaggttttggagcttgtgaatcaactggaagctctgaatcctactccggctccgttagagaatccagaacttctcgacggcaactgggttttgctgtacactgctttctctgagttgattcctctactagctgcgggttcgacacctttgttgaaagttaaaagcataagtcagtcaatagacacaaacaatctcattatcgacaactccactacactctccagcccttttgcagacttctccttcagtgctactgcttcatttgaagttcgaagcccttcaagaattgaggtttctttcaaagaaggcacgctaaaacccccggtgatcaaatcaagtgtagatctcccagagagtgtgggcgtctttgggcagcagattagcctttcgttgttaaagcagtctttgaaccccttacaagatgtggcagcaaacatttcacgggcactctctggtcagccacctctcaagcttccgtttccaggaaaccgaggcagctcttggctcttgaccacttatctcgacaaggatctcaggatttctagaggagatggtggccttttcgtgcttgccagagaaggaagctctctgcttgagctctga

SEQ ID NO: 8308 - protein, 376 aa, Arabidopsis thaliana
MATLFTVARPSSLLYVSSINPSKTFSPSISLKLNSLSFSFGYRPKPLRFSKIRSSLPSESESESDLDASAVTDEWGEKPGDANEPDSQPDNVTVNVITDEWGEKSGPELEESGTRFMESDPPRNEDEWGGEIGGETEADAGNGSAVSDPTWELKRCLADSVYGTELGFKAGSEVRAEVLELVNQLEALNPTPAPLENPELLDGNWVLLYTAFSELIPLLAAGSTPLLKVKSISQSIDTNNLIIDNSTTLSSPFADFSFSATASFEVRSPSRIEVSFKEGTLKPPVIKSSVDLPESVGVFGQQISLSLLKQSLNPLQDVAANISRALSGQPPLKLPFPGNRGSSWLLTTYLDKDLRISRGDGGLFVLAREGSSLLEL

SEQ ID NO: 8309 - DNA, 957 bp, Arabidopsis thaliana
  CDS (1)..(957)
atggcgacggtaccattgttcacccagtttccctgcaaaaccctaaatccaagctcatcaaacactaaacaccaatcgaaatctccgatcctactaccgattaactcaataaatcggcgatcggagattggagtctctgttcatcggccagatttcaaaatccgagcgacggacatcgacgacgaatggggtcaagatggagtggagagagtatttgcctcatcttcaaccgtatcggtagcagataaagcaatcgaatccgtggaggagacggagaggctaaagagatcactagcggattcgttgtacggaacagatcgaggtttaagcgtatcgagtgatacgagagctgagatcagcgagctcatcacacagctcgagtctaagaaccctactccagctcctaacgaagctctgtttctcctcaacggcaaatggatcctcgcctacacgtcgttcgtggggttgttcccattgctctcacgaagaattgaaccgttggttaaagtggatgagatctcacaaaccattgattccgatagcttcaccgttcaaaactctgtccggttcgctggtccgttttccacaacgtcgtttagcaccaacgctaagtttgaaatccgaagtcctaaacgtgtccagattaagttcgagcaaggtgttatagggactcctcagctaacggattcgattgaaataccggaatccgtggaggttcttggtcagaaaatcgatctcaatcccattaaaggtttacttacatcagtccaagacactgcttcttcagtggctagaaccatttcaaaccaaccaccattgaagttttctctgcctagtgacaacacgcagtcgtggctgctcacaacttatctcgacaaggaccttcggatctcgagaggcgatggtggaagcgtctatgtgctcatcaaagaaggaagctctctcttaaacccttaa

SEQ ID NO: 8310 - protein, 318 aa, Arabidopsis thaliana
MATVPLFTQFPCKTLNPSSSNTKHQSKSPILLPINSINRRSEIGVSVHRPDFKIRATDIDDEWGQDGVERVFASSSTVSVADKAIESVEETERLKRSLADSLYGTDRGLSVSSDTRAEISELITQLESKNPTPAPNEALFLLNGKWILAYTSFVGLFPLLSRRIEPLVKVDEISQTIDSDSFTVQNSVRFAGPFSTTSFSTNAKFEIRSPKRVQIKFEQGVIGTPQLTDSIEIPESVEVLGQKIDLNPIKGLLTSVQDTASSVARTISNQPPLKFSLPSDNTQSWLLTTYLDKDLRISRGDGGSVYVLIKEGSSLLNP

SEQ ID NO: 8311 - DNA, 933 bp, Arabidopsis thaliana
  CDS (1)..(933)
atggcgacggtacaattgtccacccaatttagctgccaaaccagagtttcaatctcaccgaactctaaatctatctccaagcctccgtttctggtaccggtgacctcaattattcaccgcccgatgatctccaccggaggaatcgctgtttccccccgtagagttttcaaagtccgagccacagatacgggagagataggatcagctctattggcggcggaggaagcaattgaagacgtggaagagacggagcggctaaagagatcgctcgtggattcgttgtacggaacagatcgaggtttaagcgcatcgagcgaaaccagagctgaaatcggagatctaatcacacagctcgagtctaagaaccctactccagctccgacggaagctcttttccttctcaacggcaaatggatcctcgcctacacatcgttcgtgaatttgttcccgttgctatcacgaggaatcgtaccgttaataaaagtcgatgagatctctcaaaccattgattcagataacttcaccgtccagaactctgttcgtttcgctggtcctttaggtacaaactcgattagcaccaacgctaaattcgaaatccgaagccctaaacgcgtccagattaagtttgagcaaggcgtaattgggacgcctcagctaacggattctattgagataccggaatatgtagaggttcttggtcaaaagattgatcttaacccgatcagagggttacttacctcggtgcaagacacagcctcgtctgtggctagaaccatatcaagccaaccaccgttgaaattctctttgccggcggacaatgcgcagtcttggctactcacgacttatctagacaaagacattcggatctctagaggagacggtggaagtgtctttgtgcttatcaaagaaggaagccctctcttgaatccttga

SEQ ID NO: 8312 - protein, 310 aa, Arabidopsis thaliana
MATVQLSTQFSCQTRVSISPNSKSISKPPFLVPVTSIIHRPMISTGGIAVSPRRVFKVRATDTGEIGSALLAAEEAIEDVEETERLKRSLVDSLYGTDRGLSASSETRAEIGDLITQLESKNPTPAPTEALFLLNGKWILAYTSFVNLFPLLSRGIVPLIKVDEISQTIDSDNFTVQNSVRFAGPLGTNSISTNAKFEIRSPKRVQIKFEQGVIGTPQLTDSIEIPEYVEVLGQKIDLNPIRGLLTSVQDTASSVARTISSQPPLKFSLPADNAQSWLLTTYLDKDIRISRGDGGSVFVLIKEGSPLLNP

SEQ ID NO: 8313 - DNA, 957 bp, Physcomitrella patens subsp. patens
  CDS (1)..(957)
atgcaccctcaccgtattgtacattttgacgtgaatctcagatttgagaacgaagacaacgcagccatcgagatcgaaggcgatggtgaggatagcggagagattgaaatctcgggtgttttggaagccaccgaggaggaaccagttctcttggaacccccggccaattccatcgatgaaggctatgtggaagcgctcaatgatggcaccctggaaccaacttccaacacatcctcggattcaagttcggaggagcagtatgaggatgatgacgttgaggatttgaagcagcagctaatcgatactctctatggtacggagaggggcttacgtgctagcagtgacacccgtgccgaggttattgagcttataacgcagttggaggcgaagaatcccacagaagctcccacagcagctctcactctcctgaatggaaagtgggttttggcgtacacgtcgttctctgagttgtttccgttgttggctgctggaaatctaccactggtgaaggttggggagatcacacagatcatagatgcgcaggcgctcactattgagaactgtgtgtcattcgaaggtcctgtgactgccacttcttttagtgcttctgcttcgttcgaaattcgcagcccaaaacgtattcaggtaaaatttgaggagggaagcatatccgccccgaaggtttcaaactccgctgagattccttcaagcttggacataatggggcagaagatcgacttttccgccgccaaggggttgttgaaaccgcttcaagacgctgctatgacagtggctagaaccctctctgggcaacctccgttgaagttttccatcccgaacgatcgggcacagtcttggttgttgactacctaccttgatgaggatcttcggatctcacgtggtgatggtggcagcgtttttgtgctcctcagggaaggaagtacactgctttattga

SEQ ID NO: 8314 - protein, 318 aa, Physcomitrella patens subsp. patens
MHPHRIVHFDVNLRFENEDNAAIEIEGDGEDSGEIEISGVLEATEEEPVLLEPPANSIDEGYVEALNDGTLEPTSNTSSDSSSEEQYEDDDVEDLKQQLIDTLYGTERGLRASSDTRAEVIELITQLEAKNPTEAPTAALTLLNGKWVLAYTSFSELFPLLAAGNLPLVKVGEITQIIDAQALTIENCVSFEGPVTATSFSASASFEIRSPKRIQVKFEEGSISAPKVSNSAEIPSSLDIMGQKIDFSAAKGLLKPLQDAAMTVARTLSGQPPLKFSIPNDRAQSWLLTTYLDEDLRISRGDGGSVFVLLREGSTLLY

SEQ ID NO: 8315 - DNA, 969 bp, Vitis vinifera
  CDS (1)..(969)
atggctggagtttctcaattcaatcaaattttctgcaagacctgcgccgtggcggcacctcagttacagtctggcgctaaattggctttttttccggccaattcggtgggggtggtggggaaggcagtggggagagttagggtttcggcgggggaggtgaataggggaaggccggttgttttggctcggacggcgttggatgatgagtgggggccggagaaggtggagccggagggggaagggtcgacggtggcggtggtggaggaggagaagtcgaaggagattactagtttgaagaaggcgttggtggattcgttttacgggactgatcgggggttgaaggcgacgagcgagactcgggcggagattgtggagcttattactcaattggaggcgaagaatccgactccagcgccaactgaggcgttgactctgctcaatgggaaatggattctagcgtacacatcttttgctggtttgttccccttgttgtcaaggggtacactgccactggtgaaggttgaggagatatcacagaccatcgactcggagaatttcacagtccagaattctgtccagttttctgggcctctggctaccacttccatcagtaccaatgctaaatttgaagtcagaagtcccaagcgtgtgcagatcaagttccaagaaggcatcattggcactccacagctgactgactccatcgagttaccagagaatgtggaatttctgggacaaaatattgacttgacgcccttcaaaggcttgatcacctcagtccaagatacagcttcttctgttgccaagacaatctccagccaaccaccattgaagttctctatcccaaacagcaatgctgaatcatggctgctaaccacataccttgatgaagatcttcgaatctctaggggagatgctggcagtatctttgtgctcatcaaggaaggcagctccctattggtaccttga

SEQ ID NO: 8316 - protein, 322 aa, Vitis vinifera
MAGVSQFNQIFCKTCAVAAPQLQSGAKLAFFPANSVGVVGKAVGRVRVSAGEVNRGRPVVLARTALDDEWGPEKVEPEGEGSTVAVVEEEKSKEITSLKKALVDSFYGTDRGLKATSETRAEIVELITQLEAKNPTPAPTEALTLLNGKWILAYTSFAGLFPLLSRGTLPLVKVEEISQTIDSENFTVQNSVQFSGPLATTSISTNAKFEVRSPKRVQIKFQEGIIGTPQLTDSIELPENVEFLGQNIDLTPFKGLITSVQDTASSVAKTISSQPPLKFSIPNSNAESWLLTTYLDEDLRISRGDAGSIFVLIKEGSSLLVP

SEQ ID NO: 8317 - DNA, 1149 bp, Vitis vinifera
  CDS (1)..(1149)
atggcgatgctactcacctcacacgcttctctattctttaagaaccctaaaacccttcgattatcttcaatccccacccaaagcccttctctctcattcgccaaagtctccacccaaaaccctcttttctcctccattcgcctctatgccgcatcccccgacaaccctgactcttcctccatcaaaccaccgtcggccagcgacggtgatgcatcggattccgaggcgtctgatcaagacattcaacatgatgctgctcctgctggtgtcgccgacgaatggggtgagaaggcggagccggagctggagccggagccggagccggaggattcgtacacgaagctctccggcgccgacccacccagagacgaggatgagtggggtggagatggggatgcgaaggacgcgtacatcaagtcgggcaatgggatagcaaccgcagcggcggcggaggtggatgaggttggggatttgaagagatgtttggtggacacggtgtacggaacgaatttcgggtttgaggctaccgcagaggtgagggcggaggttgtggagttggtgaaccagttggaggcggtaaatccgactccggctccaacggaggcggcggagcttctcgacggcaactgggttttgttgtacacagcagcttctgagctattgcctcttctggcagcaggttctactcctttgttgaaggttaaaagtatatgccaatcaattgaaaccagcagccgcaccatcgtcaactccaccactttgtcaagcccctttgccaccttctccttcagtgcatcggccacgtttgaagttcgaagtccttcaagaatacaggtccaatttaaggaaggaaccctgcagcctccagagataaagtcaagccttaatcttccagaaaatgtggatgtcttcgggcagaaaatcaatttgtcagctgtgcagcagtatcttaatccacttcaggaggcagtggcaagcatctcacgagccatttctgggcagccacctctgaaggttccgatcccaggcgaaagaagctcctcatggcttctcatcacctaccttgacaaggatattaggatctcaaggggggacggtggtctttttgtgcttgctagagaaggtagtcctctcctagatctctactag

SEQ ID NO: 8318 - protein, 382 aa, Vitis vinifera
MAMLLTSHASLFFKNPKTLRLSSIPTQSPSLSFAKVSTQNPLFSSIRLYAASPDNPDSSSIKPPSASDGDASDSEASDQDIQHDAAPAGVADEWGEKAEPELEPEPEPEDSYTKLSGADPPRDEDEWGGDGDAKDAYIKSGNGIATAAAAEVDEVGDLKRCLVDTVYGTNFGFEATAEVRAEVVELVNQLEAVNPTPAPTEAAELLDGNWVLLYTAASELLPLLAAGSTPLLKVKSICQSIETSSRTIVNSTTLSSPFATFSFSASATFEVRSPSRIQVQFKEGTLQPPEIKSSLNLPENVDVFGQKINLSAVQQYLNPLQEAVASISRAISGQPPLKVPIPGERSSSWLLITYLDKDIRISRGDGGLFVLAREGSPLLDLY

SEQ ID NO: 8319 - DNA, 1122 bp, Populus trichocarpa
  CDS (1)..(1122)
atggcactcctctacacctcacactcctccctcctgttctccccctcctcttccaaaaaacccaacaacccactccctctttccaaaaccccaccactaccatctctctctttcttccgtaaaccccctcaaaccctccgtttccttactcaaattactaaaaaacccaaattccggaccctccttacacacatctcctcttcctcctctgacccgacacctgactcagatcctgaaccaaactcacctccggtaggtatcactgacgagtggggtgagaaggcagaacccgaacttgaacctgaatacccgaaagctgcggacttggatcctccgagaaatgatgacgagtggggtggggaatttgttgccgtggaaaatggcaacgcagcggcaccgagttccagcagtgctgtggtcgtggagaaggatgagagggttgaggagttgaagaggggtttggtagatacggtctatggtactgattttgggtttcgggccagcccggaaatccgggctgaggctttggagttggttaatcagctggaggttgtaaatccgactccggcacctgtggatgctactggggtgcttgatggcaaatgggttttagtgtatactgcattttcagagctgttgccacttctggcagcaggcgctacacctttcttgaaagtgaaaagcatatctcaaacaattgatgctagcagtctatctatagtgaactcaaccacattgtcaggcccttttgctactttctcctttagcgcttctgctacttttgagtttcggactccttcaagaatacaggtggagtttaaggaaggcgtgctgcaacctccacagataaattccagcgtagaactcccagaaaatgttgatctttttgggcaaaagatcaatctgtctcccatccagcaatctcttggtcctctgcaggaggcagcagcaaatattggaagaaccatttctggccagccaccgcttaaggtacccattccaggcaaccgagcaagcacctggcttctcattacctaccttgatgaggatctccaaatctcaagaggggatggtggtcttttcgttcttgctaaagaaggaagccctcttctagaactgtag

SEQ ID NO: 8320 - protein, 373 aa, Populus trichocarpa
MALLYTSHSSLLFSPSSSKKPNNPLPLSKTPPLPSLSFFRKPPQTLRFLTQITKKPKFRTLLTHISSSSSDPTPDSDPEPNSPPVGITDEWGEKAEPELEPEYPKAADLDPPRNDDEWGGEFVAVENGNAAAPSSSSAVVVEKDERVEELKRGLVDTVYGTDFGFRASPEIRAEALELVNQLEVVNPTPAPVDATGVLDGKWVLVYTAFSELLPLLAAGATPFLKVKSISQTIDASSLSIVNSTTLSGPFATFSFSASATFEFRTPSRIQVEFKEGVLQPPQINSSVELPENVDLFGQKINLSPIQQSLGPLQEAAANIGRTISGQPPLKVPIPGNRASTWLLITYLDEDLQISRGDGGLFVLAKEGSPLLEL

SEQ ID NO: 8321 - DNA, 1050 bp, Populus trichocarpa
  CDS (1)..(1050)
atggcactcttcttcacctcacactcctccctcttcctctccccttcgtcttccataaaccccaacaacccattccctctctccaaatccccacaactaccatccctctctttctcctgcaaatcctctaaaactctccgtttccatccccaaattactaaacaacccagattccctacccacctcacacgcacctcctcctctgttccgtcatctgacccggatccggaaccaaacccaactccagtaagtatcactgacgagtggggcgagaaggcagagcccgagcccgagtacccgaaagatgcggactcggatcctacgagaaatgatgacgagtggggggagcaatttaaggatgggaggattgaggatttgaagaggtgtttggtagatacggtctacggcacggaatttgggtttcgggccaccccggagatccgggctgaagttttagagctggttaatcagttggaggctgtaaacccgacttcggcacctgtggatgctactggtgtgctcgatggaaaatgggtcttggtgtatactgcattttctgaactgttgccacttctggcagcaggtgctacacctttattgaaagtgaaaagcatatctcaaacaattgattccagcaatctatctattgtgaactcaactacattgtcaagcccttttgctactttctcttttagcgcatctgcaacttttgaggttcggactccttcaagaatacaggttgaatttaaggaaggtacactgcaacctccggaaataaattccaacatagatctcccagaaaatgttgaactatttgggcaaaagatcaatttgtctcctgtccagcaatctctcaatcctctgcaggaggcagcagcaaatattggaagaaccatttctggccagccaccacttaaggtacccattccaggcaaacaagcaagctcctggcttcttattacctaccttgatgaggatctccgtatctcaagaggggatggtggtctttttgttcttgctaaagaaggaagtcctcttctagaactgtag

SEQ ID NO: 8322 - protein, 349 aa, Populus trichocarpa
MALFFTSHSSLFLSPSSSINPNNPFPLSKSPQLPSLSFSCKSSKTLRFHPQITKQPRFPTHLTRTSSSVPSSDPDPEPNPTPVSITDEWGEKAEPEPEYPKDADSDPTRNDDEWGEQFKDGRIEDLKRCLVDTVYGTEFGFRATPEIRAEVLELVNQLEAVNPTSAPVDATGVLDGKWVLVYTAFSELLPLLAAGATPLLKVKSISQTIDSSNLSIVNSTTLSSPFATFSFSASATFEVRTPSRIQVEFKEGTLQPPEINSNIDLPENVELFGQKINLSPVQQSLNPLQEAAANIGRTISGQPPLKVPIPGKQASSWLLITYLDEDLRISRGDGGLFVLAKEGSPLLEL

SEQ ID NO: 8323 - DNA, 990 bp, Populus trichocarpa
  CDS (1)..(990)
atggcagccatctctcaattaaatcaatttccatgcaagactctctcttcaaaaacacctctattctcccactttacttcttcaagaccctcgattatccctctaaactcgatcaagaacaacccaacaaccaacaattcgatcttgaaaccaagaattctagtaaccagagaacaacccaccaagaaaaggaatcttttcttggttaaggctgtggatgaggacgaggggagtccagaaaatgaaggccctccggttgctttggctgagaagggggaggaggagctgaaagagctggcagaggttgatcgcttgaagggacagctggtggatactttttatgggactgatcgtggactgaatgctaccagtgagactagagctgaggttgtggagcttattactcagcttgaagccagaaaccccaatcctgctcccactgaggccttgactctgctcaatggcaaatggattcttgcatacacatcttttgcgggcttgttcccattgctgtcaaggggtacattgccattggtaaaggttgaggaaatatctcagacgatcgactcggagaacttaactgtccagaattctgtgcaattctcagggccgctggctactacatccattagtaccaatgccaaatttgaagtccgaagccccaagcgtgtgcagatcaagtttgaagaaggcattattgggactcccaagctgacagactcaatagagttaccggaaaatgtggaatttctgggacaaaagatcgacctcacacccttcagaggcataatctcctctgtgcaggatacagcctcatctgttgcaaagaccatttccagccaaccaccattgaagttttctatcccaaacaggaatgctgaatcatggttgctaaccacataccttgacgatgaccttcggatttcaagaggtgatgctggcagtatatttgtgctcattaaggaaggcagtcccctcttgacaccctga

SEQ ID NO: 8324 - protein, 329 aa, Populus trichocarpa
MAAISQLNQFPCKTLSSKTPLFSHFTSSRPSIIPLNSIKNNPTTNNSILKPRILVTREQPTKKRNLFLVKAVDEDEGSPENEGPPVALAEKGEEELKELAEVDRLKGQLVDTFYGTDRGLNATSETRAEVVELITQLEARNPNPAPTEALTLLNGKWILAYTSFAGLFPLLSRGTLPLVKVEEISQTIDSENLTVQNSVQFSGPLATTSISTNAKFEVRSPKRVQIKFEEGIIGTPKLTDSIELPENVEFLGQKIDLTPFRGIISSVQDTASSVAKTISSQPPLKFSIPNRNAESWLLTTYLDDDLRISRGDAGSIFVLIKEGSPLLTP

SEQ ID NO: 8325 - DNA, 993 bp, Sorghum bicolor
  CDS (1)..(993)
atggcgggatccgcgttcctcaacgccctcgtcctccgcgcgccatccccatccccgtcgctctcgtgctcgtcctcgtctacgcgccgcagcgccggcgccttcgcgttcccgaacccaccgcgcctcccatctctgcgttctgcgcgccgcgtcgtccttgcgcgggcggcggcggcgccgccgggcgcgggcggtgaccccgagcccgaggacgacgagtgggggccggagcccgagggcgggtccgctgtcacgggagcgaccgcggtggcggaggcgcctgaggcgccggaggcgagagaggtcgcggagctcaaggcgcagctgaaggacgcgctgtacggcacggagcggggcctgcgggcgtccagcgagtcgcgggccaaggtgctggagctcatcacgcagctcgagacgcgcaaccccacgccggcgcctaccgaggcgcttacgctcctcaacggcaagtggatcctcgcgtacacatcattttcccaactgttcccactattggggtttggcaatctgcctgagctcgtgaaagtggaggaaatatcacagaccattgattctgagaacttcacagtgcaaaactgtataaagttttcaggacctttggctacaacctcagttgccaccaatgcaaaatttgaaatcagaagccccaagcgcgtgcagatcaaatttgaagaaggcattgttggtacaccacagttgaccgactccattgtgctaccagagaagtttgaattgtttggacagaacatcgacctgagtccactgaaaggcatatttacatctatcgaaaatgcagcatcctcggttgcaaagaccatatctgatcagcctccgctgaaaataccaatcaggacaaacaacgctgaatcatggttgcttacgacctaccttgacgaagagctcaggatctccagaggcgatggcagcagcatctttgtgctgttcaaggaaggaagtactcttctaaactga

SEQ ID NO: 8326 - protein, 330 aa, Sorghum bicolor
MAGSAFLNALVLRAPSPSPSLSCSSSSTRRSAGAFAFPNPPRLPSLRSARRVVLARAAAAPPGAGGDPEPEDDEWGPEPEGGSAVTGATAVAEAPEAPEAREVAELKAQLKDALYGTERGLRASSESRAKVLELITQLETRNPTPAPTEALTLLNGKWILAYTSFSQLFPLLGFGNLPELVKVEEISQTIDSENFTVQNCIKFSGPLATTSVATNAKFEIRSPKRVQIKFEEGIVGTPQLTDSIVLPEKFELFGQNIDLSPLKGIFTSIENAASSVAKTISDQPPLKIPIRTNNAESWLLTTYLDEELRISRGDGSSIFVLFKEGSTLLN

SEQ ID NO: 8327 - DNA, 1146 bp, Sorghum bicolor
  CDS (1)..(1146)
atggctcccatcttcgccgcggcgtcccacgcgtccctcctccccctctcccacgtcgaccgccccgccgccggccgcctagtccgtggcactctcaggccccacacctcgggcctccgcttgcgccgccccccgggggcaaccgggcgcggccgcgggcgtggccgaggaggcatccccgacgagtggggcgagcgttcgccgccaggcgcccccgaggcccccgcgcagcccgatccgctcatcgacgacgaggacgactccgccgacggcaactcacgccctatcgtcgtcgacgagtggggcgagcccggggcgcccgagcccgagccgccctccgccgcggacccgcctagccccgccgcagacgacgagtgggaggaggagccagaggcgtcggtgccggacccgaccccggctccggcggcggcggaggaggacgagcaggcggtgaagagggaggagctcaagcgctgcttggtggacacggtgtacggctccgacctcggcttccgggcgtccacggaggtcagaggggaggtcgtcgagctagtcacccagctcgaggcggctaaccctactacggcgcccgtcgagacatcggatctcctcgacggcaactggatcctcatatatacagcatattccgagcttctgcctattctagctgctggggcaacacctttggtcaaagtaaagcagatatcccaagaaattgactccaaaagcatgacgatagtcaatgcttcaacccttacgactccattcgcatcattttcattcagcgcaactgcctcttttgaggttcaaagtccgtcaagaatagaggtccaatttaaggaggggagctttcagcctccggtaatatcatcatctgtggatctacctcaacaaattgatatatttgggcagaagatcagcctggggccagtccagcaggcactgaatccattgcagcaagcatttgctagcattgcagggtccatttctgggcagccacccctcaaggtaccgattcccggcaacaacagagctcgatcctggctcttgactacctacctggacaaagacttaaggatctcgagaggtgatggaggcttgtttattcttgcgaaagaggggagccctttgctagatctattgtaa

SEQ ID NO: 8328 - protein, 381 aa, Sorghum bicolor
MAPIFAAASHASLLPLSHVDRPAAGRLVRGTLRPHTSGLRLRRPPGATGRGRGRGRGGIPDEWGERSPPGAPEAPAQPDPLIDDEDDSADGNSRPIVVDEWGEPGAPEPEPPSAADPPSPAADDEWEEEPEASVPDPTPAPAAAEEDEQAVKREELKRCLVDTVYGSDLGFRASTEVRGEVVELVTQLEAANPTTAPVETSDLLDGNWILIYTAYSELLPILAAGATPLVKVKQISQEIDSKSMTIVNASTLTTPFASFSFSATASFEVQSPSRIEVQFKEGSFQPPVISSSVDLPQQIDIFGQKISLGPVQQALNPLQQAFASIAGSISGQPPLKVPIPGNNRARSWLLTTYLDKDLRISRGDGGLFILAKEGSPLLDLL

SEQ ID NO: 8329 - DNA, 1104 bp, Ricinus communis
  CDS (1)..(1104)
atggccctcctcctctcgtcatactcaaactcatctctcttctccgaaaagctcaccagcccaccttctcttctcccctcttctaatatcccaacatctgtctccttcttcttcaacaaaccttctagaactcttcttctcgcttccacgaatctgaattttcaaagtcccacattcccctccttaatcccatgctcttccctttcagaacccacacccgaacccgaacccgatcctaaccccaacccacctccactcaccataactgacgaatggggagaacaagtagaacccgaaacccaacccgagtacccgaaaggtacggacgaggatcctccaaaggacgacgacgagtggggggcggagtatgagtcgggtggaaatggtagcgctggaggtttggtagtggaaaaagatgatagaatagaggatttaaagaggtgtttggtggatacggtttatggaactaaattcgggtttcaggccagccccgaaattaggggagaggttttggagttagttaatcagttggaggctctgaacccaactccagcacccgtggattcttctcagatactggatggaacctggattctgctgtacactgcattttctgagttattgccactactggcagtgggttcagtacctttgctgaaagttgaaaagatatcccaagaagttgataccagcaacctctccattgtgaactctactacattgtccagcccttttgccactttctcttttagtgcgtctgcctcatttgaagttcgaagttcttcaagaatacaggtcgaatttagggaaggcagcctgcaacctccagagataaattccaaaattgatctcccagtaaatgtagatgtttttggtcagaatatcaatttgtcgcctttgcagcagtctctcaatcctctgcaggagttggtggcaaatatttcaagaaccatatctggtcagccaccacttaaggttcctattccaggtgatcgatcaaggtcctggcttctaataacgtaccttgatgaggatctacgaatctctagaggagatggcggtctttttgttctagttaaagaaggaagtccacttctagattag

SEQ ID NO: 8330 - protein, 367 aa, Ricinus communis
MALLLSSYSNSSLFSEKLTSPPSLLPSSNIPTSVSFFFNKPSRTLLLASTNLNFQSPTFPSLIPCSSLSEPTPEPEPDPNPNPPPLTITDEWGEQVEPETQPEYPKGTDEDPPKDDDEWGAEYESGGNGSAGGLVVEKDDRIEDLKRCLVDTVYGTKFGFQASPEIRGEVLELVNQLEALNPTPAPVDSSQILDGTWILLYTAFSELLPLLAVGSVPLLKVEKISQEVDTSNLSIVNSTTLSSPFATFSFSASASFEVRSSSRIQVEFREGSLQPPEINSKIDLPVNVDVFGQNINLSPLQQSLNPLQELVANISRTISGQPPLKVPIPGDRSRSWLLITYLDEDLRISRGDGGLFVLVKEGSPLLD

SEQ ID NO: 8331 - DNA, 966 bp, Ricinus communis
  CDS (1)..(966)
atggcaagcatctctcaattgaatcaatttccatgcaagactctttctacacctccctgtaattccaaattcacttcaagaccctctgttttctcgatcaaaaccaccacttccatctgtagaccaacactttcaaccggcacaagacccgtcttctcgattagagccgtggatgccgaagacgagtggggccccgattatgaggattcagccgttgccgtagctgaagaggagtcggaggagaagcttaagcctactgaggtgacagaaattgatagcctcaagaaacagctggttgattccttttatgggaccgatcgtggattaaaggccactagcgaaaccagagctgaaattgtggagcttattacccaacttgaatccaagaaccctaccgctgcccccactgaggccctgactcttctcaacggcaagtggattcttgcatacacttctttctctggtttattcccattgttgtcaaggggcactctgccgctggtgaaggtggaagaaatatcgcagacaattgattcagagaatttcactgtccaaaattctgtccagttttcagggccactagctactacttccattagtaccaatgccaaatttgaagtccgaagccccaagagagtgcagatcaagtttgatgaaggcatcattgggaccccccagctgacagattccatagtattaccagaaaatgtggaattcctgggacaaaagattgatctcacgccctttaaaggcataataacctctgttcaggacacagcatcatctgttgcaaagactatttccagccagccaccattgaaaattcccatctcaaacaacaatgctcaatcatggttactgaccacataccttgatgaagatctcagaatctcaagggctgatgctggcagcatatttgtgctcatcaaggaaggcagccctctattgacatccttaacaaactag

SEQ ID NO: 8332 - protein, 321 aa, Ricinus communis
MASISQLNQFPCKTLSTPPCNSKFTSRPSVFSIKTTTSICRPTLSTGTRPVFSIRAVDAEDEWGPDYEDSAVAVAEEESEEKLKPTEVTEIDSLKKQLVDSFYGTDRGLKATSETRAEIVELITQLESKNPTAAPTEALTLLNGKWILAYTSFSGLFPLLSRGTLPLVKVEEISQTIDSENFTVQNSVQFSGPLATTSISTNAKFEVRSPKRVQIKFDEGIIGTPQLTDSIVLPENVEFLGQKIDLTPFKGIITSVQDTASSVAKTISSQPPLKIPISNNNAQSWLLTTYLDEDLRISRADAGSIFVLIKEGSPLLTSLTN

SEQ ID NO: 8333 - DNA, 846 bp, Vitis vinifera
  CDS (1)..(846)
  misc_feature (101)..(101): y is t or c
  misc_feature (228)..(228): y is t or c
atggtggggagagttagggtttcggcgggggaggtgaataggggaaggccggttgttttggttcggacggcgttggatgatgagtgggggccggagaaggyggagccggagggggaagggtcgacggtggcggtggtggaggaggagaagtcgaaggagattactagtttgaagaaggcgttggtggattcgttttacgggactgatcgggggttgaaggcgacgagygagactcgggcggagattgtggagcttattactcaattggaggcgaagaatccgactccggcgccaactgaggcgttgactctgctcaatgggaaatggattctagcgtacacatcttttgctggtttgttccccttgttgtcaaggggtacactgccactggtgaaggttgaggagatatcacagaccatcgactcggagaatttcacagtccagaattctgtccagttttctgggcctctggctaccacttccatcagtaccaatgctaaatttgaagtcagaagtcccaagcgtgtgcagatcaagttccaagaaggcatcattggcactccacagctgactgactccatcgagttaccagagaatgtggaatttctgggacaaaatattgacttgacgcccttcaaaggcttgatcacctcagtccaagatacagcttcttctgttgccaagacaatctccagccaaccaccattgaagttctctatcccaaacagcaatgctgaatcatggctgctaaccacataccttgatgaagatcttcgaatctctaggggagatgctggcagtatctttgtgctcatcaaggaaggcagctccctattggtaccttga

SEQ ID NO: 8334 - protein, 281 aa, Vitis vinifera
  misc_feature (34)..(34): The Xaa at location 34 stands for Ala, or Val.
MVGRVRVSAGEVNRGRPVVLVRTALDDEWGPEKXEPEGEGSTVAVVEEEKSKEITSLKKALVDSFYGTDRGLKATSETRAEIVELITQLEAKNPTPAPTEALTLLNGKWILAYTSFAGLFPLLSRGTLPLVKVEEISQTIDSENFTVQNSVQFSGPLATTSISTNAKFEVRSPKRVQIKFQEGIIGTPQLTDSIELPENVEFLGQNIDLTPFKGLITSVQDTASSVAKTISSQPPLKFSIPNSNAESWLLTTYLDEDLRISRGDAGSIFVLIKEGSSLLVP

SEQ ID NO: 8335 - DNA, 996 bp, Picea sitchensis
  CDS (1)..(996)
atggcagcgatttcttcattttctgcccatcactatgcaaacagtccagccgtggcacaattgacttcaggtagtaaaccggcagcttctgccatctctgccgttggatttgcggcatctaagccatcgaatcatgtgattactctttcttccaggcctttaagcatattccatgcgtggggatccaggaggacaaatttcagagtatttgcaatcgatgcagaggatgaatggtcagggggcaagaacggcgaagaggctcccagcacagtcactgctacggttgttgaggaggagcccagcgaaatgaaagatttgaagcgtgctttagtggactcattctacggtactgacaggggactgagggctagcagtgaaacaagggctgaaattgtagagttgattacacaactggaagccaaaaaccctactccagcacctacagaggctctcaatctcctcaatggcaaatggatcctagtgtatacatccttctccgagctattcccgttgcttgctacagggactttgccgttggtgaaggttcaggaaatttctcaaaaatttgattcggggacactcacagtggagaactctgtccaatttgcaggacctctggccactacatcctttagtacaaatgcaagtttcgaagtgcggagtcccaagcgagtgcagataaagtttgaagaaggagtaataagcacaccccagcttacagatgctattgagattccagagagtgtggaagttttagggaaaaagattgatctggctccctttaaaggactaatcagttcagtgcagaatgccgcatcttctgtagtgaaaagcatatctgagcgaccccctatcaagtttccaattcgaactgagagagcacagtcttggctgttgacaacttacttggatgaagacctcagaatctctcgaggtgatggaagcagtgtttttgtgctgatcaaggaaggtagccctttactgcccccatcttag

SEQ ID NO: 8336 - protein, 331 aa, Picea sitchensis
MAAISSFSAHHYANSPAVAQLTSGSKPAASAISAVGFAASKPSNHVITLSSRPLSIFHAWGSRRTNFRVFAIDAEDEWSGGKNGEEAPSTVTATVVEEEPSEMKDLKRALVDSFYGTDRGLRASSETRAEIVELITQLEAKNPTPAPTEALNLLNGKWILVYTSFSELFPLLATGTLPLVKVQEISQKFDSGTLTVENSVQFAGPLATTSFSTNASFEVRSPKRVQIKFEEGVISTPQLTDAIEIPESVEVLGKKIDLAPFKGLISSVQNAASSVVKSISERPPIKFPIRTERAQSWLLTTYLDEDLRISRGDGSSVFVLIKEGSPLLPPS

SEQ ID NO: 8337 - DNA, 1104 bp, Populus trichocarpa x Populus deltoides
  CDS (92)..(1081)
atagtttagttgcctgtcttcgatactccctgtttcaaagagaacaacccacctctctacctctctgtcttggaaaccaaagttcaaagaaatggcagccatctctcaattaaatcaatttccatgcaagactctctattcaaaaacacctctattctcccactttacttcttcaagaccctcgactatccctctaaactcgatcaagaacaacccaacaaccaacaattcgatcttgaaacaaagaattctggtaaccagagagcaacccgccaagaaaaggaatcttttcttggttaaggctgtggatgaggacgaggggagtccagaaaatgaaggccctccggttgctttggctgagaagggggaggaggagctgaaagagctgacagaggttgatcgcttgaagggacagctggtggatactttttatgggactgatcgtggactgaatgctaccagtgagactagagctgaggttgtggagcttattactcagcttgaagccagaaaccccaatcctgctcccaccgaggccttgactctgctcaatggcaaatggattcttgcatacacatcttttgcgggcttgttcccattgctgtcaaggggtacactgccattggtaaaggttgaggaaatatctcagacgatcgactcggagaacttaactgtccagaattctgtgcaattctcagggccgctggctactacatccattagtaccaatgccaaatttgaagtccgaagccccaagcgtgtgcagatcaagtttgaagaaggcattattgggactcccaagctgacagactcaatagagttaccggaaaaagtggaatttctgggacaaaagatcgacctcacacccttcagaggcataatctcctctgtgcaggatacagcctcatctgttgcaaagaccatttccagccaaccaccattgaagttttctatcccaaacaggaatgctgaatcatggttgctaaccacataccttgacgatgaccttcggatttcaagaggtgatgctggcagtatatttgtgctcattaaggaaggcagtcccctcttgacaccctgaacaaaccaaaaaaaaaaaaaaaa

SEQ ID NO: 8338 - protein, 329 aa, Populus trichocarpa x Populus deltoides
MAAISQLNQFPCKTLYSKTPLFSHFTSSRPSTIPLNSIKNNPTTNNSILKQRILVTREQPAKKRNLFLVKAVDEDEGSPENEGPPVALAEKGEEELKELTEVDRLKGQLVDTFYGTDRGLNATSETRAEVVELITQLEARNPNPAPTEALTLLNGKWILAYTSFAGLFPLLSRGTLPLVKVEEISQTIDSENLTVQNSVQFSGPLATTSISTNAKFEVRSPKRVQIKFEEGIIGTPKLTDSIELPEKVEFLGQKIDLTPFRGIISSVQDTASSVAKTISSQPPLKFSIPNRNAESWLLTTYLDDDLRISRGDAGSIFVLIKEGSPLLTP

SEQ ID NO: 8339 - DNA, 960 bp, Oncidium Gower Ramsey
  CDS (1)..(960)
atgacatcaattgctttctggaatgctttcactgtcaacccttttccggccgccgcgcgacggagccctccgcccctaactccgttcacttccggtgcactttctcccgcaagaaaacctcgcatacttgaaatctctcatccgcggacccttccgtccttccgtgtgcaggctattgcagaagacgagtgggagagcgagaaaaaagctttaaagggagttgttggaagtgtggctctggctgaagatgagacaaccggtgcggatttggtggtctctgatctaaagaaaaagcttatcgatcagcttttcggcacagatcggggtttgaaagcgacgagcgaaactagggcggaggttaatgagctcatcactcagctggaggctaagaaccctaatccagctcccaccgaagcccttagcttgctcaacggcaggtggatcttagcgtacacgtcttttgcggggctgtttccgctgttgggggcggagagtctgcagcagttgctgaaggtggatgaaatttcgcagacgattgattcggaggggttcactgtacagaactcggtgaggttcgttgggccgttttcgagcacttcggttactactaatgccaagttcgaagtgcggagccctaaacgggtccagataaagtttgaggaaggcatcattggtactccccagctcacagactccattgtgatcccagataagtttgaattcttcgggcagaatatagacctgtccccattcaaaggcgttatctcttccttacaggacacagcgtcctctgtagctaagaccatttctagccaacctcccatcaaattccctatttctaacagcaacgcccagtcttggctcctcaccacttacctcgatgatgaactcagaatctctagagctgatggtggcagcgtgtttgtgcttattaaggaaggcagccctctcttgacttga

SEQ ID NO: 8340 - protein, 319 aa, Oncidium Gower Ramsey
MTSIAFWNAFTVNPFPAAARRSPPPLTPFTSGALSPARKPRILEISHPRTLPSFRVQAIAEDEWESEKKALKGVVGSVALAEDETTGADLVVSDLKKKLIDQLFGTDRGLKATSETRAEVNELITQLEAKNPNPAPTEALSLLNGRWILAYTSFAGLFPLLGAESLQQLLKVDEISQTIDSEGFTVQNSVRFVGPFSSTSVTTNAKFEVRSPKRVQIKFEEGIIGTPQLTDSIVIPDKFEFFGQNIDLSPFKGVISSLQDTASSVAKTISSQPPIKFPISNSNAQSWLLTTYLDDELRISRADGGSVFVLIKEGSPLLT

SEQ ID NO: 8341 - DNA, 960 bp, Oncidium Gower Ramsey
  CDS (1)..(960)
atgacatcaattgctttctgcaatgctttcactgtcaacccttttctggccgccgcgcggcggagccctccgcccctaactccattaacttcagtcgcactttctcccgctagaaaacctcgcatactcgcaatctttcatccgcgcacatttccgtccttccgtgtgcaggctattgcagaagacgagtgggagagcgagaaaaaaactttaaagggagttgttggaagtgtggctctggctgaagatgagaaaaccggtgcggatttggtggtttctgatctaaagaaaaagcttatcgatcagcttttcggcacagatcggggtttgaaagcgacgagcgaaactagggcggaggttaatgagctcatcactcagctggaggctaagaaccctaatccggcccccaccgaagcccttagcttgctcaacggcaagtggatcttagcgtacacgtcttttgtggggctgtttccgctgttgggggcggagagtctgcagcagttgctgaaggtggatgaaatttcgcagacgattgattcggaggggttcactgtacagaactcggtgaggttcgttgggccgttttcgagcacttcggttactactaatgccaagttcgaagtgcggagccctaaacgggttcagataaagtttgaggaaggcatcattggtactccccagctcacagactccattgtgatcccagataaggttgaattcttcggacagaatatagacctgtccccattcaaaggcgttatctcttccttacaggacacagcgtcctctgtagctaagaccatttctagccaacctcccatcaaattccccatttctaacagcaacgcccagtcttggctcctcaccacttacctcgatgatgaactcagaatctctagagctgatggtggcagcgtgtttgtgcttattttggaaagcagccctctcttgacttaa

SEQ ID NO: 8342 - protein, 319 aa, Oncidium Gower Ramsey
MTSIAFCNAFTVNPFLAAARRSPPPLTPLTSVALSPARKPRILAIFHPRTFPSFRVQAIAEDEWESEKKTLKGVVGSVALAEDEKTGADLVVSDLKKKLIDQLFGTDRGLKATSETRAEVNELITQLEAKNPNPAPTEALSLLNGKWILAYTSFVGLFPLLGAESLQQLLKVDEISQTIDSEGFTVQNSVRFVGPFSSTSVTTNAKFEVRSPKRVQIKFEEGIIGTPQLTDSIVIPDKVEFFGQNIDLSPFKGVISSLQDTASSVAKTISSQPPIKFPISNSNAQSWLLTTYLDDELRISRADGGSVFVLILESSPLLT

SEQ ID NO: 8343 - DNA, 1149 bp, Zea mays
  CDS (1)..(1149)
atggctcccctcttcgccgcggcgtcccacgcgtccctcctccccctctcctccctcgaccgccccgccgccggccgcctagtccgtggcaccctcaggccccgcacctcgagcctccgcctgcgccgccccccgggggcaaccgggcgcggccgcgggcgtggccgagggggcatcccagacgagtggggcgagcgctcgccgccggccaaccccgagccccccgcgcagcccgatcctcccatcgacgaagacgagtggggccgcgacgactctgccgacggcaactcacgccctatcgtcgtcgacgagtggggcgagcccggggtgcctgagcccgagccgccctccgccgcggacccgcctagcccctccgcagacgacgactggggaaaggagccggaggcgccggcgccggcccctgctccggcggcggaggaggacgagcaggaggtgaagagggaggagctcaagcggtgcctggtggacacggtgtacggctccgacctcggcttccgggcgtccacggaggtcagaggtgaggtcgtcgagctagtcacccagctcgaggcggttaaccctactactgctcccgtcgactcgccggatctcctcgacggcaactggatcctcatatatacagcatattccgagcttctgcctattctagctgctggggcaacacctttggtcaaagtaaagcagatatcccaagaaattgactccaaaatcatgacgatagtcaatgcttcgacccttacgactccattcgcttcattttcattcagcgcaaccgcctctttcgaggttcaaagcccatcaaggatagaggtccaatttaaggaggggagctttcagcctccggcaatatcatcatccgtggatctacctcaacaagttgatatatttgggcagaagatcagcctggggccagtccagcaggcactgaatccattgcagcaagcatttgctagcattgctgggtccatttctgggcagccacccctcaaggtaccaattcctggcaacaacagagctcgatcctggctcttgactacctacctggacaaagacttaaggatctcgagaggcgatggaggcttgtttattcttgccaaagaggggagccctttgctagatcaattgtaa

SEQ ID NO: 8344 - protein, 382 aa, Zea mays
MAPLFAAASHASLLPLSSLDRPAAGRLVRGTLRPRTSSLRLRRPPGATGRGRGRGRGGIPDEWGERSPPANPEPPAQPDPPIDEDEWGRDDSADGNSRPIVVDEWGEPGVPEPEPPSAADPPSPSADDDWGKEPEAPAPAPAPAAEEDEQEVKREELKRCLVDTVYGSDLGFRASTEVRGEVVELVTQLEAVNPTTAPVDSPDLLDGNWILIYTAYSELLPILAAGATPLVKVKQISQEIDSKIMTIVNASTLTTPFASFSFSATASFEVQSPSRIEVQFKEGSFQPPAISSSVDLPQQVDIFGQKISLGPVQQALNPLQQAFASIAGSISGQPPLKVPIPGNNRARSWLLTTYLDKDLRISRGDGGLFILAKEGSPLLDQL

SEQ ID NO: 8345 - DNA, 1068 bp, Medicago truncatula
  CDS (1)..(1068)
atgtctcttctctcttccacactacgtgttcctctcatcttctcccaaaaccctaaaccttcttctctctcttctctcccctctcgaatctctccctctcctcgctctcacagattcccttctctccgcttcatctccgccaccggcgacatcggagacgccgatataccatccaccgatatctccgacgaatggggcgataaatccgaacccgtacccgaagccaaaccgtctttatcctctaaggtttcgagttcggttccttcgaagaacgaggatgaatggggagaaggagcgaaaaatgacgccgggagttatagcgatgctggaaatggaactccggcttttgcttccgaagctccggtggaagaaggagggaatgatgagcttgagggtttgaaacgtgctcttgttgatacggtttatgggactgagcttgggtttcgagctgggtcggaggttcgagctgaagtgtctgagttcgtggctcagttggaagctgctaaccctactccggctccggttggggaaccagagcttcttaatggaaattgggtgttgctgtacacagcatcttctgaactgttgcctcttctagcagcaggagcattacctttggtgaaggtggataaaatcttgcaaacaattgatacctatagctccactgttgtgaactctgtgacattgtctagcccttttgcctcatcatctttcagtgcatctgcctcatttgaagttcgaagccctacaagaatacaggttacattcaaagaaggatcactacagcctccagagataaagtctaaaattgacctaccagaaaacataaacatttttggccaaaatcttagcctggggcctctgcaacaatctcttggtcctctggagaatgtggttgcaaatatatcacgtgtcatttcaggtcagtcacctcttaagattcccatacctggtgagaggacaagctcttggcttcttaccacatatcttgacaaggacttgcgaatatcaaggggagatggcgggctgtttgtccttgcaagagaagggagtcccattcttgattag

SEQ ID NO: 8346 - protein, 355 aa, Medicago truncatula
MSLLSSTLRVPLIFSQNPKPSSLSSLPSRISPSPRSHRFPSLRFISATGDIGDADIPSTDISDEWGDKSEPVPEAKPSLSSKVSSSVPSKNEDEWGEGAKNDAGSYSDAGNGTPAFASEAPVEEGGNDELEGLKRALVDTVYGTELGFRAGSEVRAEVSEFVAQLEAANPTPAPVGEPELLNGNWVLLYTASSELLPLLAAGALPLVKVDKILQTIDTYSSTVVNSVTLSSPFASSSFSASASFEVRSPTRIQVTFKEGSLQPPEIKSKIDLPENINIFGQNLSLGPLQQSLGPLENVVANISRVISGQSPLKIPIPGERTSSWLLTTYLDKDLRISRGDGGLFVLAREGSPILD

SEQ ID NO: 8347 - DNA, 951 bp, Medicago truncatula
  CDS (1)..(951)
atggcctctctctcaaacctcaaccaacttctccacataaacacacttccagtaacctctctcaactccacaccttcaattactccatcgaccatcacattcggtttacagagtaaaaatgccagaaaatcgattttggtggccgatggtttgaggcgggtggtgtatgttcgggctactgcaaatgatgatgatgatgatgagtggggttcagagccttctgccgatgtggcagttgcggaggtgatagtgccagaaagtgagacggagaagctgaagaaggacttggttggttccttttatgggactgctcgtggattgaaagcggcgagtgagacaagagcggagatttttgagcttattagtcagctcgaggctaagaatccaacccccgcttccactgatgctttgagtttgctcgatggaaaatggattcttgcgtatacatcctatgcaggtttatttccattgttgtcaagcgggctactgccattactcgaggttgaagaattatctcagactattgattctgaaagtttaagtgtccaaaactccgttctgttagctggtccattgactaccacctccattagtaccaatgccaaatttgaagttcgtagtccaaatcgtttgcagatcaagtttgaggaaggtgtcataggcactccacaactcacagactcattagagataccagaaactgtggaatttttagggcaagagattgatctatcatctttcaaagacatatttacttctatccaaaacaccgcctcatcggttgtgcaaacaatttccgaccagcctccgttgaagaccccaatctccaacagctatgctcaatcatggttgcttactacataccttgatgaagaactacgcgtcgcaaggggtgatggtggcggtgtgtttgttcttattaaggaaggaagttctcttttgacaaactaa

SEQ ID NO: 8348 - protein, 316 aa, Medicago truncatula
MASLSNLNQLLHINTLPVTSLNSTPSITPSTITFGLQSKNARKSILVADGLRRVVYVRATANDDDDDEWGSEPSADVAVAEVIVPESETEKLKKDLVGSFYGTARGLKAASETRAEIFELISQLEAKNPTPASTDALSLLDGKWILAYTSYAGLFPLLSSGLLPLLEVEELSQTIDSESLSVQNSVLLAGPLTTTSISTNAKFEVRSPNRLQIKFEEGVIGTPQLTDSLEIPETVEFLGQEIDLSSFKDIFTSIQNTASSVVQTISDQPPLKTPISNSYAQSWLLTTYLDEELRVARGDGGGVFVLIKEGSSLLTN

SEQ ID NO: 8349 - DNA, 948 bp, Medicago truncatula
  CDS (1)..(948)
atggcctctctctcaaacctcaaccaacttctccacataaacacacttccagtaacctctctcaactccacaccttcaattactccatcgaccatcacattcggtttacagagtaaaaatgccagaaaatcgattttggtggccgatggtttgaggcgggtggtgtatgttcgggctactgcaaatgatgatgatgatgagtggggttcagagccttctgccgatgtggcagttgcggaggtgatagtgccagaaagtgagacggagaagctgaagaaggacttggttggttccttttatgggactgctcgtggattgaaagcggcgagtgagacaagagcggagatttttgagcttattagtcagctcgaggctaagaatccaacccccgcttccactgatgctttgagtttgctcgatggaaaatggattcttgcgtatacatcctatgcaggtttatttccattgttgtcaagcgggctactgccattactcgaggttgaagaattatctcagactattgattctgaatgtttaagtgtccaaaactccgttctgttagctggtccattgactaccacctccattagtaccaatgccaaatttgaagttcgtagtccaaatcgtttgcagatcaagtttgaggaaggtgtcataggcactccacaactcacagactcattagagataccagaaactgtggaatttttagggcaagagattgatctatcatctttcaaagacatatttacttctatccaaaacaccgcctcatcggttgtgcaaacaatttccgatcagcctccgttgaagatcccaatctccaacagctatgctcaatcatggttgcttactacataccttgatgaagaactacgcgtcgcaaggggtgatggtggcagtgtgtttgttcttattaaggaaggaagttctcttttgacaaactaa

SEQ ID NO: 8350 - protein, 315 aa, Medicago truncatula
MASLSNLNQLLHINTLPVTSLNSTPSITPSTITFGLQSKNARKSILVADGLRRVVYVRATANDDDDEWGSEPSADVAVAEVIVPESETEKLKKDLVGSFYGTARGLKAASETRAEIFELISQLEAKNPTPASTDALSLLDGKWILAYTSYAGLFPLLSSGLLPLLEVEELSQTIDSECLSVQNSVLLAGPLTTTSISTNAKFEVRSPNRLQIKFEEGVIGTPQLTDSLEIPETVEFLGQEIDLSSFKDIFTSIQNTASSVVQTISDQPPLKIPISNSYAQSWLLTTYLDEELRVARGDGGSVFVLIKEGSSLLTN

SEQ ID NO: 8351 - DNA, 960 bp, Oryza sativa subsp. indica
  CDS (1)..(960)
atggcggggtcgtcgtccctcagcacgctctccctctgcacgcagtcgccatcaccgtcaccggtggcgtccggccgcctcgtggcaccggctgtcctcggtttcgccgaggccccgcggttcccgacgctgcgggccgcgccacggcggctgacggcgcgggcggtggccggggacgccgaggacgagtgggggaaggagccggcggcggaccagggcggtgccgccgcggcggtggccgaggcgcccgcggatgtgccggtgacgagcgaggtcgcggagctcaaggcgaagctgaaggaggcgctgtacggtacggagcgcggcctgcgcgcgtccagcgagacgcgcgcggaggtggtcgagctcatcacgcagctcgaggcccgcaaccccacgccggcgcccaccgaggcgctcaccctcctcaacggcaagtggatcctcgcgtacacctcattttcacagctattcccactattggggtctggtagtttgcctcagcttgtcaaggtggaagaaatatcacaaactattgattctgagaacttcacggttcagaattgcatcaagttttcaggacctttagcaacaacttcagtgtctaccaatgccaaatttgaagttcgaagtcccaaacgtgtacagatcaaatttgatgaaggcattatcggcactccacaattgactgattctattgtactacctgagaagtttgagttatttgggcagaatattgacctgaccccattgaagggcatattttcatcaattgaaaatgcagcatcctcagttgctagaaccatctctggtcaacctccactaaagataccaattaggactgacaatgctgagtcttggttgctcacaacctaccttgatgatgagcttagaatctccagaggtgatggcagcagcatctttgtactgtttaaggaaggaagcaccctcctatattaa

SEQ ID NO: 8352 - protein, 319 aa, Oryza sativa subsp. indica
MAGSSSLSTLSLCTQSPSPSPVASGRLVAPAVLGFAEAPRFPTLRAAPRRLTARAVAGDAEDEWGKEPAADQGGAAAAVAEAPADVPVTSEVAELKAKLKEALYGTERGLRASSETRAEVVELITQLEARNPTPAPTEALTLLNGKWILAYTSFSQLFPLLGSGSLPQLVKVEEISQTIDSENFTVQNCIKFSGPLATTSVSTNAKFEVRSPKRVQIKFDEGIIGTPQLTDSIVLPEKFELFGQNIDLTPLKGIFSSIENAASSVARTISGQPPLKIPIRTDNAESWLLTTYLDDELRISRGDGSSIFVLFKEGSTLLY

SEQ ID NO: 8353 - DNA, 1311 bp, Picea sitchensis
  CDS (1)..(1311)
atgactatggctttgctagcaactggaaagccctttcagaatcttcacaagacaaatcatcctcctcttccatctcccctgccaaaacccactctcatatctcctcgtcccctttcatttcaacgccatgcaagctctactactttccccactgtctcagccaccaccgatttacccaaatccccaattttcagtttcaacattgtccactcatcatccttagttccctctccctacaacagaggtcagaggttccaatgcccaagagtacaaatagaggatgacatcccacccaccctcaatgatgatgaatggggaacccccaggcaaccatccattttcagcaatggtgaaaggggaaatgatcccaactcaggggcggaaaacccacaaaacggagaatccaacagcccacctggcaatgtgggtggtgccgactcagccggaaatggccttgtttctgccacgtctgttgatgaatggggggagaagactgtcccagatgacgagtcggcacagacaaggctgcctgatacagacccaccttcattggaagacgatgaacgcggtgcagcaagtgacctgtcacctaaggaacgtgatggtagtgctgaagatagtgggctttcagagcttaagcaatgtttggtggattgtttctatgggactgagtatggactgagagctagcagtcagactagggctgaaattggggagttgatttctcagcttgaagctcagaatcccacccctgttccaactgaagcaccatctctgttgcagggcaagtgggttttagtgtacacatcattttctgagctattgcctctaatagcagcagggacattgccatttgtgaagcttgggaaaatattccaagaaattgatatagataagttcactatagagaattctgcttcctacagtgggccatttgccactttctcatttcgggcattagcatcttttgaagttcgtagtcccaagcgaatagaggtaaagtttgaggaagggataattcctccaccggagattacaagtacccttgatattcccgaaaaggttgagatctttggacagaaaatagatttgacttcttttcaggggtctcttcgtcctcttcaagaagctgcaacaaacatatcccgggtcatatcgggacagcctccacttaaacttcctattaggagagatggggcacaatcctggctgctaattacatatcttgacaaagatctgcgaatatctagaggagatgggggtggactttttgtactggtcaaagaaggaagttctcttttgagtttgtaa

SEQ ID NO: 8354 - protein, 436 aa, Picea sitchensis
MTMALLATGKPFQNLHKTNHPPLPSPLPKPTLISPRPLSFQRHASSTTFPTVSATTDLPKSPIFSFNIVHSSSLVPSPYNRGQRFQCPRVQIEDDIPPTLNDDEWGTPRQPSIFSNGERGNDPNSGAENPQNGESNSPPGNVGGADSAGNGLVSATSVDEWGEKTVPDDESAQTRLPDTDPPSLEDDERGAASDLSPKERDGSAEDSGLSELKQCLVDCFYGTEYGLRASSQTRAEIGELISQLEAQNPTPVPTEAPSLLQGKWVLVYTSFSELLPLIAAGTLPFVKLGKIFQEIDIDKFTIENSASYSGPFATFSFRALASFEVRSPKRIEVKFEEGIIPPPEITSTLDIPEKVEIFGQKIDLTSFQGSLRPLQEAATNISRVISGQPPLKLPIRRDGAQSWLLITYLDKDLRISRGDGGGLFVLVKEGSSLLSL

SEQ ID NO: 8355 - DNA, 996 bp, Picea sitchensis
  CDS (1)..(996)
atggcagcgatttcttcattttctgcccatcactatgcaaacagtccagccgtggcacaattgacttcaggtagtaaaccggcagcttctgccatctctgccgttggatttgcggcatctaagccatcgaatcatgtgattactctttcttccaggcctttaagcatattccatgcgtggggatccaggaggacaaatttcaaagtatttgcaatcgatgcagaggatgaatggtctgggggcaagaacggcgaagaggctcccagcacagtcactgctacggttgttgaggaggagcccagcgaaatgaaagatttgaagcgtgctttagtggactcattctacggtactgacaggggactgagggctagcagtgaaacaagggctgaaattgtagagttgattacacaactggaagccaaaaaccctactccagcacctacagaggctctcaatctcctcaatggcaaatggatcctagtgtatacatccttctccgagctattcccgttgcttgctacagggactttgccgttggtgaaggttcaggaaatttctcaaaaatttgattcggggacactcacagtggagaactctgtccaatttgcaggacctctggccactacatcctttagtacaaatgcaagtttcgaagtgcggagtcccaagcgagtgcagataaagtttgaagaaggagtaataagcacaccccagcttacagatgctattgagattccagagagtgtggaagttttagggaaaaagattgatctggctccctttaaaggactaatcagttcagtgcagaatgccgcatcttctgtagtgaaaagcatatctgagcgaccccctatcaagtttccaattcgaactgagagagcacagtcttggctgttgacaacttacttggatgaagacctcagaatctctcgaggtgatggaagcagtgtttttgtgctgatcaaggaaggtagccctttactgcccccatcttag

SEQ ID NO: 8356 - protein, 331 aa, Picea sitchensis
MAAISSFSAHHYANSPAVAQLTSGSKPAASAISAVGFAASKPSNHVITLSSRPLSIFHAWGSRRTNFKVFAIDAEDEWSGGKNGEEAPSTVTATVVEEEPSEMKDLKRALVDSFYGTDRGLRASSETRAEIVELITQLEAKNPTPAPTEALNLLNGKWILVYTSFSELFPLLATGTLPLVKVQEISQKFDSGTLTVENSVQFAGPLATTSFSTNASFEVRSPKRVQIKFEEGVISTPQLTDAIEIPESVEVLGKKIDLAPFKGLISSVQNAASSVVKSISERPPIKFPIRTERAQSWLLTTYLDEDLRISRGDGSSVFVLIKEGSPLLPPS

SEQ ID NO: 8357 - DNA, 960 bp, Oryza sativa subsp. japonica
  CDS (1)..(960)
atggcgggtcgtcgtccctcagcacgctctccctctgcacgcagtcgccatcaccgtcaccggtggcgtccgcccgcctcgtggcaccggctgtcctcggtttcgccggggccccgcggttccccgacgcgcgggccgcgccacggcgggctgacggcgcgggcggtggccggggacgccgaggacgagtgggggaaggagccggcggcggaccagggcggtgccgccgcggcggtggccgaggcgcccgcggatgtgccggtgacgagcgaggtcgcggagctcaaggcgaagctgaaggaggcgctgtacggtacggagcgcggcctgcgcgcgtccagcgagacgcgcgcggaggtggtcgagctcatcacgcagctcgaggcccgcaaccccacgccggcgcccaccgaggcgctcaccctcctcaacggcaagtggatcctcgcgtacacctcattttcacagctattcccactattggggtctggtagtttgcctcagcttgtcaaggtggaagaaatatcacaaactattgattctgagaacttcacggttcagaattgcatcaagttttcaggacctttagcaacaacttcagtgtctaccaatgccaaatttgaagttcgaagtcccaaacgtgtacagatcaaatttgatgaaggcattatcggcactccacaattgactgattctattgtactacctgagaagtttgagttatttgggcagaatattgacctgaccccattgaagggcatattttcatcaattgaaaatgcagcatcctcagttgctagaaccatctctggtcaacctccactaaagataccaattaggactgacaatgctgagtcttggttgctcacaacctaccttgatgatgagcttagaatctccagaggtgatggcagcagcatctttgtactgtttaaggaaggaagcaccctcctatattaa

SEQ ID NO: 8358 - protein, 319 aa, Oryza sativa subsp. japonica
MAGRRPSARSPSARSRHHRHRWRPPASWHRLSSVSPGPRGSPTRGPRHGGLTARAVAGDAEDEWGKEPAADQGGAAAAVAEAPADVPVTSEVAELKAKLKEALYGTERGLRASSETRAEVVELITQLEARNPTPAPTEALTLLNGKWILAYTSFSQLFPLLGSGSLPQLVKVEEISQTIDSENFTVQNCIKFSGPLATTSVSTNAKFEVRSPKRVQIKFDEGIIGTPQLTDSIVLPEKFELFGQNIDLTPLKGIFSSIENAASSVARTISGQPPLKIPIRTDNAESWLLTTYLDDELRISRGDGSSIFVLFKEGSTLLY

SEQ ID NO: 8359 - DNA, 1125 bp, Oryza sativa subsp. japonica
  CDS (1)..(1125)
atggccatgcctcccccgctcttcgccgccgcctcccaggcctccctcctcctcccctctcccaccatccaaagctccaccggatctcgccgccccttccgcctccccctccgctcctcccgccgcccgcccgtcgcagcagcagctgcctctggcgtccccgacgagtggggcgaccgcttgccctccgcgcccgagccgccctcccagcccgacccccccatcgacgacgacgagtggggccgcgacgacccctccgcctccgggaactctcgccccgtcctcgtcaccgacgagtggggcgagccgggtgtgcccgagccccaatccacctccgccgccgacccccctaccaacgacgacgagtggggtggggatccggcgccaccgccaccgccacctcctgtgccggaggaagacaacgaggaggaaaggcgggaggagctcaagcgctgcttggtggacactgtgtacggctccgacctgggcttccgggcgtcctccgaggtgaggggggaggtgctagagctcgtcacccagctcgaggccaccaatcccacgcccgagcccgtccaggccacccacctcctcgccggcaactggatcctcatatatacagcgtattctgagcttctacctatcctagcagttggtgcagcaccattgttcaaagtcgatgagatatcgcaagaaattgacacaaatagcatgaccatagtcaatgcctcaactatctcaagtccattcgcttcgttttctttcagtgccactgcttcttttgatgtacagagtccatcaaggatagaggtccaattcaaagagggaagctttcagccaccgaagatatcatcatcggtagacctacctgcagaggttgatatatttgggcagaagatcagcttgggcccagtccagcaggtgctgaaccctctgcagcaagcctttgcaagtattgcaggatccatttctgggcagccacccctcaagttacccatccctggcaacaacagggcccggtcttggctgctgacgacctacctagacaaggacctcaggatctccagaggtgatggaggtctcttcattcttgtcaaagagggtagccctctactagatcaattatag

SEQ ID NO: 8360 - protein, 374 aa, Oryza sativa subsp. japonica
MAMPPPLFAAASQASLLLPSPTIQSSTGSRRPFRLPLRSSRRPPVAAAAASGVPDEWGDRLPSAPEPPSQPDPPIDDDEWGRDDPSASGNSRPVLVTDEWGEPGVPEPQSTSAADPPTNDDEWGGDPAPPPPPPPVPEEDNEEERREELKRCLVDTVYGSDLGFRASSEVRGEVLELVTQLEATNPTPEPVQATHLLAGNWILIYTAYSELLPILAVGAAPLFKVDEISQEIDTNSMTIVNASTISSPFASFSFSATASFDVQSPSRIEVQFKEGSFQPPKISSSVDLPAEVDIFGQKISLGPVQQVLNPLQQAFASIAGSISGQPPLKLPIPGNNRARSWLLTTYLDKDLRISRGDGGLFILVKEGSPLLDQL

SEQ ID NO: 8361 - DNA, 963 bp, Coffea canephora
  CDS (1)..(963)
atggcttccatcacttctttcaatcaattctcatacacagtaaagtctaaaacctttcaacatcctcaattcggcactaaagtttcaaattctgccgtgaatttcaccgatttcggactgaaaaagccgctccaaagctctatttcaatcaaagaatcgtcaaagaaaaggcctgggtttgtagtactggtggctgcaggcgatgattatggcccagaggaggaagcagccggggttgcggtggcggaggagccgccgccaaaggagccgagggagattgatatcttgaagaaacggttggtggactcgttttatggaaccgatagaggattgaatgccagcagcgagacgagggcggaggtggtggaactgatcacccagctggaggctaaaaacccaactccggctccaactgaggcgttgactctgctcaatggcaaatggattcttgcgtacacgtcttttattggattgtttcctttgttgtcgagaggcacactgcccttggtgaaggtggaggagatatcacagaccattgactcagaggccttctctgttgagaatgtcgtccagtttgctgggccattggctacgacgtccattactacaaatgccaaatttgaagtccgcagtcccaagcgcgtgcagataaagtttgaagaaggtgtcattggaactccccagttgacagactccattgagctgccagaaagtgtggagcttctgggacaaaagatcgatcttaaccccgttaagggcttgcttacttctgtccaggacacagcatcctcagtcgcaaagtccatttctagccgaccaccactgaaattctctctttctaataggaatgccgagtcgtggcttctcaccacatacctggatgatgagcttcggatttcaaggggagatggaggcagtatttttgtgcttatcaaggaaggctgccctcttctgaaaccttag

SEQ ID NO: 8362 - protein, 320 aa, Coffea canephora
MASITSFNQFSYTVKSKTFQHPQFGTKVSNSAVNFTDFGLKKPLQSSISIKESSKKRPGFVVLVAAGDDYGPEEEAAGVAVAEEPPPKEPREIDILKKRLVDSFYGTDRGLNASSETRAEVVELITQLEAKNPTPAPTEALTLLNGKWILAYTSFIGLFPLLSRGTLPLVKVEEISQTIDSEAFSVENVVQFAGPLATTSITTNAKFEVRSPKRVQIKFEEGVIGTPQLTDSIELPESVELLGQKIDLNPVKGLLTSVQDTASSVAKSISSRPPLKFSLSNRNAESWLLTTYLDDELRISRGDGGSIFVLIKEGCPLLKP

SEQ ID NO: 8363 - DNA, 981 bp, Solanum lycopersicum
  CDS (1)..(981)
atggcttccatctcttctctcaatcaaattccttgcagaactctccaaattacatcccaatattcaaaacccacctccaaaatctcaactttacccatctcctccacgaatttcccatcaaaaacagaactacacagagcaatttcagtcaaagaattcacatacccaaaaccaaaattcacagctcaagccacaaattacgacaaggaagatgagtgggggccggaagtggagaaaataagtccgggtggagtagcggttgtggatgaagaaccaccaaaggagccaagtgaaattgagttgctgaagaagcaattggcggattctttttatggaaccaataggggtttgagtgctagcagtgagactagggcggaaatcgttgaactcatcacacagcttgagtcgaagaaccctaatccagcacctactgaagccttgactcttctcaacggcaaatggattcttgcgtacacatctttttcgggtttgttccccttgttgtcacggggcaatctgcttctggttcgagttgaagagatttcacagactatcgattctgagagtttcactgtccaaaactctgttgtctttgctggacctttagctacaacttccattagtaccaatgccaaattcgaagtcagaagtccaaaacgcgtccagattaaattcgaagaaggcataattggaacaccccagttgacagattccatcgtattgcctgagaacgttgaattcttgggacaaaagattgatctaagccccttcaaaggcttgattacttcagtccaagacacagcttcctcggtggccaagtccatttcaagtcaaccaccaattaagtttcctatttccaataacaatgcacaatcatggctgctgacaacctacttggatgatgagcttaggatctccagaggagatgctggcagtgtatttgtgttgatcaaggaaggcagtcccctcttgaagccttaa

SEQ ID NO: 8364 - protein, 326 aa, Solanum lycopersicum
MASISSLNQIPCRTLQITSQYSKPTSKISTLPISSTNFPSKTELHRAISVKEFTYPKPKFTAQATNYDKEDEWGPEVEKISPGGVAVVDEEPPKEPSEIELLKKQLADSFYGTNRGLSASSETRAEIVELITQLESKNPNPAPTEALTLLNGKWILAYTSFSGLFPLLSRGNLLLVRVEEISQTIDSESFTVQNSVVFAGPLATTSISTNAKFEVRSPKRVQIKFEEGIIGTPQLTDSIVLPENVEFLGQKIDLSPFKGLITSVQDTASSVAKSISSQPPIKFPISNNNAQSWLLTTYLDDELRISRGDAGSVFVLIKEGSPLLKP

SEQ ID NO: 8365 - DNA, 951 bp, Medicago truncatula
  CDS (1)..(951)
atggcctctctctcaaacctcaaccaacttctccacataaacacacttccagtaacctctctcaactccacaccttcaattactccatcgaccatcacattcggtttacagagtaaaaatgccagaaaatcgattttggtggccgatggtttgaggcgggtggtgtatgttcgggctactgcaaatgatgatgatgatgatgagtggggttcagagccttctgccgatgtggcagttgcggaggtgatagtgccagaaagtgagacggagaagctgaagaaggacttggttggttccttttatgggactgctcgtggattgaaagcggcgagtgagacaagagcggagatttttgagcttattagtcagctcgaggctaagaatccaacccccgcttccactgatgctttgagtttgctcgatggaaaatggattcttgcgtatacatcctatgcaggtttatttccattgttgtcaagcgggctactgccattactcgaggttgaagaattatctcagactattgattctgaaagtttaagtgtccaaaactccgttctgttagctggtccattgactaccacctccattagtaccaatgccaaatttgaagttcgtagtccaaatcgtttgcagatcaagtttgaggaaggtgtcataggcactccacaactcacagactcattagagataccagaaactgtggaatttttagggcaagagattgatctatcatctttcaaagacatatttacttctatccaaaacaccgcctcatcggttgtgcaaacaatttccgatcagcctccgttgaagatcccaatctccaacagctatgctcaatcatggttgcttactacataccttgatgaagaactacgcgtcgcaaggggtgatggtggcagtgtgtttgttcttattaaggaaggaagttctcttttgacaaactaa

SEQ ID NO: 8366 - protein, 316 aa, Medicago truncatula
MASLSNLNQLLHINTLPVTSLNSTPSITPSTITFGLQSKNARKSILVADGLRRVVYVRATANDDDDDEWGSEPSADVAVAEVIVPESETEKLKKDLVGSFYGTARGLKAASETRAEIFELISQLEAKNPTPASTDALSLLDGKWILAYTSYAGLFPLLSSGLLPLLEVEELSQTIDSESLSVQNSVLLAGPLTTTSISTNAKFEVRSPNRLQIKFEEGVIGTPQLTDSLEIPETVEFLGQEIDLSSFKDIFTSIQNTASSVVQTISDQPPLKIPISNSYAQSWLLTTYLDEELRVARGDGGSVFVLIKEGSSLLTN

SEQ ID NO: 8367 - DNA, 954 bp, Medicago truncatula
  CDS (1)..(954)
atggcctctctatcaaacctaaaccaacttctccatacaaacactcttccagtaacctctctcaactccacaccttcaatttctccgtcgaccatcacagtcggttttctgaacaaacatgtcagaaaaccgattgtgttggccgatggtttgaggcgggtggtgtatgttcaggctaatagaatcgatgatgagtggggtccagagccttctgctggtgtcgcggttgcggaggtgcaagcaactgagaaagtgtcggatggtgagacggagaagctgaagaaggcgttggttggttcgttttatgggactgatcgtggattgaaagcgacgagtgaaactagagctgagattgttgagcttattactcagctggaagctaagaatcccacacctgcttccactgatgccttgagtttgctcaatggaaaatggattcttgcgtatacatcctttgccggtttatttccattgctttcgagcggactactgccattacttacggttgaagaaatatctcagactattgactctgaaagtttgactgtccaaaactctgttctgtttgctggtccattgactaccacctccattagtaccaatgccaaatttgaagttcgaagtccgaatcgtttgcagatcaagttcgaggaaggtgtcataggcactccacaactcacagactcattagagataccagaaaatgtggaagttttggggcaaaagattgatctatcacctttcaaaggcatatttacttctgtccaaaacactgcctcatctgtcgtgcaaacaatttccaatcagcctccgttgaagatcccaatttccaacgacaacgctcaatcatggttgcttactacataccttgatgaagaactacgtatctcaaggggcgatggtggcagtgtgtttgttcttatcaaggaaggaagttctcttttgacaaactaa

SEQ ID NO: 8368 - protein, 317 aa, Medicago truncatula
MASLSNLNQLLHTNTLPVTSLNSTPSISPSTITVGFLNKHVRKPIVLADGLRRVVYVQANRIDDEWGPEPSAGVAVAEVQATEKVSDGETEKLKKALVGSFYGTDRGLKATSETRAEIVELITQLEAKNPTPASTDALSLLNGKWILAYTSFAGLFPLLSSGLLPLLTVEEISQTIDSESLTVQNSVLFAGPLTTTSISTNAKFEVRSPNRLQIKFEEGVIGTPQLTDSLEIPENVEVLGQKIDLSPFKGIFTSVQNTASSVVQTISNQPPLKIPISNDNAQSWLLTTYLDEELRISRGDGGSVFVLIKEGSSLLTN

SEQ ID NO: 8369 - DNA, 969 bp, Capsicum annuum
  CDS (1)..(969)
atggcttccatctcttctctcaatcaaattccttgcaaaactctccaaattacatcccaatattcaaaaatttcatctttacccctcacatccccaaatttcccatcaaaaactgaactacacagatcaatttcaatcaaagaattcacaaacccaaaaccaaaattcacagcacaagccacaaattacgacaaggaagatgagtggggtccggaactggagcaaataaatccaggtggagtagcagttgtggaggaagaaccaccaaaagagccgagtgaaatggagaagctgaagaagcaattgacggattctttttatggaactaataggggtttgagtgctagcagtgaaactagggctgagatcgttgaacttattactcagcttgaatcgaagaaccctactccagcacctactgaagccttgtctcttcttaatggcaaatggattcttgcgtacacatctttttctggtttgttccctttgttggcaaggggaaatctgcttccggttcgagttgaggagatttcccagaccattgatgctgagactttaaccgtccaaaattctgttgtctttgctgggcctttatctacaacttccattagcaccaatgccaagttcgaagtcagaagtcctaaacgtctccagatcaacttcgaagaaggcataataggaacaccccagttgacagattctattgagttgcctgagaacgtcgaattcttgggacaaaagattgatcttagccccttcaaaggcttgattacttcagtccaggacacagctacctcagtagccaagtccatttcaagtcaaccaccaatcaagtttcctatttccaacagctatgcacaatcatggttgctgacaacatacttggatgctgagcttaggatttccagaggagatgctggcagtatttttgtgttgatcaaggaaggcagtcccctcttgaagccttaa

SEQ ID NO: 8370 - protein, 322 aa, Capsicum annuum
MASISSLNQIPCKTLQITSQYSKISSLPLTSPNFPSKTELHRSISIKEFTNPKPKFTAQATNYDKEDEWGPELEQINPGGVAVVEEEPPKEPSEMEKLKKQLTDSFYGTNRGLSASSETRAEIVELITQLESKNPTPAPTEALSLLNGKWILAYTSFSGLFPLLARGNLLPVRVEEISQTIDAETLTVQNSVVFAGPLSTTSISTNAKFEVRSPKRLQINFEEGIIGTPQLTDSIELPENVEFLGQKIDLSPFKGLITSVQDTATSVAKSISSQPPIKFPISNSYAQSWLLTTYLDAELRISRGDAGSIFVLIKEGSPLLKP

SEQ ID NO: 8371 - DNA, 969 bp, Cucumis sativus
  CDS (1)..(969)
atggcgtttgtttctcaattcaatcaacttccgtgcaagactctcgcactcaatccaccacaacctcaattgacttctaagccttcggttttccccatcgcttcgattggggctaccgccagagccgcggcggggaagtcactgatctcagttaggcctgcgttcaaggtccgtgcggtgttaaacgatgacgagtggggggaggataaggatgagaagtatggagatgattcgtctgtggcggtagctgaaaaggaggaggaaaagcctctggagccatccgagatttataaactgaagaaggcgttggtggactcgttttacgggaccgatcgtggattacgagtgtccagagatactagggcggagattgtcgagctgattacgcaactggaatcgaagaacccaacccctgctcctactgaggccctgactctgctcaacggcaagtggattctagcgtacacaactttcgcgggtctgttcccgttgttgtctaggaatttgccattggtcaaagtggaggaaatttcacagacaattgattcagagaacctcaccgtccaaaactctgtccagttttccggtcctctagccaccacttccattactaccaatgcaaagtttgaagttcgaagtcccctgcgtgtacatatcaaattcgaagaaggtgtcattggaactccccagctgacggattcgatagtgataccagataatgtggactttcttgggcagaagattgactttacaccattcaatggtatcatatcttcccttcaagacactgcttcaaatgtagccaagacgatttcgagtcaaccaccaatcaagttctcaatctcaaacacgagggtagagtcttggttgctaactacttatcttgatgaagatcttcgaatttcacgaggagatggtggtagcgtgttcgtactcctcaaggaaggcagttctttcttgtctctctaa

SEQ ID NO: 8372 - protein, 322 aa, Cucumis sativus
MAFVSQFNQLPCKTLALNPPQPQLTSKPSVFPIASIGATARAAAGKSLISVRPAFKVRAVLNDDEWGEDKDEKYGDDSSVAVAEKEEEKPLEPSEIYKLKKALVDSFYGTDRGLRVSRDTRAEIVELITQLESKNPTPAPTEALTLLNGKWILAYTTFAGLFPLLSRNLPLVKVEEISQTIDSENLTVQNSVQFSGPLATTSITTNAKFEVRSPLRVHIKFEEGVIGTPQLTDSIVIPDNVDFLGQKIDFTPFNGIISSLQDTASNVAKTISSQPPIKFSISNTRVESWLLTTYLDEDLRISRGDGGSVFVLLKEGSSFLSL

SEQ ID NO: 8373 - DNA, 981 bp, Solanum demissum
  CDS (1)..(981)
atggcttccatctcttctctcaatcaaattccttgcaaaactctccaaattacatcccaatattcaaaacccacatccaaaatctcaactttacccatctcctccacgaatttcctatcaaaaacagaacaacacagatcaatttcagtcaaagaattcacaaacccaaaaccaaaattcacagctcaagccacaaattacgacaaggaagatgagtgggggccggaagtggagcaaataaggccgggtggagtagcggttgtggaagaagaaccacctaaggagccaagtgaaattgagttgctgaagaagcaattggcggattctttatatggaaccaataggggtttgagtgctagcagtgagactagggcggaaatcgttgaactcatcactcagcttgagtcgaagaaccctaatccagcacctactgaagccttgactcttctcaacggcaaatggattcttgcgtacacatctttctctggtttgtttcctttgttgtcaaggggcaatctgcctctggttcgagttgaggagatttcccagaccatcgattctgagagtttcactgtccaaaactctgttgtctttgctggacctttagctacaacttccattagtaccaatgccaaattcgaagtcagaagtccaaaacgtgtccagattaaatttgaagaaggcataattggaacaccccagttgacagattccatcgtattgcctgagaacgtcgaattcttgggacaaaagattgatgtaagccccttcaaaggcttgattacttcagtccaagacacagcttcctcagtggtcaagtccatttcaagtcaaccaccaattaagtttcctattaccaacaacaatgcacaatcatggctgctgacaacatacttggatgatgagcttaggattcccagaggagatgctggcagtgtttttgtgttgatcaaggaaggcagtcccctcttgaagccttaa

SEQ ID NO: 8374 - protein, 326 aa, Solanum demissum
MASISSLNQIPCKTLQITSQYSKPTSKISTLPISSTNFLSKTEQHRSISVKEFTNPKPKFTAQATNYDKEDEWGPEVEQIRPGGVAVVEEEPPKEPSEIELLKKQLADSLYGTNRGLSASSETRAEIVELITQLESKNPNPAPTEALTLLNGKWILAYTSFSGLFPLLSRGNLPLVRVEEISQTIDSESFTVQNSVVFAGPLATTSISTNAKFEVRSPKRVQIKFEEGIIGTPQLTDSIVLPENVEFLGQKIDVSPFKGLITSVQDTASSVVKSISSQPPIKFPITNNNAQSWLLTTYLDDELRIPRGDAGSVFVLIKEGSPLLKP

SEQ ID NO: 8375 - DNA, 981 bp, Solanum tuberosum
  CDS (1)..(981)
atggcttccatctcttctctcaatcaaattccttgcaaaactctccaaattacatcccaatattcaaaacccacatccaaaatctcaactttacccatctcctccacgaatttcccatcaaaaacagaactacacagatcaatttcagtcaaagaattcacaaacccaaaaccaaaattcacagctcaagccacaaattacgacaaggaagatgagtgggggccggaagtggagcaaataaggccgggtggagtagcggttgtggaagaagaaccacctaaggagccaagtgaaattgagttgctgaagaagcaattggcggattctttatatggaaccaataggggtttgagtgctagcagtgagactagggcggaaatcgttgaactcatcactcagcttgagtcgaagaaccctaatccagcacctactgaagccttgactcttctcaacggcaaatggattcttgcgtacacatctttctctggtttgtttcctttgttgtcaaggggtaatctgcctctggttcgagttgaggagatttcccagaccatcgattctgagagtttcactgtccaaaactctgttgtctttgctggacctttagctacaacttccattagtaccaatgccaaattcgaagtcagaagtccaaaacgtgtccagattaaatttgaagaaggcataattggaacaccccagttgacagattccatcgtattgcctgagaacgtcgaattcttgggacaaaagattgatctaagccccttcaaaggcttgattacttcagtccaagacacagcttcctcagtggccaagtccatttcaagtcaaccaccaattaagtttcctattaccaacaacaatgcacaatcatggctgctgacaacatacttggatgatgagcttaggatctccagaggagatgctggcagtgtttttgtgttgatcaaggaaggcagtcccctcttgaagccttaa

SEQ ID NO: 8376 - protein, 326 aa, Solanum tuberosum
MASISSLNQIPCKTLQITSQYSKPTSKISTLPISSTNFPSKTELHRSISVKEFTNPKPKFTAQATNYDKEDEWGPEVEQIRPGGVAVVEEEPPKEPSEIELLKKQLADSLYGTNRGLSASSETRAEIVELITQLESKNPNPAPTEALTLLNGKWILAYTSFSGLFPLLSRGNLPLVRVEEISQTIDSESFTVQNSVVFAGPLATTSISTNAKFEVRSPKRVQIKFEEGIIGTPQLTDSIVLPENVEFLGQKIDLSPFKGLITSVQDTASSVAKSISSQPPIKFPITNNNAQSWLLTTYLDDELRISRGDAGSVFVLIKEGSPLLKP

SEQ ID NO: 8377 - DNA, 972 bp, Citrus unshiu
  CDS (1)..(972)
atggcttcaatatctcaaaccaaccagttcccgtgcaagactctttcacaaaacccaccacacaatcagttcacctcgaagccttcaattcttcctttgaactcggttcgaatttcacggagtctcgccaagaaatcatttctttctatccaaggattcactcgggccaggccgctggttctaactcgggctgccgatgatgatgagtggggcccggagaaggagaaggagggcggtggcgctctggcggtggcagaggaggagagcccaaaagaagttacagagattgataatttgaagaaagcgcttgtggattcgttttatgggaccgatcgtggattgaatgccacaagtgagacgagggctgagatcgttgagcttattacgcagcttgaggctaagaatccaaccccagctcccaccgaggccttaactctgctaaatgccaaatggattcttgtgtacacatctttttcaggtttgtttccgttgttgtcaaggggaacattgccattggcgagggtggaggagatatctcagacaattgactcagagaacttcacggtccagaactccatccagtttgctgggccattggctacaacttccattagtaccaatgccaagtttgaagtgcggagccccaagcgtgtgcagatcaagttcgaggaaggtgtcattgggactcctcaggtaactgattcactagtgttaccggaaaatgttgaattcttgggacaaaagattgatctctcacccttcaaaggcatactctcttcagtccaagacacagcttcatctgttgcaaagaccatttctagccaaccacctttgaagttctctatctctaacagcaatgctcaatcatggttgctaaccacataccttgatgaagatcttcggatttcaagggcagatgctggcagcgtctttgttttcatcaaggaaggaagccccctcttgatgccatga

SEQ ID NO: 8378 - protein, 323 aa, Citrus unshiu
MASISQTNQFPCKTLSQNPPHNQFTSKPSILPLNSVRISRSLAKKSFLSIQGFTRARPLVLTRAADDDEWGPEKEKEGGGALAVAEEESPKEVTEIDNLKKALVDSFYGTDRGLNATSETRAEIVELITQLEAKNPTPAPTEALTLLNAKWILVYTSFSGLFPLLSRGTLPLARVEEISQTIDSENFTVQNSIQFAGPLATTSISTNAKFEVRSPKRVQIKFEEGVIGTPQVTDSLVLPENVEFLGQKIDLSPFKGILSSVQDTASSVAKTISSQPPLKFSISNSNAQSWLLTTYLDEDLRISRADAGSVFVFIKEGSPLLMP

SEQ ID NO: 8379 - DNA, 1077 bp, Pisum sativum
  CDS (1)..(1077)
atggctctactctcctccacactacgcgctccactcgtcttctccaaaaaccctaaacccgtctctctctcttcccttcactctcgaatctatctatctcctcgctctcccaggttcccttcccttcgcttcatctccgccgccggcgataccggagacgccgaaaagccatcttccaatatctccgacgagtggggcgaggggtctgagcccgaaaccaaaccgttcacatatttcaagcttccagattcggatcctcccaaggacgaggatgaatggggaaaaggagcggcagctggcgccggaagctataacgacgccgggaatggaactccaactttcgctgccgaagcttcgccggaggcggaggcggaggatggagttgatgaaaatcttgaggggctgaagcgttctcttgttgacactgtttacgggactgagctcgggttccgagctcggtcagaggttcgagctgaggtgtccgagtttgtggctcaattggaagctgctaaccccacccccgctccggttgaggaacctgaccttctcaatgggaattgggtgctgctgtacacagcatcttctgaactgttgccacttttagcagcaggatcattgcctttgttgaagttggataagatttcgcaaacaattgatacggatagcttcactgttgtaaactctacgacattgtctagcccttttgcctcgttttcttttagtgtatctgcttcatttgaagttcgaagccctacaagaatacaggttacattcaaagaagggtcactacaacctccagaaataaagtctaaaattgacctaccagaaaacataaacatttttggtcaacaacttagcctagggcctctgctacagtctctcggacccctggagaatgtggtggcaaacatatcacgtgtcatttcaggtcagtcacctcttaagattcccataccgggtgagaggacaagctcctggcttattaccacatatcttgataaggacttgcgaatatcaaggggagatggtggtttgtttgttcttgcaagagaagggagttcccttcttgatcagtaa

SEQ ID NO: 8380 - protein, 358 aa, Pisum sativum
MALLSSTLRAPLVFSKNPKPVSLSSLHSRIYLSPRSPRFPSLRFISAAGDTGDAEKPSSNISDEWGEGSEPETKPFTYFKLPDSDPPKDEDEWGKGAAAGAGSYNDAGNGTPTFAAEASPEAEAEDGVDENLEGLKRSLVDTVYGTELGFRARSEVRAEVSEFVAQLEAANPTPAPVEEPDLLNGNWVLLYTASSELLPLLAAGSLPLLKLDKISQTIDTDSFTVVNSTTLSSPFASFSFSVSASFEVRSPTRIQVTFKEGSLQPPEIKSKIDLPENINIFGQQLSLGPLLQSLGPLENVVANISRVISGQSPLKIPIPGERTSSWLITTYLDKDLRISRGDGGLFVLAREGSSLLDQ

SEQ ID NO: 8381 - DNA, 984 bp, Brassica napus
  CDS (1)..(984)
atggcgacgaccgtacctttgttcagccaattcacctgcaaaaccccaatcaccagctcatcgacttcttcattccaatcaaaatctccgattctactacccatcaatccaatcagtcggcgactcgctgttcatcggcacgatttcaaggtccgagccagtgacgtcaatgacgagtggggtccggactccaagggccgaggcggtgacgttgaagacgagtggggccccgagataggattgaactcatcggtggctgagaaagtggcagaagaagcaatcgagtctgcggaggagacggagcggcttaagagagtgctagcggggtctctgtacggaacggatcgaggtctaagcgcgtcgagtgagacgagggcggagatcagtgagctgataacgcagctcgagtcgaagaaccctaacccagctcctaacgaggctctgtttctcctcaacggcaaatggatcctcgtctatacatcgtttgtgggtctgttcccattgctctcacgcagaatctcaccgttggttaaagtggatgagatctcacaaaccattgattccgacagcttcaccgtacacaactctgtccggttcgctggtccacttgccacaacatcgcttagcaccaacgctaaattcgaagtccgaagtcctaaacgcgtccaggtcaagtttgagcagggcgttatcggaactccacaactaacggattcgattgaaatcccggagttcgtcgaggttctcggtcagaaaatcgatctcaaccccatcagagggctacttacatcggtccaagacacggcttcttcaatggctagaaccatttcaagccagccaccgttgaaattctctttgcctggagacagtgcacagtcgtggctgctcaccacttatctcgacaaagaccttcggatctctagaggcgatggtggaaacgtctttgtgctcatcagagaaggaagctctctcttaaacccttaa

SEQ ID NO: 8382 - protein, 327 aa, Brassica napus
MATTVPLFSQFTCKTPITSSSTSSFQSKSPILLPINPISRRLAVHRHDFKVRASDVNDEWGPDSKGRGGDVEDEWGPEIGLNSSVAEKVAEEAIESAEETERLKRVLAGSLYGTDRGLSASSETRAEISELITQLESKNPNPAPNEALFLLNGKWILVYTSFVGLFPLLSRRISPLVKVDEISQTIDSDSFTVHNSVRFAGPLATTSLSTNAKFEVRSPKRVQVKFEQGVIGTPQLTDSIEIPEFVEVLGQKIDLNPIRGLLTSVQDTASSMARTISSQPPLKFSLPGDSAQSWLLTTYLDKDLRISRGDGGNVFVLIREGSSLLNP

SEQ ID NO: 8383 - DNA, 957 bp, Brassica napus
  CDS (1)..(957)
atggcgacggttcagttcttcaaccaattcccctgccaaacccgagtccaaagcccaccaaactcaaaacccctctccaagccaccgtcttcgctggtgccaatgagcgcgctcactcgccgtccgttgttctcccccggagaattcgccgtttctcgtgcggatttcagagtcagagtcatcgatgcggaagacgagttggatccggagacgagtgagggaggatctgctctattgatggcggaggaagcaatcgaatccgtggaagagacggaggttctcaagagatcgctggtggattcgttgtacggcacagaccgagggttgagcgcatcgagcgagacgagagccgagatcggagatctaatcacacagctcgagtccaagaaccctacaccagctcccaccgatgctctcttccttctcaacggtaaatggatcctcgcgtacacatcgttcgttggtttgttcccgttgctttcacgagggatcgtgccgttagttaaagtcgacgagatctcacagactattgattcggacaacttcacggtcgagaactctgttctgttcgctggtccgttagctacaacctcgatcagcaccaacgccaaattcgaaatccgtagccccaaacgcgtccagattaagttcgaggaaggtgtgatcggcactcctcagctaacggattcgatcgagatcccggagtatgttgagtttcttggtcagaagattgatcttactccgatcagagggttgcttacatctgtacaagacacggctacgtctgtggctagaaccatatcgagccagccaccgttgaaattctctttgcctggggacaatgcacagtcgtggctgctcacgacttatctggacaaggacattaggatctctagaggagatggtggaagcgtctttgtgcttatcaaagaaggaagccctctcttgaacccttga

SEQ ID NO: 8384 - protein, 318 aa, Brassica napus
MATVQFFNQFPCQTRVQSPPNSKPLSKPPSSLVPMSALTRRPLFSPGEFAVSRADFRVRVIDAEDELDPETSEGGSALLMAEEAIESVEETEVLKRSLVDSLYGTDRGLSASSETRAEIGDLITQLESKNPTPAPTDALFLLNGKWILAYTSFVGLFPLLSRGIVPLVKVDEISQTIDSDNFTVENSVLFAGPLATTSISTNAKFEIRSPKRVQIKFEEGVIGTPQLTDSIEIPEYVEFLGQKIDLTPIRGLLTSVQDTATSVARTISSQPPLKFSLPGDNAQSWLLTTYLDKDIRISRGDGGSVFVLIKEGSPLLNP

SEQ ID NO: 8385 - DNA, 957 bp, Brassica napus
  CDS (1)..(957)
atggcgacggtacctctgttcacccagtttccatgcaaaattctatctccaagctcctccaactctaaactccaaccaaaatctccgactctagtgccggtaaatccaatcaaccggcggtcggaggttagaaccactgtccatcggccggatttcaaggtccgagttagcgacgtcaatgacgagtggggtcctgatgcgtcggatagaggctctaacgtatcggtggccgagaaagaagcagaagaagccattgaatccgtggaggaaacggagcggctaaagagatcgctagcggattctttgtacggaacagatcgaggtcttagcgcatcgagcgagaccagagccgagatcagtgagctgatcacacagctcgagtccaacaaccctaacccagcgcccaacgaagctctgtttctcctcagtggcaaatggattctcgcttacacatcgttcgttggtctgttcccgttgctctcacgtagaatctcaccgttggtcaaagtggatgagatctcacagaccattgactccgacagcttcaccgtacaaaactctgtacggttcgctggtccgcttgccacgacatcgtttaacaccaatgctaagttcgaagtccaaagtcctaagcgcgtccagatcaagtttgagcaaggtgttatcgggactcctcagctaacggattcaattgaaatccctgaatccgtggaggttcttggtcagaaaatcgatctcaaccccatcagaggaatactcacatctgtccaggacacggcttcttcaatggctaaaaccatttcaagccaaccaccactgaaattctctttgcctgcagacagagcccagtcgtggctgctcactacttatcttgacaaagaccttcggatctcgagaggcgatggcggaagcatctttgtgcttttcaaagaaggcagctctctcttaaacccttag

SEQ ID NO: 8386 - protein, 318 aa, Brassica napus
MATVPLFTQFPCKILSPSSSNSKLQPKSPTLVPVNPINRRSEVRTTVHRPDFKVRVSDVNDEWGPDASDRGSNVSVAEKEAEEAIESVEETERLKRSLADSLYGTDRGLSASSETRAEISELITQLESNNPNPAPNEALFLLSGKWILAYTSFVGLFPLLSRRISPLVKVDEISQTIDSDSFTVQNSVRFAGPLATTSFNTNAKFEVQSPKRVQIKFEQGVIGTPQLTDSIEIPESVEVLGQKIDLNPIRGILTSVQDTASSMAKTISSQPPLKFSLPADRAQSWLLTTYLDKDLRISRGDGGSIFVLFKEGSSLLNP

SEQ ID NO: 8387 - DNA, 984 bp, Brassica napus
  CDS (1)..(984)
atggcgacgacggtacctttgttcagccaattcacctgcaaaaccctagtcaccagctcaacgacttctacattccaatcaaaatctccgattctgttacccatcaatccaatcaatcggcgaatcgctgttcatcggcacgatttcaagatccgagccagtgacgtcaatgacgagtggggtccggactccatgggccgaggcagtgacgttgacgacgagtggggccccgagataggattgaactcatcggtggctgagaaagtggcagaagaagcaatcgagtctgcggaggagacggagcggcttaagagagtgctagcggggtctctgtacggaacggatcgaggtctaagcgcgtcgagtgagacgagggcggagatcagtgagctgataacgcagctcgagtcgaagaaccctaacccagctcctaacgaggctctgtttctcctcaacggcaaatggatcctcgtctatacatcgtttgtgggtctgttcccattgctctcacgcagaatctcaccgttggttaaagtggatgagatctcacaaaccattgattccgacagcttcaccgtacacaactctgtccggttcgctggtccacttgccacaacatcgcttagcaccaacgctaaattcgaagtccgaagtcctaaacgcgtccaggtcaagtttgagcagggcgttatcggaactccacaactaacggattcgattgaaatcccggagttcgtcgaggttctcggtcagaaaatcgatctcaaccccatcagagggctactcacatcggtccaagacacggcttcttcagtggctagaaccatttcaagccagccaccgttgaaattctctttgcctggagacagtgcacagtcgtggctgctcaccacttatctcgacaaagaccttcggatctctagaggcgatggtggaagcgtctttgtgctcatcagagaaggaagctctctcttaaacccttaa

SEQ ID NO: 8388 - protein, 327 aa, Brassica napus
MATTVPLFSQFTCKTLVTSSTTSTFQSKSPILLPINPINRRIAVHRHDFKIRASDVNDEWGPDSMGRGSDVDDEWGPEIGLNSSVAEKVAEEAIESAEETERLKRVLAGSLYGTDRGLSASSETRAEISELITQLESKNPNPAPNEALFLLNGKWILVYTSFVGLFPLLSRRISPLVKVDEISQTIDSDSFTVHNSVRFAGPLATTSLSTNAKFEVRSPKRVQVKFEQGVIGTPQLTDSIEIPEFVEVLGQKIDLNPIRGLLTSVQDTASSVARTISSQPPLKFSLPGDSAQSWLLTTYLDKDLRISRGDGGSVFVLIREGSSLLNP

SEQ ID NO: 8389 - DNA, 957 bp, Brassica napus
  CDS (1)..(957)
atggcgacggtacctttgttcacccagtttccatgcaaaacccaagttccaacctcttcgaactccaaactccaatcaaaatctccgactctagtgaccgtaaatccaatcaacaggcggacggaggctagaaccgctgtccatcggccggaattcaaggtccgagttagcgacgttaatgacgagtggggtcctgattcgtcggagagaggatccaacgtgtcggtggccgagaaagaagcagaagaagccattgaatccgtggaggaaacggagcggctaaagagatcgctagcggattctttgtacggaacagatcgaggtcttagcgcatcgagcgagacgagagccgagatcagtgagctgatcacacagcttgagtccaagaaccctaatccagcgcccaacgaagctctgtttctcctcagtggcaaatggattctcgcttacacatcgttcgttggtctgttcccgttgctctcacgtagaatctcaccgttggtcaaagtggatgagatctcacagaccattgactccgacagcttcaccgtacaaaactctgtacggttcgctggtccgcttgccacgacatcgtttaacaccaatgctaagttcgaagtccaaagtcctaagcgcgtccagatcaagtttgagcaaggtgttatcgggactcctcagctaacggattcgattgaaatccctgaatctgtggaggttcttggtcagaaaatcgatctcaaccccatcagaggattactcacatctgtccaggacacggcttcttcagtggctagaaccatttcaagccaaccaccactgaaattctctttgcctgcagacagagcccagtcgtggctgctcactacttatcttgacaaagaccttcggatctcgagaggcgatggcggaagcatctttgtgcttttcaaagaaggcagctctctcttaaacccttag

SEQ ID NO: 8390 - protein, 318 aa, Brassica napus
MATVPLFTQFPCKTQVPTSSNSKLQSKSPTLVTVNPINRRTEARTAVHRPEFKVRVSDVNDEWGPDSSERGSNVSVAEKEAEEAIESVEETERLKRSLADSLYGTDRGLSASSETRAEISELITQLESKNPNPAPNEALFLLSGKWILAYTSFVGLFPLLSRRISPLVKVDEISQTIDSDSFTVQNSVRFAGPLATTSFNTNAKFEVQSPKRVQIKFEQGVIGTPQLTDSIEIPESVEVLGQKIDLNPIRGLLTSVQDTASSVARTISSQPPLKFSLPADRAQSWLLTTYLDKDLRISRGDGGSIFVLFKEGSSLLNP

SEQ ID NO: 8391 - DNA, 939 bp, Helianthus annuus
  CDS (1)..(939)
atgtccggcctttcactaatacctaacttcccgtccaattcgtcatcaacgacgtcgtatcggaaactaacctccagaaactcaaagtttccggttaatccgattcgttttcccgccaaatcctccacaaaattgaacgtttttgtcgtgaggaagaaacataacttcagtttgcgagcttcagctgaagagaactgggaaccggagtctaaggactctccggtggcggtggcggagaaggaaccgacggagattgatctgttgaagaagcagttggttgactcgttttacgggacgaaccgtggattgagtgcgacgagtgaaactagggcggaggttgtggagttgatcacgcagcttgaggccaagaatccgactccggcgccgactgaggctcttcctcttctcaatggtaaatggatattggcctatacatccttcctaggtttgtaccctttgctgtcaagaggatccctgccagtggtgaaggttgaagagatatcacaaaccattgattctgaaaattttacagtccagaactctgtcgttttttctggactcgggtccacaactgcaatcactacaaatgcgaaatttgaagtcaggagtcctaagcgtgtgcagataaagttcgatgaagggattatcgggacaccacagttgacggactccattgtgttaccagaaaacgttgaagttttaggacaaaagttcgatatgtctccattcaaaggcttgatcacatcagttcaagacacggcttccaatgttgcaaagaccatttccaatcaaccaccattgaaattctcaatctctcaaacgaatgcagaatcatggttgttaacaacttaccttgatgaagaacttcgtatctcaaggagtgatggcggtagcgtctttgttctccttaaagaaggctctgcccttcttttaccttaa

SEQ ID NO: 8392 - protein, 312 aa, Helianthus annuus
MSGLSLIPNFPSNSSSTTSYRKLTSRNSKFPVNPIRFPAKSSTKLNVFVVRKKHNFSLRASAEENWEPESKDSPVAVAEKEPTEIDLLKKQLVDSFYGTNRGLSATSETRAEVVELITQLEAKNPTPAPTEALPLLNGKWILAYTSFLGLYPLLSRGSLPVVKVEEISQTIDSENFTVQNSVVFSGLGSTTAITTNAKFEVRSPKRVQIKFDEGIIGTPQLTDSIVLPENVEVLGQKFDMSPFKGLITSVQDTASNVAKTISNQPPLKFSISQTNAESWLLTTYLDEELRISRSDGGSVFVLLKEGSALLLP

SEQ ID NO: 8393 - DNA, 1062 bp, Glycine max
  CDS (1)..(1062)
atggctctcctcgccgtcacttcgcgcgctcccttcctcttctccccaaaccctaaaacactttctctatcctctttctactcccacctctctctctctcctcgctctcccaggttcccttctctccgcttccgctctgccaccggagacgccagcgacgccggcaagcccgtcggtaagatctccgacgagtggggcgaggactacgatcccgaggccgaagcattgacctccaagcttcccgactcggaccctcccaaggacgaggacgagtggcaggaaggaggggcgcccgacgccggcggctacgtcgacggcgggaacggaactccggtcaccggagctgaggatccggcggaggaggaggtggacgataagttggaggcgctgaagcgtgctttggtggatactttgtatgggaccgagttagggattcgggccgggtcggaggttcgagctgaggtatccgaattggtgagtcagttggaagcggcgaatcctacactcgcccccgtggaagaacctgcccttctcaatgggaattgggtgttgctgtacactgcatcttctgaactgttgcctcttctagccgcgggaagattgcctttgttgaaggtggacaagattacacaaacaattgatactagtagctccactattataaactccacaacattgtctagcccttttgcatccttgtctttcagtgcatctgcctcatttgaagttcgaacccctacgagaattcaggttacatttaaagaaggttcaatacaacctccagagataaagtctaatgttgaactaccagaaaatgtagacatttttggccaaaagcttagcctacagcctctgcaacaatcccttggcccacttcagggtctggtggaaaacatatcgcgtgtcatttctggtcagccacctcttaagattcccatccctggcgaaaggacaagctcctggcttcttactacatatcttgataaggacttgcgaatatcaaggggggatggtggtcttttcgttcttgccagagaagggagtccacttcttgatcagtag

SEQ ID NO: 8394 - protein, 353 aa, Glycine max
MALLAVTSRAPFLFSPNPKTLSLSSFYSHLSLSPRSPRFPSLRFRSATGDASDAGKPVGKISDEWGEDYDPEAEALTSKLPDSDPPKDEDEWQEGGAPDAGGYVDGGNGTPVTGAEDPAEEEVDDKLEALKRALVDTLYGTELGIRAGSEVRAEVSELVSQLEAANPTLAPVEEPALLNGNWVLLYTASSELLPLLAAGRLPLLKVDKITQTIDTSSSTIINSTTLSSPFASLSFSASASFEVRTPTRIQVTFKEGSIQPPEIKSNVELPENVDIFGQKLSLQPLQQSLGPLQGLVENISRVISGQPPLKIPIPGERTSSWLLTTYLDKDLRISRGDGGLFVLAREGSPLLDQ

SEQ ID NO: 8395 - DNA, 942 bp, Hordeum vulgare
  CDS (1)..(942)
atggcgggagtagcgtccctcaacgccgtgtccctgtccgtgccgtcgccccaggtaccgccgggggcgtcctctgcccgcggccgccttctctccccggcggcccggcgcttcccgtcgctgcgggccgcgcggcgcgtcgtcacggcgcgggcggttcccgtggacgccgacgacgagtgggggaaggagccggcggagggagggacggcggtggcggaggcgccctcggaggcggctgagaccgcaggcgagttggcggcgctcaagcagaagctcaaggcggcgctgtacgggacggagcgcggcctgcgcgcttccagcgagacgcgcgcggaggtcgtcgagctcatcacgcagctcgaggcgcgcaaccccacgccggcccccaccgaggctctcacccttctcaacggcaagtggatcctcgcgtacacatcattttcgcaattgttcccactgttaggatctggaaggctacaagctcttgtcaaggtggacgagatatcacagactattgattccgagaactttgcagtgcagaactgcatcaagttttcaggacctttggcgtcaacttcagtgtcgaccaatgccaagtttgaaattagaagccctaaacgtgtacagatcaaattcgaagaaggcatcatcggcactccacagttgaccgattccatcgtactaccagagaagttcgaattctttggacagaacattgacctgagcccattgagcggcatatttacttcgatcgagaacgcagcatcctcggtcgccaagaccatctccggtcagcccccactgaagatacctttcaggagcgagagtgctgggtcctggctgctcacaacctaccttgatgccgagcttagaatctctagaggagatggcagcagcatctttgtgctgttcaaggaaggaagctcgctctcaatatag

SEQ ID NO: 8396 - protein, 313 aa, Hordeum vulgare
MAGVASLNAVSLSVPSPQVPPGASSARGRLLSPAARRFPSLRAARRVVTARAVPVDADDEWGKEPAEGGTAVAEAPSEAAETAGELAALKQKLKAALYGTERGLRASSETRAEVVELITQLEARNPTPAPTEALTLLNGKWILAYTSFSQLFPLLGSGRLQALVKVDEISQTIDSENFAVQNCIKFSGPLASTSVSTNAKFEIRSPKRVQIKFEEGIIGTPQLTDSIVLPEKFEFFGQNIDLSPLSGIFTSIENAASSVAKTISGQPPLKIPFRSESAGSWLLTTYLDAELRISRGDGSSIFVLFKEGSSLSI

SEQ ID NO: 8397 - DNA, 963 bp, Linum usitatissimum
  CDS (1)..(963)
atggcagccaccacctctcgactgaatcactttcttccatgccatactctctccaccactcatcaaaacaccttcttcgctacctatgctcgtcccatcatcaatttccccgctgcggcctttacgctgcagcgggtttcatccaaacagttattccgtaactcacgaccttatgtcttggttcgtgcagccggagaaggcgtgtcctcctcctcctcgaccccgggccaggcatcaacggtcaccgttgtcgatgaatcggattcagagacagaaaagttgaagaaacagttggtggattgcttttacggtacggagcgtgggttgagagcaagcagcgaaaccagagctgagattggagagcttatcacccagctggaatcaaagaaccctaccccttcacctaccgacgctttgcctcttctcaagggaaagtggattctctcgtacacgtctttcccggggctgttccctttgctggcgaggggggctccctcactgttgatggtggaagaaatatctcaaaccatagattccgataatttcaccgtccagaactctgttcgatttgctagcccttatgctaccacttccatcaccaccaatgccaaattcgaagtcagaagtcctaagcgtgtccagataaagtttgaagaaggggtgattgggactccccagctgactgattccatagtgttaccagagagcgtggaatttctgggacagaagatagaccttacccctttcaaagggttgatcacctctgttcaggacactgcttccaccgttgccaagaccatatccagccagccacccttcaagttttccatcccaaacactagcactgcagattcttggttgctcaccacctaccttgaccaagaccttcgcatttcgagaggggatgctggcagcgtcttcgtacttcttaaacaaggaagccctctccttgcttccctctga

SEQ ID NO: 8398 - protein, 320 aa, Linum usitatissimum
MAATTSRLNHFLPCHTLSTTHQNTFFATYARPIINFPAAAFTLQRVSSKQLFRNSRPYVLVRAAGEGVSSSSSTPGQASTVTVVDESDSETEKLKKQLVDCFYGTERGLRASSETRAEIGELITQLESKNPTPSPTDALPLLKGKWILSYTSFPGLFPLLARGAPSLLMVEEISQTIDSDNFTVQNSVRFASPYATTSITTNAKFEVRSPKRVQIKFEEGVIGTPQLTDSIVLPESVEFLGQKIDLTPFKGLITSVQDTASTVAKTISSQPPFKFSIPNTSTADSWLLTTYLDQDLRISRGDAGSVFVLLKQGSPLLASL

SEQ ID NO: 8399 - DNA, 945 bp, Zea mays
  CDS (1)..(945)
atggcgggatcagcgttgctcaacgctctcgtcctccgcgcgccatccccgtcgctctcgtcctcgtctaagcgccgcagcgccggcgcctttgtgtcctcgaacccaccgcgcttcccatccctgcgttctgagcgccgcgtcgcccttccgcgggcggcggcgggcggtgaccccgaggacgagtgggtgccggagcctgagggtgggtccgctgtcacggggaccgcggtggctgaggcgccggaggcgggagaggtcgcagagctcaaggcgcagctaaaggatgcgctgtacggcacagagcggggcctgcgggcgtccagcgagtcgcgggccaaggtgttggagctcatcacgcagctcgagacgcgcaaccccacgccggcgcctaccgaagcgctgacgctcctcaacggcaagtggatcctcgcgtacacatcattttcccaactgttcccactgttggagtttggaaagctgccagcgctggtgaaggtggaggaaatatcacagaccattgattccaagaacttcacagtgcaaaactgtatcaagttttcaggacctttggctacaacctcagtttccaccaatgcaaaatttgaaattagaagccccaagcgcgtgcagatcaaatttgatgaaggcattgttgggacaccacagttgaccgactccgttgtgctaccggagaagtttgaagtatttggacagaacatcgacctgagtccactgaaaggcatattttcttcgatcgaaaatgcagcatcctcggttgcaaagaccatatctggccagcctccactgaaaataccgatcagggcaaacaacgccgaatcgtggttgcttacgacctaccttgacgaagaggtcaggatctccagaggcgaaggcggcggcatctttgtgctgttcaaggagggaagtactcttctaaactga

SEQ ID NO: 8400 - protein, 314 aa, Zea mays
MAGSALLNALVLRAPSPSLSSSSKRRSAGAFVSSNPPRFPSLRSERRVALPRAAAGGDPEDEWVPEPEGGSAVTGTAVAEAPEAGEVAELKAQLKDALYGTERGLRASSESRAKVLELITQLETRNPTPAPTEALTLLNGKWILAYTSFSQLFPLLEFGKLPALVKVEEISQTIDSKNFTVQNCIKFSGPLATTSVSTNAKFEIRSPKRVQIKFDEGIVGTPQLTDSVVLPEKFEVFGQNIDLSPLKGIFSSIENAASSVAKTISGQPPLKIPIRANNAESWLLTTYLDEEVRISRGEGGGIFVLFKEGSTLLN

SEQ ID NO: 8401 - DNA, 20 bp, Artificial sequence
  primer
atggcgacggtacaattgtc

SEQ ID NO: 8402 - DNA, 20 bp, Artificial sequence
  primer
tcaaggattcaagagagagc

SEQ ID NO: 8403 - protein, 334 aa, Artificial sequence
  consensus sequence
  Variant (4)..(24): Xaa in position 4 to 24 is any amino acid
  Variant (25)..(109): Xaa in position 25 to 109 is any or no amino acid
  Variant (112)..(113): Xaa in position 112 to 113 is any amino acid
  Variant (115)..(115): Xaa in position 115 is any amino acid
  Variant (117)..(118): Xaa in position 117 to 118 is any amino acid
  Variant (122)..(123): Xaa in position 122 to 123 is any amino acid
  Variant (125)..(126): Xaa in position 125 to 126 is any amino acid
  Variant (128)..(128): Xaa in position 128 is any amino acid
  Variant (131)..(131): Xaa in position 131 is any amino acid
  Variant (135)..(136): Xaa in position 135 to 136 is any amino acid
  Variant (139)..(140): Xaa in position 139 to 140 is any amino acid
  Variant (144)..(145): Xaa in position 144 to 145 is any amino acid
  Variant (148)..(148): Xaa in position 148 is any amino acid
  Variant (152)..(153): Xaa in position 152 to 153 is any amino acid
  Variant (155)..(156): Xaa in position 155 to 156 is any amino acid
  Variant (159)..(159): Xaa in position 159 is any amino acid
  Variant (161)..(161): Xaa in position 161 is any amino acid
  Variant (165)..(165): Xaa in position 165 is any amino acid
  Variant (168)..(171): Xaa in position 168 to 171 is any amino acid
  Variant (173)..(173): Xaa in position 173 is any amino acid
  Variant (177)..(178): Xaa in position 177 to 178 is any amino acid
  Variant (180)..(182): Xaa in position 180 to 182 is any amino acid
  Variant (183)..(183): Xaa in position 183 is any or no amino acid
  Variant (185)..(185): Xaa in position 185 is any amino acid
  Variant (188)..(189): Xaa in position 188 to 189 is any amino acid
  Variant (193)..(193): Xaa in position 193 is any amino acid
  Variant (196)..(199): Xaa in position 196 to 199 is any amino acid
  Variant (201)..(202): Xaa in position 201 to 202 is any amino acid
  Variant (204)..(209): Xaa in position 204 to 209 is any amino acid
  Variant (211)..(214): Xaa in position 211 to 214 is any amino acid
  Variant (216)..(216): Xaa in position 216 is any amino acid
  Variant (218)..(219): Xaa in position 218 to 219 is any amino acid
  Variant (221)..(221): Xaa in position 221 is any amino acid
  Variant (228)..(228): Xaa in position 228 is any amino acid
  Variant (230)..(230): Xaa in position 230 is any amino acid
  Variant (232)..(233): Xaa in position 232 to 233 is any amino acid
  Variant (235)..(235): Xaa in position 235 is any amino acid
  Variant (238)..(241): Xaa in position 238 to 241 is any amino acid
  Variant (243)..(246): Xaa in position 243 to 246 is any amino acid
  Variant (248)..(250): Xaa in position 248 to 250 is any amino acid
  Variant (253)..(257): Xaa in position 253 to 257 is any amino acid
  Variant (260)..(260): Xaa in position 260 is any amino acid
  Variant (262)..(262): Xaa in position 262 is any amino acid
  Variant (264)..(264): Xaa in position 264 is any amino acid
  Variant (266)..(273): Xaa in position 266 to 273 is any amino acid
  Variant (275)..(283): Xaa in position 275 to 283 is any amino acid
  Variant (286)..(286): Xaa in position 286 is any amino acid
  Variant (292)..(293): Xaa in position 292 to 293 is any amino acid
  Variant (295)..(298): Xaa in position 295 to 298 is any amino acid
  Variant (299)..(299): Xaa in position 299 is any or no amino acid
  Variant (301)..(301): Xaa in position 301 is any amino acid
  Variant (311)..(312): Xaa in position 311 to 312 is any amino acid
  Variant (322)..(322): Xaa in position 322 is any amino acid
  Variant (323)..(323): Xaa in position 323 is any or no amino acid
  Variant (327)..(327): Xaa in position 327 is any amino acid
  Variant (332)..(332): Xaa in position 332 is any amino acid
DEWXXXXXXXXXXXXXXXXXXXXXXXXXXXXXXXXXXXXXXXXXXXXXXXXXXXXXXXXXXXXXXXXXXXXXXXXXXXXXXXXXXXXXXXXXXXXXXXXXXXXXXXXXXLKXXLXDXXYGTXXGXXAXSEXRAEXXELXXQLEXXNPXPAPXXAXXLLXGXWILXYTXXXXLXPLLXXGXXXXLXKVXXISQXIDXXXXTXXNXXXXXXPXXXXSXSXXAXFEVRSPXRXQXXFXEGXXXXPXXXXSXXXPEXXXXXGQXIXLXPXXXXXXXXQXXXXXXXXXISXQPPLKXXIXXXXXAXSWLLTTYLDXXLRISRGDGGXXFVLXKEGSXLL

SEQ ID NO: 8404 - protein, 60 aa, Artificial sequence
  protein pattern
  Variant (2)..(2): Xaa in position 2 is any or no amino acid
  Variant (4)..(4): Xaa in position 4 is any amino acid
  Variant (5)..(5): Xaa in position 5 is any or no amino acid
  Variant (7)..(7): Xaa in position 7 is any amino acid
  Variant (8)..(8): Xaa in position 8 is Ala, Asp, Glu or Gly
  Variant (9)..(9): Xaa in position 9 is Ala, Cys, Ser or Thr
  Variant (10)..(10): Xaa in position 10 is Phe, Leu or Val
  Variant (14)..(14): Xaa in position 14 is Ala, Asp, Glu or Asn
  Variant (15)..(15): Xaa in position 15 is any amino acid
  Variant (17)..(17): Xaa in position 17 is Phe, Ile or Leu
  Variant (18)..(18): Xaa in position 18 is any amino acid
  Variant (20)..(20): Xaa in position 20 is any amino acid
  Variant (21)..(21): Xaa in position 21 is Ala, Pro or Ser
  Variant (22)..(22): Xaa in position 22 is Asp, Glu or Gln
  Variant (23)..(23): Xaa in position 23 is any amino acid
  Variant (26)..(26): Xaa in position 26 is Glu or Lys
  Variant (27)..(27): Xaa in position 27 is Ala, Ile or Val
  Variant (28)..(28): Xaa in position 28 is any amino acid
  Variant (29)..(29): Xaa in position 29 is Asp or Glu
  Variant (30)..(30): Xaa in position 30 is Phe or Leu
  Variant (31)..(31): Xaa in position 31 is Ile or Val
  Variant (32)..(32): Xaa in position 32 is Ala, Asn, Ser or Thr
  Variant (36)..(36): Xaa in position 36 is Ala, Ser, Thr or Val
  Variant (37)..(37): Xaa in position 37 is any amino acid
  Variant (40)..(40): Xaa in position 40 is Asn or Thr
  Variant (41)..(41): Xaa in position 41 is any amino acid
  Variant (42)..(42): Xaa in position 42 is Ala, Ser or Val
  Variant (43)..(43): Xaa in position 43 is Pro or Ser
  Variant (44)..(44): Xaa in position 44 is any amino acid
  Variant (45)..(45): Xaa in position 45 is Ala, Asp, Glu or Gly
  Variant (46)..(46): Xaa in position 46 is Ala, Glu or Asn
  Variant (47)..(48): Xaa in position 47 to 48 is any amino acid
  Variant (49)..(49): Xaa in position 49 is Leu or Val
  Variant (51)..(51): Xaa in position 51 is any amino acid
  Variant (52)..(52): Xaa in position 52 is Ala or Gly
  Variant (53)..(53): Xaa in position 53 is any amino acid
  Variant (55)..(55): Xaa in position 55 is Ile or Val
  Variant (57)..(57): Xaa in position 57 is any amino acid
  Variant (60)..(60): Xaa in position 60 is Ala or Ser
LXKXXLXXXXYGTXXGXXAXXXXRAXXXXXXXQLEXXNPXXXXXXXXXXLXXXWXLXYTX

SEQ ID NO: 8405 - protein, 61 aa, Artificial sequence
  protein pattern
  Variant (2)..(3): Xaa in position 2 to 3 is any amino acid
  Variant (4)..(4): Xaa in position 4 is Leu or Val
  Variant (5)..(5): Xaa in position 5 is Asp, Glu or Lys
  Variant (6)..(6): Xaa in position 6 is any amino acid
  Variant (7)..(7): Xaa in position 7 is Ile or Leu
  Variant (8)..(8): Xaa in position 8 is any amino acid
  Variant (10)..(10): Xaa in position 10 is any amino acid
  Variant (13)..(14): Xaa in position 13 to 14 is any or no amino acid
  Variant (16)..(19): Xaa in position 16 to 19 is any amino acid
  Variant (20)..(21): Xaa in position 20 to 21 is any or no amino acid
  Variant (23)..(23): Xaa in position 23 is Ala, Cys, Ser or Val
  Variant (24)..(25): Xaa in position 24 to 25 is any amino acid
  Variant (26)..(26): Xaa in position 26 is Phe, Ile or Leu
  Variant (27)..(27): Xaa in position 27 is Ala, Ser, Thr or Val
  Variant (28)..(28): Xaa in position 28 is Gly, Ser or Thr
  Variant (30)..(30): Xaa in position 30 is any amino acid
  Variant (31)..(31): Xaa in position 31 is Ala, Gly, Ser or Thr
  Variant (32)..(32): Xaa in position 32 is Ser or Thr
  Variant (33)..(33): Xaa in position 33 is any amino acid
  Variant (35)..(35): Xaa in position 35 is Phe, Ile, Leu or Val
  Variant (36)..(36): Xaa in position 36 is Ala, Asn, Ser or Thr
  Variant (37)..(37): Xaa in position 37 is Ala, Thr or Val
  Variant (38)..(38): Xaa in position 38 is Asn, Ser or Thr
  Variant (40)..(40): Xaa in position 40 is any amino acid
  Variant (42)..(42): Xaa in position 42 is Asp or Glu
  Variant (43)..(43): Xaa in position 43 is Ile or Val
  Variant (44)..(44): Xaa in position 44 is Gln or Arg
  Variant (45)..(45): Xaa in position 45 is Ser or Thr
  Variant (47)..(47): Xaa in position 47 is any amino acid
  Variant (49)..(49): Xaa in position 49 is Ile, Leu or Val
  Variant (50)..(50): Xaa in position 50 is any amino acid
  Variant (51)..(51): Xaa in position 51 is Ile or Val
  Variant (52)..(52): Xaa in position 52 is any amino acid
  Variant (54)..(54): Xaa in position 54 is any amino acid
  Variant (55)..(55): Xaa in position 55 is Glu or Gln
  Variant (57)..(57): Xaa in position 57 is any amino acid
  Variant (58)..(58): Xaa in position 58 is Phe, Ile, Leu or Val
  Variant (59)..(59): Xaa in position 59 is Gly or Gln
  Variant (60)..(60): Xaa in position 60 is Pro or Thr
LXXXXXXXQXIDXXSXXXXXXNXXXXXXPXXXXSXXXXAXFXXXXPXRXXXXFXXGXXXXP

SEQ ID NO: 8406 - protein, 27 aa, Artificial sequence
  protein pattern
  Variant (2)..(2): Xaa in position 2 is any amino acid
  Variant (7)..(7): Xaa in position 7 is any or no amino acid
  Variant (9)..(9): Xaa in position 9 is any or no amino acid
  Variant (13)..(13): Xaa in position 13 is any amino acid
  Variant (14)..(14): Xaa in position 14 is Asp or Glu
  Variant (15)..(15): Xaa in position 15 is Ile or Leu
  Variant (17)..(17): Xaa in position 17 is Ile or Val
  Variant (18)..(18): Xaa in position 18 is Ala, Pro or Ser
  Variant (20)..(20): Xaa in position 20 is Ala, Gly or Ser
  Variant (22)..(22): Xaa in position 22 is any or no amino acid
  Variant (24)..(24): Xaa in position 24 is Gly or Ser
  Variant (25)..(25): Xaa in position 25 is any amino acid
  Variant (26)..(27): Xaa in position 26 to 27 is Phe, Ile or Val
AXSWLLXTXYLDXXXRXXRXDXGXXXX

SEQ ID NO: 8407 - protein, 41 aa, Artificial sequence
  protein pattern
  Variant (3)..(3): Xaa in position 3 is any amino acid
  Variant (4)..(4): Xaa in position 4 is Phe, Ile or Val
  Variant (5)..(5): Xaa in position 5 is Asp, Glu, Gly or Asn
  Variant (6)..(6): Xaa in position 6 is Phe, Ile, Leu or Val
  Variant (7)..(7): Xaa in position 7 is Phe or Leu
  Variant (9)..(10): Xaa in position 9 to 10 is any amino acid
  Variant (11)..(11): Xaa in position 11 is Phe, Ile or Leu
  Variant (12)..(12): Xaa in position 12 is Asp, Asn or Ser
  Variant (13)..(13): Xaa in position 13 is Leu, Met or Val
  Variant (14)..(14): Xaa in position 14 is Ala, Gly, Asn, Gln, Ser or Thr
  Variant (15)..(15): Xaa in position 15 is any amino acid
  Variant (16)..(16): Xaa in position 16 is Phe, Ile, Leu or Val
  Variant (17)..(17): Xaa in position 17 is any amino acid
  Variant (18)..(18): Xaa in position 18 is Asp, Gly or Gln
  Variant (19)..(19): Xaa in position 19 is any amino acid
  Variant (20)..(20): Xaa in position 20 is Phe, Ile or Leu
  Variant (21)..(21): Xaa in position 21 is any amino acid
  Variant (22)..(22): Xaa in position 22 is Pro or Ser
  Variant (23)..(23): Xaa in position 23 is Ile, Leu or Val
  Variant (24)..(24): Xaa in position 24 is Glu or Gln
  Variant (25)..(25): Xaa in position 25 is Asp, Glu, Gly or Asn
  Variant (26)..(26): Xaa in position 26 is any amino acid
  Variant (27)..(27): Xaa in position 27 is Ala or Val
  Variant (28)..(28): Xaa in position 28 is Ala, Glu, Ser or Thr
  Variant (29)..(29): Xaa in position 29 is Asn, Ser or Thr
  Variant (30)..(30): Xaa in position 30 is Ile, Met or Val
  Variant (31)..(31): Xaa in position 31 is Ala, Gly, Ser or Val
  Variant (32)..(32): Xaa in position 32 is any amino acid
  Variant (33)..(33): Xaa in position 33 is Ala, Ser, Thr or Val
  Variant (34)..(34): Xaa in position 34 is Ile or Leu
  Variant (36)..(36): Xaa in position 36 is Asp, Glu, Gly, Asn or Ser
  Variant (37)..(37): Xaa in position 37 is Gln or Arg
  Variant (38)..(38): Xaa in position 38 is Pro or Ser
  Variant (40)..(40): Xaa in position 40 is Phe, Ile or Leu
PEXXXXXGXXXXXXXXXXXXXXXXXXXXXXXXXXSXXXPXK

SEQ ID NO: 8408 - DNA, 414 bp, Arabidopsis thaliana
  CDS (1)..(414)
atggcagacagaggaatattcttgtatccatttagaagattccaagaatggtcaagatcaacggctctgattgattggatggaatcaaacaactctcatatcttcaagatcaacgttcctggttacaacaaagaagacatcaaagtacagattgaagaagggaatgttttgagtataagaggagaaggaataaaggaagagaagaaggagaatttggtgtggcacgtggcggagagagaagctttttccggtggtggaagtgagtttttgcggcggattgagttgccggagaatgtgaaagttgatcaagttaaagcttacgtggagaatggtgttcttacagttgttgttcctaaggacacttcatcgaaatcgtctaaagttaggaatgttaatattactagcaagctttga

SEQ ID NO: 8409 - protein, 137 aa, Arabidopsis thaliana
MADRGIFLYPFRRFQEWSRSTALIDWMESNNSHIFKINVPGYNKEDIKVQIEEGNVLSIRGEGIKEEKKENLVWHVAEREAFSGGGSEFLRRIELPENVKVDQVKAYVENGVLTVVVPKDTSSKSSKVRNVNITSKL

SEQ ID NO: 8410 - DNA, 441 bp, Zea mays
  CDS (1)..(441)
atgtcggacttcttcttcgggagcccgttccgccgcctcttccacgcgcgccccttccatgccgtcgactggtcctccgccgcggcggcggccatggactgggtggagaccccgtcctcccacgtgctgcgcgtcaacgtgccgggactcggcaaggacgacgtcaaggtccaggtcgacgagggcaaagtgctcaccatcaggggcgccccgcccgcggccaaggagaaggggaaggaggacgaggaggaggggacggtgtggcacgtggcggagcgcggcaagccggagttcgcgcgggccgtggcgctgccggagaacgtgcgcgtggacgggatcagggccggcttggagaacggggttctcaccgtcgttgtgcccaaggaagtcgccccggcccggcccaagcccaggtccatcgccgtctccagcaagctctga

SEQ ID NO: 8411 - protein, 146 aa, Zea mays
MSDFFFGSPFRRLFHARPFHAVDWSSAAAAAMDWVETPSSHVLRVNVPGLGKDDVKVQVDEGKVLTIRGAPPAAKEKGKEDEEEGTVWHVAERGKPEFARAVALPENVRVDGIRAGLENGVLTVVVPKEVAPARPKPRSIAVSSKL

SEQ ID NO: 8412 - DNA, 450 bp, Oryza sativa
  CDS (1)..(450)
atgtcgctcgtgaggcgcagcaacgtgttcgaccccttcgctgacttctgggaccccttcgacggcgtcttccgctccctcgtcccggcgacctccgaccgcgacaccgccgctttcgccaacgcccgcgtcgactggaaggagacgccggagtcgcacgtcttcaaggccgacctccccggcgtcaagaaggaggaggtgaaggtggaggtggaggagggcaacgtgctggtgatcagcgggcagcgcagcaaggagaaggaggacaagaacgacaagtggcaccgcgtggagcgcagcagcgggcagttcatgcggcggttcaggctgccggagaacgccaaggtggaccaggtgaaggccagcatggagaacggcgtgctcaccgtcaccgtgcccaaggctgaggtcaagaagcccgaggtgaaggccattgagatctctggctga

SEQ ID NO: 8413 - protein, 149 aa, Oryza sativa
MSLVRRSNVFDPFADFWDPFDGVFRSLVPATSDRDTAAFANARVDWKETPESHVFKADLPGVKKEEVKVEVEEGNVLVISGQRSKEKEDKNDKWHRVERSSGQFMRRFRLPENAKVDQVKASMENGVLTVTVPKAEVKKPEVKAIEISG

SEQ ID NO: 8414 - DNA, 453 bp, Oryza sativa
  CDS (1)..(453)
atgtcgctggtgaggcgcagcaacgtgttcgacccattctccctcgacctctgggaccccttcgacagcgtgttccgctccgtcgtcccggccacctccgacaacgacaccgccgccttcgccaacgcccgcatcgactggaaggagacgccggagtcgcacgtcttcaaggccgacctccccggcgtcaagaaggaggaggtgaaggtggaggtggaggaaggcaacgtgctggtgatcagcggccagcgcagcaaggagaaggaggacaagaacgacaagtggcaccgcgtggagcgcagcagcgggcagttcatgcggcggttcaggctgccggagaacgccaaggtggaccaggtgaaggccggactggagaacggcgtgctcactgtcaccgtgcccaaggccgaggtcaagaagcctgaggtgaaggccattgagatctccggttaa

SEQ ID NO: 8415 - protein, 150 aa, Oryza sativa
MSLVRRSNVFDPFSLDLWDPFDSVFRSVVPATSDNDTAAFANARIDWKETPESHVFKADLPGVKKEEVKVEVEEGNVLVISGQRSKEKEDKNDKWHRVERSSGQFMRRFRLPENAKVDQVKAGLENGVLTVTVPKAEVKKPEVKAIEISG

SEQ ID NO: 8416 - DNA, 453 bp, Oryza sativa
  CDS (1)..(453)
atgtcgctggtgaggcgcagcaacgtgttcgaccccttctccctcgacctctgggaccccttcgacagcgtgttccgctccgtcgtcccggccacctccgacaacgacaccgccgccttcgccaacgcccgcatcgactggaaggagacgccggagtcgcacgtcttcaaggccgacctccccggcgtcaagaaggaggaggtgaaggtggaggtggaggaaggcaacgtgctggtgatcagcggccagcgcagcaaggagaaggaggacaagaacgacaagtggcaccgcgtggagcgcagcagcgggcagttcatgcggcggttccggctgccggagaacgccaaggtggaccaggtgaaggccggcatggagaacggcgtgctcaccgtcaccgtgcccaaggccgaggtcaagaagcccgaggtgaaggccattgagatctctggctaa

SEQ ID NO: 8417 - protein, 150 aa, Oryza sativa
MSLVRRSNVFDPFSLDLWDPFDSVFRSVVPATSDNDTAAFANARIDWKETPESHVFKADLPGVKKEEVKVEVEEGNVLVISGQRSKEKEDKNDKWHRVERSSGQFMRRFRLPENAKVDQVKAGMENGVLTVTVPKAEVKKPEVKAIEISG

SEQ ID NO: 8418 - DNA, 465 bp, Oryza sativa
  CDS (1)..(465)
atgtcgatgatccgccgcagcaacgtgttcgaccccttctccctcgacctctgggaccccttcgacggcttccccttcggctccggcagcggcagcctcttccctcgcgccaactccgacgcggcggccttcgccggcgcgcggatcgactggaaggagacgcccgaggcgcacgtgttcaaggcggacgtgccggggctgaagaaggaggaggtcaaggtggaggttgaggacggcaacgtcctccagatcagcggcgagcgcatcaaggagcaggaggagaagacggacaagtggcaccgcgtggagcgcagcagcggcaagttcctccgcaggttccggctgccggagaacaccaagccggagcagatcaaggcgtccatggagaacggcgtgctcaccgtcaccgtgcccaaggaggagcccaagaagcccgacgtcaagtccatccagatcaccggctag

SEQ ID NO: 8419 - protein, 154 aa, Oryza sativa
MSMIRRSNVFDPFSLDLWDPFDGFPFGSGSGSLFPRANSDAAAFAGARIDWKETPEAHVFKADVPGLKKEEVKVEVEDGNVLQISGERIKEQEEKTDKWHRVERSSGKFLRRFRLPENTKPEQIKASMENGVLTVTVPKEEPKKPDVKSIQITG

SEQ ID NO: 8420 - DNA, 486 bp, Oryza sativa
  CDS (1)..(486)
atgtcgctgatccgccgcagcaacgtgttcgaccccttctccctcgacctctgggaccccttcgacggcttccccttcggctccggcagcagaagcagcggcagcatcttcccgtccttcccccgcggcacctcctccgagaccgcggccttcgccggcgcgcgcatcgactggaaggagacgccggaggcgcacgtgttcaaggcggacgtgccggggctgaagaaggaggaggtcaaggtggaggtggaggacggcaacgtcctccagatcagcggcgagcgcagcaaggagcaggaggagaagacggacaagtggcaccgcgtggagcgcagcagcggcaagttcctccgcaggttccggctgccggagaacaccaagccggagcagatcaaggcgtccatggagaacggcgtgctcaccgtcaccgtgcccaaggaggagcccaagaagcccgacgtcaagtccatccaggttaccggctag

SEQ ID NO: 8421 - protein, 161 aa, Oryza sativa
MSLIRRSNVFDPFSLDLWDPFDGFPFGSGSRSSGSIFPSFPRGTSSETAAFAGARIDWKETPEAHVFKADVPGLKKEEVKVEVEDGNVLQISGERSKEQEEKTDKWHRVERSSGKFLRRFRLPENTKPEQIKASMENGVLTVTVPKEEPKKPDVKSIQVTG

SEQ ID NO: 8422 - DNA, 480 bp, Oryza sativa
  CDS (1)..(480)
atgtcgctgatccgccgcggcaacgcgttcgaccccttctccctcgacctctgggatcccgtcgacggcttccccttcggctccggcggcagcagcagcagcagcggcagcctcttccctcgggccaactccgacgcggcggccttcgccggcgcgcgcatcgactggaaggagacgcccgaggtgcacgtgttcaaggcggacgtgccggggctgaagaaggaggaggtcaaggtggaggtggacgacggcaacatcctgcagatcagcggcgagcgcagcagggagcaggaggagaagtcggacaagtggcaccgcgtggagcgcagcagcggcaagttcctccgcaggttccgcctccccgagaacaccaagccggagcagatcaaggcgtccatggagaatggcgtgctcaccgtcaccgtgcccaaggaagagcccaagaagcccgacgtcaagtccatccagatctccggctag

SEQ ID NO: 8423 - protein, 159 aa, Oryza sativa
MSLIRRGNAFDPFSLDLWDPVDGFPFGSGGSSSSSGSLFPRANSDAAAFAGARIDWKETPEVHVFKADVPGLKKEEVKVEVDDGNILQISGERSREQEEKSDKWHRVERSSGKFLRRFRLPENTKPEQIKASMENGVLTVTVPKEEPKKPDVKSIQISG

SEQ ID NO: 8424 - DNA, 441 bp, Oryza sativa
  CDS (1)..(441)
atggcggacctcttcttcggtggccccttccggcgaatcctctacgggcggcccttcccgccggattgggcgtcggcgtcggcgacggcggcgatggactgggtcgagacgccgacctcccacgtgctcaggatcaacgtcccgggactgggcaaggacgacgtcaaggtgcaggtggaggacggcaacgtgctcaccgtgaggggcgcggcgccgcacgcggcggcggagaaggagagggagagggagaaggatgtggtgtggcacgtggcggagcgcgggcggccggagttcgcgagggaggtggcgctgccggcggaggtgagggtggagcagatcagggccagcgtcgacaacggcgtgctcaccgtcgtcgtgcccaaggagcccgcgccggcccggcccaggaccaggcccatcgccgtctccagcaagctctga

SEQ ID NO: 8425 - protein, 146 aa, Oryza sativa
MADLFFGGPFRRILYGRPFPPDWASASATAAMDWVETPTSHVLRINVPGLGKDDVKVQVEDGNVLTVRGAAPHAAAEKEREREKDVVWHVAERGRPEFAREVALPAEVRVEQIRASVDNGVLTVVVPKEPAPARPRTRPIAVSSKL

SEQ ID NO: 8426 - DNA, 435 bp, Glycine max
  CDS (1)..(435)
atggctggcactatctttggataccctttcagacacttcatctggggtcacccaccaattttcaaagaatggtccggctcaacagccctcttagattggctcgaatcacccactgcccacatcttaaaaattaacgttccaggattcagcaaggaagacataaaggtgcagattgaggatgggaatattcttcacatcaaaggggaagtttggagagaggagcctcaagcaaaggagaaggatactgtttggcatgtggctgagagaggcactgggaagggagggttctcaagggaaattgaattgccagagaatgtgaaggtggatcagattaaggcacaggtggagaatggagtcctcactatagttgtgcctaaagatgcaacacccaaaacgcctaaagtgagaaacattaacatcactagcaggctttaa

SEQ ID NO: 8427 - protein, 144 aa, Glycine max
MAGTIFGYPFRHFIWGHPPIFKEWSGSTALLDWLESPTAHILKINVPGFSKEDIKVQIEDGNILHIKGEVWREEPQAKEKDTVWHVAERGTGKGGFSREIELPENVKVDQIKAQVENGVLTIVVPKDATPKTPKVRNINITSRL

SEQ ID NO: 8428 - DNA, 435 bp, Glycine max
  CDS (1)..(435)
atggctgacgctatctttggataccctttcagacgcttcatctggggtcaccctccaattttcagagaatggtctggctcaatagccctcttagattggctcgaatcacccactgcccacatcttaaaagttaatgttccaggattcagcaaggaagacataaaggtgcagattgaggatgggaatattcttcacatcaaaggggaaggtgggagagaggagcctcaagcaaaggagaaggatactgtttggcatgtggctgagagaagcactggaaaggggggtttctcaagggaaattgaattgccagagaatgtgaaggtggatcagattaaggcacaggtggaaaatggagtcctcagtatagttgtgcctaaagatgcaacacccaaaacgcctaaagtgagaaatattaacatcactagcaggctttaa

SEQ ID NO: 8429 - protein, 144 aa, Glycine max
MADAIFGYPFRRFIWGHPPIFREWSGSIALLDWLESPTAHILKVNVPGFSKEDIKVQIEDGNILHIKGEGGREEPQAKEKDTVWHVAERSTGKGGFSREIELPENVKVDQIKAQVENGVLSIVVPKDATPKTPKVRNINITSRL

SEQ ID NO: 8430 - DNA, 486 bp, Glycine max
  CDS (1)..(486)
atgtctctaatcccaaatttcttcggtggcagaaggagcaacgttttcgatcctttttccctcgacgtctgggaccccttcaaggattttcctttcccaaacactctttcttcagcttcctttcctgaattttctcgggaaaattctgcattcgtgagcactcgtgtggattggaaggagaccccagaagcacacgtattcaaggctgatattccagggctgaagaaggaggaagtgaaggttcagattgaagatgataaggttcttcagataagcggagagaggaacgttgagaaggaagataggaataacacgtggcatcgcgtggagcgtagcagcggcaagttcatgaggaggttcagattgccggagaatgcaaaagtggataaagtgaaggcttctatggaaaatggggttctcactgtcactgttcccaaggaagaggttaagaaggctgatgtgaagaacattcaaatctctggttaa

SEQ ID NO: 8431 - protein, 161 aa, Glycine max
MSLIPNFFGGRRSNVFDPFSLDVWDPFKDFPFPNTLSSASFPEFSRENSAFVSTRVDWKETPEAHVFKADIPGLKKEEVKVQIEDDKVLQISGERNVEKEDRNNTWHRVERSSGKFMRRFRLPENAKVDKVKASMENGVLTVTVPKEEVKKADVKNIQISG

SEQ ID NO: 8432 - DNA, 459 bp, Glycine max
  CDS (1)..(459)
atgtctctcattccaaacattttcggtggccgtaggagcaatgtgttcgatcccttcaaggattttcctttcccaaattccgtctctacttccttccctgagttttctcgggaaaattctgcgtttgtgagcactcgtgtggattggaaggagaccccagaggcgcacgtgttcaaggccgatattcccgggctgaagaaggaggaagtgaaggtgcagattgaagatgataaggtgcttcagatcagcggagagaggaacgttgagaatgaagataagaacgacacgtggcatcgcgtggagcgtagcagtggaaagttcatgaggaggttcagattgccggagaatgcaaaagtgaatgaagtgaaggcttctatggaaaatggggttcttactgttactgttcctaagaaagaggttaagaatcatgatgttaaggccatagaaatctctggttaa

SEQ ID NO: 8433 - protein, 152 aa, Glycine max
MSLIPNIFGGRRSNVFDPFKDFPFPNSVSTSFPEFSRENSAFVSTRVDWKETPEAHVFKADIPGLKKEEVKVQIEDDKVLQISGERNVENEDKNDTWHRVERSSGKFMRRFRLPENAKVNEVKASMENGVLTVTVPKKEVKNHDVKAIEISG

SEQ ID NO: 8434 - DNA, 725 bp, Oryza sativa
  CDS (73)..(513)
agctcaccaaaatccccagtcccgcgcaaccttcagctctcggtctgcgttagctcctgaagaatcgaagcaatggcggacctcttcttcggtggccccttccggcgaatcctctacgggcggcccttcccgccggattgggcgtcggcgtcggcgacggcggcgatggactgggtcgagacgccgacctcccacgtgctcaggatcaacgtcccgggactgggcaaggacgacgtcaaggtgcaggtggaggacggcaacgtgctcaccgtgaggggcgcggcgccgcacgcggcggcggagaaggagagggagagggagaaggatgtggtgtggcacgtggcggagcgcgggcggccggagttcgcgagggaggtggtgctgccggcggaggtgagggtggagcagatcagggccagcgtcgacaacggcgtgctcaccgtcgtcgtgcccaaggagcccgcgccggcccggcccaggaccaggcccatcgccgtctccagcaagctctgatcctgatcaagcccgaccctttgtgcattgtgcgcaagtgtttctgtgtttgtgaactgtagtcgattatagcaaccatcagtcgaatgttgtgaagggcgaatgtgtattggaagtccaaatcttaatgttgaaaattttgaaaaattttagaggtttgaattactagtatatctatgtaataatctaattaataaaggtgggtcttctgc

SEQ ID NO: 8435 - protein, 146 aa, Oryza sativa
MADLFFGGPFRRILYGRPFPPDWASASATAAMDWVETPTSHVLRINVPGLGKDDVKVQVEDGNVLTVRGAAPHAAAEKEREREKDVVWHVAERGRPEFAREVVLPAEVRVEQIRASVDNGVLTVVVPKEPAPARPRTRPIAVSSKL

SEQ ID NO: 8436 - DNA, 465 bp, Oryza sativa
  CDS (1)..(465)
atgtcgatgatccgccgcagcaacgtgttcgaccccttctccctcgacctctgggaccccttcgacggcttccccttcggctccggcagcggcagcctcttccctcgcgccaactccgacgcggcggccttcgccggcgcgcggatcgactggaaggagacgcccgaggcgcacgtgttcaaggcggacgtgccggggctgaagaaggaggaggtcaaggtggaggttgaggacggcaacgtcctccagatcagcggcgagcgcatcaaggagcaggaggagaagacggacaagtggcaccgcgtggagcgcagcagcggcaagttcctccgcaggttccggctgccggaggacaccaagccggagcagatcaaggcgtccatggagaacggcgtgctcaccgtcaccgtgcccaaggaggagcccaagaagcccgacgtcaagtccatccagatcaccggctag

SEQ ID NO: 8437 - protein, 154 aa, Oryza sativa
MSMIRRSNVFDPFSLDLWDPFDGFPFGSGSGSLFPRANSDAAAFAGARIDWKETPEAHVFKADVPGLKKEEVKVEVEDGNVLQISGERIKEQEEKTDKWHRVERSSGKFLRRFRLPEDTKPEQIKASMENGVLTVTVPKEEPKKPDVKSIQITG

SEQ ID NO: 8438 - DNA, 808 bp, Glycine max
  CDS (170)..(604)
  misc_feature (1)..(1): n is a, g, c or t
  misc_feature (285)..(285): n is a, g, c or t
ngaatcaaagaacattctggagtgtctgcgaccactaacacaaaaatacatataataatttcattgttcatcaaaaaaattgcaagcaccaccatatcattagacaacgagtttatctcttcttctactagagttctcttttctctgggtagtgtaatatcattaatcaatggctgacgctatctttggataccctttcagacgcttcatctggggtcactctccaattttcagagaatggtctggctcaatagccctcttagattggctcgaatcacccactgnccacatcttaaaagttaatgttccaggattcagcaaggaagacataaaggtgcagattgaggatgggaatattcttcacatcaaaggggacggtgggagagaggagcctcaagcaaaggagaaggatactgtttggcatgtggctgagagaagcactggaaaggggggtttctcaagggaaattgaattgccagagaatgtgaaggtggatcagattaaggcacaggtggaaaatggagtcctcagtatagttgtgcctaaagatgcaacacccaaaacgcctaaagtgagaaatattaacatcactagcaggctttaatttaaggttttcaaatctagaatatgtttatatgaatactaattgagaacaaaaaaaaaatgtactaatgatgtaacgattaagaccatgtgtgtttatattgtgacctagccctctttgattgatatgaaccttgtgtaactttcatgttactatatatgctgaaaccttttgctaaataaaccaagagcttgcataagtcta

SEQ ID NO: 8439 - protein, 144 aa, Glycine max
  misc_feature (39)..(39): The Xaa at location 39 stands for Ala, Asp, Gly, or Val.
MADAIFGYPFRRFIWGHSPIFREWSGSIALLDWLESPTXHILKVNVPGFSKEDIKVQIEDGNILHIKGDGGREEPQAKEKDTVWHVAERSTGKGGFSREIELPENVKVDQIKAQVENGVLSIVVPKDATPKTPKVRNINITSRL

SEQ ID NO: 8440 - DNA, 480 bp, Zea mays
  CDS (1)..(480)
atgtcgctgattcgccgtggaaacgcattcgaccccttctccctcgacctctgggaccccttcgagggcttcttccccttcggctccggcggcgtccgcagcctcgttccctcgttgccgcgcaccagctcggagaccgcggcatttgccggcgcgcggatcgactggaaggagacccccgaagcgcacgtgttcaaggcggacgtgccggggctgaggaaggaggaggtcaaggtggaggtcgaggacggcaacgtcctgcagatcagcggcgagcgcaacaaggagcacgaggagaagaacgacaggtggcaccgggtggagcgcagcagcggcaagttccttcgcaggttcagactgccggacaacgccaaggcagaccagatcaaggcgtccatggagaacggcgtgctcaccgtcaccgtgcccaaggaggaggccaagaaggccgacgtcaagaacgtccagatcaccggctag

SEQ ID NO: 8441 - protein, 159 aa, Zea mays
MSLIRRGNAFDPFSLDLWDPFEGFFPFGSGGVRSLVPSLPRTSSETAAFAGARIDWKETPEAHVFKADVPGLRKEEVKVEVEDGNVLQISGERNKEHEEKNDRWHRVERSSGKFLRRFRLPDNAKADQIKASMENGVLTVTVPKEEAKKADVKNVQITG

SEQ ID NO: 8442 - DNA, 477 bp, Zea mays
  CDS (1)..(477)
atgtcgctgatccgccgcagcaacgtgttcgatcccttctccctcgacctctgggacccctttgagggcttccccttcggctccggcaacagcagcagtctcttccactcgttcccgcggaccagctcggagaccgcggccttcgctggcgcgcggatcgactggaaggagactccagaggcgcacgtgttcaaggccgacgtaccggggctgaagaaggaggaggtcaaggtggaggtcgaggacggcaacgtccttcagatcagcggcgagcgcaacaaggagcaggaggagaagacggacacctggcaccgcgtggagcggagcagcgggaggttcctgcgcaggttccgactgcccgagaacgccaagacggagcagatcacggccgccatggagaacggcgtgcttacagtcactgtgccgaaggaggacgccaagaagcctgaagtgaagtccattcagatctccggctag

SEQ ID NO: 8443 - protein, 158 aa, Zea mays
MSLIRRSNVFDPFSLDLWDPFEGFPFGSGNSSSLFHSFPRTSSETAAFAGARIDWKETPEAHVFKADVPGLKKEEVKVEVEDGNVLQISGERNKEQEEKTDTWHRVERSSGRFLRRFRLPENAKTEQITAAMENGVLTVTVPKEDAKKPEVKSIQISG

SEQ ID NO: 8444 - DNA, 468 bp, Zea mays
  CDS (1)..(468)
atgtcgctcgtgagtcggcgcagcagcaacgtgttcgaccccttctccctcgacctctgggaccccttcgacatgttccgctccatcgtcccgtcggcggcctcctccggcggcggttccgagaccgccgccttcgccaacgcccgcgtggactggaaggagacgcccgaggcgcacgtgttcaaggccgacctccccggcatcaagaaggaggaggtcaaggtcgaggtggaggacggcaacgtgctcgtcatcagcggcaagcgcagcagggaggaggaggacaagaacgacaagtggcaccgcgtcgagcgcagcagcggccagttcatgaggcgcttccgcctgcctgagaacgccaaggtcgacgaggtgaaggctggcctcgagaacggcgtgctcacggtcaccgtgcccaagacggaggtgaagaagcccgaggtgaaggctatcgagatctctggttga

SEQ ID NO: 8445 - protein, 155 aa, Zea mays
MSLVSRRSSNVFDPFSLDLWDPFDMFRSIVPSAASSGGGSETAAFANARVDWKETPEAHVFKADLPGIKKEEVKVEVEDGNVLVISGKRSREEEDKNDKWHRVERSSGQFMRRFRLPENAKVDEVKAGLENGVLTVTVPKTEVKKPEVKAIEISG

SEQ ID NO: 8446 - DNA, 459 bp, Zea mays
  CDS (1)..(459)
atgtcgctcgtgaggcgcagcaacgtgttcgaccccttctcgatggacctctgggaccccttcgacaccatgttccgctccatcgtcccgtcggcggcctccaccaactccgagaccgccgtcttcgccagcgcccgcatcgactggaaggagacgcccgaggcgcacgtgttcaaggccgacctccccggcgtcaagaaggaggagatcaaggtcgaggtcgaggacggcaacgtgctggtcatcagcggccagcgcagcagggagaaggaggacaaggacgacaagtggcaccgcgtcgagcgcagcagcggccagttcgtcaggcgcttccgcctgccagagaacgccaaggtggatcaggtcaaggctggcctcgagaacggcgtgctcacggtcaccgtgcccaaggcggaggagaagaagcctgaggtgaaggctattgagatatctggttga

SEQ ID NO: 8447 - protein, 152 aa, Zea mays
MSLVRRSNVFDPFSMDLWDPFDTMFRSIVPSAASTNSETAVFASARIDWKETPEAHVFKADLPGVKKEEIKVEVEDGNVLVISGQRSREKEDKDDKWHRVERSSGQFVRRFRLPENAKVDQVKAGLENGVLTVTVPKAEEKKPEVKAIEISG

SEQ ID NO: 8448 - DNA, 459 bp, Zea mays
  CDS (1)..(459)
atgtcgctcgtgaggcgcagcaacgtgttcgaccccttctccatggacctctgggaccccttcgacaccatgttccgctccatcgtcccgtcggcgacctccaccaactccgagactgccgccttcgccagcgcccgcatcgactggaaggagacgcccgaggcgcacgtgttcaaggccgacctccccggcgtcaagaaggaagaggtcaaggtcgaggtcgaggacggcaacatgctggtcatcagcggccagcgcagcagggagaaggaggacaaggacgacaagtggcaccgcgtcgagcgcagcagcggccagttcgtcaggcgcttccgcctgccggagaacaccaaggtggatcaggtcaaggctggcctcgagaacggcgtgctcacggtcaccgtgcccaaggcggaggagaagaagcctgaggtgaaggctattgagatctctggttga

SEQ ID NO: 8449 - protein, 152 aa, Zea mays
MSLVRRSNVFDPFSMDLWDPFDTMFRSIVPSATSTNSETAAFASARIDWKETPEAHVFKADLPGVKKEEVKVEVEDGNMLVISGQRSREKEDKDDKWHRVERSSGQFVRRFRLPENTKVDQVKAGLENGVLTVTVPKAEEKKPEVKAIEISG

SEQ ID NO: 8450 - DNA, 429 bp, Streptococcus thermophilus
  CDS (1)..(429): transl_table=11
atgttaaataagattcaacaacgtaactcagacacatatagtatgacaccttttgatttttttgaagactttagccgtaatttattcaatgatttaaggtccaatttaatcaaaacagatattcatgaaactgataatgaatatattgtagaagctgaacttcctggtatctctaaagacaacattcaagttacttacgaagacggagtattaacaattagtggccaacaacaaattgatacagtagacgaagataaaaaaggaaagttgattcgtagcgaacgtagtttaacaagtgtccgacgtcaatatttattagaaaatgttaaagaagacgaaataaaggcttcttattcagatggaattcttaaagtaaccttgccaaaagatagtaacaaagaaataaaaaaatctattccaattgagtag

SEQ ID NO: 8451 - protein, 142 aa, Streptococcus thermophilus
MLNKIQQRNSDTYSMTPFDFFEDFSRNLFNDLRSNLIKTDIHETDNEYIVEAELPGISKDNIQVTYEDGVLTISGQQQIDTVDEDKKGKLIRSERSLTSVRRQYLLENVKEDEIKASYSDGILKVTLPKDSNKEIKKSIPIE

SEQ ID NO: 8452 - DNA, 468 bp, Arabidopsis thaliana
  CDS (1)..(468)
atgtcgctgattccaagcttcttcggcaacaacaggcgaatcaacaacaacatattcgatccattctcactcgacgtatgggatccattcaaggaacttcaattcccgtcatcgtcttcgtcggcgatagcaaacgcacgtgtggattggaaagagacggcggaggcgcacgtgttcaaggcggatttaccggggatgaagaaagaagaggttaaagtagagattgaggatgatagtgtgcttaagatcagcggagagagacacgttgagaaagaggagaagcaggacacgtggcatcgtgtagagagatcgagtgggggattctcgaggaagtttaggttaccggagaatgtgaagatggatcaagttaaagcttcaatggagaatggtgttttgactgtgactgtgcctaaagtggagactaataagaagaaggctcaagttaagtctattgatatctctggctaa

SEQ ID NO: 8453 - protein, 155 aa, Arabidopsis thaliana
MSLIPSFFGNNRRINNNIFDPFSLDVWDPFKELQFPSSSSSAIANARVDWKETAEAHVFKADLPGMKKEEVKVEIEDDSVLKISGERHVEKEEKQDTWHRVERSSGGFSRKFRLPENVKMDQVKASMENGVLTVTVPKVETNKKKAQVKSIDISG

SEQ ID NO: 8454 - DNA, 462 bp, Arabidopsis thaliana
  CDS (1)..(462)
atgtcgatgattccaagtttcttcaacaacaacagacgaagcaacatctttgatccattctctcttgacgtatgggatccattcaaggaactaacatcatcatcactttctcgtgagaactcagcgatcgtgaacgcacgtgtggactggagagagacgcctgaggcccacgtgtttaaagctgacttgcctggattgaagaaggaggaagttaaagttgagattgaggaggatagtgttttgaagatcagtggagagagacacgtggagaaagaagataagaatgacacgtggcaccgtgtggagagatcgagtggacagtttacgaggaggtttaggttgccggagaatgtgaagatggatcaggttaaggctgcgatggagaatggtgtgttgactgttacggtgcctaaggctgagactaagaaggctgatgttaagtctattcagatctctggttga

SEQ ID NO: 8455 - protein, 153 aa, Arabidopsis thaliana
MSMIPSFFNNNRRSNIFDPFSLDVWDPFKELTSSSLSRENSAIVNARVDWRETPEAHVFKADLPGLKKEEVKVEIEEDSVLKISGERHVEKEDKNDTWHRVERSSGQFTRRFRLPENVKMDQVKAAMENGVLTVTVPKAETKKADVKSIQISG

SEQ ID NO: 8456 - DNA, 429 bp, Streptococcus thermophilus
  CDS (1)..(429): transl_table=11
atgctaaataaaattcaacatcgtaacttaaacacatatagtgtgacaccttttgatttttttgaagaatttagtcgtaatttattcaatgattttaagccaaatttcatcaaaacagatattcatgaaactgataatgaatatcttgtagaagctgaactccctggtattcctaaagaaaatattcaagttacttacgaaaacggagtattaacaattagtggccaacaacaaattgatgcagtaaacgaagataaaaaaggaaagttgattcgtagtgaacgtagtttaacaagtgtccaacgtcaatatttattagaaaatgttaaagaagacgaaataaaggcttcttattcagatggagttcttaaagtaaccttgccaaaagatagtaacaaagaaataaaaaaatcgatttcaattgagtag

SEQ ID NO: 8457 - protein, 142 aa, Streptococcus thermophilus
MLNKIQHRNLNTYSVTPFDFFEEFSRNLFNDFKPNFIKTDIHETDNEYLVEAELPGIPKENIQVTYENGVLTISGQQQIDAVNEDKKGKLIRSERSLTSVQRQYLLENVKEDEIKASYSDGVLKVTLPKDSNKEIKKSISIE

SEQ ID NO: 8458 - DNA, 432 bp, Wolinella succinogenes DSM 1740
  CDS (1)..(432): transl_table=11
atgtttttgactcgatttgatcccctaagggatttaaaagagattgagaggcgttttcttaccccctttggtgagggaggagaagggggtgcaaaatccaacctcagaggatttgcccctgtagtgaatactcgagaagaggagaagggttacttcatcgaagtggatcttcctggcgtgcaaaaagaggatattcatattgatgtgaaagagaacaccctctctattacgggtgagcgcaagctcaaagaagaggtcaaagaggagaactactataaagttgagagcttctttggaaagttccagcggagctttacattgcccgaaaatgtagatagtgatgccattaccgcccaaagtaaagatggcgttctagagatcttcatccccaaaaccgcccccaaagacgccaaaagaatcgccatctcctaa

SEQ ID NO: 8459 - protein, 143 aa, Wolinella succinogenes DSM 1740
MFLTRFDPLRDLKEIERRFLTPFGEGGEGGAKSNLRGFAPVVNTREEEKGYFIEVDLPGVQKEDIHIDVKENTLSITGERKLKEEVKEENYYKVESFFGKFQRSFTLPENVDSDAITAQSKDGVLEIFIPKTAPKDAKRIAIS

SEQ ID NO: 8460 - DNA, 429 bp, Streptococcus thermophilus
  CDS (1)..(429): transl_table=11
atgctaaataagattcaacatcgtaacttaaacacatatagtgtgacaccttttgatttttttgaagaatttagtcgtaatttattcaatgattttaagccaaatttcatcaaaacagatattcatgaaactgataatgaatatcttgtagaagctgaactccctggtattcctaaagaaaatattcaagttacttacgaaaacggagtattaacaattagtggccaacaacaaattgattcagtaaacgaagataaaaaaggaaagttgattcgtagtgaacgtagtttaacaagtgtccaacgtcaatatttattagaaaatgttaaagaagacgaaataaaggcttcttattcagatggagttcttaaagtaaccttgccaaaagatagtaacaaagaaataaaaaaatctatttcaattgagtag

SEQ ID NO: 8461 - protein, 142 aa, Streptococcus thermophilus
MLNKIQHRNLNTYSVTPFDFFEEFSRNLFNDFKPNFIKTDIHETDNEYLVEAELPGIPKENIQVTYENGVLTISGQQQIDSVNEDKKGKLIRSERSLTSVQRQYLLENVKEDEIKASYSDGVLKVTLPKDSNKEIKKSISIE

SEQ ID NO: 8462 - DNA, 462 bp, Physcomitrella patens subsp. patens
  CDS (1)..(462)
atggctctatcgctgttcggcggtcgtggcaacagtgtgttggatcccttcgagttcggcggtgtgtgggatcctttctcggtgctggagagcgggccgtcccggcgatttgcaggcgacgcgcaggccgtggcgaacacgcggatcgattggcgtgaaacgccggaggcgcacatcttcaaagcggacctgcctgggctgaagaaggaagaggtgaaagtgcgagtggtggaggggaggacgctggagatcagcggcgagaggaagaaagaggaggtgcagaagggcgatacctggcaccgggtggagcgtgcgcagggcagttttatgcgacggttccggctgccggagggcaccaacacggacgaagtgaaggcgcaggtgcaggacggagttctgacggtgacagttcccaagcttcaggaaccgaagccacaagtgcgccagatagagatcgcgtga

SEQ ID NO: 8463 - protein, 153 aa, Physcomitrella patens subsp. patens
MALSLFGGRGNSVLDPFEFGGVWDPFSVLESGPSRRFAGDAQAVANTRIDWRETPEAHIFKADLPGLKKEEVKVRVVEGRTLEISGERKKEEVQKGDTWHRVERAQGSFMRRFRLPEGTNTDEVKAQVQDGVLTVTVPKLQEPKPQVRQIEIA

SEQ ID NO: 8464 - DNA, 462 bp, Physcomitrella patens subsp. patens
  CDS (1)..(462)
atggctctatcgctgttcggcggtcgtggcaacagtgtgttcgatcccttcgagttcggcggtgtgtgggatcctttctcggtgctggagggcgggccgtcccggcgatttgcaggcgacgcgcaggccgtggcgaacacgcggatcgattggcgtgaaacgccggaggcgcacatcttcaaagcggacctgcctgggctgaagaaggaagaggtgaaagtgcgagtggtggaggggaggacgctggagatcagcggcgagaggaagaaagaggaggtgcagaagggcgatacctggcaccgggtggagcgtgcgcagggcagttttatgcgacggttccggctgccggagggcaccaacacggacgaagtgaaggcgcaggtgcaggacggagttctgacggtgacagttcccaagcttcaggaaccgaagccacaagtgcgccagatagagatcgcgtga

SEQ ID NO: 8465 - protein, 153 aa, Physcomitrella patens subsp. patens
MALSLFGGRGNSVFDPFEFGGVWDPFSVLEGGPSRRFAGDAQAVANTRIDWRETPEAHIFKADLPGLKKEEVKVRVVEGRTLEISGERKKEEVQKGDTWHRVERAQGSFMRRFRLPEGTNTDEVKAQVQDGVLTVTVPKLQEPKPQVRQIEIA

SEQ ID NO: 8466 - DNA, 471 bp, Physcomitrella patens subsp. patens
  CDS (1)..(471)
atggctctgtcgctctttggacgtggaggacatgacattttcgattccttgacatctggtgtgattaaggatcctttcgaagccttctcggtgtcagagaacacaccgtctcggcagtatgcacgagacactcatgctgtcgcgaacacgcaagtagattggcgggagactcctgagtcgcacatttttaaagctgatcttcctggactaactaaagacgatgtgaaggttcaattggtggatggaaagaccttggaaatagctggacagaggaagaaagaagatgtgcatcatggtgacacatggcatcgtgttgagcgagcacacggcagttttttacggcggtttcgacttcctgaaaacaccatcgctgacgaggtgaaagcccacgtactagacggtgtgctcgtcgtcacggtccctaaactgaagaagccaaaacctcaagttcgccagattgaaattctttaa

SEQ ID NO: 8467 - protein, 156 aa, Physcomitrella patens subsp. patens
MALSLFGRGGHDIFDSLTSGVIKDPFEAFSVSENTPSRQYARDTHAVANTQVDWRETPESHIFKADLPGLTKDDVKVQLVDGKTLEIAGQRKKEDVHHGDTWHRVERAHGSFLRRFRLPENTIADEVKAHVLDGVLVVTVPKLKKPKPQVRQIEIL

SEQ ID NO: 8468 - DNA, 447 bp, Vitis vinifera
  CDS (1)..(447)
atgtcgctcttcattccaagctgcatgttcgatccattctctctggatatttgggatcccttcaaaggcttccctttctccacaactcttgccgaccctgaaagatccgccttttctagcaccagttgtgactggaaggaaactccagatgctcacatcttcaaggctgatcttcctggattaaagaaggaagaggtgacggttgaggttgaagagggccgggtgcttcaaatcagtggagaaaggagcaaagagcaagaagacaagaatggaaaatggcatcagattgaaagaagcagaggaaagttccttcgcagattcagacttcctgaaaatgcaaagatggatgaggttaaagccagcatggagaatggtgtgcttactgtaacggttccgaaagaggaggtgaagaagcctaaggttaaggccattgagatctccggctag

SEQ ID NO: 8469 - protein, 148 aa, Vitis vinifera
MSLFIPSCMFDPFSLDIWDPFKGFPFSTTLADPERSAFSSTSCDWKETPDAHIFKADLPGLKKEEVTVEVEEGRVLQISGERSKEQEDKNGKWHQIERSRGKFLRRFRLPENAKMDEVKASMENGVLTVTVPKEEVKKPKVKAIEISG

SEQ ID NO: 8470 - DNA, 480 bp, Vitis vinifera
  CDS (1)..(480)
atgtcgctaattcctcgccgatccaatgtttttgatccattctctctggacgtatgggatccatttgagtgttggccattcaacagcaacttccgctctctctctgatcagatccgctccggtttccccgctgaaacgtcgtcctttgtccaggccagggtcgactggaaggaaaccccaaattctcacgtcttcaaggctgatgtgcctgggctgaagaaggaggagctgaaggtggaggttgaagacgggcgggttcttcagatcagtggacagagaaaccgcgaactggaggagaagacagacacttggcaccgtgtggagcgtagcagcggcagcttcttgaggaggttccggctgccggaggacgccaaggtggatcaggtgaaggcggccatggaggatggtgtgttgactgtgactgtgccaaaggaggcggccaagaagcccgatgtgaagtccattcaaatctctggctga

SEQ ID NO: 8471 - protein, 159 aa, Vitis vinifera
MSLIPRRSNVFDPFSLDVWDPFECWPFNSNFRSLSDQIRSGFPAETSSFVQARVDWKETPNSHVFKADVPGLKKEELKVEVEDGRVLQISGQRNRELEEKTDTWHRVERSSGSFLRRFRLPEDAKVDQVKAAMEDGVLTVTVPKEAAKKPDVKSIQISG

SEQ ID NO: 8472 - DNA, 483 bp, Vitis vinifera
  CDS (1)..(483)
atggcactcatttcaagtgttcttggtggtggccgacggagcaacatctttgatcccatctctctagatatctgggatcccttcgaaggctttccttttagcaccactcttgccaacgttcctaacagtgctcgcgaaacctctgccttcgtcaacacccgtattgattggaaagagactcccgaagctcatgttttcaaggcggatcttccagggttgaagaaggaggaagtgaaggttgaggttgaagagggcagagtacttaaaattagtggagagaggactaaagagcaggaggagaaaaatgataaatggcatcgggtggagaggagcagcggcaagttccttcgccggttcaggttgccggagaatgcaaagatggatgaagtcaaggctactatggagaacggtgtgctaactgtgagggttccaaaagaagaggtgaagaagccggaggtgaaggcgatcgagatatctggttaa

SEQ ID NO: 8473 - protein, 160 aa, Vitis vinifera
MALISSVLGGGRRSNIFDPISLDIWDPFEGFPFSTTLANVPNSARETSAFVNTRIDWKETPEAHVFKADLPGLKKEEVKVEVEEGRVLKISGERTKEQEEKNDKWHRVERSSGKFLRRFRLPENAKMDEVKATMENGVLTVRVPKEEVKKPEVKAIEISG

SEQ ID NO: 8474 - DNA, 435 bp, Vitis vinifera
  CDS (1)..(435)
atggctttgattcctcgtttctttggaaacccaagtgtttctgacccatttcctcgtgaaatgtgggacccgctcttcggctccggtgaggcatcatccttggccaatttgcagattgattggaaggagacgcctgaggctcatgtcttcaaggcagaccttcctgggctgaagaaagaggaggtgaaagtggaggttgaagaagggagagtgctgaagataagtggggagagaagcatggagaaggaggacaagaatgataagtggcaccgcgtagagcggagccatggcaagttcctgaggagtttcaggttgccggaaaatgctaaggtggatgctgtgaaggctgcaatggagaatggtgttcttactgttactgttcctaagaaggaagtgaaaaaacatgaggtcaagtccattgagatcagcggttga

SEQ ID NO: 8475 - protein, 144 aa, Vitis vinifera
MALIPRFFGNPSVSDPFPREMWDPLFGSGEASSLANLQIDWKETPEAHVFKADLPGLKKEEVKVEVEEGRVLKISGERSMEKEDKNDKWHRVERSHGKFLRSFRLPENAKVDAVKAAMENGVLTVTVPKKEVKKHEVKSIEISG

SEQ ID NO: 8476 - DNA, 429 bp, Vitis vinifera
  CDS (1)..(429)
atgtctgaaagcatccgtggctttcctttcaggcgcatcttctggggcgctccagtcttcagagacttgtccggatcaacggctcccatggactggctagaatccccagctgcccacatcttcaaattcgatgtaccaggtttgagcaaagacgacataaaggtggagatagaagatggaaacgtgttgcgtgtatacagggtggcaggtgggagagaggagtccgtggtgaaagacactgtttggcatatagcagaaagagggggcgggagaggagaattttctcgggaattcgaattaccggaaaatgtgaaggttgatcagataaaggctcaggtggaaaatggtgttctcaccatcgttgttccaaaagatacgagccccaaggcctccaaagtgaagaccatcaacatctctagcaaactctaa

SEQ ID NO: 8477 - protein, 142 aa, Vitis vinifera
MSESIRGFPFRRIFWGAPVFRDLSGSTAPMDWLESPAAHIFKFDVPGLSKDDIKVEIEDGNVLRVYRVAGGREESVVKDTVWHIAERGGGRGEFSREFELPENVKVDQIKAQVENGVLTIVVPKDTSPKASKVKTINISSKL

SEQ ID NO: 8478 - DNA, 426 bp, Populus trichocarpa
  CDS (1)..(426)
atggctgatggcttctttgggtacccttttaggcgcttgttcttgagccctccagcataccatgaatggtctggatcaactgctctcatggactggcttgaatccccaactgcccatatttttaaagtcaatgtaccaggatttaacaaagaggacataaaggttcaagtgggagaagggaatattttgcacataaaaggtgatggtggcaaagaggaaacccatgagaaagacacagtttggcatgtagctgagagagggacaagaaagaggggcttttctagagaaattgagctaccagaagatgtgaagctggatcaaatcaaagctcaagttgaaaatggtgttctcaccattgttgctccaaaggataccaatccaaagcaatctaaagttaggaacatcaatatcactagcaagctttga

SEQ ID NO: 8479 - protein, 141 aa, Populus trichocarpa
MADGFFGYPFRRLFLSPPAYHEWSGSTALMDWLESPTAHIFKVNVPGFNKEDIKVQVGEGNILHIKGDGGKEETHEKDTVWHVAERGTRKRGFSREIELPEDVKLDQIKAQVENGVLTIVAPKDTNPKQSKVRNINITSKL

SEQ ID NO: 8480 - DNA, 423 bp, Populus trichocarpa
  CDS (1)..(423)
atgtctctgattcgatcattgcttagcaacccactttccactgacatctggtcaccatttggttcaagtactaatgagatatcaagtttcgctagcgcgcatgttgattggaaggagaccccagaagctcatgtattcaaggctgatcttcctgggctgaagaaagaggaagtgaaggttgagattgaagaaggaagggttcttcagataagtggagaaagaagtgttgagaaggaggataaaaacgataagtggcatcgtgttgagagaggtcgtggcaaattccttaggaggttctggttgcctgagaatgctaaagttgatgaagtgaaggcatcaatggagaatggggttttgactgttacgattcccaaggccgaggagaagaagcctgaggtcaagtccattgagatcagcggctga

SEQ ID NO: 8481 - protein, 140 aa, Populus trichocarpa
MSLIRSLLSNPLSTDIWSPFGSSTNEISSFASAHVDWKETPEAHVFKADLPGLKKEEVKVEIEEGRVLQISGERSVEKEDKNDKWHRVERGRGKFLRRFWLPENAKVDEVKASMENGVLTVTIPKAEEKKPEVKSIEISG

SEQ ID NO: 8482 - DNA, 489 bp, Populus trichocarpa
  CDS (1)..(489)
atgtctctcatcccaagctccctctttggtggccgaagaaccaacgtctttgatcctttctctcttgacatctgggaccctttccaggactttcccttcacaagcacagccctgtcagccccacgttcagaggtcgccaaagaaacatcagcatttgccagcacacgcatagactggaaggagaccccagaggctcatgttttcaaggctgatcttccagggctgaaaaaagaggaagtgaaagtggagatagaggaaggcaaggttttacaaataagtggagagagaagcaaggagaatgaagagaaaaatgacaagtggcatagagttgagagatcgagtggtaagttcttgaggaggttcagattgcctgagaatgctaaagctgatcaggtgaaggctagtatggaaaacggggtcttgacagtgactgtgcctaaagaggaagtcaagaagcctgatgttaagtccattgagatctccggctga

SEQ ID NO: 8483 - protein, 162 aa, Populus trichocarpa
MSLIPSSLFGGRRTNVFDPFSLDIWDPFQDFPFTSTALSAPRSEVAKETSAFASTRIDWKETPEAHVFKADLPGLKKEEVKVEIEEGKVLQISGERSKENEEKNDKWHRVERSSGKFLRRFRLPENAKADQVKASMENGVLTVTVPKEEVKKPDVKSIEISG

SEQ ID NO: 8484 - DNA, 489 bp, Populus trichocarpa
  CDS (1)..(489)
atgtctcttatcccaagcaccctctttggtggccgaagaagtaacatctttgatcctttctctcttgacatctgggaccctttccaggactttcccttcactagcacagccatatcagccccacgatcagagttcgccaacgaaacaacggcatttgccaacacacgcatagactggaaggagacccccgaggctcacgttttcaaggctgatctcccaggcctgaagaaagaggaagtcaaagtggagttagaggaaggcagggttttgcaaataagtggagagagaagcaaagagagagaagagaaaaatgacaagtggcatagagtggagaggtcaagtgggaagttcttaaggagattcaggttgcctgagaatgcaaaacttgatcaacttaaggctaatatggaaaacggggtcttgactgtgactgtgcctaaagaggaagtcaaaaaacctgatgttaaggccatcgagatcaccggctga

SEQ ID NO: 8485 - protein, 162 aa, Populus trichocarpa
MSLIPSTLFGGRRSNIFDPFSLDIWDPFQDFPFTSTAISAPRSEFANETTAFANTRIDWKETPEAHVFKADLPGLKKEEVKVELEEGRVLQISGERSKEREEKNDKWHRVERSSGKFLRRFRLPENAKLDQLKANMENGVLTVTVPKEEVKKPDVKAIEITG

SEQ ID NO: 8486 - DNA, 489 bp, Populus trichocarpa
  CDS (1)..(489)
atgtctctcatcccaagctccctctttggtggccgaagaaccaacgtctttgatcctttctctcttgacatctgggaccctttccaggactttcccttcacaagcacagccctatcagccccacgctcagaggtcgccaaagaaacatcagcatttgccagcacacgcatagactggaaggagaccccagaggctcatgttttcaaggctgatcttccagggctgaaaaaagaggaagtgaaagtggagatagaggaaggtaaggttttacaaataagtggagagagaagtaaagagaaggaagagaaaaatgacaagtggcatagagttgagagatcgagtggtaagttcatgaggaggttcagattgcctgagaatgctaaagctgatcaggtgaaggctagtatggaaaatggggtcttgacagtgactgtgcctaaagaggaagtcaagaagcctgatgttaagtccattgagatctccggctga

SEQ ID NO: 8487 - protein, 162 aa, Populus trichocarpa
MSLIPSSLFGGRRTNVFDPFSLDIWDPFQDFPFTSTALSAPRSEVAKETSAFASTRIDWKETPEAHVFKADLPGLKKEEVKVEIEEGKVLQISGERSKEKEEKNDKWHRVERSSGKFMRRFRLPENAKADQVKASMENGVLTVTVPKEEVKKPDVKSIEISG

SEQ ID NO: 8488 - DNA, 429 bp, Clostridium thermocellum ATCC 27405
  CDS (1)..(429): transl_table=11
atgagcctgatttcctggaatccattcagagaagtagacagcatcagcagagatatggaaaccttctttgaacgttcaccttttggttttttcagcagagcaacagctcccagagttgatgttttcgaaacagaaaaagatgttgttgtaaaggctgaaataccgggtgtatccaaagaagatttaaatgtatatgttgatgaaaattccataagattgtcaggagaaacaaaaagagatacagaatataaaaatgaacatatatacaggactgaaagatattacggaagcttttcaagaacaattcccctccctgtcgaagtaaaatcagaacaggcaaaggcagaatataaagacggtattttgaccgttacggttcctaaagttgaaacaacacaaatgaaaggcaaaaagattgatatacattaa

SEQ ID NO: 8489 - protein, 142 aa, Clostridium thermocellum ATCC 27405
MSLISWNPFREVDSISRDMETFFERSPFGFFSRATAPRVDVFETEKDVVVKAEIPGVSKEDLNVYVDENSIRLSGETKRDTEYKNEHIYRTERYYGSFSRTIPLPVEVKSEQAKAEYKDGILTVTVPKVETTQMKGKKIDIH

SEQ ID NO: 8490 - DNA, 447 bp, Caldicellulosiruptor saccharolyticus DSM 8903
  CDS (1)..(447): transl_table=11
atgttaagagatattgttccatttggaagaaggccatttgacatcatgagaaaaattgaaagagagttctttgacattgacgattggtttgaggatttctttgcgccgtttgaaaagggttcaagatttatgaggacagacattaaagagactgaaaacgagtatatcattgaagctgagcttcctggggttaaaaaagaggacatcaagatagagctttatgacaataaactcactataaaggcagaaactaagcaagaggaaaaagaagaaagagagaattttataagaagagagagaagatatggagcgtttagtagaacattctaccttgataatgtgaaagaggatggcattaaagcaaagtatgaagatggaattctgcgaattgtgcttccaaaggaaaggccatcaaaaccaaatgttagaacaattgacatcgaataa

SEQ ID NO: 8491 - protein, 148 aa, Caldicellulosiruptor saccharolyticus DSM 8903
MLRDIVPFGRRPFDIMRKIEREFFDIDDWFEDFFAPFEKGSRFMRTDIKETENEYIIEAELPGVKKEDIKIELYDNKLTIKAETKQEEKEERENFIRRERRYGAFSRTFYLDNVKEDGIKAKYEDGILRIVLPKERPSKPNVRTIDIE

SEQ ID NO: 8492 - DNA, 489 bp, Dehalococcoides sp. BAV1
  CDS (1)..(489): transl_table=11
atgactctggaaagatggcaacccggttggtcacttcgcccctggcgtcctttccgagaagtactcagtcccggcctctggaacatgcttactaatgaacgtgactggctgccggcaaccgaaatggtagaactcaaagacaaatatctgataaaagcagaaatgcccggaataaacgaagaggatattgaagtctcggtatctgataacgttctcagtataaaaggtgaaaaaaaatgcgattgcgaaatatcagaagagagctattatttcagtgagaggagttacggcagtttctcacgctctatgaccctgcccaataataccgaccctcagaatattgctgccactctggataatggcattctggaaattaccatacccaagtcatctgaggccaaacccaaaaaagtttcggtaatcaaggccgccaaacccaaaaaaactgaccttaatacccaatccataaaacctaaagcccaatcctga

SEQ ID NO: 8493 - protein, 162 aa, Dehalococcoides sp. BAV1
MTLERWQPGWSLRPWRPFREVLSPGLWNMLTNERDWLPATEMVELKDKYLIKAEMPGINEEDIEVSVSDNVLSIKGEKKCDCEISEESYYFSERSYGSFSRSMTLPNNTDPQNIAATLDNGILEITIPKSSEAKPKKVSVIKAAKPKKTDLNTQSIKPKAQS

SEQ ID NO: 8494 - DNA, 429 bp, Parabacteroides distasonis ATCC 8503
  CDS (1)..(429): transl_table=11
atgacaccgatgagaagaagtcaaaattggttaccgtatgtattcaatgatttatttgacaacgactggatgataaaagcaaactctacagctccagccatcaacgtgatagaatccgataaggattatcgagttgaggtagccgctcccggtatgacgaagaacgatttcaacatcaagatcgatgagaacaacaacttggtcgtatctatggagaaaaaagaagaaaagaatgaggataagaaagacggacgctatctgagacgcgaattctcttatagcaagttccaacaaaccatggttttgcctgacaatgtagagaaagacaagattgaggcgaaggttgagaacggcgtcttgagtatcagcataccgaaaagaactgaggaagaggctaaaatggccgagaaagtaatcgagatcaaataa

SEQ ID NO: 8495 - protein, 142 aa, Parabacteroides distasonis ATCC 8503
MTPMRRSQNWLPYVFNDLFDNDWMIKANSTAPAINVIESDKDYRVEVAAPGMTKNDFNIKIDENNNLVVSMEKKEEKNEDKKDGRYLRREFSYSKFQQTMVLPDNVEKDKIEAKVENGVLSISIPKRTEEEAKMAEKVIEIK

SEQ ID NO: 8496 - DNA, 444 bp, Thermotoga lettingae TMO
  CDS (1)..(444): transl_table=11
atgttgctggaaagacgtgaggatttcatgaaaccattcagagaacttcaacgtgaaatcgacaggctttttgaagacttcttcgctccagtgactcgcagaagcacagtttattcgtatttaccagatgtcgatgtttatgaaaccgatgactcagtagtggtcgaagtcgaggttcctggaatggacaaaaaagactttgaagtaaaggtcgaagacagtattttgagaatcaccggcgaaaagaaactcgagcgcgagaaggagaacagaaactacaaagtcgttgaaagatgctacgggaaatttgaaagaaccctgtcgttgcctgactatgtcgatgcagacaaaatcaaagcaaaatatgaaaacggtgtcttgacaatctccctgcctaaacgcgaagagaaaaaggctaaagtagtggatgtgaaaattgagtaa

SEQ ID NO: 8497 - protein, 147 aa, Thermotoga lettingae TMO
MLLERREDFMKPFRELQREIDRLFEDFFAPVTRRSTVYSYLPDVDVYETDDSVVVEVEVPGMDKKDFEVKVEDSILRITGEKKLEREKENRNYKVVERCYGKFERTLSLPDYVDADKIKAKYENGVLTISLPKREEKKAKVVDVKIE

SEQ ID NO: 8498 - DNA, 441 bp, Petrotoga mobilis SJ95
  CDS (1)..(441): transl_table=11
atgttagaaagaagaagagacgacagagatgacagagaagacttgttatctccatttgatttcttcaatagagagtttgaagacttctttagatcattgccttttggaacgacctctcgtggtgagatggatgtgtatgaaactgacgatgattacatcgtagagtgtgaattacctggtttaaacaaaaaagatataaaagttcaattaaacaacgatctattaaccatatccgcagaaaagaaagaatccgacgaagtaaaaagagggaacgtatataggagagaaagatactttggtagaattgaacgaactataagactaccagagtacattgacaaagacaaaattaaagctgaatatgaaaatggagttttgaaactaactataccaaaagttgagacagctaaaggtgaaggaaaagagatcaaaattgaataa

SEQ ID NO: 8499 - protein, 146 aa, Petrotoga mobilis SJ95
MLERRRDDRDDREDLLSPFDFFNREFEDFFRSLPFGTTSRGEMDVYETDDDYIVECELPGLNKKDIKVQLNNDLLTISAEKKESDEVKRGNVYRRERYFGRIERTIRLPEYIDKDKIKAEYENGVLKLTIPKVETAKGEGKEIKIE

SEQ ID NO: 8500 - DNA, 546 bp, Ralstonia pickettii 12J
  CDS (1)..(546): transl_table=11
atggctgaatccgataccaagcttcccgtgaagaccggcacggaagcatcgaccaaacaagccggtggcatgcaaccctggcgcgcattcgacaacctgcggcaagaggttgcacgtgtcttcgatgatttcgaccgcggatttcatctctttccgtttcatcgcgcggcgctggatatcgcgccgttctggcggcgcgaatgggcattgacgtccgcgcccgcagtagacgttgtcgaaaccgataaggcttacgagatcaaagccgacctgcctggcatggaagagaaggacgtcgaggtcaagctggtcaacagcggcttgaccatcaaaggcgagaagcaggaagagaaggaagaaaaacaaaaggactactacctgcatgaacgccacttcggggcgttcgagcggtcattccgcatgccagacggcgtcgatacagacaagatccaggccagcttcaaaaacggcgtattgacggtgacgctgcccaagacggacgcggcgcaggcggcttccaagaccatccccgtaaacgggggctga

SEQ ID NO: 8501 - protein, 181 aa, Ralstonia pickettii 12J
MAESDTKLPVKTGTEASTKQAGGMQPWRAFDNLRQEVARVFDDFDRGFHLFPFHRAALDIAPFWRREWALTSAPAVDVVETDKAYEIKADLPGMEEKDVEVKLVNSGLTIKGEKQEEKEEKQKDYYLHERHFGAFERSFRMPDGVDTDKIQASFKNGVLTVTLPKTDAAQAASKTIPVNGG

SEQ ID NO: 8502 - DNA, 405 bp, Chlorobium limicola DSM 245
  CDS (1)..(405): transl_table=11
atgcttgtcaaattagcaaaggatcccatgagacttttcgacgatatctggtcaggaacgcagatgccatctacaaatgccccggcattcaaggttgatatttctgaagacgagactgcttttcacatcgatgccgaacttccggggcttgaaaaagaacagatcgcgctgaacatcgaagacgatgtacttaccatcaaggctgagcgcaaacaggaatcggaagaaaagaaaaaagattaccaccggattgaacgatcatacggaagtttttcacgaagcttcaatctgggagagatgatcgatcaggataatatcggagctgattttgaaaacggggtactccacgttaccctgccgaaagcggcgccggtgaaaaaaacaaaggaaatctccatcagataa

SEQ ID NO: 8503 - protein, 134 aa, Chlorobium limicola DSM 245
MLVKLAKDPMRLFDDIWSGTQMPSTNAPAFKVDISEDETAFHIDAELPGLEKEQIALNIEDDVLTIKAERKQESEEKKKDYHRIERSYGSFSRSFNLGEMIDQDNIGADFENGVLHVTLPKAAPVKKTKEISIR

SEQ ID NO: 8504 - DNA, 450 bp, Geobacter lovleyi SZ
  CDS (1)..(450): transl_table=11
atggcactcgtcaagtacaacccgttacgtgagctgcgcagcatgcaggaccagatggaccgtctgctgaatctctcctggggaggtggtgagtatccgggggaagatatcaaagaggggatctggcaaccggcggtggacatctatgagactgcagattcaattgtgatcaaggcagagctgcctgatgtggatcaaaaagatatcgatgtccggattgaagataacctgttgaccatcaagggtgagcgcaagcacgagagtgaggtcaagaaggagaactaccatcggattgagcgttatttcggctcctttcagcgcagcttcaaactgcctgccacggtagagcaggaaaaagttgcagccagttgcgaaaaaggagttttaaccgtgacgctgcccaaaaaggaagaggtcaagccgaagcagatcaatgttgaggtcaaataa

SEQ ID NO: 8505 - protein, 149 aa, Geobacter lovleyi SZ
MALVKYNPLRELRSMQDQMDRLLNLSWGGGEYPGEDIKEGIWQPAVDIYETADSIVIKAELPDVDQKDIDVRIEDNLLTIKGERKHESEVKKENYHRIERYFGSFQRSFKLPATVEQEKVAASCEKGVLTVTLPKKEEVKPKQINVEVK

SEQ ID NO: 8506 - DNA, 438 bp, Hydrogenobaculum sp. Y04AAS1
  CDS (1)..(438): transl_table=11
atgagaagaggtttggcaatttggaatccatttagtgagttggaaaaggtaaaagcagaatttgacaaccttgtccaaaacttgttacctaccgtttacagcggtggcgaagtttctctggcaccagcaatagacttatatgaaacagacaaagaagtggtgataaaagctgaaatacctggtgtcaaaaaagaggatttggaagtaagcgtaaaagacaatgtcctttatattaagggcgaaaagaaagaagaaaaagaagaaaacacagaagctgtccacagagtagaacgcatatacggtaagtttgaaaggatgatatccttgccaccaaatgtaaaaacccaagaggcaaaggccgaatacaaggatggcgtcctagagataagatttcctaaaaaagaagaatctcaaagcacaaagattaacataggctaa

SEQ ID NO: 8507 - protein, 145 aa, Hydrogenobaculum sp. Y04AAS1
MRRGLAIWNPFSELEKVKAEFDNLVQNLLPTVYSGGEVSLAPAIDLYETDKEVVIKAEIPGVKKEDLEVSVKDNVLYIKGEKKEEKEENTEAVHRVERIYGKFERMISLPPNVKTQEAKAEYKDGVLEIRFPKKEESQSTKINIG

SEQ ID NO: 8508 - DNA, 447 bp, Acidithiobacillus ferrooxidans ATCC 53993
  CDS (1)..(447): transl_table=11
atggcaaatgaagtttcacgtccggtggtcaagagtgttcgtcaggtagaacctttggaaaacttaatagaaacagtgtggcctggagtattttctcctttcattacccgacaggccacgcaaccccaaatcgcgcatattgatgtccttgatcacgatgacgcttttgtattgaaggcggagattgccggcgtagataaggataagctggatgtccaggtacacggtaaccaggtctatatcagtggcgtcaaggaagaagatagctctcgggaagaagggaattatatctaccgagagcgtcgatatggagagttttctcgcaccgtgcagctccctgcagatgtgaatggcgatcaaaccaaggccatatacaaagatggtgttttagagttgactctgcctaaaacagaatctgccaaacgcaaaaagattgcgatttcctga

SEQ ID NO: 8509 - protein, 148 aa, Acidithiobacillus ferrooxidans ATCC 53993
MANEVSRPVVKSVRQVEPLENLIETVWPGVFSPFITRQATQPQIAHIDVLDHDDAFVLKAEIAGVDKDKLDVQVHGNQVYISGVKEEDSSREEGNYIYRERRYGEFSRTVQLPADVNGDQTKAIYKDGVLELTLPKTESAKRKKIAIS

SEQ ID NO: 8510 - DNA, 438 bp, Bacillus cereus Q1
  CDS (1)..(438): transl_table=11
atgcgtaatttatttccagaaataacaaaacgtcaaaatggtatttttgattttgggccttctttattagaggggatgacagatgctttctttaaaccgatgaacatggatacttttaaagtagatgttcatgaacaatctgataaatatacagtgaaagcagatttaccaggttttcaaaaagaaaacattcaagttgaatttgaacaagatgtattaacgattcaagcaactaatcataatgaagtagaagaaaaaaatgagaatggcatatatattcgtaaagaacgttctataggttctgtaactcgacgctttaattttaaacaagttgaggaagaaaatgttaaagcaaattataaagatggcgtactgacaattgaattgccaaaattgaaagaagaaaaaagtagtaagacaacaattaatatcgaataa

SEQ ID NO: 8511 - protein, 145 aa, Bacillus cereus Q1
MRNLFPEITKRQNGIFDFGPSLLEGMTDAFFKPMNMDTFKVDVHEQSDKYTVKADLPGFQKENIQVEFEQDVLTIQATNHNEVEEKNENGIYIRKERSIGSVTRRFNFKQVEEENVKANYKDGVLTIELPKLKEEKSSKTTINIE

SEQ ID NO: 8512 - DNA, 447 bp, Anaerocellum thermophilum DSM 6725
  CDS (1)..(447): transl_table=11
atgctcagagacatagttccatttggcaaaagaccatttgacattatgagaaagattgaaagagagttttttgacattgatgactggtttgaagatttctttgcaccatttgaaaaaggtacaagattcatgagaactgacattaaggagactgaaaatgagtatattattgaagcagaacttccgggggtcaaaaaagaggatatcaagatagagctttatgataacaaacttacaataaaggcagagacaaagaaagaggaaaaagaagagagagaaaactttataagacgagaaagaagatatggtgcattttcccgaacattctatcttgacaatgtaaaagaggatggtatcaaagcaaaatacgaggacggaatcttgagaatagtacttccaaaagaaagaccttcaaaaccagatgtaagaacaattgatatagaataa

SEQ ID NO: 8513 - protein, 148 aa, Anaerocellum thermophilum DSM 6725
MLRDIVPFGKRPFDIMRKIEREFFDIDDWFEDFFAPFEKGTRFMRTDIKETENEYIIEAELPGVKKEDIKIELYDNKLTIKAETKKEEKEERENFIRRERRYGAFSRTFYLDNVKEDGIKAKYEDGILRIVLPKERPSKPDVRTIDIE

SEQ ID NO: 8514 - DNA, 447 bp, Sulfurihydrogenibium azorense Az-Fu1
  CDS (1)..(447): transl_table=11
atggacagaagattagtaccagcatttgcaatctcaccattaagagaacttgcaagaattgaaaacgagattaacaaatttctaaaggagtttatgccacaggaaattacaacagaagtagtagcatggaaaccaagagtagacgtttatgaaaaggataacaacatagtagttgaagcagagattccaggagctaagaaagaggatattgaagtaaaaataaaagataatgccgttgtaatcagaggagaagttaagaaagaagaagagaaaaaagaagaaaactattacagaagcgagaggttctacggtaaatttgaaagagttatacctcttccagcagatgtaaaagtagaagaagcaaaagcagagtaccaagatggagttttaaagttaactataccaaaagctacatctgaaaaagaaattaaaattgaggtaaaatag

SEQ ID NO: 8515 - protein, 148 aa, Sulfurihydrogenibium azorense Az-Fu1
MDRRLVPAFAISPLRELARIENEINKFLKEFMPQEITTEVVAWKPRVDVYEKDNNIVVEAEIPGAKKEDIEVKIKDNAVVIRGEVKKEEEKKEENYYRSERFYGKFERVIPLPADVKVEEAKAEYQDGVLKLTIPKATSEKEIKIEVK

SEQ ID NO: 8516 - DNA, 429 bp, Bacteroides fragilis YCH46
  CDS (1)..(429): transl_table=11
atgatgcctgttagaagatctcagaattggttaccaagtatctttaatgatttctttgataacgaattaatggctaaagcaaatgctaccgcacctgctattaatgtaattgaaaccgataaggcctataaattagagttggccgcaccagggatgactaaggaggatttcagcgtacggattgatgaagaaaacaacctggtaatttcaatggaaaagaaagctgaaaacaaggaagaaaagaaagacggtcgctatttacgccgtgaattttcatattcaaaattccagcagacaatgattctgccggagaacgtagataaagatcacatctccgcgcaagtggaaaacggtgttctgaacatcgaactacccaagttgagtgaagaagaagtgaagaaacctgacagaaccattgaagttaaataa

SEQ ID NO: 8517 - protein, 142 aa, Bacteroides fragilis YCH46
MMPVRRSQNWLPSIFNDFFDNELMAKANATAPAINVIETDKAYKLELAAPGMTKEDFSVRIDEENNLVISMEKKAENKEEKKDGRYLRREFSYSKFQQTMILPENVDKDHISAQVENGVLNIELPKLSEEEVKKPDRTIEVK

SEQ ID NO: 8518 - DNA, 489 bp, Dehalococcoides ethenogenes 195
  CDS (1)..(489): transl_table=11
atgactctggaaagatggcaaccgggttggtcactgcgtccctggcgtcctttccgagaaatactcagtcccggcctttggagtatgctagctaacgaacgtgactggctgccggctaccgaaatgctggagcttaaggacaaatatctgataaaggcagagatgcccggcataaatgaagaggatattgaagtttcggtatcagataacgtacttaccatcaaaggcgaaaaaaagtacaccagcgaagtatctgaggaaaattattacttcagtgaaagaagttacggcagtttctcacgctctatgaccctgcccaacaataccagcatccagaatattgcagccacgctggataacggcatcttggaaatcagcatacccaaggtatccgaagctaaggctaagaaggtttcggtgaccaaggccgccaaaaccagaaaagccaacataaataccaaaccaggcaatccaaaaaccaaatcctga

SEQ ID NO: 8519 - protein, 162 aa, Dehalococcoides ethenogenes 195
MTLERWQPGWSLRPWRPFREILSPGLWSMLANERDWLPATEMLELKDKYLIKAEMPGINEEDIEVSVSDNVLTIKGEKKYTSEVSEENYYFSERSYGSFSRSMTLPNNTSIQNIAATLDNGILEISIPKVSEAKAKKVSVTKAAKTRKANINTKPGNPKTKS

SEQ ID NO: 8520 - DNA, 462 bp, Thermobifida fusca YX
  CDS (1)..(462): transl_table=11
atggcgcttcccgtgacccgccgtcgggaacggctgattcccacccagtggggcgcgttccccgagtttgaggaactctacgaccggatggggcggctgttggagtccgcgttcggtgagccgatcatctctcccaccacgtggacaccgtttgcggacctgttggaagacgacaagtcctacattgtggaagctgaagtcccggggatgtccaaggacgacatcaacattcaggtcagcgggaacgagctgatcatctccgggaaggtggaggagcaagaaaaagaaggggtgcgcgcccaccggcggatgcgccgctacggggagttcgaataccgcacggtgctgcccggggagatcgacgctgaaggggtgcgcgccaaactcgacaacggtgtgctgacggtgaccgctccgaagagtgcgcatgagcggccccgccacgtcgccatcgaaagctga

SEQ ID NO: 8521 - protein, 153 aa, Thermobifida fusca YX
MALPVTRRRERLIPTQWGAFPEFEELYDRMGRLLESAFGEPIISPTTWTPFADLLEDDKSYIVEAEVPGMSKDDINIQVSGNELIISGKVEEQEKEGVRAHRRMRRYGEFEYRTVLPGEIDAEGVRAKLDNGVLTVTAPKSAHERPRHVAIES

SEQ ID NO: 8522 - DNA, 489 bp, Dehalococcoides sp. CBDB1
  CDS (1)..(489): transl_table=11
atgactctggaaagatggcaacccggttggtcacttcgcccctggcgtcctttccgagaagtactcagtcccggcctctggaacatgcttactaatgaacgtgactggctgccggcaaccgaaatggtagaactcaaagacaaatatctgataaaagcagaaatgcccggaataaacgaagaggatattgaagtctcggtatctgataacgttctcagcataaaaggtgaaaaaaagtgcgattgcgaaatatcagaagagaactattatttcagtgagaggagttacggcagtttctcacgctctatgaccctgcccaataataccgaccctcagaatattgctgccactctggataatggcattctggaaattaccatacccaagtcatctgaggccaaacccaaaaaagtttcggtaatcaaggccgccaaacccaaaaaaactgaccttaatacccaatccataaaacctaaagcccaatcctga

SEQ ID NO: 8523 - protein, 162 aa, Dehalococcoides sp. CBDB1
MTLERWQPGWSLRPWRPFREVLSPGLWNMLTNERDWLPATEMVELKDKYLIKAEMPGINEEDIEVSVSDNVLSIKGEKKCDCEISEENYYFSERSYGSFSRSMTLPNNTDPQNIAATLDNGILEITIPKSSEAKPKKVSVIKAAKPKKTDLNTQSIKPKAQS

SEQ ID NO: 8524 - DNA, 426 bp, Thiomicrospira crunogena XCL-2
  CDS (1)..(426): transl_table=11
atgagtttacttttacgaaatttagaaccgtttagagagcttaaagagttagagaatcgtttacaccatttgtttccaaaaggagaagagtcgaatgtagcggcatttacaccaacggtgaacacgcgtgagggagattatgcttatcacattgagattgatttaccgggtgtgaaaaaagaagacattcatgtcgaagtcaaagaaaaccgtttgatgatttcgggtgaacgtaaagtgaaagaagaagtgaaagaagaagactaccaccgtgttgaaagccgttatggtaagtttgaacgcagtttcactctgccggataatgtcgatgcggaaaacgttgatgccagcaccactgatggtgttttagaagtggtgctaccgaagaaagaacgcagtactagcaagaaaattgaagtgaagtga

SEQ ID NO: 8525 - protein, 141 aa, Thiomicrospira crunogena XCL-2
MSLLLRNLEPFRELKELENRLHHLFPKGEESNVAAFTPTVNTREGDYAYHIEIDLPGVKKEDIHVEVKENRLMISGERKVKEEVKEEDYHRVESRYGKFERSFTLPDNVDAENVDASTTDGVLEVVLPKKERSTSKKIEVK

SEQ ID NO: 8526 - DNA, 492 bp, Syntrophus aciditrophicus SB
  CDS (1)..(492): transl_table=11
atgattagaaacctgttgcccaccgtatggcggagaagcgaaacgcccctgcgacgcgcagaggaaagccccttcttggccctgcatcgggaaatgaaccggatgttcgacgacttttcccgaggctttgacttgtcgccctttgatggcggatggagttggggcttttcgcccccggtcgacgttcgggaggacgaaaaagaggtcaccgtgaaggccgagctgccgggcatggaggagaaggacattgaggtgaatcttgccgacaatggcctcacgatcaagggggagaagaaggccgagaaggaagagaaggggaaggacaattggtatcgggagacgagctacggtgccttccataggttcatcccgcttcccgaaggactcgacaaggagaaagttgatgctcgcttcaagaacggcgtcttgaccgttacccttcgccggttggaagaggccaaggggaagaagatcgctatcaaagcggaatag

SEQ ID NO: 8527 - protein, 163 aa, Syntrophus aciditrophicus SB
MIRNLLPTVWRRSETPLRRAEESPFLALHREMNRMFDDFSRGFDLSPFDGGWSWGFSPPVDVREDEKEVTVKAELPGMEEKDIEVNLADNGLTIKGEKKAEKEEKGKDNWYRETSYGAFHRFIPLPEGLDKEKVDARFKNGVLTVTLRRLEEAKGKKIAIKAE

SEQ ID NO: 8528 - DNA, 429 bp, Streptococcus thermophilus LMD-9
  CDS (1)..(429): transl_table=11
atgttaaataagattcaaccacgcaactcagacacatatagtatgacgccttttgatttttttgaagactttagtcgtaatttattcaatgattttaagtccaatttaatcaaaacagatattcatgaaactgataatgaatatcttgtagaagctgaacttcctggtattcctaaagaaaacattcaagttacttacgaagacggagtattaacaattagtgggcaacaacaaattgatacagtagacgaagataaaaaaggaaagttgattcgtagcgaacgtagttcaacaagtctccgacgtcaatatttattagaaaatgttaaagaagacgaaataaaggcttcttattcagatggaattcttaaagtaaccttgccaaaagatagcaacaaagaaataaaaaaatctattccaattgagtag

SEQ ID NO: 8529 - protein, 142 aa, Streptococcus thermophilus LMD-9
MLNKIQPRNSDTYSMTPFDFFEDFSRNLFNDFKSNLIKTDIHETDNEYLVEAELPGIPKENIQVTYEDGVLTISGQQQIDTVDEDKKGKLIRSERSSTSLRRQYLLENVKEDEIKASYSDGILKVTLPKDSNKEIKKSIPIE

SEQ ID NO: 8530 - DNA, 438 bp, Methanosaeta thermophila PT
  CDS (1)..(438): transl_table=11
atggctgttattacaccagaggacataagatggtttcagaagagaataaaccgtatgcttgaggagatgggtatcgattcgaaggagatgcggaggttccaggagcgtctgaccggcctgatggaggagatgggcgaggtcccgccggtcgacatcgaggagagggatgatgattttgtgataaccgtcgaccttcctggcgttgacaagaatgatgtggaagtcacgatcacagaggatggtctgaggctgaaggccagaagggagctgaaggagggcagctacttcctaagagagagacgagggagctttgagaggatcgtaacactgccggtcgaggtcagagttgaggaggcgaaggcaaagctcaaggacggtgttctggagattgtggtaccaaagatcgtatcagcgaagaagaggatcgcaatagagtga

SEQ ID NO: 8531 - protein, 145 aa, Methanosaeta thermophila PT
MAVITPEDIRWFQKRINRMLEEMGIDSKEMRRFQERLTGLMEEMGEVPPVDIEERDDDFVITVDLPGVDKNDVEVTITEDGLRLKARRELKEGSYFLRERRGSFERIVTLPVEVRVEEAKAKLKDGVLEIVVPKIVSAKKRIAIE

SEQ ID NO: 8532 - DNA, 432 bp, Halothermothrix orenii H 168
  CDS (1)..(432): transl_table=11
atgaggcgataccctctggaaaggcatccctttagtgaagttaactctctcagggaccagatggaccgtttttttgaaaatctcccctatgaaaattttatgaattttagaccctctattgatgtctttgaaaaggatggaaatgttattgtcgaagccgatatcccgggaattaaccctgacgacattgaaattgccataagtgaagaccgcttaaatatcaaaggaaaagtagaaaaaaatgaagaagttaaagaagataactattaccggacagaaagacagttcggcagttttaatagaaatataaatctgccagcccgggttaaccataaaaaagctgaagcccgggtcaacaatggcgtacttaaaataaagatacccaaaatggaacacgaatcagaaaaaatcactcgcttacgccctcattaa

SEQ ID NO: 8533 - protein, 143 aa, Halothermothrix orenii H 168
MRRYPLERHPFSEVNSLRDQMDRFFENLPYENFMNFRPSIDVFEKDGNVIVEADIPGINPDDIEIAISEDRLNIKGKVEKNEEVKEDNYYRTERQFGSFNRNINLPARVNHKKAEARVNNGVLKIKIPKMEHESEKITRLRPH

SEQ ID NO: 8534 - DNA, 534 bp, Planctomyces maris DSM 8797
  CDS (1)..(534): transl_table=11
atggcaactacagtgtcatcagaaaaaaagaaaccagaacaatccactaagaatgaagtaaagaccaggccgctgtcacgtttttcgcaggatttgtcatcttttatggggcgggcgccgtttttatcgttccggaatgagatggataacctgttgaatcgtttttcagacgattttggcaacggatggctgacacaggggtatactgcgaatctcgatttgtctgaaacgaacaaccacattgaaatcagaatggatgttcccggaatccaacctgaagaaattgacgtggaagtatccggcaatctcctgcgaatcacgggagaacgtaaggaagagcatgaggaaaagggaaagatgtttcatcgtatggaacgtcgtacaggcagtttttcccgctcagtcacgttgccttgcgatgtagaagaagatcaggtcgaagcaaattgtgaaaatggtgttctgacaatcacactaccgaagtgtgaatcaatgaagccacataaaattaatgtaaaacctgtcgcaaaataa

SEQ ID NO: 8535 - protein, 177 aa, Planctomyces maris DSM 8797
MATTVSSEKKKPEQSTKNEVKTRPLSRFSQDLSSFMGRAPFLSFRNEMDNLLNRFSDDFGNGWLTQGYTANLDLSETNNHIEIRMDVPGIQPEEIDVEVSGNLLRITGERKEEHEEKGKMFHRMERRTGSFSRSVTLPCDVEEDQVEANCENGVLTITLPKCESMKPHKINVKPVAK

SEQ ID NO: 8536 - DNA, 429 bp, Parabacteroides merdae ATCC 43184
  CDS (1)..(429): transl_table=11
atgacaccgatgagaagaagtcaaaattggttaccgtatgtattcaacgatttatttgacaacgactggatgattaaagcgaactctacagctcccgccatcaacgtgattgaatcggaaaaggactatcgggtagaagttgctgctcctggtatgacaaaagacgatttcaacatccgcatcgacgagaacgacaatctggtcgtatcgatggagaaaaaagaagaaaagaatgaagacaaaaaagaaggacgctatctgagacgcgaattctcctatagcaaattccagcagacaatggttcttcccgaaaacgcagagaaagaaaagatcgaagcaaaagtcgagaatggcgtgttgaacatcatcatcccgaaaatgagcgaggaagcagccaagaaagctgaaaagattatcgaaatcaaataa

SEQ ID NO: 8537 - protein, 142 aa, Parabacteroides merdae ATCC 43184
MTPMRRSQNWLPYVFNDLFDNDWMIKANSTAPAINVIESEKDYRVEVAAPGMTKDDFNIRIDENDNLVVSMEKKEEKNEDKKEGRYLRREFSYSKFQQTMVLPENAEKEKIEAKVENGVLNIIIPKMSEEAAKKAEKIIEIK

SEQ ID NO: 8538 - DNA, 429 bp, Bacteroides ovatus ATCC 8483
  CDS (1)..(429): transl_table=11
atgatgcctgttagaagaactcaaagttggttaccaagtatctttaatgatttctttgataacgattggatggtaaaagcaaatgctactgcacctgcaattaatgttttggaaacagaaaaagagtacaaagtggaattggctgctcctggtatgacgaaggatgatttcaatgttcgcattgatgaagacaacaacctcgttatcagcatggagaagaagactgaaaacaaggaggaaaagaaagacggtcgctatctgcgtcgcgaattctcatactctaagttccagcaaacaatgattctaccggacaatgtggacaaagaaaaaattgctgcatccgtagaacatggtgttttaaacatcgaacttccgaaactctctgaagaagaagtgaagaagcccaatcggcaaatcgaaataaagtaa

SEQ ID NO: 8539 - protein, 142 aa, Bacteroides ovatus ATCC 8483
MMPVRRTQSWLPSIFNDFFDNDWMVKANATAPAINVLETEKEYKVELAAPGMTKDDFNVRIDEDNNLVISMEKKTENKEEKKDGRYLRREFSYSKFQQTMILPDNVDKEKIAASVEHGVLNIELPKLSEEEVKKPNRQIEIK

SEQ ID NO: 8540 - DNA, 429 bp, Bacteroides uniformis ATCC 8492
  CDS (1)..(429): transl_table=11
atggtacctgtaaaaacaaactcaaactggttgccgagtatttttaacgatttcttcgagaatgagtggctggcaaaaacgggagttacggctcctgccatcaatgtcattgagaatgacaaggactacaaggttgaaatggcggctcccggaatgacaaaggatgatttcaaggtgaatgttgacgagaacaacaacctgacaatctgcatggaaaagaaagaagagaagaaggaggagaagaaagacaagaagtatctccgccgcgaattctcatattccaagttccagcagaccatcctgctgcctgaaaatgtggagaaggataagatctccgcaaaagtcgaacacgggattctgtccattgaaatcccgaaaatgaaggaggaagaaaaacaaaaaactttcaaggctatcgaggttaaataa

SEQ ID NO: 8541 - protein, 142 aa, Bacteroides uniformis ATCC 8492
MVPVKTNSNWLPSIFNDFFENEWLAKTGVTAPAINVIENDKDYKVEMAAPGMTKDDFKVNVDENNNLTICMEKKEEKKEEKKDKKYLRREFSYSKFQQTILLPENVEKDKISAKVEHGILSIEIPKMKEEEKQKTFKAIEVK

SEQ ID NO: 8542 - DNA, 444 bp, Bacteroides uniformis ATCC 8492
  CDS (1)..(444): transl_table=11
atgatgcctgtaagaagaaaccaaaattggttaccgagtatttttaatgatttctttgacaatgattggatggtaaaagcaaatgccaccgcccctgccatcaacgtattcgaaacagcaaaagagtacaaagttgaattggctgctcccggtatgacaaaagaagacttcaacgttcacatcgatgaagaaaacaatctggtcatcagcatggaaaagaaaacagaaagcaaggaagagaacaacaaggacgaaaagaaggaaggccgctacttgcgccgcgaattctcatacaccaagttccagcaaaccatgattcttccggacgatgtcgataaggaaaagattggcgcccatgtagaaaacggcgtgttgaacattacattgcctaagtttacagaagcagaaaaagaaaaggccaagaaattcatcgacgtaaaataa

SEQ ID NO: 8543 - protein, 147 aa, Bacteroides uniformis ATCC 8492
MMPVRRNQNWLPSIFNDFFDNDWMVKANATAPAINVFETAKEYKVELAAPGMTKEDFNVHIDEENNLVISMEKKTESKEENNKDEKKEGRYLRREFSYTKFQQTMILPDDVDKEKIGAHVENGVLNITLPKFTEAEKEKAKKFIDVK

SEQ ID NO: 8544 - DNA, 489 bp, Dehalococcoides sp. VS
  CDS (1)..(489): transl_table=11
atgactctggaaagatggcaacccggttggtcactccgtccctggcgtcctttccgagaagtactcagtccaggcctctggaatatgctgaccaatgagcgtgactggctgccggccactgaaatgttagagcttaaagacaaatatctaataaaagccgagatgcccggaataaatgaagaagatattgaagtctctgtatctgacaatgtcctcactataaaaggtgaaaaaaaatgcaccagcgaaatatcagaggaaaactattacttcagtgagagaagctatggcagtttctcacgctccatgactttacccaacaacaccagcctccagaatattgccgccactctggataacggcattctggaaatcagcatccccaaaatatccgaggccaaagccaaaaaggtttcggtaaccaaaactgccaaatccaaaaaagcggatataaataccaagcccgcaaaacctaaaacaaaatcctga

SEQ ID NO: 8545 - protein, 162 aa, Dehalococcoides sp. VS
MTLERWQPGWSLRPWRPFREVLSPGLWNMLTNERDWLPATEMLELKDKYLIKAEMPGINEEDIEVSVSDNVLTIKGEKKCTSEISEENYYFSERSYGSFSRSMTLPNNTSLQNIAATLDNGILEISIPKISEAKAKKVSVTKTAKSKKADINTKPAKPKTKS

SEQ ID NO: 8546 - DNA, 471 bp, Bacteroides stercoris ATCC 43183
  CDS (1)..(471): transl_table=11
ttgaatattttatttattaacaatttaaaaaaggaggtaaaaatggtacctgtaaaaacaaactcaaactggttgccgagtatttttaacgatttcttcgagaatgagtggctggcaaaaacgggagttacggctcctgccatcaatgtcattgagaatgacaaggactacaaggttgaaatggcggctcccggaatgacaaaggatgatttcaaggtgaatgttgacgagaacaacaacctgacaatctgcatggaaaagaaagaagagaagaaggaggagaagaaagacaagaagtatctccgccgcgaattctcatattccaagttccagcagaccatcctgctgcctgaaaatgtggagaaggataagatctccgcaaaagtcgaacacgggattctgtccattgaaatcccgaaaatgaaggaggaagaaaaacaaaaaacttccaaggctatcgaggttaaataa

SEQ ID NO: 8547 - protein, 156 aa, Bacteroides stercoris ATCC 43183
MNILFINNLKKEVKMVPVKTNSNWLPSIFNDFFENEWLAKTGVTAPAINVIENDKDYKVEMAAPGMTKDDFKVNVDENNNLTICMEKKEEKKEEKKDKKYLRREFSYSKFQQTILLPENVEKDKISAKVEHGILSIEIPKMKEEEKQKTSKAIEVK

SEQ ID NO: 8548 - DNA, 435 bp, Bacteroides stercoris ATCC 43183
  CDS (1)..(435): transl_table=11
atgattatgatgcctgtaagaagaactcagaattggttaccaagtatctttaacgatttctttgataacgattggatggtaaaagccaatgcaacggctcccgccatcaacgtatttgaaacagaaaaggaatacaaggtagagttggcagctcccggaatgaccaaagaagacttcaacgtccatatcgacgaagaaaacaacttggtcatcagcatggagaagaaaacggaaaacaaggaagagaagaaagaaggccgctatctgcgtcgcgaattctcatactccaaattccaacagacaatgatccttccggacgatgtagacaaagaaaagatttccgcacaagtagaaaacggcgtgttgaacatagacttgccgaagttttccgaacaggaaaaagaaaaggccaaaagattcattgacgtaaaataa

SEQ ID NO: 8549 - protein, 144 aa, Bacteroides stercoris ATCC 43183
MIMMPVRRTQNWLPSIFNDFFDNDWMVKANATAPAINVFETEKEYKVELAAPGMTKEDFNVHIDEENNLVISMEKKTENKEEKKEGRYLRREFSYSKFQQTMILPDDVDKEKISAQVENGVLNIDLPKFSEQEKEKAKRFIDVK

SEQ ID NO: 8550 - DNA, 471 bp, bacterium Ellin514
  CDS (1)..(471): transl_table=11
atgaataacttaacaagatggcagcggccggatctctcagcctggcccacgtttggcaaactgtttggtctgcgcaacgaattagaacgtttatttgacgtgccgttttcggaactcgcccaaggctccaaccttttaagcatttggaacccggccattgacgtttacgaagataaagacaacgtcaccgtcaaagccgagcttcccggaatgaaaaaggaggaaatcgaagtctccctgcacgatggcgccctcgtcatctcgggtgagcgcaagagtgaagagaaatttgaaaacgccgaaacttatcgcgctgaacgattcgtcggacgcttccatcgcaccgtgacactcccgtcctctgtcaaaggcgaccaggtcaaagcgcaatataaggatggcatcctgaccatcacacttccgaaagcggaggaagccaaaccaaagcaaatcgaagtcaacatcgcgtaa

SEQ ID NO: 8551 - protein, 156 aa, bacterium Ellin514
MNNLTRWQRPDLSAWPTFGKLFGLRNELERLFDVPFSELAQGSNLLSIWNPAIDVYEDKDNVTVKAELPGMKKEEIEVSLHDGALVISGERKSEEKFENAETYRAERFVGRFHRTVTLPSSVKGDQVKAQYKDGILTITLPKAEEAKPKQIEVNIA

SEQ ID NO: 8552 - DNA, 429 bp, Bacteroides intestinalis DSM 17393
  CDS (1)..(429): transl_table=11
atgatgcctgttagaagaactcaaaattggttaccaagtatcttcaatgatttctttgataacgaatggatggaaaaagccaatgcaaccgctccggctatcaacgtactggaaacggaaaaggagtacaaagtagaattggctgctccgggaatgaccaaagatgacttcaatgttcatatcgacgaagacaacaatctggttatcagcatggaaaagaagactgagaacaaggaggaaaagaaagacggtcgctatctgcgtcgtgaattctcatactctaagttccaacagaccatgatattgccggacaatgtggacaaggaaaagattgcagcacaagtagaaaatggcgtgctgaacatcaatctgccgaaattctcagccgaagaaaaacagaagaataagaaatccattgaagtgaaataa

SEQ ID NO: 8553 - protein, 142 aa, Bacteroides intestinalis DSM 17393
MMPVRRTQNWLPSIFNDFFDNEWMEKANATAPAINVLETEKEYKVELAAPGMTKDDFNVHIDEDNNLVISMEKKTENKEEKKDGRYLRREFSYSKFQQTMILPDNVDKEKIAAQVENGVLNINLPKFSAEEKQKNKKSIEVK

SEQ ID NO: 8554 - DNA, 429 bp, Bacteroides sp. 2_2_4
  CDS (1)..(429): transl_table=11
atggtacctgtaaaaacaaattcaaactggttgccgagtatttttaacgatttcttcgagaatgagtggctggcaaaaacgggagttacggctcctgccatcaatgtcattgagaatgacaaggactacaaggttgaaatggcggctcccggaatgacgaaggatgatttcaaggtgaatgttgacgaaaacaacaacctgacaatctgcatggaaaagaaagaagagaagaaggaggagaagaaagacaagaagtatctccgccgcgaattctcttattccaagttccagcagaccatcctgctacctgaaaacgtggagaaggataagatttccgcaaaagtcgaacacgggatcctgtccattgaaatcccgaaagtgaaggaggaagaaaaacaaaaaacttccaaggctatcgaggttaaataa

SEQ ID NO: 8555 - protein, 142 aa, Bacteroides sp. 2_2_4
MVPVKTNSNWLPSIFNDFFENEWLAKTGVTAPAINVIENDKDYKVEMAAPGMTKDDFKVNVDENNNLTICMEKKEEKKEEKKDKKYLRREFSYSKFQQTILLPENVEKDKISAKVEHGILSIEIPKVKEEEKQKTSKAIEVK

SEQ ID NO: 8556 - DNA, 450 bp, Oryza sativa subsp. indica
  CDS (1)..(450)
atgtcgctcgtgaggcgcagcaacgtgttcgaccccttcgccgacttctgggaccccttcgacggcgtcctccgctccctcgtcccggcgacctccgaccgcgacaccgccgctttcgccaacgcccgcgtcgactggaaggagacgccggagtcgcacgtcttcaaggccgacctccccggcgtgaagaaggaggaggtgaaggtggaggtggaggagggcaacgtgctggtgatcagcgggcagcgcagcaaggagaaggaggacaagaacgacaagtggcaccgcgtggagcgcagcagcgggcagttcatgcggcggttccggctgccggagaacgccaaggtggaccaggtgaaggccagcatggagaacggcgtgctcaccgtcaccgtgcccaaggctgaggtcaataagcccgaggtgaaggccattgagatctctggctga

SEQ ID NO: 8557 - protein, 149 aa, Oryza sativa subsp. indica
MSLVRRSNVFDPFADFWDPFDGVLRSLVPATSDRDTAAFANARVDWKETPESHVFKADLPGVKKEEVKVEVEEGNVLVISGQRSKEKEDKNDKWHRVERSSGQFMRRFRLPENAKVDQVKASMENGVLTVTVPKAEVNKPEVKAIEISG

SEQ ID NO: 8558 - DNA, 465 bp, Oryza sativa subsp. indica
  CDS (1)..(465)
atgtcgctgatccgccgcagcaacgtgttcgaccccttctccctcgacctctgggaccccttcgacggcttccccttcggctccggcagcggcagcctcttccctcgcgccaactccgacgcggcggccttcgccggcgcgcggatcgactggaaggagacgcccgaggcgcacgtgttcaaggcggacgtgccggggctgaagaaggaggaggtcaaggtggaggttgaggacggcaacgtcctccagatcagcggcgagcgcatcaaggagcaggaggagaagacggacaagtggcaccgcgtggagcgcagcagcggcaagttcctccgcaggttccggctgccggagaacaccaagccggagcagatcaaggcgtccatggagaacggcgtgctcaccgtcaccgtgcccaaggaggagcccaagaagcccgacgtcaagtccatccagatcaccggctag

SEQ ID NO: 8559 - protein, 154 aa, Oryza sativa subsp. indica
MSLIRRSNVFDPFSLDLWDPFDGFPFGSGSGSLFPRANSDAAAFAGARIDWKETPEAHVFKADVPGLKKEEVKVEVEDGNVLQISGERIKEQEEKTDKWHRVERSSGKFLRRFRLPENTKPEQIKASMENGVLTVTVPKEEPKKPDVKSIQITG

SEQ ID NO: 8560 - DNA, 483 bp, Oryza sativa subsp. indica
  CDS (1)..(483)
atgtcgctgatccgccgcagcaacgtgttcgaccccttctccctcgacccctgggaccccttcgacggcttccccttcggctccggcagaagcagcggcagcatcttcccgtccttcccccgcggcacctcctccgagaccgcggccttcgccggcgcgcgcatcgactggaaggagacgccggaggcgcacgtgttcaaggcggacgtgccggggctgaagaaggaggaggtcaaggtggaggtggaggacggcaacgtcctccagatcagcggcgagcgcagcaaggagcaggaggagaagacggacaagtggcaccgcgtggagcgcagcagcggcaagttcctccgcaggttccggctgccggagaacaccaagccggagcagatcaaggcgtccatggagaacggggtgctcaccgtcaccgtgcccaaggaggagcccaagaagcccgacgtcaagtccatccaggttaccggctag

SEQ ID NO: 8561 - protein, 160 aa, Oryza sativa subsp. indica
MSLIRRSNVFDPFSLDPWDPFDGFPFGSGRSSGSIFPSFPRGTSSETAAFAGARIDWKETPEAHVFKADVPGLKKEEVKVEVEDGNVLQISGERSKEQEEKTDKWHRVERSSGKFLRRFRLPENTKPEQIKASMENGVLTVTVPKEEPKKPDVKSIQVTG

SEQ ID NO: 8562 - DNA, 480 bp, Oryza sativa subsp. indica
  CDS (1)..(480)
atgtcgctgatccgccgcggcaacgcgttcgaccccttctccctcgacctctgggatcccttcgacggcttccccttcggctccggcggcagcagcagcagcagcggcagcctcttccctcgggccaactccgacgcggcggccttcgccggcgcgcgcatcgactggaaggagacgcccgaggtgcacgtgttcaaggcggacgtgccggggctgaagaaggaggaggtcaaggtggaggtggacgacggcaacatcctgcagatcagcggcgagcgcagcagggagcaggaggagaagtcggacaagtggcaccgcgtggagcgcagcagcggcaagttcctccgcaggttccgcctccccgagaacaccaagccggagcagatcaaggcgtccatggagaatggcgtgctcaccgtcaccgtgcccaaggaagagcccaagaagcccgacgtcaagtccatccagatctccggctag

SEQ ID NO: 8563 - protein, 159 aa, Oryza sativa subsp. indica
MSLIRRGNAFDPFSLDLWDPFDGFPFGSGGSSSSSGSLFPRANSDAAAFAGARIDWKETPEVHVFKADVPGLKKEEVKVEVDDGNILQISGERSREQEEKSDKWHRVERSSGKFLRRFRLPENTKPEQIKASMENGVLTVTVPKEEPKKPDVKSIQISG

SEQ ID NO: 8564 - DNA, 441 bp, Oryza sativa subsp. indica
  CDS (1)..(441)
atggcggacctcttcttcggtggccccttccggcgaatcctctacgggcggcccttcccgccggattgggcgtcggcgtcggcgacggcggcgatggactgggtcgagacgccgacctcccacgtgctcaggatcaacgtcccgggactgggcaaggacgacgtcaaggtgcaggtggaggacggcaacgtgctcaccgtgaggggcgcggcgccgcacgcggcggcggagaaggagagggagagggagaaggaggtggtgtggcacgtggcggagcgcgggcggccggagttcgcgagggaggtggcgctgccggcggaggtgagggtggagcagatcagggccagcgtcgacaacggcgtgctcaccgtcgtcgtgcccaaggagcccgcgccggcccggcccaggaccaggcccatcgccgtctccagcaagctctga

SEQ ID NO: 8565 - protein, 146 aa, Oryza sativa subsp. indica
MADLFFGGPFRRILYGRPFPPDWASASATAAMDWVETPTSHVLRINVPGLGKDDVKVQVEDGNVLTVRGAAPHAAAEKEREREKEVVWHVAERGRPEFAREVALPAEVRVEQIRASVDNGVLTVVVPKEPAPARPRTRPIAVSSKL

SEQ ID NO: 8566 - DNA, 486 bp, Oryza sativa subsp. japonica
  CDS (1)..(486)
atgtcgctgatccgccgcagcaacgtgttcgaccccttctccctcgacctctgggaccccttcgacggcttccccttcggctccggcagcagaagcagcggcagcatcttcccgtccttcccccgcggcacctcctccgagaccgcggccttcgccggcgcgcgcatcgactggaaggagacgccggaggcgcacgtgttcaaggcggacgtgccggggctgaagaaggaggaggtcaaggtggaggtggaggacggcaacgtcctccagatcagcggcgagcgcagcaaggagcaggaggagaagacggacaagtggcaccgcgtggagcgcagcagcggcaagtacctccgcaggttccggctgccggagaacaccaagccggagcagatcaaggcgtccatggagaacggcgtgctcaccgtcaccgtgcccaaggaggagcccaagaagcccgacgtcaagtccatccaggttaccggctag

SEQ ID NO: 8567 - protein, 161 aa, Oryza sativa subsp. japonica
MSLIRRSNVFDPFSLDLWDPFDGFPFGSGSRSSGSIFPSFPRGTSSETAAFAGARIDWKETPEAHVFKADVPGLKKEEVKVEVEDGNVLQISGERSKEQEEKTDKWHRVERSSGKYLRRFRLPENTKPEQIKASMENGVLTVTVPKEEPKKPDVKSIQVTG

SEQ ID NO: 8568 - DNA, 486 bp, Agave tequilana
  CDS (1)..(486)
atggctctgatccctcaaatctttgggcagaggaccaacgtcttcgaccctttctccctcgacatctgggatcccttccaaggctggcctttcgaccgctccatcaccggccagtctcggccgagcgatgctctgagcgagacctctgcgtttgccaacgcccgcatcgattggaaggagacccccgaggcccacgtcttcaaggccgacctcccggggctgaagaaggaagaggtgaaggtggaggttgaggaagggagagtgcttcagatcagcggagagcgcagtaaagagaaggaggagaagaatgaaaagtggcacagggtcgagaggagcagcggcaaattccttcgaaggttcaggttgcctgagaacgcgaaaatggagcaggtgaaggcgagcatggagaatggcgtgctgactgtgactgtgcccaaagaggaggtcaagaagcccgaggtgaagcctatcgagatctctggttaa

SEQ ID NO: 8569 - protein, 161 aa, Agave tequilana
MALIPQIFGQRTNVFDPFSLDIWDPFQGWPFDRSITGQSRPSDALSETSAFANARIDWKETPEAHVFKADLPGLKKEEVKVEVEEGRVLQISGERSKEKEEKNEKWHRVERSSGKFLRRFRLPENAKMEQVKASMENGVLTVTVPKEEVKKPEVKPIEISG

SEQ ID NO: 8570 - DNA, 486 bp, Agave tequilana
  CDS (1)..(486)
atggctctgattccacaaatttttgggcagaggaccaacgtcttcgaccccttctccctcgacacctgggatcccttccaaggctggcctttcgaccgctccatcaccggtcagtctcggccgagcggtgctctgagcgagacctctgcgtttgccaacacccgcattgattggaaggagacccccgaggcccacgtcttcaaggccgacctcccggggctgaagaaggaagaggtgaaggtggaggttgaggaagggagagtgcttcagatcagcggagagcgcagtaaggaggaggaggagaagaatgacaagtggcacagggtcgagaggagcagcggcaaattccttcgaaggttcaggctgcctgagaacgcgaagatggagcaggtgaaggcgagcatggagaatggcgtgctgactgtgactgtgcccaaaaaggaggtaaagaagactgaggtgaaggctatcgagatctctggctga

SEQ ID NO: 8571 - protein, 161 aa, Agave tequilana
MALIPQIFGQRTNVFDPFSLDTWDPFQGWPFDRSITGQSRPSGALSETSAFANTRIDWKETPEAHVFKADLPGLKKEEVKVEVEEGRVLQISGERSKEEEEKNDKWHRVERSSGKFLRRFRLPENAKMEQVKASMENGVLTVTVPKKEVKKTEVKAIEISG

SEQ ID NO: 8572 - DNA, 369 bp, Vitis vinifera
  CDS (1)..(369)
atgtcgggaaacactgttggcgagacctcggccttcgccaacacacgtgttgattggaaagagacactggtagctcatgttttcaaggcggatcttccaggattgaagaaggaggaagtgaaagttgaggttgaagagggaagagtccttcaaatcagcggagagaggagtaaggagcaagaggagaagaacgacaagtggcatcgcgtggagaggagtagcgggaagttcctttgcagattcaggttgccagaagatgcaaaaacggatgaggtcaaagctagcatggagaatggagtgctgactgtgacggttccgaaagaagaggtgaagaaggctgaggtgaaggccattgaaatatctggctaa

SEQ ID NO: 8573 - protein, 122 aa, Vitis vinifera
MSGNTVGETSAFANTRVDWKETLVAHVFKADLPGLKKEEVKVEVEEGRVLQISGERSKEQEEKNDKWHRVERSSGKFLCRFRLPEDAKTDEVKASMENGVLTVTVPKEEVKKAEVKAIEISG

SEQ ID NO: 8574 - DNA, 483 bp, Vitis vinifera
  CDS (1)..(483)
  misc_feature (9)..(9): w is a or t
  misc_feature (28)..(28): r is g or a
atggcactwatttcaagtgttcttggtrgtggccgacggagcaacatctttgatcccatctctctagatatctgggatcccttcgaaggctttccttttagcaccactcttgccaacgttcctaacaccgctcgcgaaacctctgccttcgtcaacacccgtattgattggaaagagactcccgaagctcatgttttcaaggcggatcttccagggttgaagaaggaggaagtgaaggttgaagttgaagagggcagagtacttaaaattagtggagagaggactaaagagcaggaggagaaaaatgataaatggcatcgggtggagaggagcagcggcaagttccttcgccggttcaggttgccggagaatgcaaagatggatgaagtcaaggctactatggagaacggtgtgctaactgtgagggttccaaaagaagaggtgaagaagccggaggtcaaggcgatcgagatatctggttaa

SEQ ID NO: 8575 - protein, 160 aa, Vitis vinifera
  misc_feature (10)..(10): The Xaa at location 10 stands for Gly, or Ser.
MALISSVLGXGRRSNIFDPISLDIWDPFEGFPFSTTLANVPNTARETSAFVNTRIDWKETPEAHVFKADLPGLKKEEVKVEVEEGRVLKISGERTKEQEEKNDKWHRVERSSGKFLRRFRLPENAKMDEVKATMENGVLTVRVPKEEVKKPEVKAIEISG

SEQ ID NO: 8576 - DNA, 483 bp, Vitis vinifera
  CDS (1)..(483)
atgtcgctcatttcaagtgttcttggtagtgaccgccgaagcaacatcttcgatcccttttctctagaaatctgggatccctttgaaggatttcccttcaccacccctctcgccaacgtccccccctcgactcgcgagacctctgccttcaccaacgcacgcattgactggaaagagactcctgaagctcacgtcttcaaggctgatcttccggggttgaagaaagaggaggtgaaggtcgaggttgaagagggcagagtgctgcagattagcggagaaaggagtaaggagcaagaggaaaagaaagacaagtggcatcgggtggagaggagcagcggcaagttccttcgtcggttcaggttgccggagaatgcaaagatggatgaagttaaagctagcctggagaatggtgtgctaaccgtgactgtcccaaaagaagaggtgaagaaggctgaggtgaaggccatcgagatatctggttaa

SEQ ID NO: 8577 - protein, 160 aa, Vitis vinifera
MSLISSVLGSDRRSNIFDPFSLEIWDPFEGFPFTTPLANVPPSTRETSAFTNARIDWKETPEAHVFKADLPGLKKEEVKVEVEEGRVLQISGERSKEQEEKKDKWHRVERSSGKFLRRFRLPENAKMDEVKASLENGVLTVTVPKEEVKKAEVKAIEISG

SEQ ID NO: 8578 - DNA, 480 bp, Vitis vinifera
  CDS (1)..(480)
atgtcgctaattcctcgccgatccaatgtttttgatccattctctctggacgtatgggatccatttgagggttggccattcaacagcaacttccgctctctctctgatcagatccgctccggtttccccgctgaaacgtcgtcctttgtccaggccagggtcgactggaaggaaaccccaaattctcacgtcttcaaggctgatgtgcctgggctgaagaaggaggagctgaaggtggaggttgaagacgggcgggttcttcagatcagcggacagagaaaccgcgaactggaggagaagacagacacttggcaccgtgtggagcgtagcagcggcagcttcttgaggaggttccggctgccggaggacgccaaggtggatcaggtgaaggcggccatggaggatggtgtgttgactgtgactgtgccaaaggaggcggccaagaagcccgatgtgaagtccattcaaatctctggctga

SEQ ID NO: 8579 - protein, 159 aa, Vitis vinifera
MSLIPRRSNVFDPFSLDVWDPFEGWPFNSNFRSLSDQIRSGFPAETSSFVQARVDWKETPNSHVFKADVPGLKKEELKVEVEDGRVLQISGQRNRELEEKTDTWHRVERSSGSFLRRFRLPEDAKVDQVKAAMEDGVLTVTVPKEAAKKPDVKSIQISG

SEQ ID NO: 8580 - DNA, 483 bp, Vitis vinifera
  CDS (1)..(483)
  misc_feature (72)..(72): m is a or c
  misc_feature (189)..(189): y is t or c
  misc_feature (287)..(287): m is a or c
  misc_feature (288)..(288): r is g or a
  misc_feature (289)..(289): r is g or a
  misc_feature (412)..(412): k is g or t
  misc_feature (476)..(476): w is a or t
atgtcgctcatttcaagtgttcttggtagtggccgccgaagcaacatcttcgatcccttttctctggacatmtgggatccctttgaaggatttcccttcaccacccctctcgccaacgtcccctcctcgactcgcgagacctctgccttcaccaacgcacgcattgactggaaagagactcctgaagcycacgtcttcaaggctgatcttccggggttgaagaaagaggaggtgaaggttgaggttgaagagggcagagtgctgcaaattagcggagaaaggagtamrragcaagaggaaaagaaagacaagtggcatcgggtggagaggagcagcggcaagttccttcgtcggttcaggttgccggagaatgcaaagatggatgaagttaaagctagcctggagaatggtktgctaaccgtgactgtcccaaaagaagaggtgaagaaggctgaggtgaaggccatcgagatctwtggctaa

SEQ ID NO: 8581 - protein, 160 aa, Vitis vinifera
  misc_feature (96)..(96): The Xaa at location 96 stands for Lys, or Thr.
  misc_feature (97)..(97): The Xaa at location 97 stands for Glu, or Lys.
  misc_feature (138)..(138): The Xaa at location 138 stands for Leu, or Val.
  misc_feature (159)..(159): The Xaa at location 159 stands for Phe, or Tyr.
MSLISSVLGSGRRSNIFDPFSLDIWDPFEGFPFTTPLANVPSSTRETSAFTNARIDWKETPEAHVFKADLPGLKKEEVKVEVEEGRVLQISGERSXXQEEKKDKWHRVERSSGKFLRRFRLPENAKMDEVKASLENGXLTVTVPKEEVKKAEVKAIEIXG

SEQ ID NO: 8582 - DNA, 483 bp, Vitis vinifera
  CDS (1)..(483)
  misc_feature (375)..(375): k is g or t
  misc_feature (393)..(393): r is g or a
  misc_feature (396)..(396): w is a or t
  misc_feature (427)..(427): r is g or a
atggcactcatttcaagtgttcttggtggtggccgacggagcaacatctttgatcccatctctctagatatctgggatcccttcgaaggctttccttttagcaccactcttgccaacgttcctaacagcgctcgcgaaacctctgccttcgtcaacacccgtattgattggaaagagactcccgaagctcatgttttcaaggcggatcttccagggttgaagaaggaggaagtgaaggttgaggtcgaagagggcagagtacttaaaattagtggagagaggactaaagagcaggaagagaaaaatgataaatggcatcgggtggagaggagcagcggcaagttccttcgccggttcaggttgccggagaatgckaagatggatcaagtcaargcwactatggagaacggtgtgctaactgtgaggrttccaaaagaagaggtgaagaagccggaggtgaaggcgatcgagatatctggttaa

SEQ ID NO: 8583 - protein, 160 aa, Vitis vinifera
  misc_feature (143)..(143): The Xaa at location 143 stands for Ile, or Val.
MALISSVLGGGRRSNIFDPISLDIWDPFEGFPFSTTLANVPNSARETSAFVNTRIDWKETPEAHVFKADLPGLKKEEVKVEVEEGRVLKISGERTKEQEEKNDKWHRVERSSGKFLRRFRLPENAKMDQVKATMENGVLTVRXPKEEVKKPEVKAIEISG

SEQ ID NO: 8584 - DNA, 483 bp, Vitis vinifera
  CDS (1)..(483)
  misc_feature (9)..(9): s is g or c
atggcactsatttcaagtgttcttggtggtggccgacggagcaacatctttgatcccatctctctagatatctgggatcccttcgaaggctttccttttagcaccactcttgccaacgttcctaacagcgctcgcgaaacctctgccttcgtcaacacccgtattgattggaaagagactcccgaagctcatgttttcaaggcggatcttccagggttgaagaaggaggaagtgaaggttgaggtcgaagagggcagagtacttaaaattagtggagagaggactaaagagcaggaagagaaaaatgataaatggcatcgggtggagaggagcagcggcaagttccttcgccggttcaggttgccggagaatgctaagatggatcaagtcaaggctactatggagaacggtgtgctaactgtgagggttccaaaagaagaggtgaagaagccggaggtgaaggcgatcgagatatctggttaa

SEQ ID NO: 8585 - protein, 160 aa, Vitis vinifera
MALISSVLGGGRRSNIFDPISLDIWDPFEGFPFSTTLANVPNSARETSAFVNTRIDWKETPEAHVFKADLPGLKKEEVKVEVEEGRVLKISGERTKEQEEKNDKWHRVERSSGKFLRRFRLPENAKMDQVKATMENGVLTVRVPKEEVKKPEVKAIEISG

SEQ ID NO: 8586 - DNA, 462 bp, Vitis vinifera
  CDS (1)..(462)
atgtcgctaattcctcgccgatccaatgtttttgatccattctctctggacgtatgggatccatttgacaacttccgctctctctctgatcagatccgctccggtttccccgctgaaacgtcgtcctttgtccaggccagggtcgactggaaggaaaccccaaattctcacgtcttcaaggctgatgtgcctgggctgaagaaggaggagctgaaggtggaggttgaagacgggcgggttcttcagatcagtggacagagaaaccgcgaactggaggagaagacagacacttggcaccgtgtggagcgtagcagcggcagcttcttgaggaggttccggctgccggaggacgccaaggtggatcaggtgaaggcggccatggaggatggtgtgttgactgtgactgtgccaaaggaggcggccaagaagcccgatgtgaagtccattcaaatctctggctga

SEQ ID NO: 8587 - protein, 153 aa, Vitis vinifera
MSLIPRRSNVFDPFSLDVWDPFDNFRSLSDQIRSGFPAETSSFVQARVDWKETPNSHVFKADVPGLKKEELKVEVEDGRVLQISGQRNRELEEKTDTWHRVERSSGSFLRRFRLPEDAKVDQVKAAMEDGVLTVTVPKEAAKKPDVKSIQISG

SEQ ID NO: 8588 - DNA, 435 bp, Vitis vinifera
  CDS (1)..(435)
atgtctctaattccaagcttcttcagcggtcgacggaacaacatgttcgacttgtgggatccgttccaagacttcccattcaccggcgaaacggcgtcgttcgcgaacactcgcattgattggaaggagaccccggaggcccacgtcttcaaggccgatcttcctggggtaaagaaagaggaagtgaaggtagaggttgaggaagggaggattttgcagatcagtggagataggagtgttgagaaggaggagaagaatgacaagtggcaccgagtggagcgcagcagcggccagttcatgaggcggttcaggttgccggagaatgtgaaggtggaggaggtgaaggctgccatggagaatggtgttcttactgttactgttcccaaggcagaggtcaagaaacccgatgtcaaggctatcgatatttctggttga

SEQ ID NO: 8589 - protein, 144 aa, Vitis vinifera
MSLIPSFFSGRRNNMFDLWDPFQDFPFTGETASFANTRIDWKETPEAHVFKADLPGVKKEEVKVEVEEGRILQISGDRSVEKEEKNDKWHRVERSSGQFMRRFRLPENVKVEEVKAAMENGVLTVTVPKAEVKKPDVKAIDISG

SEQ ID NO: 8590 - DNA, 405 bp, Vitis vinifera
  CDS (1)..(405)
atgtctgtgattccaagcttcttcagcgatccgttccaagacttcccattcaccagcgaaacggcgtcgttcgcgaacactcgcattgattggaaggagaccccggaggcccacgtcttcaaggccgatcttcctggggtaaagaaagaggaagtaaaggtggaggttgaggaagggaggattttgcagatcagtggagataggagtgttgagaaggaggagaagaatgacaagtggcaccgagtggagcgcagcagcggccagttcatgaggcggttcaggttgccggagaatgtgaaggtggaggaggtgaaggctgccatggagaatggtgttcttactgttactgttcccaaggcagaggtcaagaaacccgatgtcaaggctatcgatatttctggttga

SEQ ID NO: 8591 - protein, 134 aa, Vitis vinifera
MSVIPSFFSDPFQDFPFTSETASFANTRIDWKETPEAHVFKADLPGVKKEEVKVEVEEGRILQISGDRSVEKEEKNDKWHRVERSSGQFMRRFRLPENVKVEEVKAAMENGVLTVTVPKAEVKKPDVKAIDISG

SEQ ID NO: 8592 - DNA, 462 bp, Gossypium hirsutum
  CDS (1)..(462)
atgtctttgattccaagcttcttcggcaacagacgcagcaacaacgtgttcgacccattctctctcgacctctgggacccactcaaggacttccccgtctcaacacggtcaccggaaacctctgccttcgtcgacgctcggattgactggagggaaacgccggaagctcacgtgttcaaagccgatgtgccggggcttaagaaagaagaagtgaaagtacaggtagaagatgatagggtgttacagataagtggagaaaggaacgtggagaaagaagataagaacgatacgtggcaccgccttgaacggagcagcggcaagtttatgaggaggttcaggttgccggaaaatgttaagatgggtcaagttaaggcttcaatggaaaatggggtgctgaccgtgactgttccgaaaatggaagttaaaaagcctgatgtcaaggctattgacatttctggttaa

SEQ ID NO: 8593 - protein, 153 aa, Gossypium hirsutum
MSLIPSFFGNRRSNNVFDPFSLDLWDPLKDFPVSTRSPETSAFVDARIDWRETPEAHVFKADVPGLKKEEVKVQVEDDRVLQISGERNVEKEDKNDTWHRLERSSGKFMRRFRLPENVKMGQVKASMENGVLTVTVPKMEVKKPDVKAIDISG

SEQ ID NO: 8594 - DNA, 728 bp, Picea sitchensis
  CDS (101)..(556)
ggcattgcgatttgcagcgacaagaactcctcgtcttgaaaagattgaaaagaacgagcattcgcatttgtcttcatagtcgttgatattcattgtaagcatgtctctcattcctcgcttattcggcagccgatctagcgttttcgatccattctcactggatctatggaacccttatgaagttgggaattctccatttttgcgggatgatgcaacagctatagccaacactcatctcgactggaaggaaacttctgacgcgcacatcttcaaggctgatcttccaggtttgaggaaagaggaggtaaagatcgaggtggaagatgaccgagtcctaaagatcagcggtgaacgcaagaaagaagaagagcaaaagaatgacaagtggcaccgaattgagcgctcctacgggagatttcttcggcgtttccggctaccagaaaataccaaggtggaggaggtgaaggctacaatggaaaacggagtgctaactgtcacggtccctaagcagtctcagcctaagcctgaggttagagccattgaaatctctggttaattgaagggaaaatttttgtataagggttcctttttggggtttaaagggtttggtttttaaaatcatagtagtattgctgtaaaggtttgtagctattactgtatttccataaagcagaagtaattaaatagatgggcattttagccctatgattggaaaaaaaaaaaaaaaa

SEQ ID NO: 8595 - protein, 151 aa, Picea sitchensis
MSLIPRLFGSRSSVFDPFSLDLWNPYEVGNSPFLRDDATAIANTHLDWKETSDAHIFKADLPGLRKEEVKIEVEDDRVLKISGERKKEEEQKNDKWHRIERSYGRFLRRFRLPENTKVEEVKATMENGVLTVTVPKQSQPKPEVRAIEISG

SEQ ID NO: 8596 - DNA, 720 bp, Picea sitchensis
  CDS (92)..(547)
ggcattgcgatttgcagcgacaataactcctcgtcttgaaaagatcgagcattcgcatttgtcttcatagtcgttgatattcattgtaagcatgtctctcattcctcgcttattcggcagccgatctagcgtttttgatccattctcactggatctatggaacccttatgaagttgggaattctccatttttgcgggatgatgcaacagctatagccaacactcatctcgactggaaggaaacttctgacgcgcacatcttcaaggctgatcttccaggtttgaggaaagaggaggtaaagatcgaggtggaagatgaccgagtcctaaagatcagcggtgaacgcaagaaagaagaagagcaaaagaatgacaagtggcaccgaattgagcgctcctacgggaaatttcttcggcgtttccggctaccagaaaataccaaggtggaggaggtgaaggctacaatggaaaacggagtgctaactgtcacggtccctaagcagtctcagcctaagcctgaggttagagccattgaaatctctggttaattgaagggaaaatttttgtataagggttcctttttggggtttaaagggtttggtttttaaaatcatagtagtattgctgtaaaggtttgtagctattactgtatttccataaagcagaagtaattaaatagatgggcattttagccctatgattgttaaaaaaaaaaaaaaaa

SEQ ID NO: 8597 - protein, 151 aa, Picea sitchensis
MSLIPRLFGSRSSVFDPFSLDLWNPYEVGNSPFLRDDATAIANTHLDWKETSDAHIFKADLPGLRKEEVKIEVEDDRVLKISGERKKEEEQKNDKWHRIERSYGKFLRRFRLPENTKVEEVKATMENGVLTVTVPKQSQPKPEVRAIEISG

SEQ ID NO: 8598 - DNA, 716 bp, Picea sitchensis
  CDS (114)..(590)
ttctacagctataaatccgctcatatcgcacccacacatttcgacaagaagcactccaagtctcagaagatctagaattcacatttgcataagaattggtattgattgccagcatgtctctcgttcctcgtttctttggcagacgatccagcgttttcgatccgttttcactggatttatgggacccttttgaatctgggaattctccatttttgggggatataggaaatcttgcaaggaatgatgcaacggccatagccaacactcagatcgactggaaggaaacttctgacgcgcacatcttcaaggctgatcttccaggtctgaagaaagaggaggtaaagatagaggtggaagacgacagggttttacagattagtggtgaacgcaagaaagaagaagagaaaaagaacgataagtggcaccgtatcgagcgctctcacgggaaatttcttcgacgtttccggctaccggaaaatgcgaaggtggaggaggtgaaggctgcaatggaaaatggagtgctcaccgtgacggttcccaagcagcctcagcctaaagctgaggttagagccatcgaaatctctggttaactgaaaaaaaaatcagtgggtgttgtcctgcgatgttagcaagggtttggaagctgacaataaattgtattttcaaaaagatgacttaataaaatggacagatatattctaaaaaaaaaaaaaaaa

SEQ ID NO: 8599 - protein, 158 aa, Picea sitchensis
MSLVPRFFGRRSSVFDPFSLDLWDPFESGNSPFLGDIGNLARNDATAIANTQIDWKETSDAHIFKADLPGLKKEEVKIEVEDDRVLQISGERKKEEEKKNDKWHRIERSHGKFLRRFRLPENAKVEEVKAAMENGVLTVTVPKQPQPKAEVRAIEISG

SEQ ID NO: 8600 - DNA, 408 bp, Picea sitchensis
  CDS (1)..(408)
atggctccgtcttacatgagagatcctctattacacttcctgcctttcagattcagtacagatgactctgctactggtcaagtggattggttggaaacacccaatgcccacatcttcaaggtcaatgtacctgggatgaacaaagatgacataaagattcaggttgaagatggtcacattctccacattaaaggagaagggaagaaagaagaggataagacagaaggtatgtggcactgtatggaacgagggagaggcagcttctccaggcagtttggtttgccagaagatgtcaagatggatcacataaaggcccaggttgaaaatggggtgctgactatcattgctcccaaggattcaaatccaaaaactagagtgcaaaacattaatatttccagtaagctgtga

SEQ ID NO: 8601 - protein, 135 aa, Picea sitchensis
MAPSYMRDPLLHFLPFRFSTDDSATGQVDWLETPNAHIFKVNVPGMNKDDIKIQVEDGHILHIKGEGKKEEDKTEGMWHCMERGRGSFSRQFGLPEDVKMDHIKAQVENGVLTIIAPKDSNPKTRVQNINISSKL

SEQ ID NO: 8602 - DNA, 456 bp, Triticum turgidum subsp. dicoccoides
  CDS (1)..(456)
atgtcgatcgtgaggcggacgaacgtgttcgaccccttcgccgacctctgggctgaccccttcgacaccttccgctccatcgtcccggcgatctcaggcggcagcagcgagacggccgcgttcgccaacgcccgggtggactggaaggagacgcccgaggcgcacgtcttcaaggccgacctccccggcgtgaagaaggaggaggtcaaggtggaggtggaggacggcaacgtgctcgtcgtcagcggcgagcgcacaaaggaggaggaggacaagaacgacaagtggcaccgcgtggagcgcagcagcggcaagttcgtcaggcgcttccgcctccccgaggacgccaaggtggaggaggtgaaggccgggctggagaacggcgtgctcaccgtcaccgtgcccaaggcccaggtcaagaagcctgaggtgaaggccatccagatctccggctga

SEQ ID NO: 8603 - protein, 151 aa, Triticum turgidum subsp. dicoccoides
MSIVRRTNVFDPFADLWADPFDTFRSIVPAISGGSSETAAFANARVDWKETPEAHVFKADLPGVKKEEVKVEVEDGNVLVVSGERTKEEEDKNDKWHRVERSSGKFVRRFRLPEDAKVEEVKAGLENGVLTVTVPKAQVKKPEVKAIQISG

SEQ ID NO: 8604 - DNA, 760 bp, Malus domestica
  CDS (81)..(545)
aaagcaatctaagcaaaaatctcttgctcaaatccttcgaattcacacccagcaaaaacccaactcaaacccaccatctaatgactctcagtctctttggcggacgacgaagcaacgtcttcgaccccttctctctggacatctgggaccctttcgagggcttcggcgatctggccaacatcccctcctccgcccgtgaaaccaccgccatcgccaacacgcgcatcgactggaaggagaccccgaaggcccacatcttcaaggtggacctcccggggataaaaaaggaggaggtgaaagtggaggtggaggacgggagggtcctgcagatcagcggcgagaggagccgggagcaggaggagaaaaacgacaagtggcacagggtggagaggagcagtggcaagtttatgaggaggttcaggctgccggagaacgcgaagattgatcaggtgaaggcggcgatggagaatggggtgctgactgtgactgtgccgaaagaggaggagaagaagcctgaggtcaaggccattgacatctccggctaaactaaattcgcataacctcgatcggctacttttgagctctgttttggtgtggtgtttagttctgcttgtgtgtatttccgagtctctgtatgtgagatgagtgatatggtgtgtcaattgtcatgtacgggttcttgttctaaatattataataaatcttcataaaagttgagtacaaaaaaaaaaaaaaaaaaaaaaaaaaaaaaaaaaaaaaa

SEQ ID NO: 8605 - protein, 154 aa, Malus domestica
MTLSLFGGRRSNVFDPFSLDIWDPFEGFGDLANIPSSARETTAIANTRIDWKETPKAHIFKVDLPGIKKEEVKVEVEDGRVLQISGERSREQEEKNDKWHRVERSSGKFMRRFRLPENAKIDQVKAAMENGVLTVTVPKEEEKKPEVKAIDISG

SEQ ID NO: 8606 - DNA, 453 bp, Camellia sinensis
  CDS (1)..(453)
atgtcgatgatcccaagcttcttcggcaatcgacaaggcagcagcattttcgatcccttctctcttgaccccttcagaaactctcccttctccgaattttcccaggaaaattccgcaatcgccaacgctcgcgtggactggaaggaaactccggaagctcacttgtttaaggccgatctaccggggctgaagaaggaggaagtgaaggtggagatcgaggacgacagagttctgcagattagcggagagagaaaggtggagaaggaggagaagaacgatacttggcacagggttgagcgcagcagcgggaagttcatgaggaggttcatgctgctggaaaacgcgaggatggatcaagtgaaagcttccatggagaacggagttctgactgtcacgattccgaaggaggaagtgaagaagcctgaaatcaagtctattgatatctctggttag

SEQ ID NO: 8607 - protein, 150 aa, Camellia sinensis
MSMIPSFFGNRQGSSIFDPFSLDPFRNSPFSEFSQENSAIANARVDWKETPEAHLFKADLPGLKKEEVKVEIEDDRVLQISGERKVEKEEKNDTWHRVERSSGKFMRRFMLLENARMDQVKASMENGVLTVTIPKEEVKKPEIKSIDISG

SEQ ID NO: 8608 - DNA, 471 bp, Vigna unguiculata
  CDS (1)..(471)
atgtcgctcattccaagtttcttcggcacagggcgaaggaccaacgtcttcgaccccttctcccttgacgtgtgggacccattcgaaaccgcactctcctttccgcgctccgaggtctcgagcgagacggcggcgatcgccaacacgcgcatcgactggaaggagacgccggaggcgcacgtgttcaaagcggatctcccggggctgaagaaggaagaggtgaaggtggagatcgaggaggggagggtgcttcagatcagcggccagaggacgaaggagaaggaggacaagaacgacaagtggcaccgcgtggagcgtagcagcggcagcttcctccgccgcttccggctgccggagaacgccaaagtcaatgaggttaaggctgctatggagaacggagtgctcacagtcactgttcccaaggaggaagtgaagaagcccgatgtgaaacccgttcagatcactggctag

SEQ ID NO: 8609 - protein, 156 aa, Vigna unguiculata
MSLIPSFFGTGRRTNVFDPFSLDVWDPFETALSFPRSEVSSETAAIANTRIDWKETPEAHVFKADLPGLKKEEVKVEIEEGRVLQISGQRTKEKEDKNDKWHRVERSSGSFLRRFRLPENAKVNEVKAAMENGVLTVTVPKEEVKKPDVKPVQITG

SEQ ID NO: 8610 - DNA, 459 bp, Zea mays
  CDS (1)..(459)
atgtcgctcgtgaggcgcagcaacgtgttcgaccccttctccatggacctctgggaccccttcgacaccatgttccgctccatcgtcccgtcggcggtctccaccaactccgagaccgccgccttcgccagcgcccgcatcgactggaaggagacgcccgaggcgcacgtgttcaaggccgacctccccggcgtcaagaaggaggaggtcaaggtcgaggtcgaggacggcaacgtgctggtcatcagcggccagcgcagcagggagaaggaggacaaggacgacaagtggcaccgcgtcgagcgcagcagcggccagttcgtcaggcgcttccgtctgccggagaacgccaaggtggaccaggtcaaggctggcctcgagaatggcgtgctcacggtcaccgtgcccaaggcggaggagaagaagcctgaggtgaaggctattgagatctctggttga

SEQ ID NO: 8611 - protein, 152 aa, Zea mays
MSLVRRSNVFDPFSMDLWDPFDTMFRSIVPSAVSTNSETAAFASARIDWKETPEAHVFKADLPGVKKEEVKVEVEDGNVLVISGQRSREKEDKDDKWHRVERSSGQFVRRFRLPENAKVDQVKAGLENGVLTVTVPKAEEKKPEVKAIEISG

SEQ ID NO: 8612 - DNA, 450 bp, Zea mays
  CDS (1)..(450)
atgtcgccggcgagcagcagcaacccgctgtcgctggacttctgggcgtcgtccgccgacccgttcggcgtcgtccggccgctggcggagcagtgccccgtcctcaccaacgtgcgcgtcgactggaaggagacccccgaggcgcacgtgttcagggccgaccttccgggcgtcaggaaggaggctgccaaggtcgaggtggaggacggcaacgtgctcgtcatcagcggcgagcgcgccagggaggaggaggaggccggcaaggacgaggcgtggcgctggcgcctcgtcgagcgcagcagcggcaggttccagaggcggttccgcctgccgcgcggcgccaggctggaccaggttcacgcgtccatggagaacggcgtgctcaccgtcaccgtgcccaaggaggaggccaagaagccgcaggtcagggctgtcgagatctctggttga

SEQ ID NO: 8613 - protein, 149 aa, Zea mays
MSPASSSNPLSLDFWASSADPFGVVRPLAEQCPVLTNVRVDWKETPEAHVFRADLPGVRKEAAKVEVEDGNVLVISGERAREEEEAGKDEAWRWRLVERSSGRFQRRFRLPRGARLDQVHASMENGVLTVTVPKEEAKKPQVRAVEISG

SEQ ID NO: 8614 - DNA, 477 bp, Zea mays
  CDS (1)..(477)
atgtcgctgatccgccgcagcaacgtgttcgatcccttctccctcgacctctgggacccctttgagggcttccccttcggctccggcaacagcagcagtctcttcccctcgttcccgcggaccagctcggagaccgcggccttcgctggcgcgcggatcgactggaaggagactccagaggcgcacgtgttcaaggccgacgtaccggggctgaagaaggaggaggtcaaggtggaggtcgaggacggcaacgtccttcagatcagcggcgagcgcaacaaggagcaggaggagaagacggacacctggcaccgcgtggagcggagcagcgggaggttcctgcgcaggttccgactgcccgagaacgccaagacggagcagatcacggccgccatggagaacggcgtgcttacagtcactgtgccgaaggaggacgccaagaagcctgaagtgaagtccattcagatctccggctag

SEQ ID NO: 8615 - protein, 158 aa, Zea mays
MSLIRRSNVFDPFSLDLWDPFEGFPFGSGNSSSLFPSFPRTSSETAAFAGARIDWKETPEAHVFKADVPGLKKEEVKVEVEDGNVLQISGERNKEQEEKTDTWHRVERSSGRFLRRFRLPENAKTEQITAAMENGVLTVTVPKEDAKKPEVKSIQISG

SEQ ID NO: 8616 - DNA, 483 bp, Ricinus communis
  CDS (1)..(483)
atgtctctgactccattcttcagcagccgaagaaacaacatcttcgatccattctcacttgacatgtgggatccattcaaagacttccccttcccttctttcccctcatcatcatcatcatcgctgttccctgatggaaactctgcttatgttaacacacgcatagactggaaagaaaccccacagtctcacatctttaaggctgatcttcctggtcttaggaaagaagaagtcaaagttgagattgaggataacaatgttcttcaaatcagcggcgagaagcatgtggaaaaggaagacaagaatgacacttggcatcgtgttgaacgcagcagcggtaagttcttgaggaggtttaggctgcccgagaatgctaagatggatcaaattaaagcttctatggagaatggtgtccttactgttactgttccaaaagttgaggtcaagaaacctgaggttaagtctattgagatttctggttaa

SEQ ID NO: 8617 - protein, 160 aa, Ricinus communis
MSLTPFFSSRRNNIFDPFSLDMWDPFKDFPFPSFPSSSSSSLFPDGNSAYVNTRIDWKETPQSHIFKADLPGLRKEEVKVEIEDNNVLQISGEKHVEKEDKNDTWHRVERSSGKFLRRFRLPENAKMDQIKASMENGVLTVTVPKVEVKKPEVKSIEISG

SEQ ID NO: 8618 - DNA, 474 bp, Ricinus communis
  CDS (1)..(474)
atggcaatgattccaagctttttcgataacccacgaagcaacatcttcgatcccttctcttcttttgacttttgggatccattcaaagacttcccatttccatctccatcttcattagtctctcgtggaaattctgcgtttattaatactcggatagactggaaggagactccagaagcccatatcttcaaggctgatcttcctgggctgaaaaaagaggaagtgaaagtggaaattgaagatgacagagtccttcagatcagcggagaaaggaatgtggagaaggaagataagaatgatacctggcatcgtgtggaacgcagcagcggcaagttcttgaggaggtttaggctgccggagaatgccaaaatggatcaagttaaggcttctatggagaatggagttctcacagtgactgttcctaaggaggaaataaagaaacctgatatcaaagctgttgaaatctctggctga

SEQ ID NO: 8619 - protein, 157 aa, Ricinus communis
MAMIPSFFDNPRSNIFDPFSSFDFWDPFKDFPFPSPSSLVSRGNSAFINTRIDWKETPEAHIFKADLPGLKKEEVKVEIEDDRVLQISGERNVEKEDKNDTWHRVERSSGKFLRRFRLPENAKMDQVKASMENGVLTVTVPKEEIKKPDIKAVEISG

SEQ ID NO: 8620 - DNA, 477 bp, Ricinus communis
  CDS (1)..(477)
atggcaatgattccaagcttctttggtaacccaagaagcagcatcttcgatcccttctcctctttcgatctctgggatccattcaaagacttcccatttccttcttcatcttccctcgtctctcgtgagaattctgcatttgtgaatgcccgcatggactggaaggagactccagaagctcatgttttcaaggctgaccttccggggcttaaaaaggaggaagtgaaagtagaaatcgaagatgacagagttcttcaaatcagcggagaaaggaatgtggagaaggaagacaagaatgatacttggcatcgtgtggagcgcagcagaggcaagtttttgaggaggtttaggctaccggagaatgcgaagatggatcaaattaaagcttcaatggagaatggagtactcactgtcactgttccaaaagatcaggaaatgaagagacctgatgttaagggtattgagatttctggttga

SEQ ID NO: 8621 - protein, 158 aa, Ricinus communis
MAMIPSFFGNPRSSIFDPFSSFDLWDPFKDFPFPSSSSLVSRENSAFVNARMDWKETPEAHVFKADLPGLKKEEVKVEIEDDRVLQISGERNVEKEDKNDTWHRVERSRGKFLRRFRLPENAKMDQIKASMENGVLTVTVPKDQEMKRPDVKGIEISG

SEQ ID NO: 8622 - DNA, 462 bp, Ricinus communis
  CDS (1)..(462)
atggcaatgactccgagcttcttcggcaacccaagaagcagcaacttcgatcctttctcctctttcgacttctgggatccattcaaagactttccatcttcaattgtctctcgtcagaattctgcttttgttaacacgcgcatagactggaaggagactccagaggctcacatcttcaaggctgatcttcctgggcttaaaaaggaggaagtgaaagtagaaattgaagatgacagagttcttcaaatcagcggagagaggaatgtggagaaggaagacaagaatgacacctggcatcgtgtggaacgcagcagtggcaagttcatgagaaggtttaggctgccggagaatgcaaagatggatcaggttaaagcttctatggagaacggagttcttacagtgattgtccctaaagtggaagtcaagaaacctgaagttaaggctattgatatttctggttga

SEQ ID NO: 8623 - protein, 153 aa, Ricinus communis
MAMTPSFFGNPRSSNFDPFSSFDFWDPFKDFPSSIVSRQNSAFVNTRIDWKETPEAHIFKADLPGLKKEEVKVEIEDDRVLQISGERNVEKEDKNDTWHRVERSSGKFMRRFRLPENAKMDQVKASMENGVLTVIVPKVEVKKPEVKAIDISG

SEQ ID NO: 8624 - DNA, 474 bp, Ricinus communis
  CDS (1)..(474)
atggcaatgattccaagtttcttcagtaacccaagaagcaacatcttcgatcccttctcctctttcgacttgtgggatccattcaaagacttcccatttccatcttcactagtccctcgtgaaaattacgctttcgttaatgctcgcatagactggaaggagactccagaagctcacatagtcaaggctgatcttcccggtcttagaaaagaggaagtgagggtggaaattgaagatggcagagtccttcaaatcagcggagaaaggaatgtggagaaggaagataagaatgatacttggcatcgtgtggaacgcagcagtggcaagttcttgaggaggtttaggatgccggagaatgcaaagattgatcaagttaaagcttcaatggagaatggagttcttactgttactgttcccaaggaggaaatcaagaaacctgatgtcagaccgatcgaaatctccgggttgagttaa

SEQ ID NO: 8625 - protein, 157 aa, Ricinus communis
MAMIPSFFSNPRSNIFDPFSSFDLWDPFKDFPFPSSLVPRENYAFVNARIDWKETPEAHIVKADLPGLRKEEVRVEIEDGRVLQISGERNVEKEDKNDTWHRVERSSGKFLRRFRMPENAKIDQVKASMENGVLTVTVPKEEIKKPDVRPIEISGLS

SEQ ID NO: 8626 - DNA, 405 bp, Ricinus communis
  CDS (1)..(405)
atgtttaacgatgagattatttaccctttcctttcaatgctaaacaaatgtcccgtgcttaacactccaacagattggaaagaaactcctgagtcgcatgtattcgtatctgatcttcctggtttgaagaatgaagaagttaaagtggaaatagttgatgaaggaaaagggaaggttcttcaaataagtggagaaagggatgctgagaaagataatgagattagtgagaagtggcatcgtgctgaacgttgtcgtggtaagtttctaagaaggtttaggttacctgaaaatgccaagagtgatggagtgaaagcttcaatggagaatggggttcttgttgttactgttcctaagcaggagatcaagaaacctgaaaagagagtgattgaagttgagggaaattaa

SEQ ID NO: 8627 - protein, 134 aa, Ricinus communis
MFNDEIIYPFLSMLNKCPVLNTPTDWKETPESHVFVSDLPGLKNEEVKVEIVDEGKGKVLQISGERDAEKDNEISEKWHRAERCRGKFLRRFRLPENAKSDGVKASMENGVLVVTVPKQEIKKPEKRVIEVEGN

SEQ ID NO: 8628 - DNA, 453 bp, Ricinus communis
  CDS (1)..(453)
atgtctgtagggccgtggtttggttggggttcctctactgacctgtgggagccatttggcggtggatggggctgggtcgaccgtggcggccgtgaccgtgatgaaacaagtgctttggctcatgttaatgtcgactggcgtgagactgacaatgctcacatctttcgtgctgatcttcctggagtgaggaaagaggaggtgaaagtgcaggtagaagaagggaacgttctgcagattagtggggagaaagtgaaggaacaggaagagacgaatgacaagtggcaccgggtggagcggaggcgtggtacctttgtcaggcgattcaggcttccagagaatgctaataccgatgggatcaagtgcaccctggagaatggggtgttgaatgtgaccgtgccaaagaaacaaagccagcagaaccagcagaatgttagattcatagatatcgcttaa

SEQ ID NO: 8629 - protein, 150 aa, Ricinus communis
MSVGPWFGWGSSTDLWEPFGGGWGWVDRGGRDRDETSALAHVNVDWRETDNAHIFRADLPGVRKEEVKVQVEEGNVLQISGEKVKEQEETNDKWHRVERRRGTFVRRFRLPENANTDGIKCTLENGVLNVTVPKKQSQQNQQNVRFIDIA

SEQ ID NO: 8630 - DNA, 471 bp, Ricinus communis
  CDS (1)..(471)
atgtcacttattcctagcatctttggcagccgcagaacaaatgtgttcgacccattctctcttgatctttgggatccctttgacggcctcttcaactctgcaaacttacctgcatctgcccgagaaacttcagctctagctaatgcaagaattgactggaaagaaacaccggaagctcacattttcaaagcggatgtgcctggactcaagaaagaggaagtgaaagtagaggttgaagaaggcagaattcttcagataagtggagaaagaagcaaagagcaggaggagaagaacgacaaatggcaccgtgttgagaggagcagtggcaagtttttcaggaggtttaggttgcctgagaatgctaagatggaggaggttaaagctagcatggagaatggtgttcttactgtcactgttcctaaggaagaggagaagaagcctgaagtcaagtctgttcaaatctcaggctga

SEQ ID NO: 8631 - protein, 156 aa, Ricinus communis
MSLIPSIFGSRRTNVFDPFSLDLWDPFDGLFNSANLPASARETSALANARIDWKETPEAHIFKADVPGLKKEEVKVEVEEGRILQISGERSKEQEEKNDKWHRVERSSGKFFRRFRLPENAKMEEVKASMENGVLTVTVPKEEEKKPEVKSVQISG

SEQ ID NO: 8632 - DNA, 471 bp, Ricinus communis
  CDS (1)..(471)
atgtctctaattcctagcatctttggcagccgcagaacaaatgtggtcgatccattctctcttgatcgttgggatccctttgacagcctcttcaactccgcaaatttacctgcatcagcccgagaaacttcagctctagctaatgcaagaattgactggaaagaaacaccagaagctcacattttcaaagccgatgtgcctggactcaagaaagaggaagtgaaagttgagattgaagaaggcagaattcttcagataagtggagaaagaagcaaagagcaggaagagaagaacgacagatggcaccgtgttgagaggagcagcggcaagtttttgagaaggtttaggttgcctgagaatgctaagatggaagaggttaaagctagcatggagaatggtgttcttactgtcactgttcctaaggaaaaggagaagaagcctgaagtcaagtctgttcaaatttccggctaa

SEQ ID NO: 8633 - protein, 156 aa, Ricinus communis
MSLIPSIFGSRRTNVVDPFSLDRWDPFDSLFNSANLPASARETSALANARIDWKETPEAHIFKADVPGLKKEEVKVEIEEGRILQISGERSKEQEEKNDRWHRVERSSGKFLRRFRLPENAKMEEVKASMENGVLTVTVPKEKEKKPEVKSVQISG

SEQ ID NO: 8634 - DNA, 420 bp, Ricinus communis
  CDS (1)..(420)
atgtctttgatccgatcattgtttggcaacccaatgtcaactgacatctgggcaccatctgggccatcgagcaatgagatttcatcattggctaatgcacaagttgattggaaggagacaccagaagctcatattttcaaggcagatcttccaggactgaagaaagaagaagtgaaagttgagattgaagaaggaagggttcttcaaatgagtggagaaagaagtgttgagaaggaagagaagaacgacaagtggcacttagtagagagaggtagaggcaagttcatgaggagattccggttaccagagaatgctaaggttgatgcagtgaaggcatcaatggagaatggtgtacttactgttactattccaaaggctgaggagaagaaacctgaagtcaagtccattcagatcaattga

SEQ ID NO: 8635 - protein, 139 aa, Ricinus communis
MSLIRSLFGNPMSTDIWAPSGPSSNEISSLANAQVDWKETPEAHIFKADLPGLKKEEVKVEIEEGRVLQMSGERSVEKEEKNDKWHLVERGRGKFMRRFRLPENAKVDAVKASMENGVLTVTIPKAEEKKPEVKSIQIN

SEQ ID NO: 8636 - DNA, 468 bp, Desulfonatronospira thiodismutans ASO3-1
  CDS (1)..(468): transl_table=11
atgatggaacgtttactgccaaccagaagaacaaatgcacctgaaagaagaactgccatgagaacgcccatggacatgttcgagatgtttgaagatatgtggagaagccctttccgggggatcgaggaactggatcagcagtttaccccggcaatagaggtaagcgaaaaggagaacgagatagttgtccgggctgaagtccccggtatgagccctgaggatatggatatcagggtggaaaacaatcatttgatcctgagtggcgagaaaaagcacgagcataaagacgagaaggaaaatcagatacacagggagtttacttatggtcggttctaccgcaccatcccgctcaggggagaagttgatccaggaaatgtaaaggccaaatacaaggatggcgtattgactgtaaatgtacccatgaaccccgaaagcaccagggccaagaagatagccatagagagctaa

SEQ ID NO: 8637 - protein, 155 aa, Desulfonatronospira thiodismutans ASO3-1
MMERLLPTRRTNAPERRTAMRTPMDMFEMFEDMWRSPFRGIEELDQQFTPAIEVSEKENEIVVRAEVPGMSPEDMDIRVENNHLILSGEKKHEHKDEKENQIHREFTYGRFYRTIPLRGEVDPGNVKAKYKDGVLTVNVPMNPESTRAKKIAIES

SEQ ID NO: 8638 - DNA, 857 bp, Zea mays
  CDS (87)..(563)
ccgaagctcaatcaattcactcaaacctcttccccaaatcttcgattagattctcgttgacaagaagactagaaccgaacctgaccatgtcgctgatccgccgcagcaacgagttcgatcccttctccctcgacctctgggacccctttgagggcttccccttcggctccggcaacagcagcagtctcttcccctcgttcccgcggaccagctcggagaccgcggccttcgctggcgcgcggatcgactggaaggagactccagaggcgcacgtgttcaaggccgacgtaccggggctgaagaaggaggaggtcaaggtggaggtcgaggacggcaacgtccttcagatcagcggcgagcgcaacaaggagcaggaggagaagacggacacctggcaccgcgtggagcggagcagcgggaggttcctgcgcaggttccgactgcccgagaacgccaagacggagcagatcacggccgccatggagaacggcgtgcttacagtcactgtgccgaaggaggacgccaagaagcctgaagtgaagtccattcagatctccggctagacctcggtctgcggtcgtcgtacctgcgtggtttgaggaacggcagttcgcctcggtcgttctgtgaaataaaattgggttacaagaattatggcgtttgtcaatatggtcgtaatgtcgtaggatggtggaatgtggtcacaaactttgcgtatgttgggtctacttgtggtgtctgaatctatgtatggatgtcatgagtttgtctactagagttctagttcctgtggtgttcgtatgatgtatatcatgagttaactctatctaaaatttcttcattatggtatttttaag

SEQ ID NO: 8639 - protein, 158 aa, Zea mays
MSLIRRSNEFDPFSLDLWDPFEGFPFGSGNSSSLFPSFPRTSSETAAFAGARIDWKETPEAHVFKADVPGLKKEEVKVEVEDGNVLQISGERNKEQEEKTDTWHRVERSSGRFLRRFRLPENAKTEQITAAMENGVLTVTVPKEDAKKPEVKSIQISG

SEQ ID NO: 8640 - DNA, 471 bp, Fragaria ananassa
  CDS (1)..(471)
atggctctaagtctctttggcaatagccgacgcagcaacgtcttcgatcccttttccctcgacacctgggaccctttccagggatttggccctctcatgaactcctcctccaccgccggcgacacctcagccttcgcgcagactcgaatcgactggaaggagactccggaggctcatgtcttcaaggcggacctgcccggactgaagaaggaagaagtgaaggttgagctggaggaagggaatgtccttcagatcagcggagagaggagcaaggagcaggaggagaagaacgacaagtggcacagggtggagaggagcagtggcaagttcgtgaggaggttcaggctgccggacaatgcaaaggtggatcaggttaaggctgctatggagaatggggtgcttactgtgactgtgcccaaagcaccggagccgaagccccaggttaagagcatcgacatctctggagcctaa

SEQ ID NO: 8641 - protein, 156 aa, Fragaria ananassa
MALSLFGNSRRSNVFDPFSLDTWDPFQGFGPLMNSSSTAGDTSAFAQTRIDWKETPEAHVFKADLPGLKKEEVKVELEEGNVLQISGERSKEQEEKNDKWHRVERSSGKFVRRFRLPDNAKVDQVKAAMENGVLTVTVPKAPEPKPQVKSIDISGA

SEQ ID NO: 8642 - DNA, 453 bp, Streptococcus thermophilus
  CDS (1)..(453): transl_table=11
atgctaaataagattcaacatcgtaacttaaacacatatagtgtgacacctttagatttttatagtgtgacacctttaaatttttttgaagactttagtcgtagtttattcaatgattttaagccccatttcattaaaacagatattcatgaaactgataatgaatatcttgtagaagctgaactccctggtattcctaaagaagacattcaagttacttacgaaaacggagtattaacaattagtggccaacaacaaattgatgcagtaaacgaagataaaaaaggaaacttgattcgtagcgaacgtaatttaacaagtgtccgacgtcaatatttattagaaaatgttaaagaagacgaaataaaggcttcttattcagatggagttcttaaagtaaccttgccaaaagatagtaacaaagaaataaaaaaatctatttcaattgagtag

SEQ ID NO: 8643 - protein, 150 aa, Streptococcus thermophilus
MLNKIQHRNLNTYSVTPLDFYSVTPLNFFEDFSRSLFNDFKPHFIKTDIHETDNEYLVEAELPGIPKEDIQVTYENGVLTISGQQQIDAVNEDKKGNLIRSERNLTSVRRQYLLENVKEDEIKASYSDGVLKVTLPKDSNKEIKKSISIE

SEQ ID NO: 8644 - DNA, 429 bp, Streptococcus thermophilus
  CDS (1)..(429): transl_table=11
atgctaaataagattcaacatcgtaacttaaacacatatagtgtgacaccttttgatttttttgaagaatttagtcgtaatttattcaatgattttaagcccaatttcattaaaacagatattcatgaaactgataatgaatatcttgtagaagctgaactccctggtattcctaaagaagacattcaagttacttacgaaaacggagtattaacaattagtggccaacaacaaattgatgcagtaaacgaagataaaaaaggaaagttgattcgtagcgaacgtagtttaacaagtgtccaacgtcaatatttattagaaaatgttaaagaagacgaaataaaggcttcttattcagatggagttcttaaagtaaccttgccaaaagatagtaacaaagaaataaaaaaatctatttcaattgaatag

SEQ ID NO: 8645 - protein, 142 aa, Streptococcus thermophilus
MLNKIQHRNLNTYSVTPFDFFEEFSRNLFNDFKPNFIKTDIHETDNEYLVEAELPGIPKEDIQVTYENGVLTISGQQQIDAVNEDKKGKLIRSERSLTSVQRQYLLENVKEDEIKASYSDGVLKVTLPKDSNKEIKKSISIE

SEQ ID NO: 8646 - DNA, 465 bp, Solanum peruvianum
  CDS (1)..(465)
atgtctctgatcccaagaatcttcggcgaccgacgaagcagtagcatgttcgatccattttcaattgacgtatttgatccatttagggaattaggctttccaggtaccaattcacgggagacctctgcatttgctaacactcgaatcgattggaaggaaactccagaagctcatgtgttcaaagccgatcttccagggcttaagaaggaggaagtgaaagtggagatcgaagaagatagggttcttcagatcagcggagagaggaacgtggagaaagaagataagaacgatacttggcatcgtgtggaacgcagcagtggaaaattcatgaggagatttagacttccggagaacgcaaagatggatcaagttaaggcttctatggagaatggagtgctgactgtcactgttccaaaggaagaagtgaagaaacctgatgtcaagtctattgaaatctctggttaa

SEQ ID NO: 8647 - protein, 154 aa, Solanum peruvianum
MSLIPRIFGDRRSSSMFDPFSIDVFDPFRELGFPGTNSRETSAFANTRIDWKETPEAHVFKADLPGLKKEEVKVEIEEDRVLQISGERNVEKEDKNDTWHRVERSSGKFMRRFRLPENAKMDQVKASMENGVLTVTVPKEEVKKPDVKSIEISG

SEQ ID NO: 8648 - DNA, 474 bp, Cuscuta japonica
  CDS (1)..(474)
atgtctctaattccgagtttcttcgagggtcgccggagcaacgcctttgatccgttctccctggagttatgggatccgtttttctcaaacacggtggctaatttatccggtagctcctccgcacgagaggcgtctgccttcgccaacgctcggattgactggaaggaaacgccggaggctcacattttcaaggccgacgttcccgggctgaagaaggaggaggtgaaggttgaggttgaggaaggcaaggtgctgcagattagcggggagaggagcaaagagaaggaggagaagaacgacacctggcaccgtgtggagaggagcagcggcaagtttttgcggagtttcaggttgccggagaatgctaaggttgatcaggtaaaggctgctatggagaacggcgtgctcacggtcactgtgccaaaggtggaagagaagaaggcggaggtgaaaagtattcagatctccggttaa

SEQ ID NO: 8649 - protein, 157 aa, Cuscuta japonica
MSLIPSFFEGRRSNAFDPFSLELWDPFFSNTVANLSGSSSAREASAFANARIDWKETPEAHIFKADVPGLKKEEVKVEVEEGKVLQISGERSKEKEEKNDTWHRVERSSGKFLRSFRLPENAKVDQVKAAMENGVLTVTVPKVEEKKAEVKSIQISG

SEQ ID NO: 8650 - DNA, 429 bp, Streptococcus thermophilus
  CDS (1)..(429): transl_table=11
atgctaaataagattcaacatcgtaacttaaacacatatagtgtgacaccttttgatttttttgaagaatttagtcgtaatttattcaatgattttaagccaaatttcatcaaaacagatattcatgaaactgataatgaatatcttgtagaagctgaactccctggtattcctaaagaaaatattcaagttacttacgaaaacggagtattaacaattagtggccaacaacaaattgattcagtaaacgaagataaaaaaggaaagttgattcgtagtgaacgtagtttaacaagtgtccaacgtcaatatttattagaaaatgttaaagaagacgaaataaaggcttcttattcagatggagttcttaaagtaaccttgccaaaagatagtaacaaagaaaaaaaaaaatctatttcaattgaatag

SEQ ID NO: 8651 - protein, 142 aa, Streptococcus thermophilus
MLNKIQHRNLNTYSVTPFDFFEEFSRNLFNDFKPNFIKTDIHETDNEYLVEAELPGIPKENIQVTYENGVLTISGQQQIDSVNEDKKGKLIRSERSLTSVQRQYLLENVKEDEIKASYSDGVLKVTLPKDSNKEKKKSISIE

SEQ ID NO: 8652 - DNA, 492 bp, Helianthus annuus
  CDS (1)..(492)
atgtcgatcattccaaatttcttcggccgcagacgaacaaactgcttcgaccccttctctctagacgtgtgggacccattcgaaggcttccctttcaacaacaacaacttcggatccttatccgaccaagtccgatcatcatccgaaacatcgtcgttcgtgaacgctaatgttgactggagagagactaatgatgcgcatgtgtttaaggcggatgtacccggactgaagaaggaggaagtgaaggtagaggtggaggacgatcgagtgttgcagatcagtggagagaggaataaggagagtgaagagaaaggggacacgtggcaccgtgtggagaggagtagtgggaagtttgtgaggaggtttaggttgccagagaatgcgaaggtggatcaggtgaaggctgcgatggagaacggtgtgttgacggttactgtgccgaaagttgaagtgaagaagcctgatgtgaagtccattcagatttctggttag

SEQ ID NO: 8653 - protein, 163 aa, Helianthus annuus
MSIIPNFFGRRRTNCFDPFSLDVWDPFEGFPFNNNNFGSLSDQVRSSSETSSFVNANVDWRETNDAHVFKADVPGLKKEEVKVEVEDDRVLQISGERNKESEEKGDTWHRVERSSGKFVRRFRLPENAKVDQVKAAMENGVLTVTVPKVEVKKPDVKSIQISG

SEQ ID NO: 8654 - DNA, 471 bp, Helianthus annuus
  CDS (1)..(471)
atgtcgatcattccaagcttctttaccggtaacggaagcaacatattcgacccattctccagcgaaatctgggaccccttccagggcctctcaagtgtcatcaacaacctccctgaatcatctcgtgaaacaacagccatagccaataccagaatcgactggaaggagacaccagaggctcacgtgttcaaggcggacctgccaggtctgaagaaggaggaggtgaaggtggaggttgaagaaggtagagtgttgcagataagcggagagaggagcagagaaaatgtagagaagaatgacaagtggcataggatggagaggagctctgggaagtttttgaggcggtttaggttgccggagaatgcgaaaatggatcaggtgaaggcggcgatggagaacggtgtgctgacggtcaccgtgccgaaggcggaagtgaaaaagcccgaggtgaaggctattgatatttcttga

SEQ ID NO: 8655 - protein, 156 aa, Helianthus annuus
MSIIPSFFTGNGSNIFDPFSSEIWDPFQGLSSVINNLPESSRETTAIANTRIDWKETPEAHVFKADLPGLKKEEVKVEVEEGRVLQISGERSRENVEKNDKWHRMERSSGKFLRRFRLPENAKMDQVKAAMENGVLTVTVPKAEVKKPEVKAIDIS

SEQ ID NO: 8656 - DNA, 480 bp, Nicotiana tabacum
  CDS (1)..(480)
atggctatgattccaagtttctttggtggtagaaggagcaatattttcgacccgttttcacttgatatatttgatccgtttgagggctttccattttcaggcactgttgctaacgttccatcttctgctcgtgaaacttctgcttttgcaaatgcaagaattgattggaaagaaaccccagattcccatatcttcaaaatggatgttccagggattaagaaagaggaagtgaaagttgaagtagaagaaggaagagtattacagataagtggagaaaggagcagagagcaagaggagaagaacgacacgtggcatcgtatggaaagaagcagtggcaagtttatgagaaggtttaggctgccaggaaatgccaaaatggaggaaattaaagctgctatggaaaatggagtactcactgtaactgtaccaaaagaagaagagaagaaatctgaagtgaaagctattgacatctctggttaa

SEQ ID NO: 8657 - protein, 159 aa, Nicotiana tabacum
MAMIPSFFGGRRSNIFDPFSLDIFDPFEGFPFSGTVANVPSSARETSAFANARIDWKETPDSHIFKMDVPGIKKEEVKVEVEEGRVLQISGERSREQEEKNDTWHRMERSSGKFMRRFRLPGNAKMEEIKAAMENGVLTVTVPKEEEKKSEVKAIDISG

SEQ ID NO: 8658 - DNA, 376 bp, Nicotiana tabacum
  CDS (2)..(376)
attgggctttccaggttccaattcaggggagacttctgctttcgcgaacactcgagtcgattggaaggaaactccggaggctcatgtgttcaaggccgatctccctgggcttaagaaggaggaagtgaaagtggagatcgaggatgatagggttcttcagattagcggagataggaacgtagagaaagaagacaagaatgatacttggcaccgtgtggaacgcagcagcggcaaattcatgaggaggttcagacttccggagaatgcgaaaatggatcaagttaaggcggcgatggagaatggagtgctcactgttactgttccgaaagaagaggtgaagaagcctgatgtcaagtccattgagatcaccggttag

SEQ ID NO: 8659 - protein, 124 aa, Nicotiana tabacum
LGFPGSNSGETSAFANTRVDWKETPEAHVFKADLPGLKKEEVKVEIEDDRVLQISGDRNVEKEDKNDTWHRVERSSGKFMRRFRLPENAKMDQVKAAMENGVLTVTVPKEEVKKPDVKSIEITG

SEQ ID NO: 8660 - DNA, 480 bp, Capsicum frutescens
  CDS (1)..(480)
atgtctatgattccaagcttcttcggtggtcgcaggagcaacatcttcgacccagtctccctcgacctatgggatccgttcgagggcttcccaatttcaagcacaatcgccaacaccccctcctctgctcgtgaaacctctgctttcccaaatgcaagaatcgattggaaagagaccccacaagcgcacatcttcaaagtagacgttccggggatcaagagagaggaagtgaaagtccaagttgaagaaggaaggatactacagataaccggtgagaggagcagagagcaagaggagaagaatgatcagtggcaccgtatggagaggagcagtggcaagtttttgaggagatttaggctgccggagaatacgaagatgggggaaattaaagcagctatggagaatggagtgctcactgtaactgttcctaaagaagaggagaagagatctgaggtgaaggcaattgatatctctggttaa

SEQ ID NO: 8661 - protein, 159 aa, Capsicum frutescens
MSMIPSFFGGRRSNIFDPVSLDLWDPFEGFPISSTIANTPSSARETSAFPNARIDWKETPQAHIFKVDVPGIKREEVKVQVEEGRILQITGERSREQEEKNDQWHRMERSSGKFLRRFRLPENTKMGEIKAAMENGVLTVTVPKEEEKRSEVKAIDISG

SEQ ID NO: 8662 - DNA, 471 bp, Ananas comosus
  CDS (1)..(471)
atgtctctggttcggcgaagcaacatcttcgatcccttctccctcgacctgtgggagcccttcgagggcttccccttcggcggcgccctctcgttcccgcgcccctcggcgtccttccccgcggagacagcgtcgttcgcgggcgcccgcatagattggaaggagacgccggaggcgcacgtgttcaaggcggatctgccgggggtgaagaaggaggaggtgaaggtggaggtggaggagggcaacgtcctgcagatcagcggcgagcgcaccagggagaaggaggagaagaacgacacctggcaccgcgtggagcgcagcagcggcaagttcctacgcaggttccgcctccccgacaacgccaaggtcgatcaggtcaaggccgccatggagaacggcgtgctcaccgtcaccgtccccaaggaggacgtcaagaagccccaggtcaagtccgtccagatctccggctga

SEQ ID NO: 8663 - protein, 156 aa, Ananas comosus
MSLVRRSNIFDPFSLDLWEPFEGFPFGGALSFPRPSASFPAETASFAGARIDWKETPEAHVFKADLPGVKKEEVKVEVEEGNVLQISGERTREKEEKNDTWHRVERSSGKFLRRFRLPDNAKVDQVKAAMENGVLTVTVPKEDVKKPQVKSVQISG

SEQ ID NO: 8664 - DNA, 468 bp, Arabidopsis thaliana
  CDS (1)..(468)
atgtcgctgattccaagcttcttcggcaacaacaggcgaatcaacaacaacatattcgatccattctcactcgacgtatgggatccattcaaggaacttcaattcccgtcaccgtcttcgtcggcgatagcaaacgcacgtgtggattggaaagagacggcggaggcgcacgtgttcaaggcggatttaccggggatgaagaaagaagaggttaaagtagagattgaggatgatagtgtgcttaagatcagcggagagagacacgttgagaaagaggagaagcaggacacgtggcatcgtgtagagagatcgagtgggggattctcgaggaagtttaggttaccggagaatgtgaagatggatcaagttaaagcttcaatggagaatggtgttttgactgtgactgtgcctaaagtggagactaataagaagaaggctcaagttaagtctattgatatctctggctaa

SEQ ID NO: 8665 - protein, 155 aa, Arabidopsis thaliana
MSLIPSFFGNNRRINNNIFDPFSLDVWDPFKELQFPSPSSSAIANARVDWKETAEAHVFKADLPGMKKEEVKVEIEDDSVLKISGERHVEKEEKQDTWHRVERSSGGFSRKFRLPENVKMDQVKASMENGVLTVTVPKVETNKKKAQVKSIDISG

SEQ ID NO: 8666 - DNA, 468 bp, Helianthus annuus
  CDS (1)..(468)
atgtcgatcatcccaagcttgttcgctggccgaaggagcagcgtctttgacccattttccctcgacgtttgggacccattcagagacttccccatttcgtcttcctctgatgtttcaagggaaacttctgcgttggtaaacgcccgtgtggattggaaggaaacgccagaagctcatgtgttcaaggccgatcttcctgggatcaagaaagaagaagtgaaggtggaggtggaagacggaaacatattacagatcaccggtgagaggaatgtggagaaagaagataagaatgataagtggcatcgggttgaacgaagcagtggcaaattcacaaggaggttcaggttgccggagaatgctaaaatggatcaggtgaaagcggccatggaaaacggggtgcttacaattacggtgcccaaagaagaagtgaagaaacccgatgtcaagtctattgaaatctccggttaa

SEQ ID NO: 8667 - protein, 155 aa, Helianthus annuus
MSIIPSLFAGRRSSVFDPFSLDVWDPFRDFPISSSSDVSRETSALVNARVDWKETPEAHVFKADLPGIKKEEVKVEVEDGNILQITGERNVEKEDKNDKWHRVERSSGKFTRRFRLPENAKMDQVKAAMENGVLTITVPKEEVKKPDVKSIEISG

SEQ ID NO: 8668 - DNA, 468 bp, Helianthus annuus
  CDS (1)..(468)
atgtcgatcgtcccaagcttattcggtagccgacgcagcagcatcttcgacccattttccctatacgtttgggacccattcagagacttccctatttcaacttcatctgaagtttcaagggaaacttctgctttggtaaacgcccgtgtggattggaaggaaacgccagaagctcatgtgttcaaggccgatcttcctgggatcaagaaagaagaagtgaaggtggaggtggaagacggaaacatcttacaaatcaccggtgagaggaacgtggagaaagaagataagaatgataagtggcatcgggttgaaagaagcagcggaaaattcacaaggaggttcaggttgccggagaatgctaaaatggatcaggtgaaggcggctatggaaaacggagtgcttacaattacggtgcctaaagaagaagcaaagaaacctgacgtcaagtctattgaaatctccggttaa

SEQ ID NO: 8669 - protein, 155 aa, Helianthus annuus
MSIVPSLFGSRRSSIFDPFSLYVWDPFRDFPISTSSEVSRETSALVNARVDWKETPEAHVFKADLPGIKKEEVKVEVEDGNILQITGERNVEKEDKNDKWHRVERSSGKFTRRFRLPENAKMDQVKAAMENGVLTITVPKEEAKKPDVKSIEISG

SEQ ID NO: 8670 - DNA, 477 bp, Retama raetam
  CDS (1)..(477)
atgtctctaattcctagcgtttttggcactggacgaaggaccaacgtgttcgacccattctccctcgacatatgggacccattccaagacttcccattgcgcaccattgctccctccggcttcgacaccgagacagccgccgtggcaaacacccgaattgactggaaagagacaccggaggcgcacgtgttcaaggcagacctaccagggctgaagaaggaagaggtgaaggtggaagtggaggaaggtcgtgttctgcagataagtggtgagaggactaaggagaaggaagacaagaacgacacgtggcatcgcgtggagtgcagcgctggccgattcctccgccgtttcaggctgccggagaatgccaaggtggaacaagtgaaggctagcttggagaacggtgtgctcactgttactgtccctaaggaagaggttaagaagcctgatgtcaagcctgttcagatcactggctga

SEQ ID NO: 8671 - protein, 158 aa, Retama raetam
MSLIPSVFGTGRRTNVFDPFSLDIWDPFQDFPLRTIAPSGFDTETAAVANTRIDWKETPEAHVFKADLPGLKKEEVKVEVEEGRVLQISGERTKEKEDKNDTWHRVECSAGRFLRRFRLPENAKVEQVKASLENGVLTVTVPKEEVKKPDVKPVQITG

SEQ ID NO: 8672 - DNA, 453 bp, Hordeum vulgare
  CDS (1)..(453)
atgtcgatcgtgaggcgtagcaacgcgttcgaccccttcgccgacctctgggctgacccgttcgacaccttccgctccatcgtcccggcgttctctggcaacagcgagacggccgccttcgccaatgctcgcgtcgactggaaggagaccccggaggcgcacgtcttcaaggccgaccttcccggcgtgaagaaggaggaggtcaaggtggaggtggaggacggcaacgtgctcgttgtcagcggcgagcgcactaaggagaaggaggacaagaacgacaagtggcaccgcgtggagcgtagcagcggcaagttcgtgaggcgcttccgcctgccggaggacgccaaggtggaggaggtgaaggccggactggagaacggtgtgctcaccgtcaccgtgcccaagacagaggtcaagaagcccgaggtgaaggccatcgagatctccggctga

SEQ ID NO: 8673 - protein, 150 aa, Hordeum vulgare
MSIVRRSNAFDPFADLWADPFDTFRSIVPAFSGNSETAAFANARVDWKETPEAHVFKADLPGVKKEEVKVEVEDGNVLVVSGERTKEKEDKNDKWHRVERSSGKFVRRFRLPEDAKVEEVKAGLENGVLTVTVPKTEVKKPEVKAIEISG

SEQ ID NO: 8674 - DNA, 483 bp, Malus domestica
  CDS (1)..(483)
atgtcgttaattcccaactcccgacgaggaagcagcagcgttttcgacccattctccctcaatctgtgggaccctttcaaggatttcccgttcccttcctcctcatcactctccgcatttcctgaattttctcgggagaattcggcttttgtgaacactagggtcgactggaaggagacccccgaagcccatgtgttcaaggcggacgttccggggctgaaaaaagaggaggtgaaggtggaggtggaagacgacagggtgcttaagatcagcggagagaggaacgtggaggaggaggataaaaacgacaagtggtacagagtggagaggagcagcggcaagttcttgaggaggtttcagcttccggagaacgcaaaggttgatcagattaaggctgccatggagaatggagttctaagtgtcactgttccgaaggcggagttgaagaacgttgacgtcagagccattgaaatttcgggttga

SEQ ID NO: 8675 - protein, 160 aa, Malus domestica
MSLIPNSRRGSSSVFDPFSLNLWDPFKDFPFPSSSSLSAFPEFSRENSAFVNTRVDWKETPEAHVFKADVPGLKKEEVKVEVEDDRVLKISGERNVEEEDKNDKWYRVERSSGKFLRRFQLPENAKVDQIKAAMENGVLSVTVPKAELKNVDVRAIEISG

SEQ ID NO: 8676 - DNA, 429 bp, Streptococcus thermophilus
  CDS (1)..(429): transl_table=11
atgctaaataagattcaacatcgtaacttaaacacatatagtgtgacaccttttgatttttttgaagaatttagtcgtaatttattcaatgattttaagccaaatttcatcaaaacagatattcatgaaactgataatgaatatcttgtagaagctgaactccctggtattcctaaagaaaacattcaagttacttacgaaaacggagtattaacaattagtggccaacgccaaattgatgcagtaaacgaagataaaaaaggaaagttgattcgtagtgaacgtagtttaacaagtgtccaacgtcaatatttattagaaaatgttaaagaagacgaaataaaggcttcttattcagatggagttcttaaagtaaccttgccaaaagatagtaacaaagaaataaaaaaatctatttcaattgagtag

SEQ ID NO: 8677 - protein, 142 aa, Streptococcus thermophilus
MLNKIQHRNLNTYSVTPFDFFEEFSRNLFNDFKPNFIKTDIHETDNEYLVEAELPGIPKENIQVTYENGVLTISGQRQIDAVNEDKKGKLIRSERSLTSVQRQYLLENVKEDEIKASYSDGVLKVTLPKDSNKEIKKSISIE

SEQ ID NO: 8678 - DNA, 474 bp, Helianthus annuus
  CDS (1)..(474)
atgtcgatcgtctcaagcttgttcggtggccgaaggagcagcgtcttcgaccccttttccctagacgtttgggacccattcagagacttccccatttcgtcttcctctgatgtttcaagggaaacttctgcgttggtaaacgcccgtgtggattggaaggaaacgccagaagctcatgtgttcaaggcggatcttccagggatcaaaaaggaagaagtgaaggtggaggtagaagacggaaacatcttaaaaatcaccggtgagaggaacatcgagaaagaagataagaatgacaaatggcatcgggttgaacgaagcagtggcaaattcacaaggaggttcaggttgccggagaatgctaaaatggatcaggtgaaagcggccatggaaaacggggtgcttacaattacggtgcccaaagaagaagtgaagaaacccgatgtcaagtctattggagatctctggttagaataa

SEQ ID NO: 8679 - protein, 157 aa, Helianthus annuus
MSIVSSLFGGRRSSVFDPFSLDVWDPFRDFPISSSSDVSRETSALVNARVDWKETPEAHVFKADLPGIKKEEVKVEVEDGNILKITGERNIEKEDKNDKWHRVERSSGKFTRRFRLPENAKMDQVKAAMENGVLTITVPKEEVKKPDVKSIGDLWLE

SEQ ID NO: 8680 - DNA, 480 bp, Nicotiana tabacum
  CDS (1)..(480)
atgtctctgattccaagcttctttgatggccgcaggagcaacatcttcgatccattctccctcaacatatgggatcctttcgagggcttccctttctccggcacggtcgccaacattccaacctctactcgtgaaaccgctgctttctcgagtgctcgaattgattggaaagagaccccagaatcccatgtctttaaggtggatcttcctggaattaagaaagaggaggtgaaggtggaggtagaagaaggaagagttctacaaattagtggcgagagaagcagagagcaagaggagaagaacgataaatggcacagcatggagaggagcagcggaaagttccttaggaggtttaggttgccggagaatatcaaaatggaagagattaaggcaactatggagaatggggtgctcactgtgactgtcccaaaaatggaggaaaagaaacctgaggtgaaggccattgacatctctggttaa

SEQ ID NO: 8681 - protein, 159 aa, Nicotiana tabacum
MSLIPSFFDGRRSNIFDPFSLNIWDPFEGFPFSGTVANIPTSTRETAAFSSARIDWKETPESHVFKVDLPGIKKEEVKVEVEEGRVLQISGERSREQEEKNDKWHSMERSSGKFLRRFRLPENIKMEEIKATMENGVLTVTVPKMEEKKPEVKAIDISG

SEQ ID NO: 8682 - DNA, 465 bp, Solanum lycopersicum
  CDS (1)..(465)
atgtctctgatcccaagaattttcggcgatcgacgaagcagcagcatgttcgatccattttcaattgacgtatttgatccattcagggaattaggcttcccaagtaccaattcaggggagagctctgcatttgccaacacacgaatagactggaaggaaactccagaagctcatgtgttcaaggttgatcttccagggcttaagaaggaggaagtcaaagtggaagtcgaggaggatagggttcttcagatcagcggagagaggaacgtggagaaggaagataagaatgataagtggcatcgcatggagcgaagcagcgggaaattcatgaggagatttagacttccggagaatgcaaagatggatcaagttaaggcgtctatggagaatggagtgcttactgttactgttccaaaggaagaggtgaagaagcctgaggtcaagtccattgagatctctggttaa

SEQ ID NO: 8683 - protein, 154 aa, Solanum lycopersicum
MSLIPRIFGDRRSSSMFDPFSIDVFDPFRELGFPSTNSGESSAFANTRIDWKETPEAHVFKVDLPGLKKEEVKVEVEEDRVLQISGERNVEKEDKNDKWHRMERSSGKFMRRFRLPENAKMDQVKASMENGVLTVTVPKEEVKKPEVKSIEISG

SEQ ID NO: 8684 - DNA, 465 bp, Solanum lycopersicum
  CDS (1)..(465)
atgtctctgatcccaagaattttcggcgatcgacgaagcagcagcatgttcgatccattttcaatcgacgtatttgatccattcagggaattaggcttcccaggtaccaattcaggggagagctctgcatttgccaacacacgaatagactggaaggaaactccagaagctcatgtgttcaaggctgatcttccagggcttaagaaggaggaagtcaaagtggaagtcgaggaggatagggttcttcagatcagcggagagaggaacgtggagaaggaagataagaatgacaagtggcatcgcgtggagcgaagcagcgggaaattcatgaggagatttagacttccggagaatgcaaagatggatcaagttaaggcttcaatggagaacggagtgcttactgttactgttccaaaagaagaggtgaagaagcctgaggtcaagtccattgagatctctggttaa

SEQ ID NO: 8685 - protein, 154 aa, Solanum lycopersicum
MSLIPRIFGDRRSSSMFDPFSIDVFDPFRELGFPGTNSGESSAFANTRIDWKETPEAHVFKADLPGLKKEEVKVEVEEDRVLQISGERNVEKEDKNDKWHRVERSSGKFMRRFRLPENAKMDQVKASMENGVLTVTVPKEEVKKPEVKSIEISG

SEQ ID NO: 8686 - DNA, 465 bp, Quercus suber
  CDS (1)..(465)
atggcgctcagtcttttcggtggccgaagaagcaacgtgttcgaccctttctcactggacatctgggacccatttgagggcttcagtgctgtagccagcgttcctccctcggctcgtgaaaccacagcttttgctacagcacgcattgattggaaggaaaccccagaggcacatattttcaaggctgatcttccaggtctgaagaaggaggaagtgaaagttgaggttgaggatggtaatgtgttgcaaataagtggggagaggagcaaagagcacgaggaaaagaatgataagtggcacagggttgagaggagctgtggcaagtttatgaggaggtttaggttgccagagaatgcgaaggtggatcaggtgaaggctaatatggagaatggagtgctcactgtgatggtgcctaaggaagagcagaagaagcctgcggtcaaggccatcgagatctctggctaa

SEQ ID NO: 8687 - protein, 154 aa, Quercus suber
MALSLFGGRRSNVFDPFSLDIWDPFEGFSAVASVPPSARETTAFATARIDWKETPEAHIFKADLPGLKKEEVKVEVEDGNVLQISGERSKEHEEKNDKWHRVERSCGKFMRRFRLPENAKVDQVKANMENGVLTVMVPKEEQKKPAVKAIEISG

SEQ ID NO: 8688 - DNA, 465 bp, Castanea sativa
  CDS (1)..(465)
atggcgctcagtcttttcggtggccgaagaagcaacgtgttcgaccctttctcactggacatatgggacccatttgagggcttcagtgctgtagccaacgttcctccctcggctcgtgaaaccacagcttttgctacagcacgcattgattggaaggaaaccccagaggcacacattttcaaggctgatcttccgggtctgaagaaggaggaagtgaaagttgaggttgaggatgggaatgtgttgcaaataagcggggagaggagcaaagagcatgaggaaaagaatgataagtggcacagggttgagaggagctgtggcaagtttcttaggaggtttaggttgccagagaatgcgaaggtggagcaggtgaaggccaatatggagaatggagtgctcactgtgattgtgcctaaggaggagcagaaaaagactgaggtcaagtccatcgagatctctggttaa

SEQ ID NO: 8689 - protein, 154 aa, Castanea sativa
MALSLFGGRRSNVFDPFSLDIWDPFEGFSAVANVPPSARETTAFATARIDWKETPEAHIFKADLPGLKKEEVKVEVEDGNVLQISGERSKEHEEKNDKWHRVERSCGKFLRRFRLPENAKVEQVKANMENGVLTVIVPKEEQKKTEVKSIEISG

SEQ ID NO: 8690 - DNA, 462 bp, Funaria hygrometrica
  CDS (1)..(462)
atggctctgtcgctgttcggcggtcgtggcagcagcatcctggatcctttcgagttcggcagcgtgtgggatcctttctcggtactggagaatgggccgtctcggcgatttgcgagcgacgcgcacgccgtggcaaacacgcggatcgactggcgtgaaacaccggaggcgcacgtcttcaaagccgacctgcctgggctgaagaaggaggaggtgaaggtgcaagtggtggaggggaggacgctggagatcagcggcgagaggaagaaagaggaggtgcagaagggcgatacatggcatcgggtggagcgcgcgcagggcagtttcatgcgacggttccggctgccggagggcacgaacgtggatgaagtgaaggcgcaggtgcaggacggggtcctgacggtgacaattcccaagcttcagaaaccgaagccacaagtgcggcagatagagatcgcgtga

SEQ ID NO: 8691 - protein, 153 aa, Funaria hygrometrica
MALSLFGGRGSSILDPFEFGSVWDPFSVLENGPSRRFASDAHAVANTRIDWRETPEAHVFKADLPGLKKEEVKVQVVEGRTLEISGERKKEEVQKGDTWHRVERAQGSFMRRFRLPEGTNVDEVKAQVQDGVLTVTIPKLQKPKPQVRQIEIA

SEQ ID NO: 8692 - DNA, 429 bp, Streptococcus thermophilus
  CDS (1)..(429): transl_table=11
atgttaaataagattcaacaacgtaactcagacatatatagtatgacaccttttaatttttttgaagactttagacgtaatttattcaacgatttaaagtccaatttaatcaaaacagatattcatgaaactgataatgaatatgttgtagaagctgaacttcctggtattcctaaagaagacattcaagttaattatgaaaacggagtattaacaattagtggccaacgccaaattgatgcagcaatcgaagatgaaaaaggaaaattgattcatagcgaacgtagtttaacaagtgtccgacgtcaatatttattagaaaatgttaaagaagacgaaataaaggcttcttattcagatggaattcttaaagtaaccttaccaaaagatagtaacaaagaaataaaaacatctattccaattgagtag

SEQ ID NO: 8693 - protein, 142 aa, Streptococcus thermophilus
MLNKIQQRNSDIYSMTPFNFFEDFRRNLFNDLKSNLIKTDIHETDNEYVVEAELPGIPKEDIQVNYENGVLTISGQRQIDAAIEDEKGKLIHSERSLTSVRRQYLLENVKEDEIKASYSDGILKVTLPKDSNKEIKTSIPIE

SEQ ID NO: 8694 - DNA, 474 bp, Daucus carota
  CDS (1)..(474)
atgtcgatcattccaagcttttttggaggccggagaagcaacgtgttcgacccattctctcttgatgtatgggatcctttcaaagattttcctcttgttacctcctctgcctctgagttcggaaaagagactgcagcgtttgtcaatacgcacattgactggaaggagactccccaggctcatgtgttcaaggccgatcttccagggctgaagaaagaagaggtgaaggtagagcttgaagaaggaaaggttcttcagatcagcggagagcggaacaaagagaaggaggagaagaacgacaagtggcaccgcgtggaacgtagcagtggcaagtttctaaggaggttcaggcttccagagaatgcaaaggtggatgaggtgaaagctgctatggcgaatggggtggttactgttactgttccaaaggtggagatcaagaagccggaggtcaaggccattgatatttctggttaa

SEQ ID NO: 8695 - protein, 157 aa, Daucus carota
MSIIPSFFGGRRSNVFDPFSLDVWDPFKDFPLVTSSASEFGKETAAFVNTHIDWKETPQAHVFKADLPGLKKEEVKVELEEGKVLQISGERNKEKEEKNDKWHRVERSSGKFLRRFRLPENAKVDEVKAAMANGVVTVTVPKVEIKKPEVKAIDISG

SEQ ID NO: 8696 - DNA, 465 bp, Solanum lycopersicum
  CDS (1)..(465)
atgtctctgatcccaagaattttcggcgatcgacgaagcagcagcatgttcgatccattttcaattgacgtatttgatccattcagggaattaggcttcccaagtaccaattcaggggagagctctgcatttgccaacacacgaatagactggaaggaaactccagaacctcatgtgttcaaggttgatcttccagggcttaagaaggaggaagtcaaagtggaagtcgaggaggatagggttcttcagatcagcggagagaggaacgtggagaaggaagataagaatgataagtggcatcgcatggagcgaagcagcgggaaattcatgaggagatttagacttccggagaatgcaaagatggatcaagttaaggcgtctatggagaatggagtgcttactgttactgttccaaaggaagaggtgaagaagcctgaggtcaagtccattgagatctctggttaa

SEQ ID NO: 8697 - protein, 154 aa, Solanum lycopersicum
MSLIPRIFGDRRSSSMFDPFSIDVFDPFRELGFPSTNSGESSAFANTRIDWKETPEPHVFKVDLPGLKKEEVKVEVEEDRVLQISGERNVEKEDKNDKWHRMERSSGKFMRRFRLPENAKMDQVKASMENGVLTVTVPKEEVKKPEVKSIEISG

SEQ ID NO: 8698 - DNA, 480 bp, Daucus carota
  CDS (1)..(480)
atgtcgatcattccgagcttttttggcagccgaagaagcaacgttttaaacccgttctctctcgacatctgggatcctttccaggactaccctctcatcacctcctcaggtacttcctctgagttcggaaaagagactgcagcgtttgccaatacgcacattgactggaaggagactccccaggctcatgtgttcaaggctgatcttccgggcttaaagaaagaagaggtgaaggtagaggttgaagaaggaaaggttcttcagatcagcggagagcggaacaaagaaaaggaggagaagaacaacaagtggcaccgtgtggaattcagcagtggcaagtttctgaggaggttcaggcttccagagaatgcaaatgtggatgaggtgaaagctggaatggagaatggagtgttaactgttactgttccaaaggtggagatgaagaagcccgaggtcaagtccattcatatatctggctaa

SEQ ID NO: 8699 - protein, 159 aa, Daucus carota
MSIIPSFFGSRRSNVLNPFSLDIWDPFQDYPLITSSGTSSEFGKETAAFANTHIDWKETPQAHVFKADLPGLKKEEVKVEVEEGKVLQISGERNKEKEEKNNKWHRVEFSSGKFLRRFRLPENANVDEVKAGMENGVLTVTVPKVEMKKPEVKSIHISG

SEQ ID NO: 8700 - DNA, 486 bp, Glycine max
  CDS (1)..(486)
atgtctctaatcccaaacttcttcggtggccggagaaacaatgtgttcgatcctttctcactggacgtgtgggatcccttcaaggattttcctttcccaaatacgctttcttcagcttccttccctgaattttctcgggaaaattcagcatttgtgagcacccgtgtggactggaaggagaccccagaggcgcacgtgttcaaggcagatattccaggactgaagaaggaggaagtgaaggtgcagattgaagacgataaggttcttcagataagcggagagaggaacgttgagaaggaagataagaacgacacgtggcatcgagtggagcgtagcagtggcaagttcatgagaaggttcagattgccggagaacgctaaagtggagcaagtgaaggcttctatggaaaatggggttcttactgtcactgttcccaaggaagaggttaagaagcctgatgttaaggccatagaaatctctggttaa

SEQ ID NO: 8701 - protein, 161 aa, Glycine max
MSLIPNFFGGRRNNVFDPFSLDVWDPFKDFPFPNTLSSASFPEFSRENSAFVSTRVDWKETPEAHVFKADIPGLKKEEVKVQIEDDKVLQISGERNVEKEDKNDTWHRVERSSGKFMRRFRLPENAKVEQVKASMENGVLTVTVPKEEVKKPDVKAIEISG

SEQ ID NO: 8702 - DNA, 462 bp, Brassica napus
  CDS (1)..(462)
atgtcgttgattccaagcttcttcggtaacaacaggcgtggcagcaacagcttcttcgatcctttctccctcgacgtttgggatccactcagggagttctcttccctttcccgagacaactccgcgatcgtgaacgcgcgtgtggactggagggagacgcccgaggcgcacgtgttcaaggcggacttgcctggactcaaaaaggaggaagtgaaggtggagatcgaggaagacagcgtgctgaagatcagtggagagagacacgtggagaaggaggataagaacgacacgtggcaccgtgtggagagatcgagcgggcagttcacgaggaagtttaggcttcctgagaacgtgaagatggatcaggtgaaggctgcgatggagaatggtgtgctgactgtgacggtgcctaaggcggagaccaagaaggctgatgtcaagtctatccagatctctggctga

SEQ ID NO: 8703 - protein, 153 aa, Brassica napus
MSLIPSFFGNNRRGSNSFFDPFSLDVWDPLREFSSLSRDNSAIVNARVDWRETPEAHVFKADLPGLKKEEVKVEIEEDSVLKISGERHVEKEDKNDTWHRVERSSGQFTRKFRLPENVKMDQVKAAMENGVLTVTVPKAETKKADVKSIQISG

SEQ ID NO: 8704 - DNA, 471 bp, Brassica napus
  CDS (1)..(471)
atgtcgatgattccgagcttcttcggcaacaacaggcgcggcggcagcagcttcttcgatcctttttctcttgatgtttgggatccgttcaaggactttccatcatcttcttcgttttcacgggagaactccgcgattgtgaacgcgcgtgtggactggagggagactcctgacgcgcacgtgttcaaggcggatttgcctgggatgaagaaggaggaagtgaaggtggagatcgaggatgacagcgtgttgaagatcagtggggagaggcacgtggagaaggaggataagaacgatacgtggcaccgcgtggagaggtcgagcgggcagttcacgaggaagtttaggcttccggagaatgtgaagatggatcaggtgaaggctgcgatggagaacggggttctgactgtgactgtgccgaaggcggagatgaagaaacctgatgtcaaatctattcagatctctggctga

SEQ ID NO: 8705 - protein, 156 aa, Brassica napus
MSMIPSFFGNNRRGGSSFFDPFSLDVWDPFKDFPSSSSFSRENSAIVNARVDWRETPDAHVFKADLPGMKKEEVKVEIEDDSVLKISGERHVEKEDKNDTWHRVERSSGQFTRKFRLPENVKMDQVKAAMENGVLTVTVPKAEMKKPDVKSIQISG

SEQ ID NO: 8706 - DNA, 471 bp, Brassica napus
  CDS (1)..(471)
atgtcgatgattccgagcttcttcggcaacaacaggcgcggcggcagcagcttcttcgatcctttttctcttgacgtttgggatccgttcaaggactttccatcatcctcttcgttttcgcgggagaactccgcgattgtgaacgcgcgtgtggactggagggagactcctgaggcgcacgtgttcaaggccgatttgccgggactgaagaaagaggaagtgaaggtggagatcgaggatgacagcgtgttgaagatcagcggggagaggcacgtggagaaggaggataagaacgacacgtggcaccgtgtggagaggtcgagcgggcagttcacgaggaagttcaggctgccggagaatgtgaagatggatcaggtgaaggctgcgatggagaacggggttctgactgtgactgtgccaaaggcggagatgaagaaaactgatgtcaaatctattcagatctctggctga

SEQ ID NO: 8707 - protein, 156 aa, Brassica napus
MSMIPSFFGNNRRGGSSFFDPFSLDVWDPFKDFPSSSSFSRENSAIVNARVDWRETPEAHVFKADLPGLKKEEVKVEIEDDSVLKISGERHVEKEDKNDTWHRVERSSGQFTRKFRLPENVKMDQVKAAMENGVLTVTVPKAEMKKTDVKSIQISG

SEQ ID NO: 8708 - DNA, 483 bp, Brassica napus
  CDS (1)..(483)
atgtctctaattccaagccttttcagtggacgcagatcaaacgtttttgatcccttctcgcttgacgcatgggatccattccaaggattcttcactccttccgcgttaggaaacgcttccggctcaaccgctcgtgacattgcagcgtttacaaacgcgagagttgactggaaggagacgccagaggcacacgtgttcaaggccgacttgccggggctgaagaaagaagaagtgaaggttgaggttgaagacaaggacattcttcagataagcggagagaggagcaaggagaacgaggagaagagcgacaagtggcaccgcgtggagagggcaagcgggaagtttatgaggaggtttaagttgccggagaatgcgaagatggaggaagtgaaggcgacgatggagaacggtgtgcttacggttacggtgccgaaagcgcctgagaagaagcctgaggttaagtctattgatatctctggctaa

SEQ ID NO: 8709 - protein, 160 aa, Brassica napus
MSLIPSLFSGRRSNVFDPFSLDAWDPFQGFFTPSALGNASGSTARDIAAFTNARVDWKETPEAHVFKADLPGLKKEEVKVEVEDKDILQISGERSKENEEKSDKWHRVERASGKFMRRFKLPENAKMEEVKATMENGVLTVTVPKAPEKKPEVKSIDISG

SEQ ID NO: 8710 - DNA, 465 bp, Brassica napus
  CDS (1)..(465)
atggaatttgtaaggtttccgatagtctcaatcctcgaagacatgctagaagttcccgaagagcacaacgagaagagccgcaacaatccttcaagagcttacatgcgggacgcaaaggcaatggcggctacgccagccgacgtgatcgagcacgcgaacgcgtacgttttcgtggtggacatgcctggaatcaaaggagaggagatcaaggttcaggtggaggacgagaacgtgcttgtggtgagtggagagaggcagagagagaacaaggagagcgagggtgtgaagtatgtgaggatggagaggaggatggggaagtttatgaggaagtttcagttgcctgagaacgctgatttggagaagatctctgctgtttgtaacgatggtgtgttgaaggtgactgttcagaagcttcctcctcctgagcctaagaaaccaaagactatccaagtccaagttgcttga

SEQ ID NO: 8711 - protein, 154 aa, Brassica napus
MEFVRFPIVSILEDMLEVPEEHNEKSRNNPSRAYMRDAKAMAATPADVIEHANAYVFVVDMPGIKGEEIKVQVEDENVLVVSGERQRENKESEGVKYVRMERRMGKFMRKFQLPENADLEKISAVCNDGVLKVTVQKLPPPEPKKPKTIQVQVA

SEQ ID NO: 8712 - DNA, 471 bp, Brassica napus
  CDS (1)..(471)
atgtcgatgattccgagcttctttggaaacaacaggcgtggcagcagcagcttcttcgatccgttttctctagatgtttgggacccgttcaaggacttttcatcatcttcttcgttttcccgagaaaactctgcgatcgtgaacgcgcgcgtggactggagggagacgccggaggcgcacgtgttcaaggcggacttacctggactgaagaaggaggaagtgaaggtcgaggttgaggacaacaacgtgttgaagatcagtggtcagaggcacgtggagaaggaggacaagagcgacacgtggcaccgcgtggagaggtcgaggggacagttcacgaggaagtttaggctgccggagaacgtgaagatggaccaggtgaaggctgcgttggagaacggagtcctgactgtgacggtgcctaaggtagagacggagaaggctagtgtcagatctgttcagatatctggctga

SEQ ID NO: 8713 - protein, 156 aa, Brassica napus
MSMIPSFFGNNRRGSSSFFDPFSLDVWDPFKDFSSSSSFSRENSAIVNARVDWRETPEAHVFKADLPGLKKEEVKVEVEDNNVLKISGQRHVEKEDKSDTWHRVERSRGQFTRKFRLPENVKMDQVKAALENGVLTVTVPKVETEKASVRSVQISG

SEQ ID NO: 8714 - DNA, 465 bp, Brassica napus
  CDS (1)..(465)
atggattttggaaggttcccgataatctcaatcctcgaagacatgctagaagtccccgaggagcacaacgataagagccgcaacaacccctctcgagtttacatgcgcgacgcaaaggccatggcggctacaccagccgacgtgatcgagcatcagaacgcgtacgtgttcgtggtggacatgcctgggatcaaaggagatgagatcaaggttcaggtggagaacgagaatgtgcttgtggtgagcggagagaggcagagggagaacaaggagagcgagggtgtgaagttcgtgaggatggagaggagaatgggtaagtttatgaggaagtttcagctgcctgagaatgcggatttggagaagatctctgccgtttgtcacgatggtgttttgaaggtgactgttgagaagcttcctcctcctgagcctaagaaaccgaagactattcaggtccaagtggcttga

SEQ ID NO: 8715 - protein, 154 aa, Brassica napus
MDFGRFPIISILEDMLEVPEEHNDKSRNNPSRVYMRDAKAMAATPADVIEHQNAYVFVVDMPGIKGDEIKVQVENENVLVVSGERQRENKESEGVKFVRMERRMGKFMRKFQLPENADLEKISAVCHDGVLKVTVEKLPPPEPKKPKTIQVQVA

SEQ ID NO: 8716 - DNA, 483 bp, Brassica napus
  CDS (1)..(483)
atgtctctaatcccaagcttttttggaggacggagatcaaacgcttttaaccccttctcgctagatgcatgggatccattcgaaggattcttcactccttcctcgttagcaaacgcatccggttcaaccgctcgtgaaatggcagcgtttacaaacgcaagagtggactggaaggagactcctgaggcacacatgttcaaagccgacttgcctggattgaagaaagaggaagtgaaggttgaggttgaagacaagaacatacttcagataagcggagagaggagcaaggagaacgaagagaagagcgacaaatggcaccgtgtggagagggcaagcgggaagtttatgaggaggtttaagttacctgagaatgctaagatggaagaagtgaaggcggcaatggagaacggtgtgcttacgattacggtgccgaaagctcctgagaagaagcatgaggtcaagtctgttgacatctctggctaa

SEQ ID NO: 8717 - protein, 160 aa, Brassica napus
MSLIPSFFGGRRSNAFNPFSLDAWDPFEGFFTPSSLANASGSTAREMAAFTNARVDWKETPEAHMFKADLPGLKKEEVKVEVEDKNILQISGERSKENEEKSDKWHRVERASGKFMRRFKLPENAKMEEVKAAMENGVLTITVPKAPEKKHEVKSVDISG

SEQ ID NO: 8718 - DNA, 474 bp, Brassica napus
  CDS (1)..(474)
atgtctctaatcccgagctttttcggtggccgaagaacaaacgtgttcgacccattctcgctagacctgtatgacccgttcgaaggattcttaacgccttcagggatgacaaacgcaccatccaaggacgtggcagcgttcacaaacgcgaaagtggactggagggagacaccagaggcgcacgtgttcaaggcggacttgccggggctgaagaaggaagaagtgaaggtggaggttgaagatggcaacatacttcagataagtggagagagaagcagcgagaatgaagagaagagtgacaagtggcaccgtgtggagaggtcaagtgggaagttcatgaggaggtttaagttgccggagaacgcgaaggtagatgaagtgaaagctagtatggagaacggtgtgttgtcggtcacggtgcctaagatggctgagaggaagcctgaggtcaagtctattgacatctccggctaa

SEQ ID NO: 8719 - protein, 157 aa, Brassica napus
MSLIPSFFGGRRTNVFDPFSLDLYDPFEGFLTPSGMTNAPSKDVAAFTNAKVDWRETPEAHVFKADLPGLKKEEVKVEVEDGNILQISGERSSENEEKSDKWHRVERSSGKFMRRFKLPENAKVDEVKASMENGVLSVTVPKMAERKPEVKSIDISG

SEQ ID NO: 8720 - DNA, 459 bp, Brassica napus
  CDS (1)..(459)
atgtctctagttccaagccttttcggaggacgcagatcaaacgcttttgatccgttctcgctagatgcatgggatccatttgaaggactcttaacgccttcctcggctcgtgacatggcagcattcacaaacgcaagagtggactggaaggagacgccggaggcacacgtgttcaaagcggacttgccggggctgaagaaagaggaagtgaaggttgaggttgaagacaagaacatactgcaaataagtggagagaggagcaaggagaacgaagagaagaacgacaagtggcaccgtgtggagagagcaagtgggaagtttatgaggaggtttaagttgcctgagaatgcgaagatggaagaagtgaaggcgacaatggagaatggtgtgcttacggttacggtaccaaaggcgcctgagaagaagcctgaagtcaagtctattgatatctcaggctga

SEQ ID NO: 8721 - protein, 152 aa, Brassica napus
MSLVPSLFGGRRSNAFDPFSLDAWDPFEGLLTPSSARDMAAFTNARVDWKETPEAHVFKADLPGLKKEEVKVEVEDKNILQISGERSKENEEKNDKWHRVERASGKFMRRFKLPENAKMEEVKATMENGVLTVTVPKAPEKKPEVKSIDISG

SEQ ID NO: 8722 - DNA, 465 bp, Glycine max
  CDS (1)..(465)
atgtctctgattccaggtttcttcggtgcccgaaggagcaacgtcttcgatccattctcactcgacatttgggatcccttcaaggattttcatgttcccacttcttctgtttctgctgaaaattctgcattcgtgagcactcgtgtggattggaaggaaaccccagaggcacacgtgttcaaggctgatattccagggctgaagaaagaggaagtcaaggttcagattgaagatgatagggttcttcagattagcggagagaggaacgttgagaaggaagacaagaacgacacgtggcatcgcgtggagcgtagcagtggtaagttcgtgagaaggtttagattgccggagaatgcaaaagtgaatgaagtgaaggcttctatggaaaatggggttctcactgtcactgttcctaaggaagaggctaagaagcctgatgtcaaggccattgaaatctctggttga

SEQ ID NO: 8723 - protein, 154 aa, Glycine max
MSLIPGFFGARRSNVFDPFSLDIWDPFKDFHVPTSSVSAENSAFVSTRVDWKETPEAHVFKADIPGLKKEEVKVQIEDDRVLQISGERNVEKEDKNDTWHRVERSSGKFVRRFRLPENAKVNEVKASMENGVLTVTVPKEEAKKPDVKAIEISG

SEQ ID NO: 8724 - DNA, 459 bp, Glycine max
  CDS (1)..(459)
atgtctctcattccaaacattttcggtggccgtaggagcaatgtgttcgatcccttcaaggattttcctttcccaaattccgtctctacttccttccctgagttttctcgggaaaattctgcgtttgtgagcactcgtgtggattggaaggagaccccagaggcgcacgtgttcaaggccgatattcccgggctgaagaaggaggaagtgaaggtgcagattgaagatgataaggtgcttcagatcagcggagagaggaacgttgagaaggaagataagaacgacacgtggcatcgcgtggagcgtagcagtggaaagttcatgaggaggttcagattgccggagaatgcaaaagtgaatgaagtgaaggcttctatggaaaatggggttcttactgttactgttcctaaggaagaggttaagaatcatgatgttaaggccatagaaatctctggttaa

SEQ ID NO: 8725 - protein, 152 aa, Glycine max
MSLIPNIFGGRRSNVFDPFKDFPFPNSVSTSFPEFSRENSAFVSTRVDWKETPEAHVFKADIPGLKKEEVKVQIEDDKVLQISGERNVEKEDKNDTWHRVERSSGKFMRRFRLPENAKVNEVKASMENGVLTVTVPKEEVKNHDVKAIEISG

SEQ ID NO: 8726 - DNA, 477 bp, Triticum aestivum
  CDS (1)..(477)
atgtcgctgattccccgcggcaaagctttcgaccccttctcccttgacctctcggaccccttcgatggcttccccttcggctccggcggcatcagcagcttcttcccctcgttcccgcgcgcatcctccgagaccgcggccttcgccggcgcgcggatcgactggaaggagactcccgaggcgcacgtgttcaaggcggacgtgccggggctgaaaaaggaggaagtgaaggtggaggtcgaggacggcaacgtgctccagatcagcggcgagcgcaacaaagagcaggaggagaagacgggcacgtggcacagggtggagcgcagcagcggcaagttcctgcgcaggttccgcctcccggacaacgccaaggcggaccagatcaaggcggccatggagaacggcgtgctcacagtcaccgtgcccaagaaggaggtcaaggagccggaggtcaagtccatccagatttctggctag

SEQ ID NO: 8727 - protein, 158 aa, Triticum aestivum
MSLIPRGKAFDPFSLDLSDPFDGFPFGSGGISSFFPSFPRASSETAAFAGARIDWKETPEAHVFKADVPGLKKEEVKVEVEDGNVLQISGERNKEQEEKTGTWHRVERSSGKFLRRFRLPDNAKADQIKAAMENGVLTVTVPKKEVKEPEVKSIQISG

SEQ ID NO: 8728 - DNA, 474 bp, Triticum aestivum
  CDS (1)..(474)
atgtcgctgattccccgcggcaacgccttcgaccccttctccctcgacctctggaaccccttcgacggcttccccttcggctccggcagcagcggcggcggcggcagcctcttcccctcgttcccgcgcatcagctccgagaccgcggccttcgccggcgcgcggatcgactggaaggagacgcccgaggcgcacgtgttcaaggcggacgtgccggggctgaagaaggaggaagtggaggacggcaacgtgctccagatcagcggcgagcgcaacaaagagaaggaggagaagaccgacacgtggcacagggtggagcgcagcagcggcaagttcctgcgcaggttcaggctcccggaggacgccaaggtggagcagatcaaggcggccatggagaacggcgtgctcaccgtcaccgtggccaaggaggaggccaagaagcccgaggtcaagtccatcctgatctccggatag

SEQ ID NO: 8729 - protein, 157 aa, Triticum aestivum
MSLIPRGNAFDPFSLDLWNPFDGFPFGSGSSGGGGSLFPSFPRISSETAAFAGARIDWKETPEAHVFKADVPGLKKEEVEDGNVLQISGERNKEKEEKTDTWHRVERSSGKFLRRFRLPEDAKVEQIKAAMENGVLTVTVAKEEAKKPEVKSILISG

SEQ ID NO: 8730 - DNA, 468 bp, Triticum aestivum
  CDS (1)..(468)
atgtcgctgatccgccgtggcgacgtgttcgaccccttctcgctcgacctctgggaccccttcgacggcttccccttcggctccggcagcggcagcatcttcccgcgcaccaccagctccgacaccgcggccttcgccggcgcgcgcatcgactggaaggagacgcccgaggcgcacgtgttcaaggcggacgtcccggggctgaagaaggaggaggtgaaggttgaggtggacgacggcaacgtgctgcagatcagcggcgagcggaacaaggagcaggagcagaagaccgacacctggcaccgcgtggagcgcagcagcggcaagttcctgcgccggttcaggctcccggacaacgtgaagtccgaggagatcaaggcggccatggagaacggcgtgctcaccgtcaccgtgcccaaggcggaggccaagaagcccgacgtcaagcccgtccagatcacgggatag

SEQ ID NO: 8731 - protein, 155 aa, Triticum aestivum
MSLIRRGDVFDPFSLDLWDPFDGFPFGSGSGSIFPRTTSSDTAAFAGARIDWKETPEAHVFKADVPGLKKEEVKVEVDDGNVLQISGERNKEQEQKTDTWHRVERSSGKFLRRFRLPDNVKSEEIKAAMENGVLTVTVPKAEAKKPDVKPVQITG

SEQ ID NO: 8732 - DNA, 474 bp, Triticum aestivum
  CDS (1)..(474)
atgtcgctgatccgccgcagcaacgtgttcgaccccttctccctcgacttcttcgacccattcgaaggcttccccttcggctccggcaacagcagcagcggcagtctcgtcccgcgcacctcctccgacacagcggccttcgcgggcgcgcgcatcgactggaaggagacgtccgaggcgcacgtgttcaaggcggacgtgccggggctgaagaaggaggaggtgaaggtggaggtggaggacggcaacatcctccagatcagcggcgagcggaagaaggagcaggaggagaagaccgacacctggcaccgcgtggagcgcagcagcggcaagttcctgcgcaggttctgcctcccggacaacgccaaggcggagcaggtgaaggcgtccatggagaacggcgtgctcaccgtcaccgtgcccaaggaggaggccaagaagcccgaggtcaagtccatccagatctcaggctag

SEQ ID NO: 8733 - protein, 157 aa, Triticum aestivum
MSLIRRSNVFDPFSLDFFDPFEGFPFGSGNSSSGSLVPRTSSDTAAFAGARIDWKETSEAHVFKADVPGLKKEEVKVEVEDGNILQISGERKKEQEEKTDTWHRVERSSGKFLRRFCLPDNAKAEQVKASMENGVLTVTVPKEEAKKPEVKSIQISG

SEQ ID NO: 8734 - DNA, 477 bp, Zea mays
  CDS (1)..(477)
atgtcgctgatccgccgcagcaacgtgttcgatcccttctccctcgacctctgggacccctttgagggcttccccttcggctccggcagcagcagcagtctcttcccctcgttcccgcggaccagctcggagaccgcggccttcgctggcgcgcggatcgactggaaggagactccagaggcgcacgtgttcaaggccgacgtaccggggctgaagaaggaggaggtcaaggtggaggtcgaggacggcaacgtccttcagatcagcggcgaacgcaacaaggagcaggaggagaagacggacacctggcaccgcgtggagcggagcagcgggaggttcctgcgcaggttccgactgcccgagaacgctaagacggagcagatcacggccgccatggagaacggcgtgcttacagtcactgtgccgaaggaggacgccaagaagcctgaagtgaagtccattcagatctccggctag

SEQ ID NO: 8735 - protein, 158 aa, Zea mays
MSLIRRSNVFDPFSLDLWDPFEGFPFGSGSSSSLFPSFPRTSSETAAFAGARIDWKETPEAHVFKADVPGLKKEEVKVEVEDGNVLQISGERNKEQEEKTDTWHRVERSSGRFLRRFRLPENAKTEQITAAMENGVLTVTVPKEDAKKPEVKSIQISG

SEQ ID NO: 8736 - DNA, 477 bp, Linum usitatissimum
  CDS (1)..(477)
atgtcgctgattccaagcttcttcggtaaccgccgatccgaccccttctccgccctggatatgtgggatccgattagggatttctcctccttcaacttcccctcctcatctctgatcctcggcggcggggagaactctgctttcgtgaacacgcggatcgactggaaggagactccagaggcgcacgtgttcaaggcggacctcccggggctgaagaaggaggagattaaggtcgaggtggaggaagatcgggtgctgcagatcagcggggaaaggaacgtggagaaggaggataagaacgacacgtggcacagggttgagaggagcagtgggaaattcatgaggaggttcaggctccccgagaatgctaagatggaggaggttaaggcggcgatggagaacggcgtgctgacggtgacggttcccaaggcggaggtgaagaagcctgaagtcaaggccattgagatatctggttaa

SEQ ID NO: 8737 - protein, 158 aa, Linum usitatissimum
MSLIPSFFGNRRSDPFSALDMWDPIRDFSSFNFPSSSLILGGGENSAFVNTRIDWKETPEAHVFKADLPGLKKEEIKVEVEEDRVLQISGERNVEKEDKNDTWHRVERSSGKFMRRFRLPENAKMEEVKAAMENGVLTVTVPKAEVKKPEVKAIEISG

SEQ ID NO: 8738 - DNA, 483 bp, Zea mays
  CDS (1)..(483)
atgtcgctcgtgagtcgccgcagcagcaacgtgttggacttggaccccttctccctcgacctctggtgggaccccttcgacatgttccgctccatcgtcccgtcggcggcctcctccggcggcggttccgagaccgccgccttcgccaacgcccgcgtcgactggaaggagacgcccgaggcgcacgtgttcaaggccgacctccccggcgtcaagaaggaggaggtcaaggtcgaggtgaaggacggcaacgtgctcgtcatcagcggcaagcgcagcagggaggaggaggaggaggacaagaacggcaagtggcaccgcgtcgagcgcagcagcggccagttcatgaggcgcttccgcctgcctgagaacgccaagctggacgaggtgaaggctggcctcgagaacggcgtgctcacggtcaccgtgcccaagacggaggtgaagaagcccgaggtgaaggctatcgagatctctggttga

SEQ ID NO: 8739 - protein, 160 aa, Zea mays
MSLVSRRSSNVLDLDPFSLDLWWDPFDMFRSIVPSAASSGGGSETAAFANARVDWKETPEAHVFKADLPGVKKEEVKVEVKDGNVLVISGKRSREEEEEDKNGKWHRVERSSGQFMRRFRLPENAKLDEVKAGLENGVLTVTVPKTEVKKPEVKAIEISG

SEQ ID NO: 8740 - DNA, 477 bp, Hordeum vulgare
  CDS (1)..(477)
atgtcgctgatccgtcgcagcaacgtgttcgaccccttctccctcgacttcttcgaccccttcgacggcttccccttcggctccggcagcagcaacagcggcggcagcctcgtcccgcgcacctcctctgacacggcggccttcgcgggggcgcgcatcgactggaaggagacccccgaggcgcacgtgttcaaggcggacgtgccggggctgaagaaggaggaggtgaaggtggaggtggaggacggcaacatcctccagatcagcggcgagaggaacaaggagcaggaggagaagacggacacctggcacagggtggagcgcagcagcggcaagttcctgcgcaggttcaggctcccggagaacgccaaggcggagcaggtgaaggcgtccatggagaacggcgtgctcaccgtcaccgtgcccaaagaggaggccaagaagcccgaggtcaagtccatccagatctccggctag

SEQ ID NO: 8741 - protein, 158 aa, Hordeum vulgare
MSLIRRSNVFDPFSLDFFDPFDGFPFGSGSSNSGGSLVPRTSSDTAAFAGARIDWKETPEAHVFKADVPGLKKEEVKVEVEDGNILQISGERNKEQEEKTDTWHRVERSSGKFLRRFRLPENAKAEQVKASMENGVLTVTVPKEEAKKPEVKSIQISG

SEQ ID NO: 8742 - DNA, 456 bp, Hordeum vulgare
  CDS (1)..(456)
atgtcgatcgtgaggcgtagcaacgtgttcgaccccttcgccgacctctgggcggaccccttcgacaccttccgctccatcgtcccggcaatctcaggcggcaacagcgagacagctgcgttcgccaacgcccggatggactggaaggagacgcccgaggcgcacgtcttcaaggctgatcttcctggcgtgaagaaggaggaggtcaaggtggaggtggaggacggcaacgtgctcgtcgtcagcggcgaacgcactaaggagaaggaggacaagaacgataagtggcaccgcgtggagcgtagcagcggcaagtttgtgaggcgcttccgcctgccggaggatgccaaggtggaggaggtgaaggccgggctggagaacggtgtgctcaccgtcaccgtgcccaagacagaggtcaagaagcccgaggtgaaggccatcgagatctccggctga

SEQ ID NO: 8743 - protein, 151 aa, Hordeum vulgare
MSIVRRSNVFDPFADLWADPFDTFRSIVPAISGGNSETAAFANARMDWKETPEAHVFKADLPGVKKEEVKVEVEDGNVLVVSGERTKEKEDKNDKWHRVERSSGKFVRRFRLPEDAKVEEVKAGLENGVLTVTVPKTEVKKPEVKAIEISG

SEQ ID NO: 8744 - DNA, 456 bp, Hordeum vulgare
  CDS (1)..(456)
atgtcgatcgtgaggaggagcaacgtgttggaccccttcgccgacctctgggccgacccattcgacaccttccgctccatcttcccggcgatctcaggcgggaacagcgagacagctgcgttcgcgaacgcccggatggactggaaggagacgcctgaggcacatgtcttcaaggctgatcttcctggcgtgaagaaggaggatgtcaaggtggaggtggaggacggcaacgtgctcatcgtcagcggcgagcgcaccaaagagaaggaggacaagaacgacaagtggcatcgggtggagcgcagcagcgggaagttcgtgcggcgcttccgcctgccagacgacgccaaggttgatgaagtgaaggccggactggagaacggtgtgctcaccgtcaccgtgcccaaagccgaggtcaagaagcccgaggtgaaggccatcgagatctccggctga

SEQ ID NO: 8745 - protein, 151 aa, Hordeum vulgare
MSIVRRSNVLDPFADLWADPFDTFRSIFPAISGGNSETAAFANARMDWKETPEAHVFKADLPGVKKEDVKVEVEDGNVLIVSGERTKEKEDKNDKWHRVERSSGKFVRRFRLPDDAKVDEVKAGLENGVLTVTVPKAEVKKPEVKAIEISG

SEQ ID NO: 8746 - DNA, 462 bp, Helianthus annuus
  CDS (1)..(462)
atgtcaatcattccaagctttttcaccagcaaaagaagcaacatattcgacccattctccctagacacatgggacccgttccaagggatcatctccaccgaacccgcgcgggaaaccgcagcgatcgtgaacgcgagaatcgactggaaagagacgcccgaggcgcacgtgttaaaagccgacttacccgggatgaagaaggaagaggtgaaggtggaagtggaagacgggagggtgttgcagataagtggagagaggtgtagagagcaggaggagaaggatgacacgtggcatagggttgagaggagtagtgggaagtttattaggcggtttcggttgccggagaatgcgaagatggatgaggtgaaggcgatgatggagaacggtgtgttgacggtggttgtgcctaaggaggaggaggagaagaagccgatggtgaaggctattgatatttctgggtag

SEQ ID NO: 8747 - protein, 153 aa, Helianthus annuus
MSIIPSFFTSKRSNIFDPFSLDTWDPFQGIISTEPARETAAIVNARIDWKETPEAHVLKADLPGMKKEEVKVEVEDGRVLQISGERCREQEEKDDTWHRVERSSGKFIRRFRLPENAKMDEVKAMMENGVLTVVVPKEEEEKKPMVKAIDISG

SEQ ID NO: 8748 - DNA, 492 bp, Helianthus annuus
  CDS (1)..(492)
atgtcgatcattccaaatttcttcggccgcagacgaacaaacgtcttcgaccccttctctctagacgtgtgggacccattcgaaggcttccctttcaacaacaacaacttcggatccttatccgaccaagtccgatcatcatccgaaacatcgtcgttcgtgaacgctaatgttgactggagagagactaatgatgcgcatgtgtttaaggcggatgtacccggactgaagaaggaggaagtgaaggtagaggtggaggacgatcgagtgttgcagatcagtggagagaggaataaggagagtgaagagaaaggggacacgtggcaccgtgtggagaggagtagtgggaagtttgtgaggaggtttaggttgccagagaatgcgaaggtggatcaggtgaaggctgcgatggagaacggtgtgttgacggttactgtgccgaaagttgaagtgaagaagcctgatgtgaagtccattcagatttctggttag

SEQ ID NO: 8749 - protein, 163 aa, Helianthus annuus
MSIIPNFFGRRRTNVFDPFSLDVWDPFEGFPFNNNNFGSLSDQVRSSSETSSFVNANVDWRETNDAHVFKADVPGLKKEEVKVEVEDDRVLQISGERNKESEEKGDTWHRVERSSGKFVRRFRLPENAKVDQVKAAMENGVLTVTVPKVEVKKPDVKSIQISG

SEQ ID NO: 8750 - DNA, 594 bp, Brassica napus
  CDS (1)..(594)
atgaagcacttgccatacttccctctgttaagcctcttagtaggagctctgatacttggaaacatcaaaccaagtgaagggtctctgtcttctgcagtagacactccaggaagcttgctatccgatctctggctagacaggtttcctgatccgttcaagatcttggagagaatcccactaggactcgagagggaccagagtgtggctctgtctccagcgagagttgactggaaagagacagcagaaggacatgagatcatgctggatgtgcccggtctgaaaaaggatgaagtgaagatagaggtggaggagaatcgagtcctctcagtcagtggagagaggaaaagagaggaagagaagaaaggagatcagtggcacagagttgagagatcgtatggaaagttttggagacagttcaagctacctgataatgttgatatggaatctgtcaaggccaagcttgagaatggtgtgctcactattaatcttacaaagcttgctcctgaaaaggtcaagggtcctagagttgttaacattgcagctgaagaagaccaaactgcaaagatcagctcctctgaatccaaagagctgtga

SEQ ID NO: 8751 - protein, 197 aa, Brassica napus
MKHLPYFPLLSLLVGALILGNIKPSEGSLSSAVDTPGSLLSDLWLDRFPDPFKILERIPLGLERDQSVALSPARVDWKETAEGHEIMLDVPGLKKDEVKIEVEENRVLSVSGERKREEEKKGDQWHRVERSYGKFWRQFKLPDNVDMESVKAKLENGVLTINLTKLAPEKVKGPRVVNIAAEEDQTAKISSSESKEL

SEQ ID NO: 8752 - DNA, 465 bp, Brassica napus
  CDS (1)..(465)
atggatttcggaaggttcccgatcatctcaatcctcgaagacatgctcgaggtccccgaagagcacagcgagaagggccgcagcaacccgtcgagagcttacgtgagagaccagaaggcgatggcggctacgccagctgacgtcatcgagcaacccgacgcgtacgctttcgtggtggacatgcctgggatcaaaggagacgagatcaaggtccaggtcgagagcgacaacgtgctcgtggtgagcggagagaggaagagggagagcaaggagaacgagggagtgaagtatgtgaggatggagaggaggatggggaagttcatgaggaagtttcagttgcctgagaatgcggatttggagaagatatctgcttcttgtaatgacggtgtgttgaaagtgactgttgggaagcttcctcctcctgagcctaagaaaccgaagactattcaggtccaagtcgcttga

SEQ ID NO: 8753 - protein, 154 aa, Brassica napus
MDFGRFPIISILEDMLEVPEEHSEKGRSNPSRAYVRDQKAMAATPADVIEQPDAYAFVVDMPGIKGDEIKVQVESDNVLVVSGERKRESKENEGVKYVRMERRMGKFMRKFQLPENADLEKISASCNDGVLKVTVGKLPPPEPKKPKTIQVQVA

SEQ ID NO: 8754 - DNA, 465 bp, Brassica napus
  CDS (1)..(465)
atggaatttgtaaggtttccgatagtctcaatcctcgaagacatgctagaagttcccgaagagcacaacgagaagagccgcaacaatccttcaagagcttacatgcgggacgcaaaggcaatggcggctacaccagccgacgtgatcgagcacccgaacgcgtacgttttcgtggtggacatgcctggaatcaaaggagaggagatcaaggttcaggtggagaacgagaatgtgcttgtggtgagcggagagaggcagagagagaacaaggagagcgagggtgtgaagtatgtgaggatggagaggagaatggggaagtttatgaggaagtttcagttgcctgagaatgctgatttggagaagatctctgctgtttgtcacgatggtgtattgaaggtgactgttcagaagcttcctcctcctgagcctaagaaaccaaagactattcaggtccaagtggcttga

SEQ ID NO: 8755 - protein, 154 aa, Brassica napus
MEFVRFPIVSILEDMLEVPEEHNEKSRNNPSRAYMRDAKAMAATPADVIEHPNAYVFVVDMPGIKGEEIKVQVENENVLVVSGERQRENKESEGVKYVRMERRMGKFMRKFQLPENADLEKISAVCHDGVLKVTVQKLPPPEPKKPKTIQVQVA

SEQ ID NO: 8756 - DNA, 474 bp, Brassica napus
  CDS (1)..(474)
atgtctctaatcccaagctttttcggtggccgaagaacaaacgtgttcgacccattctcgctagacctgtatgacccgttcgaaggattcttaacgccttcagggatgacaaacgcaacctccaaggacgtggcagcgttcacaaacgcgaaagtggactggagggagacaccagaggcgcacgtgttcaaggcggacttgccggggctgaagaaggaagaagtgaaggtggaggttgaagatggcaacatacttcagataagtggagagagaagcagcgagaatgaagagaagagtgacaagtggcaccgtgtggagaggtcaagtgggaagttcatgaggaggtttaagttgccggagaacgcgaaggtagatgaagtgaaagctagtatggagaacggtgtgttgtcggtcacggtgcctaagatggctgagaggaagcctgaggtcaagtctattgacatctccggctaa

SEQ ID NO: 8757 - protein, 157 aa, Brassica napus
MSLIPSFFGGRRTNVFDPFSLDLYDPFEGFLTPSGMTNATSKDVAAFTNAKVDWRETPEAHVFKADLPGLKKEEVKVEVEDGNILQISGERSSENEEKSDKWHRVERSSGKFMRRFKLPENAKVDEVKASMENGVLSVTVPKMAERKPEVKSIDISG

SEQ ID NO: 8758 - DNA, 474 bp, Brassica napus
  CDS (1)..(474)
atgtcgatgattccgaccttcttcggcaacaacaggcgcgggggcaacagcttcttcgatccgttttgtctagatgtttgggacccgttcaaggactttccctcatcttcctcttcgttttcccgagaaaactctgtgatcgtgaacgcgcgtgtggactggagggagacgccggaggcgcacgtgttcaaggcggacttacctggactgaagaaggaggaagtgaaggtcgaggtcgaggacaacaacgtgttgaagatcagtggtcagaggcacgtggagaaggaggacaagagcgacacgtggcaccgcgtggagaggtcgagcggacagttcacgaggaagtttaggctgccggagaacgtgaagatggaccaggtgaaggctgcattggagaacggagtcctgactgtgacggtgcctaaggtagagacggaggaggctagtgtcagatctgttcagatatctggctga

SEQ ID NO: 8759 - protein, 157 aa, Brassica napus
MSMIPTFFGNNRRGGNSFFDPFCLDVWDPFKDFPSSSSSFSRENSVIVNARVDWRETPEAHVFKADLPGLKKEEVKVEVEDNNVLKISGQRHVEKEDKSDTWHRVERSSGQFTRKFRLPENVKMDQVKAALENGVLTVTVPKVETEEASVRSVQISG

SEQ ID NO: 8760 - DNA, 462 bp, Brassica napus
  CDS (1)..(462)
atgtcgatgattccaagcttcttcggtaacaacaggcgtggcagcaacagcttcttcgatcctttctcccttgacgtttgggatccactcagggagctctcttccctttcccgagacaactccgcgatcgtgaacgcgcgtgtggactggagggagacgcccgaggcgcacgtgttcaaggcggacttgcctggactcaaaaaggaggaagtgaaggtggagatcgaggaagacagcgtgctgaagatcagtggagagagacacgtggagaaggaggataagaacgacacgtggcaccgtgtggagagatcgagcgggcagttcacgaggaagtttaggcttcctgagaacgtgaagatggatcaggtgaaggctgcgatggagaacggtgtgctgactgtgacggtgcctaaggcggagaccaagaaggctgatgtcaagtctatccagatctctggctga

SEQ ID NO: 8761 - protein, 153 aa, Brassica napus
MSMIPSFFGNNRRGSNSFFDPFSLDVWDPLRELSSLSRDNSAIVNARVDWRETPEAHVFKADLPGLKKEEVKVEIEEDSVLKISGERHVEKEDKNDTWHRVERSSGQFTRKFRLPENVKMDQVKAAMENGVLTVTVPKAETKKADVKSIQISG

SEQ ID NO: 8762 - DNA, 483 bp, Brassica napus
  CDS (1)..(483)
atgtctctaatcccaagcttttttggaggacggagatcaaacgcttttaaccccttctcgctagatgcatgggatccattcgaaggattcttcactccttcctcgttagcaaacgcatccggttcaaccgctcgtgacatggcagcgtttacaaacgcaagagtggactggaaggagacgcccgaggcacacgtgttcaaagccgacttgccggggctgaagaaagaggaagtgaaggttgaggttgaagacaagaacatacttcagataagcggagagaggagcaaggagaacgaagagaagaacgacaaatggcaccgtgtggagagggcaagcgggaagtttatgaggaggtttaagttgcctgagaatgcgaagatggaagaagtgaaggcgacgatggagaacggtgtgcttacggttacggtgccgaaagcgcctgagaagaagcctgaagtcaagtctattgacatctctggctaa

SEQ ID NO: 8763 - protein, 160 aa, Brassica napus
MSLIPSFFGGRRSNAFNPFSLDAWDPFEGFFTPSSLANASGSTARDMAAFTNARVDWKETPEAHVFKADLPGLKKEEVKVEVEDKNILQISGERSKENEEKNDKWHRVERASGKFMRRFKLPENAKMEEVKATMENGVLTVTVPKAPEKKPEVKSIDISG

SEQ ID NO: 8764 - DNA, 483 bp, Brassica napus
  CDS (1)..(483)
atgtctctaattccaagccttttcggaggacgcaggtcaaacgttttcgatccgttctcactagacgcatgggatccattcgagggcttcttcactccttccgcgttagcaaacgcttccggctcaaccgctcgtgacattgcagcgtttacgaacgcgagagtggactggaaggagacgcccgaggcacacgtgttcaaagctgatttgccagggctgaagaaagaagaggtgaaggttgaggttgaagacaagaacatacttcagataagcggagagaggagcaaggagaacgaagagaagaacgacaagtggcaccgcgtggagagggcaagcgggaagtttatgaggaggtttaagttgccggagaatgcgaagatggaggaagtgaaggcgacgatggagaacggtgtgcttacggttacggtgccgaaagcgcctgagaagaagcctgaagttaagtctattgatatctctggctaa

SEQ ID NO: 8765 - protein, 160 aa, Brassica napus
MSLIPSLFGGRRSNVFDPFSLDAWDPFEGFFTPSALANASGSTARDIAAFTNARVDWKETPEAHVFKADLPGLKKEEVKVEVEDKNILQISGERSKENEEKNDKWHRVERASGKFMRRFKLPENAKMEEVKATMENGVLTVTVPKAPEKKPEVKSIDISG

SEQ ID NO: 8766 - DNA, 594 bp, Brassica napus
  CDS (1)..(594)
atgaagcacttgccttacttccctctgttaagcctcttcgtaggagctctgatacttggaaacaccaaaccaagtgaagggtctctgtcttccgcaatagacactccgggaagcttgctatccgatctctggctagacaggtttcctgatccgttcaagattttggagagaatcccactagaactcgagagggaccagagcgtggctctgtctccagctagagttgactggaaagaaacagcagaaggacatgagatcatgctggatgtgcctggtctaaagaaggatgaagtgaagatagaggtggaggagaatcgagtcctttcagtcagtggagagaggaaaagagaggaagagaagaaaggagatcagtggcatagagttgagagatcatatggaaagttctggagacagttcaagctacctgataatgttgatatggaatctgtcaaggccaagcttgagaatggtgttctcactattaacctcacaaagctggctcctgaaaaggtcaagggtcctagagttgttaacattgcagctgaagaagaccaaaccgcaaagatcagctcctctgaatccaaagagctgtga

SEQ ID NO: 8767 - protein, 197 aa, Brassica napus
MKHLPYFPLLSLFVGALILGNTKPSEGSLSSAIDTPGSLLSDLWLDRFPDPFKILERIPLELERDQSVALSPARVDWKETAEGHEIMLDVPGLKKDEVKIEVEENRVLSVSGERKREEEKKGDQWHRVERSYGKFWRQFKLPDNVDMESVKAKLENGVLTINLTKLAPEKVKGPRVVNIAAEEDQTAKISSSESKEL

SEQ ID NO: 8768 - DNA, 462 bp, Glycine max
  CDS (1)..(462)
atgtctttgattccaagtttctttggtggcagaaggagcaatgttttggatcctttctccctcgatgtgtgggacccttttaaggattttccttttcccacttctctttctgctgaaaattcagcgtttgtgagcacacgagtggattggaaggagacaccagaagcacacgtgttcaaggctgatattccagggctgaagaaggaggaagtgaagctggagattcaagatgacagaattcttcagataagtggagagaggaacgttgagaaggaagacaagaacgacacgtggcaccgcgtggagcgaagcagtggtaagttcatgaggagtttcagattgccagataatgctaaagtggatcaagttaaggcttccatggaaaatggggttctcactgtaactgttccaaaggaagagattaagaagcctgatgttaaggccatagaaatttctggttaa

SEQ ID NO: 8769 - protein, 153 aa, Glycine max
MSLIPSFFGGRRSNVLDPFSLDVWDPFKDFPFPTSLSAENSAFVSTRVDWKETPEAHVFKADIPGLKKEEVKLEIQDDRILQISGERNVEKEDKNDTWHRVERSSGKFMRSFRLPDNAKVDQVKASMENGVLTVTVPKEEIKKPDVKAIEISG

SEQ ID NO: 8770 - DNA, 480 bp, Glycine max
  CDS (1)..(480)
atgtcgttgattccaagtttcttcggcaccgggcgaagaaccaacgtcttcgaccccttctccctcgacgtgtgggacccattccatggcttccccggcaccaccgccctctccgctccgcgctccgagacggcggccttcgccaacacgcgcatcgactggaaggagacggcggaggcgcacgtgttcaaggcagacctgccggggctgaagaaggaagaggtgaaggtggagatcgaggaggagggaagggtgctgcagataagcggacagagaacaaaggagaaggaggacaagaacgacacgtggcaccgcctcgaacgctccagcggcagctttctccgccgcttccgcctgccggagaacgcgaaactcgatcaggtgaaggccggcatggagaacggagtgctcactgtcactgttcccaaggtggatgtcaagaagcccgatgtcaagcccgttcagatcactgaaggctaa

SEQ ID NO: 8771 - protein, 159 aa, Glycine max
MSLIPSFFGTGRRTNVFDPFSLDVWDPFHGFPGTTALSAPRSETAAFANTRIDWKETAEAHVFKADLPGLKKEEVKVEIEEEGRVLQISGQRTKEKEDKNDTWHRLERSSGSFLRRFRLPENAKLDQVKAGMENGVLTVTVPKVDVKKPDVKPVQITEG

SEQ ID NO: 8772 - DNA, 474 bp, Glycine max
  CDS (1)..(474)
atgtctatcatcccaaacttgttcggtggtagacgaagcaacgtcttcgacccattctctctggacgtatgggaccctttcgaggggtttcctttttccacaggtcacgtgccttcctctggtggggaaagcagtgccatagccaacactcgcgtggactggaaggagactccggcggctcacgtgttcaacgttgatcttcccgggttgaagaaggaggaagtgaaggttgaagttgaagatgggagggtgctgcagattagtggtgagaggaccaaagaacaagaacagaaagatgataggtggcaccgcgttgaaagaagcactgggaagttcatgaggaggttcaggcttcccgagaatgccaaaatggatcaggtcaaggctgctatggagaatggagtgctaactgttactgtgcccaaggaggaagacaagaaacctcaagtcaagtcaattcaaatatctgcctag

SEQ ID NO: 8773 - protein, 157 aa, Glycine max
MSIIPNLFGGRRSNVFDPFSLDVWDPFEGFPFSTGHVPSSGGESSAIANTRVDWKETPAAHVFNVDLPGLKKEEVKVEVEDGRVLQISGERTKEQEQKDDRWHRVERSTGKFMRRFRLPENAKMDQVKAAMENGVLTVTVPKEEDKKPQVKSIQISA

SEQ ID NO: 8774 - DNA, 477 bp, Glycine max
  CDS (1)..(477)
atggatatgaggttgatggatttggactctccattcttcaacactctgcacagaatcatggatctgacggaggacgccgagaagaacttgaacgctccgactcggacatacgtgcgcgacgccaaggcaatggctgcgactcctgctgacgtgaaggagtaccctaactcgtacgttttcgtgatcgacatgcctggcctcaaatctggggacattaaagtgcaggtggaggacgacaacgtgcttctgataagcggcgagaggaagagggaggaggaaaaagagaaagaagggggaaagtatttgaggatggagagaaggcttggcaagttgatgaggaagtttactctccctgagaatgccaacaccgatgctatctctgctgtctgccaagacggtgtgctcactgtcactgtcaataagctgcctcctcctcagcccaagaagcccaagactatagaggtcaacatagcctga

SEQ ID NO: 8775 - protein, 158 aa, Glycine max
MDMRLMDLDSPFFNTLHRIMDLTEDAEKNLNAPTRTYVRDAKAMAATPADVKEYPNSYVFVIDMPGLKSGDIKVQVEDDNVLLISGERKREEEKEKEGGKYLRMERRLGKLMRKFTLPENANTDAISAVCQDGVLTVTVNKLPPPQPKKPKTIEVNIA

SEQ ID NO: 8776 - DNA, 516 bp, Glycine max
  CDS (1)..(516)
atgtccctcctttcctccggtggcttcttcggccgcagaagaaacgacccgccaccccaccaacccacgtgggaccactaccaggcccaggaccatcaccaccctctgggagtttcccagccccaccacccaccccccttcatgtccttccccagtgactcctcgccggtgctcaacaccgccctcatagagtggaaggagaccccggaggcgcacgtttacaatgcgcacctcccgggctacaagcgcaacgacgtgcgcgtggaggtcgacgacgaccgggtgctctgcatcgtgtgcgggaagagcgtcgagaaggaggagcagaggggaggctggcaccgcgtcgagctctccagtggacagttcgttcagcgcctcactttgcctgagaattccatggtggatcatgttaaggcctatatggataacggggtgctcactatcacggttcctaaacaccacagaggggtcaataaccgtgttagaaacattaacatctcttctcgtccgtga

SEQ ID NO: 8777 - protein, 171 aa, Glycine max
MSLLSSGGFFGRRRNDPPPHQPTWDHYQAQDHHHPLGVSQPHHPPPFMSFPSDSSPVLNTALIEWKETPEAHVYNAHLPGYKRNDVRVEVDDDRVLCIVCGKSVEKEEQRGGWHRVELSSGQFVQRLTLPENSMVDHVKAYMDNGVLTITVPKHHRGVNNRVRNINISSRP

SEQ ID NO: 8778 - DNA, 480 bp, Glycine max
  CDS (1)..(480)
atggatttcagggtgatgggtttggattctccattgttccacacgctgcaacacatgatggacatgtcagaggacgctgcaggggacaacaagacatacagtgctccgacacggtcatacgttcgagacgccaaagcaatggctgcaacacctgcggatgtgaaggaatatcccaactcctacgtattcgagattgacatgccagggttgaaatctggggacataaaggttcaggttgaagacgacaacgtgcttctgattagtggggagagaaagagggatgaagaaatagaaggggtgaagtatctgagaatggagagaaggattgggaagttcatgcgcaagtttgtgttacctgagaatgccaacactgatgcaatctctgctgtgtgccaagatggggtgcttagtgtcatagtgcagaaattgcctccaccggaacctaagaaacctaagactattgaggttaaggttgcttga

SEQ ID NO: 8779 - protein, 159 aa, Glycine max
MDFRVMGLDSPLFHTLQHMMDMSEDAAGDNKTYSAPTRSYVRDAKAMAATPADVKEYPNSYVFEIDMPGLKSGDIKVQVEDDNVLLISGERKRDEEIEGVKYLRMERRIGKFMRKFVLPENANTDAISAVCQDGVLSVIVQKLPPPEPKKPKTIEVKVA

SEQ ID NO: 8780 - DNA, 480 bp, Glycine max
  CDS (1)..(480)
atggatttcagagtgatgggtttggagtctccactgttccacacgctgcaacacatgatggacatgtcagaggacggtgcaggagacaacaagacacacaatgctccaacatggtcatacgttcgagacgcgaaagcaatggctgcaacacctgcggatgtgaaggagtatccgaattcttacgtgttcgagatcgacatgccgggtttgaaatctggggacataaaggttcaagttgaagacgacaacctgcttctgatatgtggggaacgaaagagggacgaagagaaagaaggggcgaagtatttgagaatggagagaagggttgggaagttaatgcgcaagtttgtgctgcctgagaatgccaacactgatgcaatctctgctgtgtgccaagatggtgtgcttagtgtaaccgtgcagaaattgcctccacctgagcctaagaaacctaggactattcaggttaaggttgcttga

SEQ ID NO: 8781 - protein, 159 aa, Glycine max
MDFRVMGLESPLFHTLQHMMDMSEDGAGDNKTHNAPTWSYVRDAKAMAATPADVKEYPNSYVFEIDMPGLKSGDIKVQVEDDNLLLICGERKRDEEKEGAKYLRMERRVGKLMRKFVLPENANTDAISAVCQDGVLSVTVQKLPPPEPKKPRTIQVKVA

SEQ ID NO: 8782 - DNA, 453 bp, Glycine max
  CDS (1)..(453)
atgtcactgataccaagtttcttcggtggtcgaaggagcaatgttttcgaccctttctcgctcgacgtatgggaccccttcaaggatttgtctttcccttctgctgaagattcagctttcttgaaaacacgagtggattggaaggagaccccagaagcgcacgtgttcaaggctgatattccggggctgaagaaggagcaagtgaaagtggagattgaagatgacaaggttcttcagataagcggagagaggagtgttgagaaagaagacaagaacgataagtggcaccgcgtggagcgtagcagtggtaagttcttgaggaagttcagattgccagaaaacgctaaagtcgatcaagttaaggcttctattgaaaatggggttctcactgtcaccgttccaaaggaagaggtcaaaaaacctgatgttaaggccgtgcaaatctctggttaa

SEQ ID NO: 8783 - protein, 150 aa, Glycine max
MSLIPSFFGGRRSNVFDPFSLDVWDPFKDLSFPSAEDSAFLKTRVDWKETPEAHVFKADIPGLKKEQVKVEIEDDKVLQISGERSVEKEDKNDKWHRVERSSGKFLRKFRLPENAKVDQVKASIENGVLTVTVPKEEVKKPDVKAVQISG

SEQ ID NO: 8784 - DNA, 465 bp, Glycine max
  CDS (1)..(465)
atgtcattgattccaagtattttcggtggcccaaggagcaacgtgttcgatccattctcactcgatatgtgggatcccttcaaggattttcatgttcccacttcttctgtttctgctgaaaattctgcatttgtgaacacacgtgtggattggaaggagacccaagaggcacacgtgctcaaggctgatattccagggctgaagaaagaggaagtgaaggttcagattgaagatgatagggttcttcagattagcggagagaggaacgttgagaaggaagacaagaacgacacgtggcatcgcgtggagcgtagcagtggaaagttcatgagaaggttcagattgccagagaatgcaaaagtggagcaagtaaaggcttgtatggaaaatggggttctcactgttactattccaaaggaagaggttaagaagtctgatgttaagcctatagaaatctctggttaa

SEQ ID NO: 8785 - protein, 154 aa, Glycine max
MSLIPSIFGGPRSNVFDPFSLDMWDPFKDFHVPTSSVSAENSAFVNTRVDWKETQEAHVLKADIPGLKKEEVKVQIEDDRVLQISGERNVEKEDKNDTWHRVERSSGKFMRRFRLPENAKVEQVKACMENGVLTVTIPKEEVKKSDVKPIEISG

SEQ ID NO: 8786 - DNA, 462 bp, Glycine max
  CDS (1)..(462)
atgtctctgattccaagtttcttcggtggccgaaggagcagtgttttcgaccctttctccctcgatgtgtgggaccccttcaaggattttccatttcccagttctctttctgctgaaaattcagcgtttgtgagcacacgagtggattggaaggagacaccagaagcacacgtgttcaaggctgatattccagggctgaagaaggaggaagtgaagctggagattcaagatggcagagttcttcagataagcggagagaggaatgttgaaaaagaagacaagaatgatacgtggcatcgcgtggagcgaagcagtggcaagttggtgaggaggtttagattgccggagaatgctaaagtggaccaagtgaaggcttccatggaaaatggggttctcactgtaactgttcctaaggaagagattaagaagcctgatgttaaggccatagacatctctggttaa

SEQ ID NO: 8787 - protein, 153 aa, Glycine max
MSLIPSFFGGRRSSVFDPFSLDVWDPFKDFPFPSSLSAENSAFVSTRVDWKETPEAHVFKADIPGLKKEEVKLEIQDGRVLQISGERNVEKEDKNDTWHRVERSSGKLVRRFRLPENAKVDQVKASMENGVLTVTVPKEEIKKPDVKAIDISG

SEQ ID NO: 8788 - DNA, 462 bp, Glycine max
  CDS (1)..(462)
atgtctctgattccaaactttttcggtggccgtaggagcaatgtgtttgatcctttctcccttgaagtgtgggatcccttcaaggattttcattttccctcttctgtttctgctgaaaattctgcatctgtgaacactcgtgtggattggaaagaaaccccagaagcacacgtgttcaaggcagatattccagggctgaagaaggaggaagtgaaggtggaaattgaagatgatagggttcttcagataagcggagagaggaaccttgagaaggaagataagaacgacacgtggcatcgcgtggagcgtagcagcggcaagttcatgaggaggttcaggttgccggagaatgctaaagtggagcaagtgaaggcttctatggaaaatggggttctcactgtcactgttcccaaggaagaggttaagaagcctgatgttaaggccattgaaatctctggttaa

SEQ ID NO: 8789 - protein, 153 aa, Glycine max
MSLIPNFFGGRRSNVFDPFSLEVWDPFKDFHFPSSVSAENSASVNTRVDWKETPEAHVFKADIPGLKKEEVKVEIEDDRVLQISGERNLEKEDKNDTWHRVERSSGKFMRRFRLPENAKVEQVKASMENGVLTVTVPKEEVKKPDVKAIEISG

SEQ ID NO: 8790 - DNA, 486 bp, Glycine max
  CDS (1)..(486)
atgtctctaatcccaaacttcttcggtggccggagaaacaatgtgttcgatcctttctcactggacgtgtgggatcccttcaaggattttcctttcccaaatacgctttcttcagcttccttccctgaattttctcgggaaaattcagcatttgtgagcacccgtgtggactggaaggagaccccagaggcgcacgtgttcaaggcagatattccaggactgaagaaggaggaagtgaaggtgcagattgaagacgataaggttcttcagataagcggagagaggaacgttgagaaggaagataagaacgacacgtggcatcgagtggagcgtagcagtggcaagttcatgagaaggttcagattgccggagaacgctaaagtggagcaagtgaaggcttctatggaaaatggggttcttactgtcactgttcccaaggaagaggttaagaagcctgatgttaaggccatagacatctctggttaa

SEQ ID NO: 8791 - protein, 161 aa, Glycine max
MSLIPNFFGGRRNNVFDPFSLDVWDPFKDFPFPNTLSSASFPEFSRENSAFVSTRVDWKETPEAHVFKADIPGLKKEEVKVQIEDDKVLQISGERNVEKEDKNDTWHRVERSSGKFMRRFRLPENAKVEQVKASMENGVLTVTVPKEEVKKPDVKAIDISG

SEQ ID NO: 8792 - DNA, 462 bp, Glycine max
  CDS (1)..(462)
atgtctctgattccaagtttcttcagtggcccaaggagcaacgtgtttgatcctttctcacttgacgtgtgggatcccttcaaggattttcactttcccacttctgtttctgctgaaaattctgcatttgtgagcactcgggtggattggaaggagaccccagaagcacacgtgctcaaggcagatattccagggctgaagaaagaggaagtgaaggtgcagattgaagatgatagggttcttcagataagcggagagaggaaccttgagaaggaagataagaacgacacgtggcatcgagtggagcgtagcagtggcaagttcatgagaaggttcagattgccggagaatgctaaagtggagcaagtgaaggcttctatggaaaatggggttctcactgttactgttcccaaggaagagattaagaagcctgatgttaaagccatagaaatctctgcttaa

SEQ ID NO: 8793 - protein, 153 aa, Glycine max
MSLIPSFFSGPRSNVFDPFSLDVWDPFKDFHFPTSVSAENSAFVSTRVDWKETPEAHVLKADIPGLKKEEVKVQIEDDRVLQISGERNLEKEDKNDTWHRVERSSGKFMRRFRLPENAKVEQVKASMENGVLTVTVPKEEIKKPDVKAIEISA

SEQ ID NO: 8794 - DNA, 480 bp, Glycine max
  CDS (1)..(480)
atggatttcagggtgatgggtttggattctccattgttccacacgctgcaacacatgatggacatgtcagaggacgctgcaggggacaacaagacatacagtgctccgacacggtcatacgttcgagacgccaaagcaatggctgcaacacctgcggatgtgaaggaatatcccaactcctacgtattcgagattgacatgccagggttgaaatctggggacataaaggttcaggttgaagacgacaacgtgcttctgattagtggggagagaaagagggatgaagaaaaagaaggggtgaagtatctgagaatggagagaaggattgggaagttcatgcgcaagtttgtgttacctgagaatgccaacactgatgcaatctctgctgtgtgccaagatggggtgcttagtgtcattgtgcagaaattgcctccacctgaacctaagaaacctaagactattgaggttaaggttgcttga

SEQ ID NO: 8795 - protein, 159 aa, Glycine max
MDFRVMGLDSPLFHTLQHMMDMSEDAAGDNKTYSAPTRSYVRDAKAMAATPADVKEYPNSYVFEIDMPGLKSGDIKVQVEDDNVLLISGERKRDEEKEGVKYLRMERRIGKFMRKFVLPENANTDAISAVCQDGVLSVIVQKLPPPEPKKPKTIEVKVA

SEQ ID NO: 8796 - DNA, 462 bp, Glycine max
  CDS (1)..(462)
atgtctctgattccaagtttcttcggtggccgaaggagcagtgttttcgaccctttctccctcgatgtgtgggagccctttaaggattttccatttcccagttctctttctgctgaaaattcagcctttgtgagcacacgagtggattggaaggagacaccagaagcacacgtgttcaaggctgatattccagggctgaagaaggaggaagtgaagctggagattcaagatgacagagttcttcagataagcggagagaggaatgttgaaaaagaagacaagaatgatacgtggcatcgcgtggagcgaagcagtggtaagttcatgaggaggtttagattgccggagaatgctaaagtggatcaagttaaggcttccatggaaaatggggttctcactgtaactgttcctaaggaagagattaagaagcctgatgttaaggccattgacatctctggttaa

SEQ ID NO: 8797 - protein, 153 aa, Glycine max
MSLIPSFFGGRRSSVFDPFSLDVWEPFKDFPFPSSLSAENSAFVSTRVDWKETPEAHVFKADIPGLKKEEVKLEIQDDRVLQISGERNVEKEDKNDTWHRVERSSGKFMRRFRLPENAKVDQVKASMENGVLTVTVPKEEIKKPDVKAIDISG

SEQ ID NO: 8798 - DNA, 456 bp, Hordeum vulgare
  CDS (1)..(456)
atgtcgatcgtgaggcggagcaacgtgttcgaccccttcgccgacctctgggcggaccccttcgacaccttccgctccatcgtcccggcgatctcaggcggcaacagcgagacagctgcgttcgccaacgcccggatggactggaaggagacgcccgaggcgcacgtcttcaaggctgatcttcctggcgtgaagaaggaggaggtcaaggtggaggtggaggacggcaacgtgctcgtcgtcagcggcgagcgcactaaggagaaggaggacaagaacgacaagtggcaccgtgtggagcgcagcagcggcaagtttgtgaggcgcttccgcctgccggaggacgccaaggtggaggaggtgaaggccgggctggagaacggtgtgctcaccgtcaccgtgcccaaggccgaggtcaagaagcccgaggtgaaggccatcgagatctccggctga

SEQ ID NO: 8799 - protein, 151 aa, Hordeum vulgare
MSIVRRSNVFDPFADLWADPFDTFRSIVPAISGGNSETAAFANARMDWKETPEAHVFKADLPGVKKEEVKVEVEDGNVLVVSGERTKEKEDKNDKWHRVERSSGKFVRRFRLPEDAKVEEVKAGLENGVLTVTVPKAEVKKPEVKAIEISG

SEQ ID NO: 8800 - DNA, 477 bp, Hordeum vulgare
  CDS (1)..(477)
atgtcgctgatccgccgcagcaacgtgttcgaccccttctccctcgacttcttcgaccccttcgacggcttccccttcggctccggcagcagcaacagcggcggcacccccgtcccgcgcacctcctctgacacggcggccttcgcgggggcgcgcatcgactggaaggagacgcccgaggcgcacgtgttcaaggcggacgtgccggggctgaagaaggaggaggtgaaggtggaggtggaggacggcaacatcctccagatcagcggcgagaggaacaaggagcaggaggagaagacggacacctggcacagggtggagcgcagcagcggcaagttcctgcgcaggttcaggctcccggagaacgccaaggcggagcaggtgaaggcgtccatggagaacggcgtgctcaccgtcaccgtgcccaaagaggaggccaagaagcccgaggtcaagtccatccagatctccggctag

SEQ ID NO: 8801 - protein, 158 aa, Hordeum vulgare
MSLIRRSNVFDPFSLDFFDPFDGFPFGSGSSNSGGTPVPRTSSDTAAFAGARIDWKETPEAHVFKADVPGLKKEEVKVEVEDGNILQISGERNKEQEEKTDTWHRVERSSGKFLRRFRLPENAKAEQVKASMENGVLTVTVPKEEAKKPEVKSIQISG

SEQ ID NO: 8802 - DNA, 465 bp, Glycine max
  CDS (1)..(465)
atgtctctgattccaggtttcttcggtgcccgaaggagcaacgtcttcgatccattctcactcgacatttgggatcccttcaaggattttcatgttcccacttcttctgtttctgctgaaaattctgcattcgtgagcactcgtgtggattggaaggaaaccccagaggcacacgtgttcaaggctgatattccagggctgaagaaagaggaagtcaaggttcagattgaagatgatagggttcttcagattagcggagagaggaacgttgagaaggaagacaagaacgacacgtggcatcgcgtggagcgtagcagtggtaagttcgtgagaaggttcagattgccggagaatgcaaaagtgaatgaagtgaaggcttctatggaaaatggggttctcactgtcactgttcctaaggaagaggttaagaagcctgatgtcaaggccattgaaatctctggttga

SEQ ID NO: 8803 - protein, 154 aa, Glycine max
MSLIPGFFGARRSNVFDPFSLDIWDPFKDFHVPTSSVSAENSAFVSTRVDWKETPEAHVFKADIPGLKKEEVKVQIEDDRVLQISGERNVEKEDKNDTWHRVERSSGKFVRRFRLPENAKVNEVKASMENGVLTVTVPKEEVKKPDVKAIEISG

SEQ ID NO: 8804 - DNA, 477 bp, Glycine max
  CDS (1)..(477)
atggatatgaggttgatggatttggactctccattcttcaacactctgcacagaatcatggatctgacggaggacgccgagaagaacttgaacgctccgactcggacatacgtgcgcgacgccaaggcaatggctgcgactcctgctgacgtgaaggagtaccctaactcgtacgttttcgtgatcgacatgcctggcctcaaatctggggacattaaagtgcaggtggaggacgacaacgtgcttctgataagcggcgagaggaagagggaggaggaaaaagagaaagaagggggaaagtatttgaggatggagagaaggcttggcaagttgatgaggaagtttactctccctgagaatgccaacaccgatgctatctctgctgtctgcctagacggtgtgctcactgtcactgtcaataagctgcctcctcctcagcccaagaagcccaagactatagaggtcaacatagcctga

SEQ ID NO: 8805 - protein, 158 aa, Glycine max
MDMRLMDLDSPFFNTLHRIMDLTEDAEKNLNAPTRTYVRDAKAMAATPADVKEYPNSYVFVIDMPGLKSGDIKVQVEDDNVLLISGERKREEEKEKEGGKYLRMERRLGKLMRKFTLPENANTDAISAVCLDGVLTVTVNKLPPPQPKKPKTIEVNIA

SEQ ID NO: 8806 - DNA, 486 bp, Oryza sativa
  CDS (1)..(486)
atgtcgctgatccgccgcagcaacgtgttcgaccccttctccctcgacctctgggaccccttcgacggcttccccttcggctccggcggcagcagcagcggcagcatcttcccgtccttcccgcgcggcgcctcctccgagaccgcggccttcgccggcgcgcggatcgactggaaggagacgcccgaggcgcacgtgttcaaggcggacgtgccggggctgaagaaggaggaggtcaaggtggaggtggacgacggcaacatcctgcagatcagcggcgagcgcaacaaggagcaggaggagaagacggaccagtggcaccgcgtggagcgcagcagcggcaagttcctccgcaggttccgcctccccgacaacgccaagccggagcagatcaaggcgtccatggagaacggcgtgctcaccgtcacggttcccaaggaggaggccaagaagcccgacgtcaagtccatccagatctccggctag

SEQ ID NO: 8807 - protein, 161 aa, Oryza sativa
MSLIRRSNVFDPFSLDLWDPFDGFPFGSGGSSSGSIFPSFPRGASSETAAFAGARIDWKETPEAHVFKADVPGLKKEEVKVEVDDGNILQISGERNKEQEEKTDQWHRVERSSGKFLRRFRLPDNAKPEQIKASMENGVLTVTVPKEEAKKPDVKSIQISG

SEQ ID NO: 8808 - DNA, 501 bp, Oryza sativa
  CDS (1)..(501)
atggagagcgccatgttcgggctggagacgccgctgatgacggcgctgcagcacctgctcgacatccccgacggcgagggcggcgccgccgggaagcagggcgcgaccggtggcccgacgcgtgcgtacgtgcgcgacgcccgcgccatggcggcgacccccgccgacgtgaaggatctgcccggggcgtacgcgttcgtggtggacatgcctgggctcaagtcctccgacatcaaggtgcaggtggaggaggagaggctgctggtgatcagcggggagcggcggcgcggcggcggggaggaggagaaggaggagtcgtgcaagtacctgcggatggagcggcggatgggcaagttcatgcgcaagttcgtgctccccgacaacgccgacgtcgacaagatctccgccgtgtgccaggacggcgtgctcaccgtcaccgtcgagaagctcccgccgccggagcccaagaagcccaagaccatcgaggtcaaggtcgcgtga

SEQ ID NO: 8809 - protein, 166 aa, Oryza sativa
MESAMFGLETPLMTALQHLLDIPDGEGGAAGKQGATGGPTRAYVRDARAMAATPADVKDLPGAYAFVVDMPGLKSSDIKVQVEEERLLVISGERRRGGGEEEKEESCKYLRMERRMGKFMRKFVLPDNADVDKISAVCQDGVLTVTVEKLPPPEPKKPKTIEVKVA

SEQ ID NO: 8810 - DNA, 465 bp, Zea mays
  CDS (1)..(465)
atgtcgccggcgcgcagcagcagcagcaacgtcttcgacccgctgtcgctggacttctgggcgtcgttcgccgacccgttcggcgtcgtccggccgctggcggagcagtgccccgtcctcaccaacgtgcgcgtcgactggaaggagacccccgaggcgcacgtgttcagggccgaccttccgggcgtcaggaaggaggctgccaaggtcgaggtggaggacggcaacgtgctcgtcatcagcggcgagcgcgccagggaggaggaggaggccggcaaggacgaggcgtggcgctggcgcctcgccgagcgcagcagcggcaggttcaagaggcggttccgcctgccgcgcggcgccaggctggaccaggttcacgcgtccatggagaacggcgtgctcaccgtcaccgtgcccaaggaggaggccaagaagccgcaggtcagggctgtcgagatctctggttga

SEQ ID NO: 8811 - protein, 154 aa, Zea mays
MSPARSSSSNVFDPLSLDFWASFADPFGVVRPLAEQCPVLTNVRVDWKETPEAHVFRADLPGVRKEAAKVEVEDGNVLVISGERAREEEEAGKDEAWRWRLAERSSGRFKRRFRLPRGARLDQVHASMENGVLTVTVPKEEAKKPQVRAVEISG

SEQ ID NO: 8812 - DNA, 474 bp, Triticum aestivum
  CDS (1)..(474)
atgtcgctgatccgccgcagcaacgtgttcgaccccttctccctcgacttcttcgaccccttcgacggcttccccttcggctccggcagcaacagcagcggcagcctcatcccgcgcacctcctccgacacggcggccttcgcgggcgcgcgcatcgactggaaggagacgcccgaggcgcacgtgttcaaggcggacgtgccggggctgaagaaggaggaggtgaaggtggaggtggaggacggcaacatcctccagatcagcggcgagcggaacaaggagcaggaggagaagaccgacacctggcaccgcgtggagcgcagcagcggcaagttcctccgcaggttccggctgccggagaacgccaaggcggagcaggtgaaggcgtccatggagaacggcgtgctcaccgtcaccgtgcccaaggaggaggccaagaagcccgaggtcaagtccatccagatctccggctag

SEQ ID NO: 8813 - protein, 157 aa, Triticum aestivum
MSLIRRSNVFDPFSLDFFDPFDGFPFGSGSNSSGSLIPRTSSDTAAFAGARIDWKETPEAHVFKADVPGLKKEEVKVEVEDGNILQISGERNKEQEEKTDTWHRVERSSGKFLRRFRLPENAKAEQVKASMENGVLTVTVPKEEAKKPEVKSIQISG

SEQ ID NO: 8814 - DNA, 477 bp, Triticum aestivum
  CDS (1)..(477)
atgtcgctgatccgccgcagcaacgtgttcgaccccttctccctcgacttcttcgacccttttgacggcttccccttcggctccggcagcagcaacagcggcggcagcctcgtcccgcgcacctcctccgacacggcggccttcgcgggcgcgcgcatcgactggaaggagacgcccgaggcgcacgtgttcaaggcggacgtccccgggctgaagaaggaggaggtgaaggtggaggtggaggacggcaacatcctccagatcagcggcgagcggaacaaggagcaggaggagaagaccgacacctggcacagggtggagcgcagcagcggcaagttcctccgcaggttccggctcccggagaacgccaaggcggagcaggtgaaggcgtcgatggagaacggcgtgctcaccgtcaccgtgcccaaggaggaggccaagaagcccgacgtcaagtccatccagatctccggctag

SEQ ID NO: 8815 - protein, 158 aa, Triticum aestivum
MSLIRRSNVFDPFSLDFFDPFDGFPFGSGSSNSGGSLVPRTSSDTAAFAGARIDWKETPEAHVFKADVPGLKKEEVKVEVEDGNILQISGERNKEQEEKTDTWHRVERSSGKFLRRFRLPENAKAEQVKASMENGVLTVTVPKEEAKKPDVKSIQISG

SEQ ID NO: 8816 - DNA, 456 bp, Triticum aestivum
  CDS (1)..(456)
atgtcgatcgtgcggcggagcaacgtgttcgaccccttcgccgacctctgggcggaccccttcgacaccttccgctccatcgtcccggcgatctctggcggcagcagcgagacggccgcgttcgccaacgcccggatggactggaaggagacccccgaggcgcacgtcttcaaggccgacctccccggcgtgaagaaggaggaggtcaaggtggaggtggaggacggcaacgtgctcgtcgtcagcggcgagcgcacaaaggagaaggaggacaagaacgacaagtggcaccgcgtggagcgcagcagcggcaagtttgtcaggcggttccggctgccggaggacgccaaggtggaggaggtgaaggccgggctggagaacggcgtgctcaccgtcaccgtgcccaaggccgaggtcaagaagcccgaggtcaaggccatcgagatatccggctga

SEQ ID NO: 8817 - protein, 151 aa, Triticum aestivum
MSIVRRSNVFDPFADLWADPFDTFRSIVPAISGGSSETAAFANARMDWKETPEAHVFKADLPGVKKEEVKVEVEDGNVLVVSGERTKEKEDKNDKWHRVERSSGKFVRRFRLPEDAKVEEVKAGLENGVLTVTVPKAEVKKPEVKAIEISG

SEQ ID NO: 8818 - DNA, 456 bp, Triticum aestivum
  CDS (1)..(456)
atgtcgatcgtgaggcggagcaacgtgttcgaccccttcgccgacctctgggcggaccccttcgacaccttccgctccatcgtcccggcgatctcaggcggcaacagcgagacggccgcgttcgccaacgctcgcgtggactggaaggagactcccgaggcgcacgtcttcaaggccgaccttccaggagtgaagaaggaggaggtcaaggtggaggtggaggacggcaacgtgctcgtcgtcagtggcgagcgcacaaaggagaaggaggacaagaacgacaagtggcaccgcatggagcgcagcagcggcaagttcgtgcggcgcttccgcctccccgaggacgccaaggtggaggaggtgaaggccgggctggagaacggcgtgctcaccgtcaccgtgcccaaggccgaggtcaagaagcccgaggtgaaggccatcgagatctccggttga

SEQ ID NO: 8819 - protein, 151 aa, Triticum aestivum
MSIVRRSNVFDPFADLWADPFDTFRSIVPAISGGNSETAAFANARVDWKETPEAHVFKADLPGVKKEEVKVEVEDGNVLVVSGERTKEKEDKNDKWHRMERSSGKFVRRFRLPEDAKVEEVKAGLENGVLTVTVPKAEVKKPEVKAIEISG

SEQ ID NO: 8820 - DNA, 456 bp, Triticum aestivum
  CDS (1)..(456)
atgtcgatcgtgcggcggagcaacgtcttcgaccccttcgccgacctctgggcggaccccttcgacaccttccgctccatcgtcccggcgatctcaggtggcagcagcgagacggccgcgttcgccaatgctcgcatggactggaaggagacccccgaggcgcacgtcttcaaggccgaccttccaggcgtgaagaaggaggaggtcaaggtggaggtggaggacggcaacgtgctcgtcgtcagcggcgagcgcaccaaggaaaaggaggacaagaacgacaagtggcaccgcgtggagcgcagcagcggcaagttcgtcaggcggttccggctgccggaggacgccaaggtggaggaggtgaaggccgggctggagaacggtgtgctcaccgtcaccgtgcccaaggccgaggtcaagaagcccgaggtgaaggccatccagatctccggctga

SEQ ID NO: 8821 - protein, 151 aa, Triticum aestivum
MSIVRRSNVFDPFADLWADPFDTFRSIVPAISGGSSETAAFANARMDWKETPEAHVFKADLPGVKKEEVKVEVEDGNVLVVSGERTKEKEDKNDKWHRVERSSGKFVRRFRLPEDAKVEEVKAGLENGVLTVTVPKAEVKKPEVKAIQISG

SEQ ID NO: 8822 - DNA, 459 bp, Triticum aestivum
  CDS (1)..(459)
atgtcgatcgtgcggcggagcaacgtgttcgaccccttcgccgacctctgggcggaccccttcgacgccttccgctccatcgtcccggcgatctcaggcggcagcagcagcgagacggccgcgttcgccagtgctcgcgtggactggaaggagacccccgaggcgcacgtcttcaaggccgacctccccggcgtgaagaaggaggaggtcaaggtggaggtggaggacggcaacgtgctcgtcgtcagcggcgagcggagcagggagaaggaggacaagaacgacaagtggcaccgcgtggagcgcagcagcggcaagttcgcgaggcgcttccggctgccggaggacgccaaggtggaggaggtgaaggccgggctggagaacggcgtgctcaccgtcaccgtgccaaaggcccacgtcaagaagcccgaggtgaaggccatcgagatatccggctga

SEQ ID NO: 8823 - protein, 152 aa, Triticum aestivum
MSIVRRSNVFDPFADLWADPFDAFRSIVPAISGGSSSETAAFASARVDWKETPEAHVFKADLPGVKKEEVKVEVEDGNVLVVSGERSREKEDKNDKWHRVERSSGKFARRFRLPEDAKVEEVKAGLENGVLTVTVPKAHVKKPEVKAIEISG

SEQ ID NO: 8824 - DNA, 468 bp, Triticum aestivum
  CDS (1)..(468)
atgtcgctgatccgtcgcagcaacgtgttcgaccccttctccctcgacctctgggaccccttcgacggcttccccttcggctccgacggcagcggcagcctcgtcccgcgcacctcctctgacacggtggccttcgccggcgcgcggatcgactggaaggagacgcccgtggcgcacgtgttcaaggcggacgtgccagggctgaagaaggaggaggtgaaggtggaggtggaggacggcaacatcctccagatcagcggcgagcggaacaaggagcaggaggagaagaccgacacgtggcaccgcgtggagcgcagcagcggcaagttcctgcgcaggttcaggctcccggagaacgccaaggcggagcaggtgaaggcgtccatggagaacggcgtgctcaccgtcaccgtgcccaaggaggaggccaagaagcccgaggtcaagtccatccagatctccagctag

SEQ ID NO: 8825 - protein, 155 aa, Triticum aestivum
MSLIRRSNVFDPFSLDLWDPFDGFPFGSDGSGSLVPRTSSDTVAFAGARIDWKETPVAHVFKADVPGLKKEEVKVEVEDGNILQISGERNKEQEEKTDTWHRVERSSGKFLRRFRLPENAKAEQVKASMENGVLTVTVPKEEAKKPEVKSIQISS

SEQ ID NO: 8826 - DNA, 474 bp, Triticum aestivum
  CDS (1)..(474)
atgtcgctgatccgccgcagcaacgtgtttgaccccttctccctcgacttcttcgacccattcgaaggcttccccttcggctccggcaacagcggcagcggcagcctcgtcccgcgcacctcctcggacacggcggccttcgcgggcgcgcgcatcgactggaaggagacgcccgaggcgcacgtgttcaaggcggacgtgccggggctgaagaaggaggaggtgaaggtggaggtggaggacggcaacatcctccagatcagcggcgagcggaacaaggagcaggaggagaagactgacacctggcaccgcgtggagcgcagcagtggtaagttcctgcgcaggttccggctcccggagaacgccaaggcggagcaggtgaaggcgtccatggagaacggcgtgctcaccgtcaccgtgcccaaggtggaggccaagaagcccgaggtcaagtccatccatatctccggctag

SEQ ID NO: 8827 - protein, 157 aa, Triticum aestivum
MSLIRRSNVFDPFSLDFFDPFEGFPFGSGNSGSGSLVPRTSSDTAAFAGARIDWKETPEAHVFKADVPGLKKEEVKVEVEDGNILQISGERNKEQEEKTDTWHRVERSSGKFLRRFRLPENAKAEQVKASMENGVLTVTVPKVEAKKPEVKSIHISG

SEQ ID NO: 8828 - DNA, 462 bp, Glycine max
  CDS (1)..(462)
atgtctttgattccaagtttctttggtggcagaaggagcaatgttttggatcctttctccctcgatgtgtgggacccttttaaggattttccttttcccacttctctttctgctgaaaattcagcgtttgtgagcacacgagtggattggaaggagacaccagaagcacacgtgttcaaggctgatattccagggctgaagaaggaggaagtgaagctggagattcaagatgacagaattcttcagataagtggagagaggaacgttgagaaggaagacaagaacgacacgtggcaccgcgtggagcgaagcagtggtaagttcatgaggagtttcagattgccagagaatgctaaagtggatcaagttaaggcttccatggaaaatggggttctcactgtaactgttccaaaggaagagattaagaagcctgatgttaaggccatagaaatttctggttaa

SEQ ID NO: 8829 - protein, 153 aa, Glycine max
MSLIPSFFGGRRSNVLDPFSLDVWDPFKDFPFPTSLSAENSAFVSTRVDWKETPEAHVFKADIPGLKKEEVKLEIQDDRILQISGERNVEKEDKNDTWHRVERSSGKFMRSFRLPENAKVDQVKASMENGVLTVTVPKEEIKKPDVKAIEISG

SEQ ID NO: 8830 - DNA, 465 bp, Zea mays
  CDS (1)..(465)
atgtcgctggtgaggcgcagcagcgtgttcgacccattctccgtggacctcttcgaccccttcgacagcatgttccgctccatcgtgccgtcgtcgtcgtcggcggcggcggcctccgagaccgccgccttcgccagcgcccgcatcgactggaaggagacgcccgaggcgcacgtgttcaaggccgacctccccggcgtgaagaaggaggaggtgaaggtggaggtggaggacggcaacgtgctgctcatcagcgggcagcgcagcagggagaaggaggacaagggcgacaagtggcaccgcgtggagcgcagcagcggccagttcgtgcggcgcttccgcctccccgagaacgccaagaccgaggaggtgagggccgcgctggagaacggcgtgctcacggtcaccgtgcccaaggccgaggtcaagaagcctgaggttaagagcatccagatctccggctga

SEQ ID NO: 8831 - protein, 154 aa, Zea mays
MSLVRRSSVFDPFSVDLFDPFDSMFRSIVPSSSSAAAASETAAFASARIDWKETPEAHVFKADLPGVKKEEVKVEVEDGNVLLISGQRSREKEDKGDKWHRVERSSGQFVRRFRLPENAKTEEVRAALENGVLTVTVPKAEVKKPEVKSIQISG

SEQ ID NO: 8832 - DNA, 483 bp, Zea mays
  CDS (1)..(483)
atgtcgctcgtgagtcgccgcagcagcaacgtgttcgacttcgaccccttctccctcgacctctggtgggaccccttcgacatgttccgctccatcgtcccgtcggcggcctcctccggcggcggttccgagaccgccgccttcgccaacgcccgcgtcgactggaaggagacgcccgaggcgcacgtgttcaaggccgacctccccggcgtcaagaaggaggaggtcaaggtcgaggtgaaggacggcaacgtgctcgtcatcagcggcaagcgcagcagggaggaggaggacaagaacaagaacgacaagtggcaccgcgtcgagcgcagcagcggccagttcatgaggcgcttccgcctgcctgagaacgccaagctggacgaggtgaaggctggcctcgagaacggcgtgctcacggtcaccgtgcccaagacggaggtgaagaagcccgaggtgaaggctatcgagatctctggttga

SEQ ID NO: 8833 - protein, 160 aa, Zea mays
MSLVSRRSSNVFDFDPFSLDLWWDPFDMFRSIVPSAASSGGGSETAAFANARVDWKETPEAHVFKADLPGVKKEEVKVEVKDGNVLVISGKRSREEEDKNKNDKWHRVERSSGQFMRRFRLPENAKLDEVKAGLENGVLTVTVPKTEVKKPEVKAIEISG

SEQ ID NO: 8834 - DNA, 483 bp, Zea mays
  CDS (1)..(483)
atgtcgctcgtgagtcgccgcagcagcaacgtgttggacttggaccccttctccctcgacctctggtgggaccccttcgacatgttccgctccatcgtcccgtcggcggcctcctccggcggcggttccgagaccgccgccttcgccaacgcccgcgtcgactggaaggagacgcccgaggcgcacgtgttcaaggccgacctccccggcgtcaagaaggaggaggtcaaggtcgaggtgaaggacggcaacgtgctcgtcatcagcggcaagcgcagcagggaggaggaggaggaggacaagaacggcaagtggcaccgcgtcgagcgcagcagcggccagttcatgaggcgcttccgcctgcctgagaacgccaagctggacgaggtgaaggctggcctcgagaacggcgtgctcacggtcaccgtgcccaagacggaggtgaagaagcccgaggtgaaggctatcgagatctctgtttga

SEQ ID NO: 8835 - protein, 160 aa, Zea mays
MSLVSRRSSNVLDLDPFSLDLWWDPFDMFRSIVPSAASSGGGSETAAFANARVDWKETPEAHVFKADLPGVKKEEVKVEVKDGNVLVISGKRSREEEEEDKNGKWHRVERSSGQFMRRFRLPENAKLDEVKAGLENGVLTVTVPKTEVKKPEVKAIEISV

SEQ ID NO: 8836 - DNA, 465 bp, Zea mays
  CDS (1)..(465)
atgtcgctggtgaggcgcggcagcgtgttcgacccattctccgtggacctcttcgaccccttcgacagcgtgttccgctccatcgtgccgtcgtcgtcgtcggcggcggcggcctccgagaccgccgccttcgccagcgcccgcatcgactggaaggagacgcccgaggcgcacgtgttcaaggccgacctccccggcgtgaagaaggaggaggtgaaggtggaggtggaggacggcaacgtgctgctcatcagcgggcagcgcagcagggagaaggaggacaagggcgacaagtggcaccgcgtggagcgcagcagcggccagttcgtgcggcgcttccgcctccccgagaacgccaagaccgaggaggtgagggccgcgctggagaacggcgtgctcacggtcaccgtgcccaaggccgaggtcaagaagcctgaggttaagagcatccagatctccggctga

SEQ ID NO: 8837 - protein, 154 aa, Zea mays
MSLVRRGSVFDPFSVDLFDPFDSVFRSIVPSSSSAAAASETAAFASARIDWKETPEAHVFKADLPGVKKEEVKVEVEDGNVLLISGQRSREKEDKGDKWHRVERSSGQFVRRFRLPENAKTEEVRAALENGVLTVTVPKAEVKKPEVKSIQISG

SEQ ID NO: 8838 - DNA, 21 bp, Artificial sequence
  primer
atggcagacagaggaatattc

SEQ ID NO: 8839 - DNA, 24 bp, Artificial sequence
  primer
tcaaagcttgctagtaatattaac

SEQ ID NO: 8840 - protein, 123 aa, Artificial sequence
  consensus sequence
  Variant (2)..(3): Xaa in position 2 to 3 is any amino acid
  Variant (6)..(15): Xaa in position 6 to 15 is any amino acid
  Variant (18)..(19): Xaa in position 18 to 19 is any amino acid
  Variant (22)..(23): Xaa in position 22 to 23 is any amino acid
  Variant (26)..(31): Xaa in position 26 to 31 is any amino acid
  Variant (32)..(35): Xaa in position 32 to 35 is any or no amino acid
  Variant (37)..(37): Xaa in position 37 is any amino acid
  Variant (40)..(40): Xaa in position 40 is any amino acid
  Variant (41)..(43): Xaa in position 41 to 43 is any or no amino acid
  Variant (45)..(46): Xaa in position 45 to 46 is any amino acid
  Variant (47)..(48): Xaa in position 47 to 48 is any or no amino acid
  Variant (50)..(56): Xaa in position 50 to 56 is any amino acid
  Variant (57)..(67): Xaa in position 57 to 67 is any or no amino acid
  Variant (70)..(70): Xaa in position 70 is any amino acid
  Variant (71)..(71): Xaa in position 71 is any or no amino acid
  Variant (73)..(73): Xaa in position 73 is any amino acid
  Variant (74)..(76): Xaa in position 74 to 76 is any or no amino acid
  Variant (78)..(78): Xaa in position 78 is any amino acid
  Variant (80)..(82): Xaa in position 80 to 82 is any amino acid
  Variant (85)..(92): Xaa in position 85 to 92 is any amino acid
  Variant (93)..(93): Xaa in position 93 is any or no amino acid
  Variant (95)..(97): Xaa in position 95 to 97 is any amino acid
  Variant (102)..(102): Xaa in position 102 is any amino acid
  Variant (104)..(105): Xaa in position 104 to 105 is any amino acid
  Variant (108)..(117): Xaa in position 108 to 117 is any amino acid
  Variant (118)..(122): Xaa in position 118 to 122 is any or no amino acid
DXXETXXXXXXXXXXPGXXKEXXKVXXXXXXXXXXLXISXXXXGXXXXEXXXXXXXXXXXXXXXXXXERXXGXXXXFXRXXXLPXXXXXXXXXAXXXNGVLXVXXPKXXXXXXXXXXXXXXXI

SEQ ID NO: 8841 - protein, 18 aa, Artificial sequence
  protein pattern
  Variant (2)..(2): Xaa in position 2 is any amino acid
  Variant (3)..(9): Xaa in position 3 to 9 is any or no amino acid
  Variant (13)..(13): Xaa in position 13 is any amino acid
  Variant (14)..(14): Xaa in position 14 is Ile or Val
  Variant (15)..(15): Xaa in position 15 is any amino acid
  Variant (16)..(16): Xaa in position 16 is Ile, Leu or Val
EXXXXXXXXGVLXXXXPK

SEQ ID NO: 8842 - DNA, 1824 bp, Populus trichocarpa
  CDS (1)..(1824)
atggcatcaacgtttactgccatgtcctcagctggaaccttggctgctcctaatgcccgtgccctggataagaagtttgcattttcttcaaacaagttgtcatcttttgcttccatttctgcaagtcgatttggtagaccacagaatgtagttctaccaagatcgcgttctctcaaggttaatgcggccaaggagcttcatttcaacaaggacgggtcagcaattaggaaattgcaaactggtgtgaacaagcttgcagatctagttggggttacccttggacctaaaggccggaatgttgttcttgagagcaagtacggttcacctaaaattgtcaatgatggtgtgactgttgctaaagaggttgaattggaggatccagttgaggacattggtgctaagctagtgagacaagctgctgccaagacaaatgacttggctggtgatgggaccacaacatctgttgttcttgcacagggcctaattgcagaaggtgtcaaggttgtggcggctggtgcaaaccctgttttaatcactagaggcattgaaaagaccacaagagctcttgtaaatgaacttaaattgatgtcaaaagaggttgaagacagtgaacttgcagatgtggccgctgttagtgcagggaacaactatgaagttgggaatatgattgcggaagctatgagcaaagttggtaggaagggagtggtgactcttgaagagggaaaaagcgctgataatagtctctatgtcgttgagggaatgcagtttgaccgtggttatatctcaccttacttcgtcactgatagtgaaaaaatggctgttgaatatgataactgcaagttgcttcttgttgacaagaaaataacaaatgctagagatctcattgccattttggaagatgcaattaaaggtggatatccagttgtaatagttgctgaagacattgagcaagaagctttagctactcttgttgtcaataagcttaggggtgctttgaagattgctgccctcaaagctcctggttttggggagcggaagagccagtaccttgatgacatagctattctgactggtggaactgttgttagagaagaggtgggccttgccttggacaaagtaggcagtgaggtcctgggacatgcttctaaagtggttcttaccaaggatacaaccaccattgttgctgatggaagcacccaagaagcagtaaataagagagttgcacagattaaaaatcttattgaggctgctgaacaagactatgaaaaggagaagctcaatgaaagaattgcaaaactgtcaggtggtgttgcagtgatacaggttggagcacaaaccgaaacagagcttaaagaaaagaaactgagagttgaagatgctctaaatgcaaccaaggctgccgttgaggaaggtattgtggttggtggtggatgcaccctgctgagactggcatcaaaggtggatgccatcaaggacagccttgagaatgatgaagaaaaggtcggagcagacattgtaaagagagctctgagctaccccttgaaattaatagccaagaatgctggtgttaatgggagtgtggtcagcgagaaggtgctcgcaagtgacaatcctaagtttggatacaatgctgcaactggaaattatgaagatctgatggctgctggaatcatcgatccaacgaaggtggtcagatgttgcctggagcatgcatcatccgtagcaaagactttcttgatgtcagattgtgtagttgttgagattaaggagcccgaatcagtgcctgctggcaaccccatggacaactcaggatatgggtattaa

SEQ ID NO: 8843 - protein, 607 aa, Populus trichocarpa
MASTFTAMSSAGTLAAPNARALDKKFAFSSNKLSSFASISASRFGRPQNVVLPRSRSLKVNAAKELHFNKDGSAIRKLQTGVNKLADLVGVTLGPKGRNVVLESKYGSPKIVNDGVTVAKEVELEDPVEDIGAKLVRQAAAKTNDLAGDGTTTSVVLAQGLIAEGVKVVAAGANPVLITRGIEKTTRALVNELKLMSKEVEDSELADVAAVSAGNNYEVGNMIAEAMSKVGRKGVVTLEEGKSADNSLYVVEGMQFDRGYISPYFVTDSEKMAVEYDNCKLLLVDKKITNARDLIAILEDAIKGGYPVVIVAEDIEQEALATLVVNKLRGALKIAALKAPGFGERKSQYLDDIAILTGGTVVREEVGLALDKVGSEVLGHASKVVLTKDTTTIVADGSTQEAVNKRVAQIKNLIEAAEQDYEKEKLNERIAKLSGGVAVIQVGAQTETELKEKKLRVEDALNATKAAVEEGIVVGGGCTLLRLASKVDAIKDSLENDEEKVGADIVKRALSYPLKLIAKNAGVNGSVVSEKVLASDNPKFGYNAATGNYEDLMAAGIIDPTKVVRCCLEHASSVAKTFLMSDCVVVEIKEPESVPAGNPMDNSGYGY

SEQ ID NO: 8844 - DNA, 1815 bp, Zea mays subsp. mays
  CDS (127)..(1815)
atggcttcagcgttcgggaccgcctccacttgcggcattaaacatgcacctgccggcgttgcgcttgctgcgcccatgaagcacctttccctcgtctcgccctcgctggtttcgcttccgcgcaagatgaggccgcgaaggaagtacaacttcagggtaaacgctgcaaaggagctgcatttcaacaaggatggctcggctatcaggaaaatgcaaaatggggtcaacaagcttgcagatctcgtcggggttactcttggaccaaaggggcgaaatgtagtcctcgaaagcaagtatggctcacctaaaattgtcaatgatggtgtcactgtggcaaaggaggttgaacttgaggaccctgttgaaaatattggtgctaaattggtccgccaagctgctgctaaaacaaatgacttggctggtgatgggacaaccacttcggttgtccttgctcaagggatgattactgagggtgtaaaggttgtagctgctggtgctaatccagtgcagatcacccgtggtattgagaaaacagccaaagcactagtcagtgaactccaaaagatgtccaaggaggttgaggacagtgagcttgctgatgttgctgcagttagtgcgggaaataactatgaaattgggaatatgatagctgaggctatgaaaaaggttgggcggcagggagtggtcacacttgaagaaggaaagagtgctgaaaataacctctattctgttgagggaatgcagtttgaccgtggctatatttctccctactttgtgactgacagtgaaaaaatgacagtcgagtatgagaactgcaagcttctccttgtggacaagaaaattaacaatgccagagatcttatcactatcctggaggatgctattagaagtggatatccaattctaatagtggcagaggacattgagcaggaagctcttgcaacccttgtggttaataggcttagaggtgcattgaagattgctgctattaaggcccctggttttggagagcgcaaaagtcaatatcttgatgacattgctactctcactggaggcactgtcatcagagaagaagttggattatccttagacaaggcagacaatgcggtcctaggaactgctgctaaggttgtagttaccaaggattcaacaacaatagtgggagatggcactacacaggaggaagtgaacaaaagggtgacacaaatcaagaaccagattgaggctactgaacaagaatatgagagagaaaaactaaacgagaggatagctaaactctctggtggtgttgctgtcattcaggtaggagcacagacagaaactgagctcaaggaaaagaaattgagggttgaggatgccctgaatgctacaaaggcagcagtcgaggaaggtatcgtaggtggtggctgtacccttttgaggcttgcatcaaaagttgatgcaattatagagacccttgagaacgatgaacagaaggttggggctgaaattgtaaggaagtccttgagctatccacttaaattgattgcaaaaaatgcaggcgttaatggcagtgtggttactgagaaggttcttgccaatgagaacttcaggtatgggtacaatgcggctacaggggagtatgaggacttgatggctgctggtatcattgatcccaccaaggttgtgaggtgctgcttggagcatgctgcatcggtggcgaaaaccttcatcacctctgatgccgttgttgttgacgccaaggtggctgagcaagcaccatcatctcctgcaaacccaatggcaatgggtggtggctcaggttttgggttctaa

SEQ ID NO: 8845 - protein, 562 aa, Zea mays subsp. mays
MRPRRKYNFRVNAAKELHFNKDGSAIRKMQNGVNKLADLVGVTLGPKGRNVVLESKYGSPKIVNDGVTVAKEVELEDPVENIGAKLVRQAAAKTNDLAGDGTTTSVVLAQGMITEGVKVVAAGANPVQITRGIEKTAKALVSELQKMSKEVEDSELADVAAVSAGNNYEIGNMIAEAMKKVGRQGVVTLEEGKSAENNLYSVEGMQFDRGYISPYFVTDSEKMTVEYENCKLLLVDKKINNARDLITILEDAIRSGYPILIVAEDIEQEALATLVVNRLRGALKIAAIKAPGFGERKSQYLDDIATLTGGTVIREEVGLSLDKADNAVLGTAAKVVVTKDSTTIVGDGTTQEEVNKRVTQIKNQIEATEQEYEREKLNERIAKLSGGVAVIQVGAQTETELKEKKLRVEDALNATKAAVEEGIVGGGCTLLRLASKVDAIIETLENDEQKVGAEIVRKSLSYPLKLIAKNAGVNGSVVTEKVLANENFRYGYNAATGEYEDLMAAGIIDPTKVVRCCLEHAASVAKTFITSDAVVVDAKVAEQAPSSPANPMAMGGGSGFGF

SEQ ID NO: 8846 - DNA, 1818 bp, Zea mays subsp. mays
  CDS (127)..(1818)
atggcttcagcgttcgggaccgcctccacttgcggcattaaacatgcacctgccggcgttgcgcttgctgcgcccatgaagcacctttccctcgtctcgccctcgctggtttcgcttccgcgcaagatgaggccgcgaaggaagtacaacttcagggtaaacgctgcaaaggagctgcatttcaacaaggatggctcggctatcaggaaaatgcaaaatggggtcaacaagcttgcagatctcgtcggggttactcttggaccaaaggggcgaaatgtagtcctcgaaagcaagtatggctcacctaaaattgtcaatgatggtgtcactgtggcaaaggaggttgaacttgaggaccctgttgaaaatattggtgctaaattggtccgccaagctgctgctaaaacaaatgacttggctggtgatgggacaaccacttcggttgtccttgctcaagggatgattactgagggtgtaaaggttgtagctgctggtgctaatccagtgcagatcacccgtggtattgagaaaacagccaaagcactagtcagtgaactccaaaagatgtccaaggaggttgaggacagtgagcttgctgatgttgctgcagttagtgcgggaaataactatgaaattgggaatatgataactgaggctatgaaaaaggttgggcggcagggagtggtcacacttgaagaaggaaagagtgctgaaaataacctctattctgttgagggaatgcagtttgaccgtggctatatttctccctactttgtgactgacagtgaaaaaatgacagtcgagtatgagaactgcaagcttctccttgtggacaagaaaattaacaatgccagagatcttatcactatcctggaggatgctattagaagtggatatccaattctaatagtggcagaggacattgagcaggaagctcttgcaacccttgtggttaataggcttagaggtgcattgaagattgctgctattaaggcccctggttttggagagcgcaaaagtcaatatcttgatgacattgctactctcactggaggcactgtcatcagagaagaagttggattatccttagacaaggcagacaatgcggtcctaggaactgctgctaaggttgtagttaccaaggattcaacaacaatagtgggagatggcactacacaggaggaagtgaacaaaagggtgacacaaatcaagaaccagattgaggctactgaacaagaatatgagagagaaaaactaaacgagaggatagctaaactctctggtggtgttgctgtcattcaggtaggagcacagacagaaactgagctcaaggaaaagaaattgagggttgaggatgccctgaatgctacaaaggcagcagtcgaggaaggtatcgttgtaggtggtggctgtacccttttgaggcttgcatcaaaatttgatgcaattatagagacccttgagaacgatgaacagaaggttggggctgaaattgtaaggaagtccttgagctatccacttaaattgattgcaaaaaatgcaggcgttaatggcagtgtggttactgagaaggttcttgccaatgagaacttcaggtatgggtacaatgcggctacaggggagtatgaggacttgatggctgctggtatcattgatcccaccaaggttgtgaggtgctgcttggagcatgctgcatcggtggcgaaaaccttcatcacctctgatgccgttgttgttgacgccaaggtggctgagcaagcaccatcatctcctgcaaacccaatggcaatgggtggtggctcaggttttgggttctaa

SEQ ID NO: 8847 - protein, 563 aa, Zea mays subsp. mays
MRPRRKYNFRVNAAKELHFNKDGSAIRKMQNGVNKLADLVGVTLGPKGRNVVLESKYGSPKIVNDGVTVAKEVELEDPVENIGAKLVRQAAAKTNDLAGDGTTTSVVLAQGMITEGVKVVAAGANPVQITRGIEKTAKALVSELQKMSKEVEDSELADVAAVSAGNNYEIGNMITEAMKKVGRQGVVTLEEGKSAENNLYSVEGMQFDRGYISPYFVTDSEKMTVEYENCKLLLVDKKINNARDLITILEDAIRSGYPILIVAEDIEQEALATLVVNRLRGALKIAAIKAPGFGERKSQYLDDIATLTGGTVIREEVGLSLDKADNAVLGTAAKVVVTKDSTTIVGDGTTQEEVNKRVTQIKNQIEATEQEYEREKLNERIAKLSGGVAVIQVGAQTETELKEKKLRVEDALNATKAAVEEGIVVGGGCTLLRLASKFDAIIETLENDEQKVGAEIVRKSLSYPLKLIAKNAGVNGSVVTEKVLANENFRYGYNAATGEYEDLMAAGIIDPTKVVRCCLEHAASVAKTFITSDAVVVDAKVAEQAPSSPANPMAMGGGSGFGF

SEQ ID NO: 8848 - DNA, 1806 bp, Oryza sativa
  CDS (40)..(1806)
atggcttcaacattcggtgccacttctacggttggcctcatggctgcgccaaccggaattgtatcagacaagaagccatcttctctatcttcggtgtcatctgtttctgttgccagccgaccacgcaatgcacgccttcagaggaagtgcaacttcagggtaaaagctgccaaggagttgtacttcaacaaggatggctcggctatcaagaagcttcagactggagtaaacaagcttgctgaccttgttggagttacactgggaccaaagggaaggaatgttgttttggagagcaagtatgggtcccctaggattgtcaatgatggtgttacagttgcaagagaggttgaactggaggatcctgttgaaaatattggagctaagttggttaggcaagcagcagcaaagaccaatgatttagctggagatggcacaactacttctgttgtgcttgctcaggggctgattgctgagggtgttaaggtcgttgcagctggtgccaatcctgtgcaaattacacgtggtatcgagaaaactgcgaaagcactagttgaagagctaaagaaattgtcaaaggaggttgaagacagtgagcttgcggatgttgctgcagtcagtgctggcaacaattatgaaatcggtaatatgatagcagaggctatgagcaaggttggcaggaagggtgtggttacccttgaagaagggagaagttctgagaataatctctatgttgtggagggaatgcagtttgaacgtggttatatctccccgtattttgtaactgacagcgagaagatgtctgcagaatatgagaactgcaagcttcttttggtggacaaaaaaatcaccaacgcaagggatcttatcaatgttttggaggaggccataagaggtgcatacccaattctgataattgctgaggatattgagcaggaggctcttgctactcttgttgtcaacaagcttagagggtcattgaaaattgccgctatcaaagcccctggttttggtgagcgcaagacccagtacttggatgatattgccattctaactggagcaactgtaatcagggatgaagttgggctgtcacttgacaaggcagacaaatcagttttaggaacggctgcaaaggtggtccttaacaaagagtcaacaacaattgttggtgatggcagtacacaggaagaagtgactaagagggttgcacaaataaaaaatctcatcgaggctgccgaacaagaatacgagaaggaaaagctcaatgagaggattgcaaagcttgctggtggtgttgcagtcattcaggtgggagcacaaacagagaccgaactaaaagagaagaagttgagagttgaggatgccctaaatgctaccaaggctgctgttgaggaaggtattgttgttggtggagggtgcactcttctgagactggcagctagagttgacgccatcaaggacaacctggagaatgatgagcagaaggttggagctgaaattgtaaggagagcgctgagctacccgcttaaattgattgctaagaatgctggtgttaatggaagcgttgttaccgagaaggttctctctaacgataacttcaagtttggttacaatgctgcaactggacagtacgaggatttgatggctgctggtatcattgaccccactaaggtggtgagatgttgtcttgagcatgctgcgtcggtggccaagacattcctcacatcggatgtcgtcgtcgtcgagatcaaggagcctgagcctgcgcccgtcaccaacccgatggacaactccggctacgggtactga

SEQ ID NO: 8849 - protein, 588 aa, Oryza sativa
MAAPTGIVSDKKPSSLSSVSSVSVASRPRNARLQRKCNFRVKAAKELYFNKDGSAIKKLQTGVNKLADLVGVTLGPKGRNVVLESKYGSPRIVNDGVTVAREVELEDPVENIGAKLVRQAAAKTNDLAGDGTTTSVVLAQGLIAEGVKVVAAGANPVQITRGIEKTAKALVEELKKLSKEVEDSELADVAAVSAGNNYEIGNMIAEAMSKVGRKGVVTLEEGRSSENNLYVVEGMQFERGYISPYFVTDSEKMSAEYENCKLLLVDKKITNARDLINVLEEAIRGAYPILIIAEDIEQEALATLVVNKLRGSLKIAAIKAPGFGERKTQYLDDIAILTGATVIRDEVGLSLDKADKSVLGTAAKVVLNKESTTIVGDGSTQEEVTKRVAQIKNLIEAAEQEYEKEKLNERIAKLAGGVAVIQVGAQTETELKEKKLRVEDALNATKAAVEEGIVVGGGCTLLRLAARVDAIKDNLENDEQKVGAEIVRRALSYPLKLIAKNAGVNGSVVTEKVLSNDNFKFGYNAATGQYEDLMAAGIIDPTKVVRCCLEHAASVAKTFLTSDVVVVEIKEPEPAPVTNPMDNSGYGY

SEQ ID NO: 8850 - DNA, 2236 bp, Zea mays
  CDS (69)..(1808)
ctaattagaggctcctccgcgctctcggcgggggtttagctgccgtggcctgaggatttgtagaagacatggcctcgacgttcggtgccacttctacagttggccttatggctgctccaacggggaagaatgtgcgccttcagaggagggctaacttcagagtaaaagcggctaaggagctgtacttcaacaaggatgggtcagctatcaagaagctccagactggagtcaataagcttgcagacctagttggagttacactcggaccgaagggaaggaatgtcgttttggagagcaagtacggctctcccaagattgttaacgatggcgttacagttgcaagagaggttgagctggaggaccctgtggaaaacattggagctaaattggtcaggcaagctgcagctaagaccaacgatcttgctggagatgggacaaccacctctgtggtccttgctcaggggctgattgctgagggtgttaaggtggtagcagctggtgctaatcctgttcagattactcgtggtattgagaaaacagctaaagcactagttgaagaactacggaagttgtctaaggaggttgaagatagtgagcttgcagatgttgctgcagttagtgctggcaacaactatgaaattggtaacatgatagcagaggccatgagcaaggtcggtcggaagggcgttgtcacccttgaagaggggaagagttctgagaactttctctatgttgtggagggaatgcaatttgaccgtggttacatctctccgtactttgtaacagacagtgagaaaatgactgcagagtacgagaactgcaagctgcttttggttgataagaaaatcaccaatgcaagggatcttatcaacgttttggaagaagccatcagaggtgcatacccaatcctgataattgcagaggatattgagcaggaggctcttgctacccttgtcgtcaacaagctcagaggatcactgaagatcgctgccatcaaagcccctggttttggagagcgcaagactcagtacttggatgatattgccatccttactggagcaactgtaatcagagatgaagttgggctatcacttgacaaggccgacaagtcagttcttggaacagccgcaaaggttgtccttacgaaagagtcgacaacaattgttggtgatggcagcacccaggaagaagttactaagagggttgcacagattaaaaatctcattgaggcagcagaacaagaatacgaaaaggaaaagctcaatgagaggatagcgaagcttgctggtggtgttgctgtcattcaggtgggagcacaaacagaaactgaactaaaagagaagaagttgagagttgaggatgccctaaatgcaactaaggctgccgttgaggaaggtattgttgttgggggagggtgcactcttttgcggcttgcagctaaagtcgacgccatcaaggatacactggagaacgacgagcagaaggttggagctgaaatagtgaggagggccctgagctacccacttaatttgattgctaaaaacgccggtgtcaatggcagtgttgtcactgagaaggtcctttctaatgataacttcaagtatggttacaatgctgctactggacagtacgaggacctgatggctgctggtatcattgaccccaccaaggtggtgagatgctgcttggagcacgccgcgtcggtggccaagaccttcctgacatcagatgttgtggtcgtcgatatcaaggagccggaggctacacctgtcgcaaacccgatggacaactctggctatggatactgatgagatgctatggccatgccccatgggacgaaggtgatcaccatattaattttttggtaggcgaggagtcgggtcgaggtagctttttagacgaccgaaaggcgaaaataagttgaggatctgcatcccaaatttgtgatgtaaactgaggcagaacagcagccaaatgaagcagagatttgatgaaagattctgtaactggttgcagctaattttgaatgcagtttgcacacgaccaattcaaatggctccggcaacgtcagattatgctgcgtcgaaactgatttgaaactgatacaccggagcggtctcctctctgggagcgatccatatttttgtgtactttctgatttgatgacccatctgtttgtttctagaagataatgtatttgagggcgtctgtttttaaaagaaaagtttgcatgagt

SEQ ID NO: 8851 - protein, 579 aa, Zea mays
MASTFGATSTVGLMAAPTGKNVRLQRRANFRVKAAKELYFNKDGSAIKKLQTGVNKLADLVGVTLGPKGRNVVLESKYGSPKIVNDGVTVAREVELEDPVENIGAKLVRQAAAKTNDLAGDGTTTSVVLAQGLIAEGVKVVAAGANPVQITRGIEKTAKALVEELRKLSKEVEDSELADVAAVSAGNNYEIGNMIAEAMSKVGRKGVVTLEEGKSSENFLYVVEGMQFDRGYISPYFVTDSEKMTAEYENCKLLLVDKKITNARDLINVLEEAIRGAYPILIIAEDIEQEALATLVVNKLRGSLKIAAIKAPGFGERKTQYLDDIAILTGATVIRDEVGLSLDKADKSVLGTAAKVVLTKESTTIVGDGSTQEEVTKRVAQIKNLIEAAEQEYEKEKLNERIAKLAGGVAVIQVGAQTETELKEKKLRVEDALNATKAAVEEGIVVGGGCTLLRLAAKVDAIKDTLENDEQKVGAEIVRRALSYPLNLIAKNAGVNGSVVTEKVLSNDNFKYGYNAATGQYEDLMAAGIIDPTKVVRCCLEHAASVAKTFLTSDVVVVDIKEPEATPVANPMDNSGYGY

SEQ ID NO: 8852 - DNA, 1755 bp, glycine max
  CDS (1)..(1755)
atggcctcaaccaacgctctctcttcagcctccattctacgctctcccaaccgccagtctctgacccgaagagcgaaccataatggaagagtaaattaccggaaaccgaataaccgtttctccgtgaaagcctccgccaaagagattgcctttgaccagcattcccgctctgctatgcaggccggcattgacaagctcgccgacgctgttgggctcactcttgggcccagagggaggaatgttgtgttggatgagtttggaagtcctaaagtggtcaacgatggtgtcaccattgctcgcgcaatcgagcttcccgatcctatggagaatgctggtgcagctcttatcagagaggttgctagcaagactaacgactctgcgggtgatgggactaccacggcttcggttcttgctcgcgagataattaagctggggcttctcagtgtgacttctggggcaaatcctgtgtctcttaagagagggattgataagactgtgcagggtttggtggaggagttggagaagaaggccaggcctgtcaaaggtggagatgatatcaaagctgttgcttccatttctgctgggaatgatgagttgattgggcaaatgattgcggaagcaattgataaggttggacctgatggtgttttgtccattgagtcttcatcttcatttgagaccacagttgaagtggaagaaggaatggagattgacagagggtatatctcgcctcaatttgtgacaaaccctgagaagttgattgttgaatttgagaatgcgagagtgttgatcacggatcagaagatttcagcaataaaagatattataccactgttggagaaaaccactcagttgagagctcctttgcttatcattgctgaggatgtcactggtgaggctttggccacccttgttgtgaataagctacgtggtatccttaacgttgctgccatcaaagctcctggctttggtgagcggcgaaaggccctgcttcaagacattgctatattgactggtgctgagttccaagctagtgatctgggtctgcttgttgaaaacacctcagtggagcagcttggcttggctcggaaaattaccatctccaaggattctaccactatcattgctgatgctgcaacaaaggatgagctgcaagccagggttgctcagttaaagaaggagctgtcacagacagactcagtatatgatactgagaaactggctgagaggatagctaaactgtctggtggagttgcagtcatcaaggttggtgctgccacagagaccgagcttgaggatcgtaagctccgaattgaggatgccaagaatgcaacttttgctgccattgaggaaggtattgtacctggtggaggtactgcactggttcatctctccactcatgtcccagcactcaaggacaagcttgatgatgcagatgagaggctaggagccgacattgtgcaaaaggcactgatagctcctgcagcattgattgctcaaaatgctggaatagaaggtgaagttgttgtggagaaaataaagagtggtgaatgggaggtcggttacaatgctatggtagacaggtatgagaatttagtggaggctggagttatcgaccctgccaaggtaacaaggtgtgcattgcagaatgctgcttcagttgctggaatggtgttgaccacacaggccattgtggtggaaaaacctaagcccaaggcacctgtagctggtgccccacaaggccttaccgtttaa

SEQ ID NO: 8853 - protein, 584 aa, glycine max
MASTNALSSASILRSPNRQSLTRRANHNGRVNYRKPNNRFSVKASAKEIAFDQHSRSAMQAGIDKLADAVGLTLGPRGRNVVLDEFGSPKVVNDGVTIARAIELPDPMENAGAALIREVASKTNDSAGDGTTTASVLAREIIKLGLLSVTSGANPVSLKRGIDKTVQGLVEELEKKARPVKGGDDIKAVASISAGNDELIGQMIAEAIDKVGPDGVLSIESSSSFETTVEVEEGMEIDRGYISPQFVTNPEKLIVEFENARVLITDQKISAIKDIIPLLEKTTQLRAPLLIIAEDVTGEALATLVVNKLRGILNVAAIKAPGFGERRKALLQDIAILTGAEFQASDLGLLVENTSVEQLGLARKITISKDSTTIIADAATKDELQARVAQLKKELSQTDSVYDTEKLAERIAKLSGGVAVIKVGAATETELEDRKLRIEDAKNATFAAIEEGIVPGGGTALVHLSTHVPALKDKLDDADERLGADIVQKALIAPAALIAQNAGIEGEVVVEKIKSGEWEVGYNAMVDRYENLVEAGVIDPAKVTRCALQNAASVAGMVLTTQAIVVEKPKPKAPVAGAPQGLTV

SEQ ID NO: 8854 - DNA, 1785 bp, Brassica napus
  CDS (1)..(1785)
atggcttcagctttcagcgcaacgtcttcactgggctcatctttggctcctccttcgaacagattatcatctcttgtttcggtctcgacgaacccttttggaaagagtcaagcttttgctcagaggaaagcgaggttccccaaaatctacgcggctaagcagttgcatttcaataaagacgggactgctattaagaagcttcaagctggtgtgaacaaacttgcggatctagttggagttacattaggtccaaaagggagaaacgttgttcttgaaagcaaatacggttctccgaggatcgttaatgacggtgttacagttgctagagaggttgagcttgaggatccagttgagaacattggtgctaagctagtgagacaagctgcttccaagactaatgacttagctggtgatggaacgacgacttccgttgttcttgcgcaaggtctcatcgctgaaggtgtcaaggtggtggctgctggtgcaaacccggtgttgattaccagaggaatcgagaaaaccaccaaggctcttgtcgccgagttgaagaagatgtcaaaagaggtcgaagatagtgaactcgcagatgtagcagctgtaagtgcaggaaacaactacgaagtaggcaacatgattgcggaagcaatggctaaagttggccgtaaaggcgttgtcactctggaagaaggaaaaagcgcagagaacagtctctacgttgttgaagggatgcaattcgatcgtggctacatttctccttactttgtcactgatagtgagaaaatgtgtgctgaatacgagaactgcaagttgtttcttgttgacaagaaaataacaaatgctagagacattatcagtattcttgaagatgctatcaaaggtggatacccgcttctgatcattgctgaagacatcgagcaagagccattagcgactcttgttgttaacaagcttcgtggtactataaagattgctgctttaaaagctcctgggtttggagagaggaagagtcagtaccttgatgacattgctgctcttacaggagctactgtaattagggaagaggttgggcttcagttggagaaagttggaccagaggttttgggtaatgctggtaaagtggttctcacaaaagacactacgactattgttggtgatggaagtactgaagaagttgtgaagaagagagttgaacagatcaagaatcttatcgaggctgctgaacaagactatgagaaggaaaagcttaatgagagaatcgctaaattatcaggcggtgttgctgtaatccaggttggagcacaaactgagacagagcttaaggagaagaaattgagagttgaagatgctcttaatgctacaaaggcggctgtggaagaaggtattgttgttggaggtggatgcactctgctaagacttgcagcaaaagtggatgccattaaagcgactctagcaaacgatgaagaaaaggttggagctgacattgttaagaaagcattgagctacccattgaagttaatcgccaagaacgctggtgttaatggcagcgttgtcagcgaaaaggtactctctagcgacaaccctaaacacggttacaacgctgcaactggcaaatacgaagatcttatgtctgcaggaatcattgatccaaccaaagttgtgagatgttgcttagagcatgctttatctgtggctaagacattcttgatgtctgattgggttgttgtggagatcaaggagcctgaatcagcagctcctgccatggataattcaggttatggcttctaa

SEQ ID NO: 8855 - protein, 594 aa, Brassica napus
MASAFSATSSLGSSLAPPSNRLSSLVSVSTNPFGKSQAFAQRKARFPKIYAAKQLHFNKDGTAIKKLQAGVNKLADLVGVTLGPKGRNVVLESKYGSPRIVNDGVTVAREVELEDPVENIGAKLVRQAASKTNDLAGDGTTTSVVLAQGLIAEGVKVVAAGANPVLITRGIEKTTKALVAELKKMSKEVEDSELADVAAVSAGNNYEVGNMIAEAMAKVGRKGVVTLEEGKSAENSLYVVEGMQFDRGYISPYFVTDSEKMCAEYENCKLFLVDKKITNARDIISILEDAIKGGYPLLIIAEDIEQEPLATLVVNKLRGTIKIAALKAPGFGERKSQYLDDIAALTGATVIREEVGLQLEKVGPEVLGNAGKVVLTKDTTTIVGDGSTEEVVKKRVEQIKNLIEAAEQDYEKEKLNERIAKLSGGVAVIQVGAQTETELKEKKLRVEDALNATKAAVEEGIVVGGGCTLLRLAAKVDAIKATLANDEEKVGADIVKKALSYPLKLIAKNAGVNGSVVSEKVLSSDNPKHGYNAATGKYEDLMSAGIIDPTKVVRCCLEHALSVAKTFLMSDWVVVEIKEPESAAPAMDNSGYGF

SEQ ID NO: 8856 - DNA, 1818 bp, Zea mays
  CDS (1)..(1818)
atggcttcagcgttcgggaccgcctccacttgcggcattaaacatgcacctgccggcgttgcgcttgctgcgcccatgaagcacctttccctcgtctcgccctcgctggtttcgcttccgcgcaagatgaggccgcgaaggaagtacaacttcagggtaaacgctgcaaaggagctgcatttcaacaaggatggctcggctatcaggaaaatgcaaaatggggtcaacaagcttgcagatctcgtcggggttactcttggaccaaaggggcgaaatgtagtcctcgaaagcaagtatggctcacctaaaattgtcaatgatggtgtcactgtggcaaaggaggttgaacttgaggaccctgttgaaaatattggtgctaaattggtccgccaagctgctgctaaaacaaatgacttggctggtgatgggacaaccacttcggttgtccttgctcaagggatgattactgagggtgtaaaggttgtagctgctggtgctaatccagtgcagatcacccgtggtattgagaaaacagccaaagcactagtcagtgaactccaaaagatgtccaaggaggttgaggacagtgagcttgctgatgttgctgcagttagtgcgggaaataactatgaaattgggaatatgatagctgaggctatgaaaaaggttgggcggcagggagtggtcacacttgaagaaggaaagagtgctgaaaataacctctattctgttgagggaatgcagtttgaccgtggctatatttctccctactttgtgactgacagtgaaaaaatgacagtcgagtatgagaactgcaagcttctccttgtggacaagaaaattaacaatgccagagatcttatcactatcctggaggatgctattagaagtggatatccaattctaatagtggcagaggacattgagcaggaagctcttgcaacccttgtggttaataggcttagaggtgcattgaagattgctgctattaaggcccctggttttggagagcgcaaaagtcaatatcttgatgacattgctactctcactggaggcactgtcatcagagaagaagttggattatccttagacaaggcagacaatgcggtcctaggaactgctgctaaggttgtagttaccaaggattcaacaacaatagtgggagatggcactacacaggaggaagtgaacaaaagggtgacacaaatcaagaaccagattgaggctactgaacaagaatatgagagagaaaaactaaacgagaggatagctaaactctctggtggtgttgctgtcattcaggtaggagcacagacagaaactgagctcaaggaaaagaaattgagggttgaggatgccctgaatgctacaaaggcagcagtcgaggaaggtatcgttgtaggtggtggctgtacccttttgaggcttgcatcaaaagttgatgcaattatagagacccttgagaacgatgaacagaaggttggggctgaaattgtaaggaagtccttgagctatccacttaaattgattgcaaaaaatgcaggcgttaatggcagtgtggttactgagaaggttcttgccaatgagaacttcaggtatgggtacaatgcggctacaggggagtatgaggacttgatggctgctggtatcattgatcccaccaaggttgtgaggtgctgcttggagcatgctgcatcggtggcgaaaaccttcatcacctctgatgccgttgttgttgacgccaaggtggctgagcaagcaccatcatctcctgcaaacccaatggcaatgggtggtggctcaggttttgggttctaa

SEQ ID NO: 8857 - protein, 605 aa, Zea mays
MASAFGTASTCGIKHAPAGVALAAPMKHLSLVSPSLVSLPRKMRPRRKYNFRVNAAKELHFNKDGSAIRKMQNGVNKLADLVGVTLGPKGRNVVLESKYGSPKIVNDGVTVAKEVELEDPVENIGAKLVRQAAAKTNDLAGDGTTTSVVLAQGMITEGVKVVAAGANPVQITRGIEKTAKALVSELQKMSKEVEDSELADVAAVSAGNNYEIGNMIAEAMKKVGRQGVVTLEEGKSAENNLYSVEGMQFDRGYISPYFVTDSEKMTVEYENCKLLLVDKKINNARDLITILEDAIRSGYPILIVAEDIEQEALATLVVNRLRGALKIAAIKAPGFGERKSQYLDDIATLTGGTVIREEVGLSLDKADNAVLGTAAKVVVTKDSTTIVGDGTTQEEVNKRVTQIKNQIEATEQEYEREKLNERIAKLSGGVAVIQVGAQTETELKEKKLRVEDALNATKAAVEEGIVVGGGCTLLRLASKVDAIIETLENDEQKVGAEIVRKSLSYPLKLIAKNAGVNGSVVTEKVLANENFRYGYNAATGEYEDLMAAGIIDPTKVVRCCLEHAASVAKTFITSDAVVVDAKVAEQAPSSPANPMAMGGGSGFGF

SEQ ID NO: 8858 - DNA, 1797 bp, Oryza sativa
  CDS (1)..(1797)
atggcctcagcattcgggagcacctcagcatgtggcatcaagatcactcctaccgcttttgccaccaagaaacatctttgcctggttccacccccagtcgtttcacttccccggaaaaataggcctcagaggaagtgtaatttcagagtaaatgctgccaaagagttatatttcaacaaggatgggttggctatcaagaagctgcaaaatggagtcaataagcttgctgatctcgttggagtcacccttggtccaaaaggacggaatgttgtccttgagagcaagtatggatcacctaaaattgtcaatgatggtgttaccgttgcaaaggaggttgagctggaggaccctgttgaaaatattggagccaaattagtccggcaagctgcagccaagacaaatgatttggctggtgatgggacaacgacttctgttgtccttgctcaagggatgatcacagagggtgttaaggttgtggctgctggtgctaatccagtacagattacccgtggtatagagaaaacggccaaagcacttgtgagtgaactccaaaaaatgtccaaggaggttgaagacagcgaacttgctgatgttgctgcggtaagtgctggaaataactacgaaattggcaacatgatagctgaagctatgaacaaggttggacgacagggggtggtcacacttgaagaaggaaagagtgctgaaaataatctctatgttgttgagggaatgcaatttgatcgcggctatatttctccctactttgtaactgacagtgaaaaaatgtcagtggagtatgagaattgcaagttgctccttgtggacaagaaaatcaacaatgccagagatcttataacaattctggaggatgctattaggggtgggtacccaatcctaatagttacggaggatattgagcaggaagctcttgcaactcttgtggtcaacaggcttaggggtgcattgaagattgctgctattaaagctcctggttttggagaacgcaagagtcaataccttgatgatattgctactcttactggaggtactgtcatcagggaagaagttggcttgtccctagacaaagctgatagagatgttctaggaacggccgccaaggttgtagttaccaaggattcaacaacaatagttggggatggtactacccaggacgaagtaaacaaaagggtgacacaaatcaagaaccagattgaggttgctgaacaggaatatgagaaagaaaaactgaatgagagaatagctaagctctctggtggtgttgctgtcatccaggtaggagcacagacagaaactgagcttaaggaaaagaaactgagggttgaagatgcactgaatgcaaccaaggcggctgttgaggaaggtattgttgttggaggtggctgtacgcttttgcggcttgcatcaaaagttgatgccattatagaaacacttgagaatgatgaacagaaggttggggctgaaatcgtaaggaagtccttgagttacccacttaaattaatagcaaaaaatgctggtgttaacggcagtgttgttactgagaaggtccttgccaatgataacttcaggtatggttacaatgccgctacaggaaaatatgaggatttgatggctgctggtattattgatcccaccaaggtggtgagatgttgcttggagcatgctgcgtcggtggcgaaaacattcatcacatcagatgctgttgtggtggacatcaaggagcctgagaaagcagctgctgctgggaacccaatgggtggatcaggttttggattttag

SEQ ID NO: 8859 - protein, 598 aa, Oryza sativa
MASAFGSTSACGIKITPTAFATKKHLCLVPPPVVSLPRKNRPQRKCNFRVNAAKELYFNKDGLAIKKLQNGVNKLADLVGVTLGPKGRNVVLESKYGSPKIVNDGVTVAKEVELEDPVENIGAKLVRQAAAKTNDLAGDGTTTSVVLAQGMITEGVKVVAAGANPVQITRGIEKTAKALVSELQKMSKEVEDSELADVAAVSAGNNYEIGNMIAEAMNKVGRQGVVTLEEGKSAENNLYVVEGMQFDRGYISPYFVTDSEKMSVEYENCKLLLVDKKINNARDLITILEDAIRGGYPILIVTEDIEQEALATLVVNRLRGALKIAAIKAPGFGERKSQYLDDIATLTGGTVIREEVGLSLDKADRDVLGTAAKVVVTKDSTTIVGDGTTQDEVNKRVTQIKNQIEVAEQEYEKEKLNERIAKLSGGVAVIQVGAQTETELKEKKLRVEDALNATKAAVEEGIVVGGGCTLLRLASKVDAIIETLENDEQKVGAEIVRKSLSYPLKLIAKNAGVNGSVVTEKVLANDNFRYGYNAATGKYEDLMAAGIIDPTKVVRCCLEHAASVAKTFITSDAVVVDIKEPEKAAAAGNPMGGSGFGF

SEQ ID NO: 8860 - DNA, 1734 bp, Oryza sativa
  CDS (1)..(1734)
atgtaccgcgcggcggccagcctcgcctccaaggcccgtcaagccgggagcagcgctcgtcagattgggagtaggctcgccttgcatagaaactatgctgccaaggacatcaagtttggtgtcgaggcccgggccttgatgttgaggggtgttgaggagttggctgatgcggtcaaagtgacaatgggtcctaagggacgcactgttgttattgagcaaagctttggtgctcctaaagttacaaaggatggagttactgttgccaagagcattgaattcagtaacagggttaagaatgttggtgcaagccttgtgaagcaggttgctaatgcgactaacgacactgctggggatgggacaacatgtgctactgttcttacaaaagctatattcgctgagggatgcaagtctgtagcagctggaatgaatgcgatggatttgagacgtggtatctcgatggctgttgatgaagtagtgacaaatttaaaaggcatggccagaatgattagcacatcagaggaaatagcacaggttggtactatatcagctaatggggaaagggaaattggtgagctcattgcaaaagctatggagaaggttggcaaagagggagtcatcactattacggatggtaacaccctctacaatgagcttgaagttgtagaaggcatgaaacttgacagaggttatatctctccttacttcattaccaaccaaaagaaccagaaatgtgaactagacgatccactgatcttgatacatgacaagaaagtgtccaaccttcatgctgtggtgaaagtgttggagttagctctgaagaagcaaaggcctctgcttattgttgcagaggatgtagaaagtgaagcattgggtactctgattattaacaagcttcgtgcaggcattaaggtttgtgcagtcaaagctcctgggtttggggagagcaggaaagccaacttacaggacctcgctatccttactgggggagaagtcataactgaagaacttggaatgaaccttgagaattttgagcctcagatgctggggacttgcaagaaggttacagtatctaaggatgacacagtcatccttgatggagctggagataagaaggccattgaagagagagctgagcagctgagatctgcaattgagctaagcacttctgactatgataaagagaagcttcaggagcggttagcaaagctttctggtggtgttgctgttctaaagattggtggagctagtgaagcggaggttggtgagaagaaggatagagtgactgatgcactaaatgctaccaaagctgctgtagaggagggtattgtaccaggtggtggagttgcccttctgtatgcatcaaaagacctggataaattgcagactgcgaactttgaccaaaagattggtgtccagatcattcaaaatgctttgaagaccccagtgcacacaattgcttcgaatgcgggtgtagaaggatctgtcattattggcaagcttttggaacaggataatactgatctaggttatgatgctgctaaaggtgaatacgttgacatggtgaagtctggtatcattgacccactaaaagttatcagaacagctctggtggatgctgcaagtgtgtcctctctaatgactaccacagaatctattattgttgagatccccaaggaagaggaggcagcagccgcagcacccgcaatgggtggcatgggcgggatgggtttctag

SEQ ID NO: 8861 - protein, 577 aa, Oryza sativa
MYRAAASLASKARQAGSSARQIGSRLALHRNYAAKDIKFGVEARALMLRGVEELADAVKVTMGPKGRTVVIEQSFGAPKVTKDGVTVAKSIEFSNRVKNVGASLVKQVANATNDTAGDGTTCATVLTKAIFAEGCKSVAAGMNAMDLRRGISMAVDEVVTNLKGMARMISTSEEIAQVGTISANGEREIGELIAKAMEKVGKEGVITITDGNTLYNELEVVEGMKLDRGYISPYFITNQKNQKCELDDPLILIHDKKVSNLHAVVKVLELALKKQRPLLIVAEDVESEALGTLIINKLRAGIKVCAVKAPGFGESRKANLQDLAILTGGEVITEELGMNLENFEPQMLGTCKKVTVSKDDTVILDGAGDKKAIEERAEQLRSAIELSTSDYDKEKLQERLAKLSGGVAVLKIGGASEAEVGEKKDRVTDALNATKAAVEEGIVPGGGVALLYASKDLDKLQTANFDQKIGVQIIQNALKTPVHTIASNAGVEGSVIIGKLLEQDNTDLGYDAAKGEYVDMVKSGIIDPLKVIRTALVDAASVSSLMTTTESIIVEIPKEEEAAAAAPAMGGMGGMGF

SEQ ID NO: 8862 - DNA, 1755 bp, Oryza sativa
  CDS (1)..(1755)
atggccaccatgccaagcacttgcgcctcctcctcctccctcttcctcctcctccgcagggacaggaggagcagcaggagtgccagcctccccggacccgcccgccgtttgggggttgtgcgcgcctccgccaaggagatcgccttcgaccagggatcgcgatcctccctccaggccggcgtcgagaagctcgccgccgccgtcgccgtcaccctcggtcccagaggaagaaatgtcgtcttggatgagtttgggagccccaaagtggtcaatgacggagttaccattgctcgagctattgagctcgctgatccaatggagaatgccggtgctgctttgattcgtgaggttgccagcaagacaaatgactcagcaggtgatgggactacaaccgcatctgtcctggctcgtgagatcataaaattgggcctgctgagtgttacttcaggggcaaacccagtatctatcaaaaagggcatagataagaccgtgcacagtttagttgaggaacttgagaagaagtcaaggcctgtgaagggcagtggtgatattaaagctgttgctgccatatctgctggaaatgatgacttcgtcggtaccatgatcgctgaggctattgacaaggttggccctgatggtgttctttcgatcgagtcatcatcatcttttgagaccaccgttgaagttgaagaaggaatggagattgacagaggatatatctctcctcagtttgttacaaatcctgagaagtcacttgttgagtttgaaaatgctagaattcttgtcactgaccagaagatttcttcaataaaagaaataattcctttgctggaacaaacaactcaactaagagcaccactcctcataattgcggaggatgtagctggcgaagctttggcaactttagttgtcaacaagcttagaggaattctcaatgtagctgcgattaaagcacctggctttggtgaaaggcgtaaggctcttcttcaggacatcgccatcgttacaggtgctgaatttcaagccaaagatcttggtttactggtggagagtacaaccgtggagcaacttggcatagcccggaaagtgacaatctcccagtcatccactaccattatagcagatgttgccaccaaagatgagatccaggcaagaattgcacagctgaagagagagctttctcagacagactcagcatatgactctgagaagttggctgagagaatcgcaaagctttctggcggagttgcggttataaaggtaggagctgcaaccgagacagagcttgaggatcgcaagcttcgtatcgaggatgccaagaatgcaacatttgctgctattgaggaaggtatagtacctggaggtggtgcggcctatgttcacctgtcaaaatttgtaccagccatcaaggagaagttggatgaccctgaagagcgccttggtgctgatatcattcaaaaggctctagtggcaccggcagcactaatagcacacaatgctggagttgaaggggaagtgattgtagaaaagatcaaggagagtgaatgggaggttggctacaatgcgatggctgacagacacgagaacttggtacaggctggtgtgattgaccctgcaaaggtgacaagatgtgcgttgcaaaacgcagcctcggtggctggaatggtactaaccacgcaagccatcgttgtggagaagccaaagaagaaggcgtcggcggcttccggggcaccagaaggttctcttgccatgtga

SEQ ID NO: 8863 - protein, 584 aa, Oryza sativa
MATMPSTCASSSSLFLLLRRDRRSSRSASLPGPARRLGVVRASAKEIAFDQGSRSSLQAGVEKLAAAVAVTLGPRGRNVVLDEFGSPKVVNDGVTIARAIELADPMENAGAALIREVASKTNDSAGDGTTTASVLAREIIKLGLLSVTSGANPVSIKKGIDKTVHSLVEELEKKSRPVKGSGDIKAVAAISAGNDDFVGTMIAEAIDKVGPDGVLSIESSSSFETTVEVEEGMEIDRGYISPQFVTNPEKSLVEFENARILVTDQKISSIKEIIPLLEQTTQLRAPLLIIAEDVAGEALATLVVNKLRGILNVAAIKAPGFGERRKALLQDIAIVTGAEFQAKDLGLLVESTTVEQLGIARKVTISQSSTTIIADVATKDEIQARIAQLKRELSQTDSAYDSEKLAERIAKLSGGVAVIKVGAATETELEDRKLRIEDAKNATFAAIEEGIVPGGGAAYVHLSKFVPAIKEKLDDPEERLGADIIQKALVAPAALIAHNAGVEGEVIVEKIKESEWEVGYNAMADRHENLVQAGVIDPAKVTRCALQNAASVAGMVLTTQAIVVEKPKKKASAASGAPEGSLAM

SEQ ID NO: 8864 - DNA, 1746 bp, Oryza sativa
  CDS (1)..(1746)
atgtaccgggcggcggcggcggcggcgtcgtcgatttcgaggtcctcgtcggcgctgcggaagcagctgtcgcgcggcggttgcggggagcagcggctgtgggcgcgggggtatgcggcgaaggaggtggcgttcggcgtcggagcccgggccgccttgctgcagggcgtgaacgacctcgccgacgccgtcaaggtcaccatgggccccaaggggcgcaatgtgattatcgagagatcccatagagctcccaaagtcacaaaggatggagtcacggttgcaaaaagcattgagtttgaggacagtgctaagaatgttggtgcaaacctggtgaagcaagttgctgaagctactaataaggtcgcaggagatggtaccacttgtgcaactgtacttacacaggctattcttacggaaggctgcaaggctgtggcagcaggggtcaatgttatggacttacgtaatggcataaacaaggccataagttctatcactacacacctcaaaagtaaagcatggattatcaactcctcagaagaaataaatcaggtagcaactatttctgcaaatggagaaaaggaaataggagatttgatatcaaaggcgatggaaaaggttggaaaggatggagttattactattactgatggcaagacattagacaatgagcttgaagcggtacagggaatgaaactttccagaggctacatatctccttactttgtgactgatcagaagactcagaagtgtgagatggaaaatcctcttattctaattcatgacaagaaaatctcaacgatgaattcacttcttccagttttagaaatgtctatcaagaatcgtaggcctcttctcatcattgctgaggatgttgagggagaagctctatcaatgcttgttctgaacaagcatcgtgctggattaaagatatgtgctgtcaaagctcctggatttggtgaaaacagaagagccaatctggatgacgtggctgtgttgacaggaggagaggttgtcagcgaggaccaaggtcttgatcttggtaaagtcgaactacaaatgcttggcactgctaaaaaggttactgtatcccttgatgatactatcattctagatggtggaggcgacaaacagcagatagaggagaggtgtcaacagcttagagaatcaatggacaaaagcactgctgtatttgacaaagaaaaggctcaagaacgtctatcaaagttatctggtggtgttgctgtcctcaagattgggggagctagtgaagttgaagttggtgagaaaaaagatagggtaacagacgctttacatgcagcaagggctgctgtggaggagggcattgtaccaggtggtggagttgcccttctgtatgccaccaaggagcttgacaagattatcacagcaaatgaggatgaaaagattggagttcaaattatcaagaatgctttgaaggctcctttgatgactatagctgcaaatgctggcattgatggtggtgtggtcattgggaagctaattgaacaagataatcttaatatgggctatgatgcagcaagaggggagtatgttgacatgattaaggctgggatcatcgaccctgtgaaagtcatccgaacagcgctacaagatgcatcaagtgtttctttgctgatgacaacgacagaggcagctgttgctgagcccccagcagcaaaggccagaatggctagtcggatgccgcagatgagcgggatggatttttga

SEQ ID NO: 8865 - protein, 581 aa, Oryza sativa
MYRAAAAAASSISRSSSALRKQLSRGGCGEQRLWARGYAAKEVAFGVGARAALLQGVNDLADAVKVTMGPKGRNVIIERSHRAPKVTKDGVTVAKSIEFEDSAKNVGANLVKQVAEATNKVAGDGTTCATVLTQAILTEGCKAVAAGVNVMDLRNGINKAISSITTHLKSKAWIINSSEEINQVATISANGEKEIGDLISKAMEKVGKDGVITITDGKTLDNELEAVQGMKLSRGYISPYFVTDQKTQKCEMENPLILIHDKKISTMNSLLPVLEMSIKNRRPLLIIAEDVEGEALSMLVLNKHRAGLKICAVKAPGFGENRRANLDDVAVLTGGEVVSEDQGLDLGKVELQMLGTAKKVTVSLDDTIILDGGGDKQQIEERCQQLRESMDKSTAVFDKEKAQERLSKLSGGVAVLKIGGASEVEVGEKKDRVTDALHAARAAVEEGIVPGGGVALLYATKELDKIITANEDEKIGVQIIKNALKAPLMTIAANAGIDGGVVIGKLIEQDNLNMGYDAARGEYVDMIKAGIIDPVKVIRTALQDASSVSLLMTTTEAAVAEPPAAKARMASRMPQMSGMDF

SEQ ID NO: 8866 - DNA, 1806 bp, Oryza sativa
  CDS (1)..(1806)
atggcttcaacattcggtgccacttctacggttggcctcatggctgcgccaaccggaattgtatcagacaagaagccatcttctctatcttcggtgtcatctgtttctgttgccagccgaccacgcaatgcacgccttcagaggaagtgcaacttcagggtaaaagctgccaaggagttgtacttcaacaaggatggctcggctatcaagaagcttcagactggagtaaacaagcttgctgaccttgttggagttacactgggaccaaagggaaggaatgttgttttggagagcaagtatgggtcccctaggattgtcaatgatggtgttacagttgcaagagaggttgaactggaggatcctgttgaaaatattggagctaagttggttaggcaagcagcagcaaagaccaatgatttagctggagatggcacaactacttctgttgtgcttgctcaggggctgattgctgagggtgttaaggtcgttgcagctggtgccaatcctgtgcaaattacacgtggtatcgagaaaactgcgaaagcactagttgaagagctaaagaaattgtcaaaggaggttgaagacagtgagcttgcggatgttgctgcagtcagtgctggcaacaattatgaaatcggtaatatgatagcagaggctatgagcaaggttggcaggaagggtgtggttacccttgaagaagggagaagttctgagaataatctctatgttgtggagggaatgcagtttgaacgtggttatatctccccgtattttgtaactgacagcgagaaaatgtctgcagaatatgagaactgcaagcttcttttggtggacaaaaaaatcaccaacgcaagggatcttatcaatgttttggaggaggccataagaggtgcatacccaattctgataattgctgaggatattgagcaggaggctcttgctactcttgttgtcaacaagcttagagggtcattgaaaattgccgctatcaaagcccctggttttggtgagcgcaagacccagtacttggatgatattgccattctaactggagcaactgtaatcagggatgaagttgggctgtcacttgacaaggcagacaaatcagttttaggaacggctgcaaaggtggtccttaacaaagagtcaacaacaattgttggtgatggcagtacacaggaagaagtgactaagagggttgcacaaataaaaaatctcatcgaggctgccgaacaagaatacgagaaggaaaagctcaatgagaggattgcaaagcttgctggtggtgttgcagtcattcaggtgggagcacaaacagagaccgaactaaaagagaagaagttgagagttgaggatgccctaaatgctaccaaggctgctgttgaggaaggtattgttgttggtggagggtgcactcttctgagactggcagctagagttgacgccatcaaggacaacctggagaatgatgagcagaaggttggagctgaaattgtaaggagagcgctgagctacccgcttaaattgattgctaagaatgctggtgttaatggaagcgttgttaccgagaaggttctctctaacgataacttcaagtttggttacaatgctgcaactggacagtacgaggatttgatggctgctggtatcattgaccccactaaggtggtgagatgttgtcttgagcatgctgcgtcggtggccaagacattcctcacatcggatgtcgtcgtcgtcgagatcaaggagcctgagcctgcgcccgtcaccaacccgatggacaactccggctacgggtactga

SEQ ID NO: 8867 - protein, 601 aa, Oryza sativa
MASTFGATSTVGLMAAPTGIVSDKKPSSLSSVSSVSVASRPRNARLQRKCNFRVKAAKELYFNKDGSAIKKLQTGVNKLADLVGVTLGPKGRNVVLESKYGSPRIVNDGVTVAREVELEDPVENIGAKLVRQAAAKTNDLAGDGTTTSVVLAQGLIAEGVKVVAAGANPVQITRGIEKTAKALVEELKKLSKEVEDSELADVAAVSAGNNYEIGNMIAEAMSKVGRKGVVTLEEGRSSENNLYVVEGMQFERGYISPYFVTDSEKMSAEYENCKLLLVDKKITNARDLINVLEEAIRGAYPILIIAEDIEQEALATLVVNKLRGSLKIAAIKAPGFGERKTQYLDDIAILTGATVIRDEVGLSLDKADKSVLGTAAKVVLNKESTTIVGDGSTQEEVTKRVAQIKNLIEAAEQEYEKEKLNERIAKLAGGVAVIQVGAQTETELKEKKLRVEDALNATKAAVEEGIVVGGGCTLLRLAARVDAIKDNLENDEQKVGAEIVRRALSYPLKLIAKNAGVNGSVVTEKVLSNDNFKFGYNAATGQYEDLMAAGIIDPTKVVRCCLEHAASVAKTFLTSDVVVVEIKEPEPAPVTNPMDNSGYGY

SEQ ID NO: 8868 - DNA, 1755 bp, Oryza sativa
  CDS (1)..(1755)
atgtctttgaccaccgtttctttctcataccccgccaagccgcttcccaaatggccgtgcacgctgcctaagccgccgccgagggctcgctgccgttttgtggtgcgggcggacgtcaaggtgatctcttccggtgaggcctgccgccgtgggctcgccgccggcatcgacaagctcgccgacgccgtcgcggtcactctaggccccaaaggcaggaatgttgttattgaccaagacgatgttcctaaagtaatcaatgatggtatcacaattgccaaggctatagagctcccaaatgctgttgagcacgcaggtgccatgttacttcaagagatagcatccaagacgaatagttctgttggcgatggaacaacaactgctattattttggcaagagaaattatcaatcttgggttgttggcagtagccactggtgctaacccagttgccctgagaaagggtattgacaaagctgttcatgaacttattgggatcttgaagactaaatgtatccctgtaagtacaaaggaggacataaaagctgttgcttcaatatcagctggcaatgatgaatatgttggcgatctcattgctgatgcattggagaagataggtcctgatggaataattaaaattgagtcctcatcttcaatatatacttcagttgaggtgcaagaaggaatgaagatagacaaaggttatatctctccacatttcatcacaaatcaagacaaagcaattgttgaatttgaaaatgctagggtacttttaactgatcagcgggtggatgatgtccaagagatacttcctttgctagagaagaccacacagttgagtgtccctttgttgattattgcggaggatgtttcacatacggtgtattcaactcttgttcttaacaaactgaatggactgctaaatgttgctgttgttaaatgtcctggtttgggagatgaaaagaaggctattctccaagatattgctattatgacaggtgcagatttctttgctagtgaccttggctggtgtcttcaaggtgctacttctgatcagctaggtatggctcagaagatcactataacaagtgatactactactatcattgcacatccttcgatgagaccagaaattgaggccagaattcagcaacttaagaaagatctagaggagacaacaagtgcctatctaaaagaaaggttttcatctcgtatcgctaaactctcaagaggtattgcagttatcaaggttggtgcagctactgaagctgaactcgaggataggaaactgagagcggaggatgcaaaaaatgcaacctttgcagccattagcgaaggcataactcctggaggtggtgtgacgtatgttcaattatcaaagtatattcccagtatcatggatcttgtagatgactctgaagagaagattggtgtaaatatagttgggaaggcacttctcgtccctgctatgacgatagctcgcaatgctggggcagatggtccagctgttgtagagaagcttcttgcgagtgaatggcgagttggatacaatgcaatgactgacaaatttgaagaccttgttgatgctggtgtggtagacccatgcagggttgcaagatgtgtgcttcaaaactctgcctctattgcaggacttattttaatgacgcaagctatgatgttcgacaaaataaagaagaaaaagtccaccattcctcaaattcctggcatcccaccattgcagataaatcaaaatgcttag

SEQ ID NO: 8869 - protein, 584 aa, Oryza sativa
MSLTTVSFSYPAKPLPKWPCTLPKPPPRARCRFVVRADVKVISSGEACRRGLAAGIDKLADAVAVTLGPKGRNVVIDQDDVPKVINDGITIAKAIELPNAVEHAGAMLLQEIASKTNSSVGDGTTTAIILAREIINLGLLAVATGANPVALRKGIDKAVHELIGILKTKCIPVSTKEDIKAVASISAGNDEYVGDLIADALEKIGPDGIIKIESSSSIYTSVEVQEGMKIDKGYISPHFITNQDKAIVEFENARVLLTDQRVDDVQEILPLLEKTTQLSVPLLIIAEDVSHTVYSTLVLNKLNGLLNVAVVKCPGLGDEKKAILQDIAIMTGADFFASDLGWCLQGATSDQLGMAQKITITSDTTTIIAHPSMRPEIEARIQQLKKDLEETTSAYLKERFSSRIAKLSRGIAVIKVGAATEAELEDRKLRAEDAKNATFAAISEGITPGGGVTYVQLSKYIPSIMDLVDDSEEKIGVNIVGKALLVPAMTIARNAGADGPAVVEKLLASEWRVGYNAMTDKFEDLVDAGVVDPCRVARCVLQNSASIAGLILMTQAMMFDKIKKKKSTIPQIPGIPPLQINQNA

SEQ ID NO: 8870 - DNA, 1905 bp, Oryza sativa
  CDS (1)..(1905)
atgcttctagagcctcctcgcgtcttctcctctctcatcaaatcccctcgccctcctctctttcctcctccccaagaaaaaaaaaggcttcatagctcaacctcctcgccgccgccgctcacctcccctcccctcccatccctcctcctccctagccccaggtcgctgctcggctccgccatgtaccgcgcggccgccagcctcgcctccaaggctcggcaagccgggagcagcgctcgccaggttggaagcaggcttgccttgagcaggaactatgctgccaaggatatcaagtttggagttgaggcccgtgctttgatgctgaggggtgttgaggagttggcagatgcagtcaaagtgacaatgggtcctaagggacgcaatgtggttattgagcagagctatggttcaccgaaagtcacaaaggacggtgtgactgttgccaagagcattgagttcaaggatagagtcaagaatgttggtgcaagccttgtaaagcaggttgctaatgcgaccaatgatactgctggagatggtaccacttgtgctactgtattgactaaagcaatatttactgaggggtgcaagtctgttgctgctggcatgaatgcaatggatttaaggcgtggtatttcaatggctgttgatgctgttgtaactaacctaaagggcatggctagaatgatcagcacatcagaggaaatagctcaggtgggcacaatatcagcaaatggggaaagggaaattggtgagcttattgcaaaggctatggagaaggttggcaaggagggtgtaatcaccattgcggatggtaacaccctttacaatgagcttgaagttgtggaaggcatgaaacttgacagaggctacatctctccttactttgttaccaacccaaagacccagaaatgtgaactggatgaccccttgatcctgatacatgacaagaaggtttcgaacctgcatgcagtagttaaagtcttggagttggctctgaagaagcaaaggcctctgctgattgttgctgaagatgtagagagcgaggcattgggtactctgattattaacaagcttcgtgcaggcatcaaggtctgtgctgttaaagctcctgggtttggggagaacaggaaagcaaacttacaggaccttgcgatccttactggaggagaagtcataactgaagagctaggaatgaatcttgagaagttcgagcctcagatgttgggtacatgcaagaaggtaactgtatctaaggacgacactgttattcttgatggagctggagacaagaaatccattgaagagagggctgagcagattagatctgcaattgagctaagcacttctgattatgacaaggaaaagctacaggagcggttggcaaagctctccggaggtgttgctgttctaaagatcggaggagccagtgaagctgaagttggtgagaagaaggatagagtgacagatgcattgaatgccactaaagctgctgtggaagagggtattgtaccaggtggaggtgttgcacttctttatgcatcaaaggagctggataaattgccgactgctaactttgatcaaaagattggtgtacaaatcattcagaatgctttgaagacaccggtgcacactattgcttccaacgcaggtgtagaaggggctgttgttgtcggtaagcttttggaacaagataacaccgaccttggctatgatgcggctaaaggtgaatatgtggacatggtgaaggctggtatcattgacccactaaaagtgatcagaactgccttggtggatgctgcaagcgtatcatctctgatgacaaccacggaatccatcatcgtagagatcccaaaggaagagaaggaggcgccagcgatgggaggcatgggtggaatggattactaa

SEQ ID NO: 8871 - protein, 634 aa, Oryza sativa
MLLEPPRVFSSLIKSPRPPLFPPPQEKKRLHSSTSSPPPLTSPPLPSLLLPSPRSLLGSAMYRAAASLASKARQAGSSARQVGSRLALSRNYAAKDIKFGVEARALMLRGVEELADAVKVTMGPKGRNVVIEQSYGSPKVTKDGVTVAKSIEFKDRVKNVGASLVKQVANATNDTAGDGTTCATVLTKAIFTEGCKSVAAGMNAMDLRRGISMAVDAVVTNLKGMARMISTSEEIAQVGTISANGEREIGELIAKAMEKVGKEGVITIADGNTLYNELEVVEGMKLDRGYISPYFVTNPKTQKCELDDPLILIHDKKVSNLHAVVKVLELALKKQRPLLIVAEDVESEALGTLIINKLRAGIKVCAVKAPGFGENRKANLQDLAILTGGEVITEELGMNLEKFEPQMLGTCKKVTVSKDDTVILDGAGDKKSIEERAEQIRSAIELSTSDYDKEKLQERLAKLSGGVAVLKIGGASEAEVGEKKDRVTDALNATKAAVEEGIVPGGGVALLYASKELDKLPTANFDQKIGVQIIQNALKTPVHTIASNAGVEGAVVVGKLLEQDNTDLGYDAAKGEYVDMVKAGIIDPLKVIRTALVDAASVSSLMTTTESIIVEIPKEEKEAPAMGGMGGMDY

SEQ ID NO: 8872 - DNA, 1737 bp, Oryza sativa
  CDS (1)..(1737)
atggcgtccgccaacgccatctccaccgcctccctcctccgctctttctcctcccaggggagggtgaggagggccaagaatgggcgggcgcagcggctagtggtgcgggcggacgccaaggacatcgccttcgaccagaaatcccgggcggcgctccaggccggcgtcgagaagctcgccaacgccgttggcgtcaccctcggcccacgagggagaaacgtagtgcttgatgagtacggcagtcccaaagtggtaaatgatggagtcaccattgcccgggctattgagctatatgatccgatggaaaatgctggtgcagcattgatccgtgaggttgctagcaagaccaatgattctgctggtgatgggactacaaccgcctctgtccttgctcgtgaaatcatcaagctgggccttttgagtgtaacttctggtgcaaaccctgtatcacttaagaaaggaatagacaaaacagtgcatggtcttattgaagagctggagaagaaggctagaccagtcaagggcagtggtgatatcaaagctgttgcctctatctctgctggcaacgatgaacttattggatctatgattgctgatgctattgacaaagtgggtcctgatggtgtcctttcaattgagtcttcatcatctttcgagactactgttgatgttgaagaaggaatggagattgaccgtggatacatttcccctcaatttgtgacaaacctcgagaaatcgatcgtagagtttgagaatgctaaggttcttattactgatcagaagatcaccagcataaaggagattcttccaatcttggagaagacaacacagttgagagctccactgtttattattgctgaggacattactggcgaagctttggcaacccttgttgttaataagctccgaggaattctcaatgttgcagcaatcaaagccccaagttttggtgagcgacgcaaggctgtccttcaggatattgccattgtgacaggcgctgaatttctagcaaaagacctgggtttgctggttgagaatgcaactgaagagcaacttgggacagcgagaaaagtcacaatacatcagactacaacaaccctcatagcggatgcagctagcaaagatgagattcaggcaagggttgcacagctaaagaaggaactctccgaaactgattcgatatatgatacagagaaattggctgagaggattgcaaagctttctggtggtgtggctgtcatcaaggttggggctgcaactgagactgagcttgaggaccgccaactacgtatcgaggatgcgaagaatgcaactttcgcagctattgaggagggcattgttcctggaggtggtacagcgtatgtgcatctttcaactaccgtccctgcgatcaaagaaacaatcgaagaccatgatgagcgccttggtgcagacattattcaaaaggcgttggtagctcccgcttcactgattgcccacaatgctggagtggaaggggaagtggtagttgagaagatcaaggacggcgagtgggaagtcgggtacaatgcgatgaacgacaagtatgagaacttgattgaggcgggtgttattgacccagctaaggtgacgagatgcgcgctccagaatgccgcctcggtggctggaatggtccttaccacacaggccattgttgtcgagaagccgaagcccaaggctcctgttgctgagccggcagagggaacccttaccgtctaa

SEQ ID NO: 8873 - protein, 578 aa, Oryza sativa
MASANAISTASLLRSFSSQGRVRRAKNGRAQRLVVRADAKDIAFDQKSRAALQAGVEKLANAVGVTLGPRGRNVVLDEYGSPKVVNDGVTIARAIELYDPMENAGAALIREVASKTNDSAGDGTTTASVLAREIIKLGLLSVTSGANPVSLKKGIDKTVHGLIEELEKKARPVKGSGDIKAVASISAGNDELIGSMIADAIDKVGPDGVLSIESSSSFETTVDVEEGMEIDRGYISPQFVTNLEKSIVEFENAKVLITDQKITSIKEILPILEKTTQLRAPLFIIAEDITGEALATLVVNKLRGILNVAAIKAPSFGERRKAVLQDIAIVTGAEFLAKDLGLLVENATEEQLGTARKVTIHQTTTTLIADAASKDEIQARVAQLKKELSETDSIYDTEKLAERIAKLSGGVAVIKVGAATETELEDRQLRIEDAKNATFAAIEEGIVPGGGTAYVHLSTTVPAIKETIEDHDERLGADIIQKALVAPASLIAHNAGVEGEVVVEKIKDGEWEVGYNAMNDKYENLIEAGVIDPAKVTRCALQNAASVAGMVLTTQAIVVEKPKPKAPVAEPAEGTLTV

SEQ ID NO: 8874 - DNA, 1728 bp, Glycine max
  CDS (1)..(1728)
atgtatcgctttgcttctaacctcgcttccaaagcaaggattgctaggagtagcagccaccagattggaagtaggctgagttcgagcagaaactatgcggctaaagacattagatttggtgtggaggctcgggcactgatgcttaagggtgttgaagagctagctgatgctgtcaaagtaaccatgggtcccaaggggcgtaatgttgtgattgagcaaagttttggtgcccctaaagtaaccaaagatggagtaactgttgcaaagagcattgaattcaaggataaagttaagaatgttggtgccagtcttgtaaagcaggttgcaaatgctactaatgatgtggctggtgatggaaccacgtgcgctacagtccttacacgagcaatatttactgaaggctgcaaatcagttgcggctggaatgaatgcaatggacctgaggcgtggtataagtatggctgtcgatgctgtggtgacaaacttgaaaagcagagcaaggatgattagcacatctgaagaaatagcacaggtagggacaatatctgctaacggagagagagaaattggtgagttgattgcaaaagctatggagaaagttggcaaagagggagtaatcacaatttcagatggcaaaaccttatataatgagttggaagttgttgaaggaatgaagctcgacaggggctacatatctccttatttcattacaaatgataagaaccagaaatgtgaacttgaagatcccctcattctaattcatgagaagaaaatctcgagtataaatgctatagttaaagtcttagagttggctttgaagagacaaagatctttattgattattgccgaggatgtggaaagtgatgcacttgcaactcttattctaaataagcttcgggctggaattaaggtatgtgctattaaagcccctggttttggcgaaaataggaaagccaatcttcaagatcttgcagttctcacaggaggagcacttattactgaagagcttggcttgaagcttgaaaaagtggatttggatatgcttggcacctgtaaaaaaataacagtttctaaggatgacactgtcattcttgacggagcaggtgacaagaaagcacttgaggaaagatgcgagcagattaggtctgcaattgaaaacagcacctcagattatgacaaggaaaagttacaggaaagattagccaagctttctggtggtgttgccgtgcttaagattggaggagccagtgaagctgaagttggtgagaagaaggatagagtgacagatgccttaaatgcaactaaggctgctgtagaggaaggcattgtatcaggtggtggtgttgctcttctatatgcgtcaaaagagttggataaacttcaaactgctaactttgatcagaagattggtgtccagattatccaaaatgctttaaagacacctgtgctcacaattgcatcaaatgcgggtgttgagggtgcagttgttgttggcaaactattggaacaggagaatcatgatctaggatatgatgcagccaaaggtgaatatgttgatatggttaaagctggaatcatagaccctttgaaggtgattaggacagccttggttgatgcagccagtgtatcatctttgatgacaacaactgaagctgttgtgtctgaacttccaaacgatgataaagatactccagctatggctggtggcatgggtggcatgggttattaa

SEQ ID NO: 8875 - protein, 575 aa, Glycine max
MYRFASNLASKARIARSSSHQIGSRLSSSRNYAAKDIRFGVEARALMLKGVEELADAVKVTMGPKGRNVVIEQSFGAPKVTKDGVTVAKSIEFKDKVKNVGASLVKQVANATNDVAGDGTTCATVLTRAIFTEGCKSVAAGMNAMDLRRGISMAVDAVVTNLKSRARMISTSEEIAQVGTISANGEREIGELIAKAMEKVGKEGVITISDGKTLYNELEVVEGMKLDRGYISPYFITNDKNQKCELEDPLILIHEKKISSINAIVKVLELALKRQRSLLIIAEDVESDALATLILNKLRAGIKVCAIKAPGFGENRKANLQDLAVLTGGALITEELGLKLEKVDLDMLGTCKKITVSKDDTVILDGAGDKKALEERCEQIRSAIENSTSDYDKEKLQERLAKLSGGVAVLKIGGASEAEVGEKKDRVTDALNATKAAVEEGIVSGGGVALLYASKELDKLQTANFDQKIGVQIIQNALKTPVLTIASNAGVEGAVVVGKLLEQENHDLGYDAAKGEYVDMVKAGIIDPLKVIRTALVDAASVSSLMTTTEAVVSELPNDDKDTPAMAGGMGGMGY

SEQ ID NO: 8876 - DNA, 1776 bp, Glycine max
  CDS (1)..(1776)
atggcttcttccaccttcaccgcaatgtccgcttgcaagctttcctcctccgccgccatctcctccttccccacccaccgccgcaccaacgccgtccttctgtccagacgcagccgcgccgccagggtctccgccatggccaaggagttgcacttcaacaaagacggcaccgcaattaggaagctccagagcggtgtgaacaagctcgcggatctggttggggtcacgcttggtcccaagggaaggaatgttgttctcgaaagcaagtacggctcgccgaaaatcgttaacgacggtgtcaccgtcgccaaagaggttgagttggaggatccggttgagaatattggcgccaagttggtgagacaagcagctgccaagacaaacgacttggctggtgatggaaccacgacttcggttgttctagctcagggtcttattgccgaaggcgttaaggttgttgcagctggggccaaccctgtgctcatcacccggggcattgagaagacggcaaaagctcttgtttctgagcttaaactgatgtcaaaagaggttgaagatagtgagttggcagatgtggcagcagtcagtgctgggaacaattatgaagtgggaaatatgatagctgaagcattgagcagagttggtagaaagggtgttgtgacccttgaggagggtaagagtgctgataacagtctatatgttgtcgaggggatgcaatttgaccgtggttatatttctccatactttgttactgacagtgagaaaatggccgttgaatatgagaactgtaagttgctgttagttgacaaaaagataaccaatgcaagggatcttatcaacatactggaggatgctattagaagtggataccctatattaattattgctgaggatattgaacaagaagctttagcaactcttgtggtgaacaaacttagaggatcactgaaaattgcagcactcaaggcccctgggtttggagatcgcaagagccagtaccttgatgatattgccatcttgactggaggtactgtaatcagagaagaggttggccttactttggacaaagctgggaaagaggttctcggatatgcctccaaggtggttctcaccaaggatacaaccacaattgttggtgatggaagtacccaggaagcagtgaacaagagagttgcacagattaggaacctaattgaggctgctgagcaagagtatgagaaagaaaagctgaatgagagaattgctaaattatctggtggtgtggctgtcatacaggttggtgcacaaactgagactgagctcaaggaaaagaaattgagagttgaagatgctcttaatgctacaaaggcagctgtagaggagggtattgtagttggtggtggttgcactcttctgagacttgcatcaaaggtggacacaatcaaggatagccttgataatgatgaagaaaaagttggagctgatattgtgaaaagagctcttagttaccctttgaaattaattgccaaaaacgctggtgtcaatggtagtgttgtcagtgagaaggtattgtccagcgacaatccaagatatggatataatgctgccaccggaaaatatgaagatttgatgtctgctgggatcattgatccaacaaaggtggtcagatgttgcctggaacatgcagcctctgtagccaaaaccttcttaatgtcagattgtgtggttgtcgagataaaggaacctgagcctgtacctgctggaaaccccatggacaattcaggatatggtatctag

SEQ ID NO: 8877 - protein, 591 aa, Glycine max
MASSTFTAMSACKLSSSAAISSFPTHRRTNAVLLSRRSRAARVSAMAKELHFNKDGTAIRKLQSGVNKLADLVGVTLGPKGRNVVLESKYGSPKIVNDGVTVAKEVELEDPVENIGAKLVRQAAAKTNDLAGDGTTTSVVLAQGLIAEGVKVVAAGANPVLITRGIEKTAKALVSELKLMSKEVEDSELADVAAVSAGNNYEVGNMIAEALSRVGRKGVVTLEEGKSADNSLYVVEGMQFDRGYISPYFVTDSEKMAVEYENCKLLLVDKKITNARDLINILEDAIRSGYPILIIAEDIEQEALATLVVNKLRGSLKIAALKAPGFGDRKSQYLDDIAILTGGTVIREEVGLTLDKAGKEVLGYASKVVLTKDTTTIVGDGSTQEAVNKRVAQIRNLIEAAEQEYEKEKLNERIAKLSGGVAVIQVGAQTETELKEKKLRVEDALNATKAAVEEGIVVGGGCTLLRLASKVDTIKDSLDNDEEKVGADIVKRALSYPLKLIAKNAGVNGSVVSEKVLSSDNPRYGYNAATGKYEDLMSAGIIDPTKVVRCCLEHAASVAKTFLMSDCVVVEIKEPEPVPAGNPMDNSGYGI

SEQ ID NO: 8878 - DNA, 1611 bp, Glycine max
  CDS (1)..(1611)
atggcttcttcttccaccttcactgcaatgtccgcctgcaagctctcctcctccgccgccatctcctccttcccctcccgccgccgctccaacgccgtcgttctgtcgaggcgcagccgcgccgccagggtctccgccatggccaaggagttgcacttcaacaaagacggcaccgcaattaagaagctccagagcggtgtgaacaagctcgcggatctggttggggtcacgcttggtcccaagggaagaaatgttgttctcgagagcaagtatggctcgccgaaaatcgttaacgacggtgtcactgtcgctaaagaggttgagttggaggatcccgttgagaatattggtgccaagttggtgagacaagcggctgccaagacaaacgacttggctggtgatggaaccacgacctcggttgttcttgctcagggtcttatagcggaaggtgtcaaggttgttgcagctggggccaaccctgtgctcatcacacgtggcattgagaagacagcgaaagctcttgtatctgagcttaaacagatgtcaaaagaggttgaagatagtgagttggcagatgtggcagcagtcagtgcagggaacaattatgaagtaggaaatatgattgctgaagcattgagcagagttggtagaaagggtgtcgtgacccttgaggagggaaagagtgctgataacagtctgtatgttgttgaggggatgcaattcgaccgtggttatatttctccatacttcgttactgacagtgagaaaatggctgttgagtatgagaactgtaagttgctgttagttgacaaaaagataaccaatgcacgggatcttatcaacatactggaggatgctattagaagtggacaccctatattgattattgctgaggatattgaacaagaggctttagcaactcttgtggtgaacaaacttagaggatcactgaagattgcagcactgaaggcccctgggtttggagagcgcaagagccagtaccttgatgatattgccatcttgactggaggtactgtaatcagagaagaggttggccttactttggacaaagctgggaaagaggttctcggatatgcctccaaggtggtgctcaccaaggatacaaccacaattgttggtgatggaagtacccaggaagcagtgaacaagagagttgcacaaattaggaacctaattgaggctgctgagcaagagtatgagaaagaaaagctgaatgagagaattgctaaattgtctggtggtgtggctgtgatacaggttggcgcacaaactgagacagagctcaaggaaaagaaattgagagttgaagacgctcttaatgctacaaaggcagctgtagaggaaggtattgttgttggtggtggttgcactcttctgagacttgcatcaaaggtggatgcaatcaaggatagccttgataatgatgaagaaaaagttggagctgatattgtgaaaagagctcttagttaccctttgaaattaattgccaagaatgctggtgtcaatggtagtgttgtcagtgagaaggtatcaaggtttagtctatgtagaatttctcttttctctacgagcgtggttgtgatgatgtga

SEQ ID NO: 8879 - protein, 536 aa, Glycine max
MASSSTFTAMSACKLSSSAAISSFPSRRRSNAVVLSRRSRAARVSAMAKELHFNKDGTAIKKLQSGVNKLADLVGVTLGPKGRNVVLESKYGSPKIVNDGVTVAKEVELEDPVENIGAKLVRQAAAKTNDLAGDGTTTSVVLAQGLIAEGVKVVAAGANPVLITRGIEKTAKALVSELKQMSKEVEDSELADVAAVSAGNNYEVGNMIAEALSRVGRKGVVTLEEGKSADNSLYVVEGMQFDRGYISPYFVTDSEKMAVEYENCKLLLVDKKITNARDLINILEDAIRSGHPILIIAEDIEQEALATLVVNKLRGSLKIAALKAPGFGERKSQYLDDIAILTGGTVIREEVGLTLDKAGKEVLGYASKVVLTKDTTTIVGDGSTQEAVNKRVAQIRNLIEAAEQEYEKEKLNERIAKLSGGVAVIQVGAQTETELKEKKLRVEDALNATKAAVEEGIVVGGGCTLLRLASKVDAIKDSLDNDEEKVGADIVKRALSYPLKLIAKNAGVNGSVVSEKVSRFSLCRISLFSTSVVVMM

SEQ ID NO: 8880 - DNA, 1779 bp, Glycine max
  CDS (1)..(1779)
atggcttcttcttccaccttcactgcaatgtccgcctgcaagctctcctcctccgccgccatctcctccttcccctcccgccgccgctccaacgccgtcgttctgtcgaggcgcagccgcgccgccagggtctccgccatggccaaggagttgcacttcaacaaagacggcaccgcaattaagaagctccagagcggtgtgaacaagctcgcggatctggttggggtcacgcttggtcccaagggaagaaatgttgttctcgagagcaagtatggctcgccgaaaatcgttaacgacggtgtcactgtcgctaaagaggttgagttggaggatcccgttgagaatattggtgccaagttggtgagacaagcggctgccaagacaaacgacttggctggtgatggaaccacgacctcggttgttcttgctcagggtcttatagcggaaggtgtcaaggttgttgcagctggggccaaccctgtgctcatcacacgtggcattgagaagacagcgaaagctcttgtatctgagcttaaacagatgtcaaaagaggttgaagatagtgagttggcagatgtggcagcagtcagtgcagggaacaattatgaagtaggaaatatgattgctgaagcattgagcagagttggtagaaagggtgtcgtgacccttgaggagggaaagagtgctgataacagtctgtatgttgttgaggggatgcaattcgaccgtggttatatttctccatacttcgttactgacagtgagaaaatggctgttgagtatgagaactgtaagttgctgttagttgacaaaaagataaccaatgcacgggatcttatcaacatactggaggatgctattagaagtggacaccctatattgattattgctgaggatattgaacaagaggctttagcaactcttgtggtgaacaaacttagaggatcactgaagattgcagcactgaaggcccctgggtttggagagcgcaagagccagtaccttgatgatattgccatcttgactggaggtactgtaatcagagaagaggttggccttactttggacaaagctgggaaagaggttctcggatatgcctccaaggtggtgctcaccaaggatacaaccacaattgttggtgatggaagtacccaggaagcagtgaacaagagagttgcacaaattaggaacctaattgaggctgctgagcaagagtatgagaaagaaaagctgaatgagagaattgctaaattgtctggtggtgtggctgtgatacaggttggcgcacaaactgagacagagctcaaggaaaagaaattgagagttgaagacgctcttaatgctacaaaggcagctgtagaggaaggtattgttgttggtggtggttgcactcttctgagacttgcatcaaaggtggatgcaatcaaggatagccttgataatgatgaagaaaaagttggagctgatattgtgaaaagagctcttagttaccctttgaaattaattgccaagaatgctggtgtcaatggtagtgttgtcagtgagaaggtattgtccagtgacaatccaagatatggatataatgctgccactggtaaatatgaagatttgatgtctgctgggatcattgatccaacaaaggtggtcagatgttgcctggagcatgcagcctctgtagccaaaaccttcttaatgtcagattgcgtggttgttgagataaaggaacctgaggccatacctgctggaaaccccatggacaattcaggatatggactctag

SEQ ID NO: 8881 - protein, 592 aa, Glycine max
MASSSTFTAMSACKLSSSAAISSFPSRRRSNAVVLSRRSRAARVSAMAKELHFNKDGTAIKKLQSGVNKLADLVGVTLGPKGRNVVLESKYGSPKIVNDGVTVAKEVELEDPVENIGAKLVRQAAAKTNDLAGDGTTTSVVLAQGLIAEGVKVVAAGANPVLITRGIEKTAKALVSELKQMSKEVEDSELADVAAVSAGNNYEVGNMIAEALSRVGRKGVVTLEEGKSADNSLYVVEGMQFDRGYISPYFVTDSEKMAVEYENCKLLLVDKKITNARDLINILEDAIRSGHPILIIAEDIEQEALATLVVNKLRGSLKIAALKAPGFGERKSQYLDDIAILTGGTVIREEVGLTLDKAGKEVLGYASKVVLTKDTTTIVGDGSTQEAVNKRVAQIRNLIEAAEQEYEKEKLNERIAKLSGGVAVIQVGAQTETELKEKKLRVEDALNATKAAVEEGIVVGGGCTLLRLASKVDAIKDSLDNDEEKVGADIVKRALSYPLKLIAKNAGVNGSVVSEKVLSSDNPRYGYNAATGKYEDLMSAGIIDPTKVVRCCLEHAASVAKTFLMSDCVVVEIKEPEAIPAGNPMDNSGYGL

SEQ ID NO: 8882 - DNA, 1755 bp, Glycine max
  CDS (1)..(1755)
atggcctcaaccaacgctctctcttcagcctccattctacgctctcccaaccgccagtctctgacccgaagagcgaaccataatggaagagtaaattaccggaaaccgaataaccgtttctccgtgaaagcctccgccaaagagattgcctttgaccagcattcccgctctgctatgcaggccggcattgacaagctcgccgacgctgttgggctcactcttgggcccagagggaggaatgttgtgttggatgagtttggaagtcctaaagtggtcaacgatggtgtcaccattgctcgcgcaatcgagcttcccgatcctatggagaatgctggtgcagctcttatcagagaggttgctagcaagactaacgactctgcgggtgatgggactaccacggcttcggttcttgctcgcgagataattaagctggggcttctcagtgtgacttctggggcaaatcctgtgtctcttaagagagggattgataagactgtgcagggtttggtggaggagttggagaagaaggctaggcctgtcaaaggtggagatgatatcaaagctgttgcttccatttctgctggaaatgatgagttgattgggcaaatgattgcggaagcaattgataaggttggacctgatggtgttttgtccattgagtcttcatcatcgtttgagaccacagttgaagtggaagaaggaatggagattgacagagggtatatctcgcctcaatttgttacaaaccctgagaagttgattgttgaatttgagaatgcgagagtgttgattacagatcagaagatttcagcaataaaagacattataccactgttggagaaaaccactcagttgagagctcctttgcttatcattgccgaggatgtcactggtgaggctttggccacccttgtcgtgaataagctgcgtggtatccttaacgttgctgccattaaagctcctggctttggtgagcggcgaaaggccctgcttcaagacattgctatattgactggtgctgagttccaagctagtgatctgggtctgcttgttgaaaacacctcagtggagcagcttggtttggctaggaaaattaccatctccaaggattctaccactgtcattgctgatgctgcgacaaaggatgagttgcaagccagggttgctcagttaaagaaggagctgtctcagacagactcagtatatgatactgagaaactggctgagaggatagctaaactgtctggtggagttgcagtcatcaaggttggtgctgctacagagactgagcttgaggatcggaagctccgaatagaggatgccaagaatgcaacttttgctgccattgaggaaggtattgtacctgggggtggcactgcactggttcatctctccactcatgtcccagcaatcaaggacaagcttgaggatgcagatgagaggctaggagctgacattgtgcaaaaggcactgatagctcctgcagcattgattgctcaaaatgctggaatagaaggtgaagttgttgtggagaaaataaagagtggtgaatgggaggtcggttacaatgccatggcagacaggtatgagaatttagtggaggctggagttatcgaccctgccaaggtaactaggtgtgctttgcagaatgctgcttcagttgctggaatggtgttgaccacgcaggccattgtggtggagaaacctaagcccaaggcacctgtagctggtgccccacaaggccttaccgtttga

SEQ ID NO: 8883 - protein, 584 aa, Glycine max
MASTNALSSASILRSPNRQSLTRRANHNGRVNYRKPNNRFSVKASAKEIAFDQHSRSAMQAGIDKLADAVGLTLGPRGRNVVLDEFGSPKVVNDGVTIARAIELPDPMENAGAALIREVASKTNDSAGDGTTTASVLAREIIKLGLLSVTSGANPVSLKRGIDKTVQGLVEELEKKARPVKGGDDIKAVASISAGNDELIGQMIAEAIDKVGPDGVLSIESSSSFETTVEVEEGMEIDRGYISPQFVTNPEKLIVEFENARVLITDQKISAIKDIIPLLEKTTQLRAPLLIIAEDVTGEALATLVVNKLRGILNVAAIKAPGFGERRKALLQDIAILTGAEFQASDLGLLVENTSVEQLGLARKITISKDSTTVIADAATKDELQARVAQLKKELSQTDSVYDTEKLAERIAKLSGGVAVIKVGAATETELEDRKLRIEDAKNATFAAIEEGIVPGGGTALVHLSTHVPAIKDKLEDADERLGADIVQKALIAPAALIAQNAGIEGEVVVEKIKSGEWEVGYNAMADRYENLVEAGVIDPAKVTRCALQNAASVAGMVLTTQAIVVEKPKPKAPVAGAPQGLTV

SEQ ID NO: 8884 - DNA, 1818 bp, Glycine max
  CDS (1)..(1818)
atggcatgttcttcattcacatttgccaatccatcatcaattcctagactgagaaattcactttcttcttcttctataagcccgagagctatggccaaagagctttacttcaaccacgacggttcagccacgaaaaagctgttggcaggagtggacatggtggctgagctgcttggtgtgacattgggtccaaaggggagaaatgttgtgctgccaaataagtatggaccacccaagatagtaaatgatggagaaactgttctcaaggagattgaattggaagatccgttggaaaatgttggagttaaattggtgagacaagctggtgctaaaacgaatgaccaagctggtgatggctcaactacatctgttgttcttgctcgtggcttaatcagagaggggacaaaggttattgcagctggaatgaatcctgttcaaattgctcgtgggattgagaagacagcagcggcacttgtttctgaactcagattgatgtcaagagaagttgaggatcatgaacttgcagatgttgctgcagtcagtgctgggaatgattattcagttggaaacatgatttctgaggctctgcataaagtaggtagaatgggagtagtgacaattgaaaccggaaggagtactgagaattgtctagagattgtggaagggatgcaattcgatcgtggatatctgtcaccatactttgtcaacaatagaagaaagatgacagttgaactccacaactgcaagttgcttttggttgacaagaaaatcacaaaaacaaaggaattgatcaacatattgaacaattctgcaaaagaaaagtatcctgttttgatagttgcagaaggcattgaacaagaagctcttgctccagtcatcaaaaataaacttcggggtgctcttaaggtagctgccattaaggctcctgcctttggtgaacgcaagacacattacttggaagatattgccatcttgactggaggtactgtaatcagagaagatatgggtttcaccctagaaaaggctcacaagaatgatctgggttctgctactaaggttgtcataacaaagaattctaccttaatagttactgatgggagtactcgagaagctgttgagaagagggttcatcaacttaggaggcttgttgagaatactgtagaaaatttccaaaagaatatattgaatgaaaggatagcaaggttatctgggggcattgctattcttcaggtaggagcacaaacacaagtagagttgaaggataaacagttaagagtagaagatgctctaaatgcaaccaaggctgcaatcgaggaaggtgtagtggtcggtggtggctgtagccttttaagactatctcaaaaggtggatggcataaaaaaactactggacaatgaagaacaacagattggtgctgaaatcttcaggagagcattgagctatcctacaagaatgatagcgaagaatgctggtttaaacggcaatgtcatcatagataaggttttatcagacaataacatgaattttggttacaatgctgctagagacagttacgaggatctcatgaaggctgggatcatggatccaacaaaggtagttaggtgttgtatagagcattcagcttctgtggccaaggcatttctaacatctaatgcagtagtcgttgagcgcaaggaattagagccaataccgatgccacgaagaaagtctatgcccatgcccacctcaggtaatgaattagagccaatgtccataccacgaagaaagcccatgtccatgcccatggctaccccaggtttaggacccatgggattttag

SEQ ID NO: 8885 - protein, 605 aa, Glycine max
MACSSFTFANPSSIPRLRNSLSSSSISPRAMAKELYFNHDGSATKKLLAGVDMVAELLGVTLGPKGRNVVLPNKYGPPKIVNDGETVLKEIELEDPLENVGVKLVRQAGAKTNDQAGDGSTTSVVLARGLIREGTKVIAAGMNPVQIARGIEKTAAALVSELRLMSREVEDHELADVAAVSAGNDYSVGNMISEALHKVGRMGVVTIETGRSTENCLEIVEGMQFDRGYLSPYFVNNRRKMTVELHNCKLLLVDKKITKTKELINILNNSAKEKYPVLIVAEGIEQEALAPVIKNKLRGALKVAAIKAPAFGERKTHYLEDIAILTGGTVIREDMGFTLEKAHKNDLGSATKVVITKNSTLIVTDGSTREAVEKRVHQLRRLVENTVENFQKNILNERIARLSGGIAILQVGAQTQVELKDKQLRVEDALNATKAAIEEGVVVGGGCSLLRLSQKVDGIKKLLDNEEQQIGAEIFRRALSYPTRMIAKNAGLNGNVIIDKVLSDNNMNFGYNAARDSYEDLMKAGIMDPTKVVRCCIEHSASVAKAFLTSNAVVVERKELEPIPMPRRKSMPMPTSGNELEPMSIPRRKPMSMPMATPGLGPMGF

SEQ ID NO: 8886 - DNA, 2188 bp, Sorghum bicolor
  CDS (149)..(1888)
gccggccgggtcgggacgtccgcaaaccccttcacaacacgcagctgcgacccaacccgacccctcccgaggccgccagccttatcctctcctccgcctccgcgatcccctccgtctccaatccatccgcaagcgcagcaaggtagacatggcttcgacattcggtgccacttctacagttggccttatggctgctccagcagggaagaatgtgcgccttcagaggagggctaacttcagagtaaaagcagccaaggagctgtacttcaacaaggatggctcagctatcaagaagctccagactggagtcaataagcttgcagacctagttggagttacacttggaccaaagggaaggaatgtcgttttggagagcaagtatggctctcctaagattgttaacgatggtgttacagttgcaagagaggttgagctggaggaccctgtggaaaacattggagctaaattggtcaggcaagctgcagctaagaccaatgatctagctggagatgggacaaccacctccgtggtccttgctcagggactgattgctgagggtgttaaggttgtggcagctggtgctaatcctgttcagattactcgtggtattgagaaaacagcgaaagcactagttgaagaactacgtaagttgtccaaggatgttgaagatagcgagcttgcagatgttgctgcagttagtgctggcaacaactatgaaatcggtaacatgatagcagaggccatgagcaaggttggtcggaagggtgtggttacccttgaagagggaaggagttctgagaactttctctatgttgtggagggaatgcagtttgaccgtggttatatctctccctactttgtaacagacagtgagaaaatgtctgccgagtacgagaactgcaagcttcttttggttgacaagaagatcaccaatgcaagggatcttatcaacgttttggaagaagccatcagaggtgcatacccaatcctgataattgctgaggatattgagcaggaggctcttgctactcttgttgtcaacaagcttagaggatcattgaagattgctgccatcaaagcccctggttttggagagcgcaagactcagtacttggatgatattgccatccttactggagcaactgtaatcagggatgaagttgggctgtcacttgacaaggctgacaaatcagtccttggaacagctgcaaaggttgttcttaccaaagagtcgacaacaattgttggtgacggcagcacccaggaagaagttactaaaagggttgcgcagattaaaaatctgattgaggcagcagaacaagaatatgaaaaggaaaagctcaatgagaggatagcgaagcttgctggcggtgttgctgtcattcaggtgggagcacaaacagaaactgaactaaaagagaagaagttgagagttgaggatgccctaaatgcaactaaggctgctgttgaggaaggtattgttgttggtggagggtgcactcttttgcggcttgcagctaaagtcgatgccatcaaagatacactggagaatgatgagcagaaggttggagctgaaatagtaagaagggccctgagctacccacttaaattgattgctaaaaacgctggtgtcaatggcagcgttgtcactgagaaggtcctttctaacgataacttcaagtatggttacaatgctgctactggacagtacgaggacttgatggctgctggtatcattgaccccaccaaggtggtgagatgctgcttggagcatgccgcatcggtggccaagaccttcctgacatcagatgttgtggtcgtcgatatcaaggagccggaggccgcgcccctcgctaacccgatggacaactctggctatggatactgatgaagtgatgagatgatatggccaagccgcagttgccccatgggacgaaggtgatcaccatattattttttggtaggcgagacgtcgggtccaggtagtttcagataaaaatgtgagtttgttgtacggccaaaaggtgaaaataaggggaggatctgtagccccaaatctgtgatgtaaactgcatcaggacagcagctaaatcaagcagaaattgctgagagattttgtaactgattgcagctatgttgaatgaatgcagtttgcacacgactaaaacacaaatttaaaatgtgcctg

SEQ ID NO: 8887 - protein, 579 aa, Sorghum bicolor
MASTFGATSTVGLMAAPAGKNVRLQRRANFRVKAAKELYFNKDGSAIKKLQTGVNKLADLVGVTLGPKGRNVVLESKYGSPKIVNDGVTVAREVELEDPVENIGAKLVRQAAAKTNDLAGDGTTTSVVLAQGLIAEGVKVVAAGANPVQITRGIEKTAKALVEELRKLSKDVEDSELADVAAVSAGNNYEIGNMIAEAMSKVGRKGVVTLEEGRSSENFLYVVEGMQFDRGYISPYFVTDSEKMSAEYENCKLLLVDKKITNARDLINVLEEAIRGAYPILIIAEDIEQEALATLVVNKLRGSLKIAAIKAPGFGERKTQYLDDIAILTGATVIRDEVGLSLDKADKSVLGTAAKVVLTKESTTIVGDGSTQEEVTKRVAQIKNLIEAAEQEYEKEKLNERIAKLAGGVAVIQVGAQTETELKEKKLRVEDALNATKAAVEEGIVVGGGCTLLRLAAKVDAIKDTLENDEQKVGAEIVRRALSYPLKLIAKNAGVNGSVVTEKVLSNDNFKYGYNAATGQYEDLMAAGIIDPTKVVRCCLEHAASVAKTFLTSDVVVVDIKEPEAAPLANPMDNSGYGY

SEQ ID NO: 8888 - DNA, 2361 bp, Zea mays
  CDS (124)..(1863)
  misc_feature (2231)..(2231): n is a, g, c or t
gggtacctcgaggccggccgggacgacccctcagccctcacacaagagacgcagctgcgagtccgccagccttatcctcctccccatctccggcttccaacccgcaagcgcggtaaggtagacatggcttcgacattcggtgccacttctactgtcggccttatggctgctccaacagggaagaatgtgcgccttcagaggagggtgaacttcagagtaagagcagctaaggagctgtacttcaacaaggatggctcagctatcaagaagctccagactggagtcaataagcttgcagacctagtcggagttacactcggaccaaagggaaggaatgttgttttggagagcaagtatggttctcctaaaattgttaacgatggtgttacagttgccagagaggttgagctggaggaccctgtggagaacattggtgctaaattggtcaggcaagcagcagctaagaccaatgatctagctggagatgggacaaccacctctgtggttcttgctcaggggctgatcgctgagggtgttaaggttgtggcagctggtgctaatcctgttcagattactcgtggtatcgagaaaacagcgaaagcactagttgaagaactacggaagttgtctaaggaggtcgaagatagtgagcttgcagatgttgctgctgttagtgcgggcaacaactacgaaattggtaatatgatagcagaggccatgagcaaggttggtcggaagggtgtggttaccctcgaagaagggaggagttctgaaaactttctctatgttgtggaggggatgcaatttgatcgtggttatatctctccgtactttgtaacagacagtgagaaaatgtctgccgagtatgagaactgcaagctacttttggttgacaaaaagatcaccaacgcaagggatcttatcaatgttttggaagaagccatcagaggtggatacccaatcctgataattgctgaggatattgagcaggaggctcttgctacccttgttgtcaacaagctcagaggatcattgaagattgctgccatcaaagcccctggttttggagagcgcaagactcagtacttggatgatattgccatccttactggagcaactgtaatcagagatgaagttgggctgtcacttgacaaggctgacaaatcagtccttggaacagcagcaaaggttgtccttactaaagagtcgacaacaattgttggtgatggcagcacccaggacgaagttactaagagggttgcacagattaaaaatctcattgaggcagcagaacaagaatatgaaaaggaaaagctcaatgagaggatagcaaagcttgctggtggtgttgctgtcattcaggtgggagcacaaacagaaactgaactaaaagagaagaagttaagagttgaggatgccctaaatgcaaccaaggctgctgttgaggaaggtattgttgttggtggaggatgcacccttttgcggcttgcagctaaagtcgatgccatcaaggatacactggagaacgatgagcagaaggttggagctgaaatagtaaggagggccctgagctacccacttaaattgattgctaaaaatgccggtgtcaatggcagcgtcgtcactgagaaggtcctttctaacgataacttcaagtatggttacaatgctgctactggacagtacgaggacttgatggctgctggtatcattgatcccaccaaggtggtgagatgctgcttggagcacgccgcgtcggtggccaagaccttcctgacatcagatgttgtggtcgtcgatattaaggagccagaggccgcgccccttgctaacccgatggacaactctggctatggatactaatggagatgagatggccaagccgcatgggaagaagggtgatcaccatattatttttttggtaggcgagaagagtcgggtcgaggtagtttttcatcatcagataaaaaaagcgagtttgttgtacgaccactaggcgaaaaataagtgggaggggctgtgtagcccaaatttgtgatgtaaactggagacagacagcagctaaaaacaagcagaaattgctgagtgattttgtaactgatttgcagctatgctgaatgcagtttgcacgcgactaaacaggaatctaaaaaaaaaaaaaaaaaaaaaaaaaaaaaaaaaaaaaaaaaaaaaaaaaaaaaaaaaaaaaaaaaaaaaaaaaaaaaaaaaanaaaaaaaaaaaaaaaaaaaaaaaaaaaaaaaaaaaaaaaaaaaaaaaaaataaaaattttaaaggggggggcctttttaaagatccaaattttccttccccttgcttgcaaatttttattttttttttgg

SEQ ID NO: 8889 - protein, 579 aa, Zea mays
MASTFGATSTVGLMAAPTGKNVRLQRRVNFRVRAAKELYFNKDGSAIKKLQTGVNKLADLVGVTLGPKGRNVVLESKYGSPKIVNDGVTVAREVELEDPVENIGAKLVRQAAAKTNDLAGDGTTTSVVLAQGLIAEGVKVVAAGANPVQITRGIEKTAKALVEELRKLSKEVEDSELADVAAVSAGNNYEIGNMIAEAMSKVGRKGVVTLEEGRSSENFLYVVEGMQFDRGYISPYFVTDSEKMSAEYENCKLLLVDKKITNARDLINVLEEAIRGGYPILIIAEDIEQEALATLVVNKLRGSLKIAAIKAPGFGERKTQYLDDIAILTGATVIRDEVGLSLDKADKSVLGTAAKVVLTKESTTIVGDGSTQDEVTKRVAQIKNLIEAAEQEYEKEKLNERIAKLAGGVAVIQVGAQTETELKEKKLRVEDALNATKAAVEEGIVVGGGCTLLRLAAKVDAIKDTLENDEQKVGAEIVRRALSYPLKLIAKNAGVNGSVVTEKVLSNDNFKYGYNAATGQYEDLMAAGIIDPTKVVRCCLEHAASVAKTFLTSDVVVVDIKEPEAAPLANPMDNSGYGY

SEQ ID NO: 8890 - DNA, 2254 bp, Oryza sativa
  CDS (91)..(1812)
acctttcgagccgttgacattattccccaccgcagcccgctttcttcgttgccctttctgagtggctgcgtaagtgcacacttggaaaatatgcagacctcacttcgtgcaccagggaaggccttcggccccgctcgcgttgtcagcaaaagcaggaagcaccatgtggtgcgtgcagccaaggacctgcacttcaacaagaacatggaggcactgaagaagatgcaggcaggagctgataagctggccactgttgtgggagtcaccctgggtccaaagggccgcaacgtcgtgctggagagcaagtacggcagccccaagattgtgaacgatggtgtcacaattgccagggaggttgagcttgaggacccagtggagaacatcggagcaaagctggtgcgccaggcagccgcacgcacaaacgacacagcgggtgatggcacaaccacagcaaccatcctcagtgcagcattcattgctgagggattgaagattgtggcagcaggcaccaaccccgtgcagctgactcgcggcatggacaagactgtggctgcactggtcaaggagctggccgggctgtccactgaggtggccagcgacagggacctggccaatgtggcatcagtgtcagcaggcggcaatgccgagatcggccagctgattgctgacgccatggccaaggtgggccgccagggcgtggtcaccatggaggagagcaagacagcagaggacaacctggtgtttgtggagggcatgcagtttgaccgcggctactacagcccgtactttgtcacagacccagagcgcatggtggcagagtacgagaactgcagggtcctgctggttgacaagaagatctccaccgcccgtgacgtgattggcctgctggaggctgccatccgcggcaactaccctctgctgatcatggctgaggatgttgagcaggaggcactggccacgctggtcgtcaacaagctgcgaggaacactcaaggtggtggcggtcaaggcaccagggttcggcgagcgcaagaccagctacctggaggacattgccatcctgacaggcggcaccctggtcaaggatgagctgggcgtaacactggacaaggcagacgagagcgtgctgggcgtggcagccaaggtggtgatcagcaaggaggcctgcaccatcgtgggagacggccgctcgcaggcagacgtggacacacgcgtgaagcagatccgcaaccttgcggagcagacggagcaggagtatgagaaggagaagctcaatgagcgcatcgcacgcctcagcggcggcgtggccatcatccaggttggcgcccagactgagactgagctaaaggagaagaagctgcgtgtggaggatgccctgaatgccaccaaggctgctgtggaggagggcatcgtcattggtggtggctgcacgctgctcaagcttgctgccaaggtggataccgtcaaggagtcgctctccaatgaggagcagaaggtcggtgccgaaattgtgaagaaggcgctgacctacccactgaagctgatcgcagagaatgcaggcacaaacggcagcgtagtaatgcagaaggtgattgacagccaggaccccaactacggctacaacgcagcgattgacaagtttgaggaccttatgcagagcggcatcattgacccaacaaaggtgatccgttgtgcgctggagaacgcctgctctgtggcgaagaccttcctgcttgcagacgtggtggtcacagagatcccagagaggcagccagcagcagcagcagccccagcagacgactacggctactaagcagcagtcgcacctgcttacacactgtgcaaattgctcgaccatggtgcattcgttcagcagtcagcgcagctgcagactgcagctgcttgggctgtgtgatgtactggagccatttgtgcttgcagcgttgtggcagctgtgtgcttagtatgtagcagctgaggttggagagtgggtattgggtcttgtgctttctctttcatgtgggtcggatggtgagatgggcagctacccattgcattgtggcaggcacccgtgcagctggaatgcgcggaattggtgaagactgctgcttgactttgtttgggtatggtgatggctcagcagtgcctacacttgcaagtgcgcatttgcggaacttccgcttgaagggcattcttcctctttctcatatctgttggagtatcaccgcatgggattcatgtaaccgtgtctcttg

SEQ ID NO: 8891 - protein, 573 aa, Oryza sativa
MQTSLRAPGKAFGPARVVSKSRKHHVVRAAKDLHFNKNMEALKKMQAGADKLATVVGVTLGPKGRNVVLESKYGSPKIVNDGVTIAREVELEDPVENIGAKLVRQAAARTNDTAGDGTTTATILSAAFIAEGLKIVAAGTNPVQLTRGMDKTVAALVKELAGLSTEVASDRDLANVASVSAGGNAEIGQLIADAMAKVGRQGVVTMEESKTAEDNLVFVEGMQFDRGYYSPYFVTDPERMVAEYENCRVLLVDKKISTARDVIGLLEAAIRGNYPLLIMAEDVEQEALATLVVNKLRGTLKVVAVKAPGFGERKTSYLEDIAILTGGTLVKDELGVTLDKADESVLGVAAKVVISKEACTIVGDGRSQADVDTRVKQIRNLAEQTEQEYEKEKLNERIARLSGGVAIIQVGAQTETELKEKKLRVEDALNATKAAVEEGIVIGGGCTLLKLAAKVDTVKESLSNEEQKVGAEIVKKALTYPLKLIAENAGTNGSVVMQKVIDSQDPNYGYNAAIDKFEDLMQSGIIDPTKVIRCALENACSVAKTFLLADVVVTEIPERQPAAAAAPADDYGY

SEQ ID NO: 8892 - DNA, 1794 bp, Arabidopsis thaliana
  CDS (1)..(1794)
atggcatcaacctttagcgcaacgtcgtcaatgggttcatctttggctcctccttcgaatcgattgtcatcttttgtttcgatctcatcaagctcttttggaaggactcagagtattgctcagaggaaagcaaggtttcctaaaatatatgcggctaagcaattgcatttcaataaggacgggactgcgattaagaagcttcaagctggtgtgaataaacttgcggatttagttggggttactttaggtcctaaaggcaggaatgttgttctagagagcaaatacggttcccctagaatcgttaatgatggtgttacggtcgctagagaggttgagcttgaggatccagttgagaacattggtgctaagctagtgagacaagctgcttccaagactaatgacttagctggtgatggaacaacgacttctgttgttcttgctcaaggtcttattgctgaaggtgtaaaggtggtagctgctggtgcaaatcctgttttgattaccagaggtattgagaaaaccaccaaagctcttgtggctgagttgaagaaaatgtcaaaggaggttgaagacagtgaactagcagatgttgcagcagttagtgcaggaaacaattacgaagtaggcaatatgattgcagaagcaatggcaaaagttggtcgtaaaggtgttgtcactctagaggaaggcaaaagcgctgagaacagcctttacgttgttgaaggaatgcaatttgatcgtggttatatctctccttactttgtcaccgacagtgagaaaatgtgtgcagaatatgagaactgcaagttgtttcttgttgacaaaaagataacaaatgctagagatattattagcattctggaagatgcgattaaaggtggatacccgcttttgatcattgctgaagatattgagcaagagccattagcgactcttgttgttaacaagcttcgtgggacaataaaagttgctgctttgaaagctcctggatttggagagaggaaaagccagtaccttgatgacattgctgcgcttacaggagctactgtgattagggaagaagttggacttcagttggagaaagttggaccagaagttttgggtaatgctggtaaagtggttctcacaaaagatactacaacgatagttggtgatggaagtactgaagaagttgtgaagaagagagttgaacagatcaagaatcttatcgaggctgctgaacaagactatgaaaaggaaaagcttaatgagagaattgctaaattatcaggcggtgttgctgtaattcaggttggagcacaaactgagacagagcttaaggagaagaaattaagagttgaagatgctcttaatgctacaaaggctgctgtggaagaaggtattgttgttggcggaggatgtactctgctaagacttgcatcgaaagtggacgctattaaagagactctagcaaacgatgaagaaaaggttggagctgacattgttaagaaagcattgagctacccactgaagttaatcgccaagaacgctggtgtcaatggcagcgttgtcagtgagaaggttctttctagtgacaaccctaaacatggttacaatgctgcaactggcaaatacgaagatctcatggctgcaggaatcattgatccaaccaaagttgtgagatgttgcctagagcatgcttcatctgtggcaaagacattcttgatgtctgattgtgttgttgtggagatcaaggagcctgaatcagcagctcctgctggtaaccctatggacaattcaggttacggcttctaa

SEQ ID NO: 8893 - protein, 597 aa, Arabidopsis thaliana
MASTFSATSSMGSSLAPPSNRLSSFVSISSSSFGRTQSIAQRKARFPKIYAAKQLHFNKDGTAIKKLQAGVNKLADLVGVTLGPKGRNVVLESKYGSPRIVNDGVTVAREVELEDPVENIGAKLVRQAASKTNDLAGDGTTTSVVLAQGLIAEGVKVVAAGANPVLITRGIEKTTKALVAELKKMSKEVEDSELADVAAVSAGNNYEVGNMIAEAMAKVGRKGVVTLEEGKSAENSLYVVEGMQFDRGYISPYFVTDSEKMCAEYENCKLFLVDKKITNARDIISILEDAIKGGYPLLIIAEDIEQEPLATLVVNKLRGTIKVAALKAPGFGERKSQYLDDIAALTGATVIREEVGLQLEKVGPEVLGNAGKVVLTKDTTTIVGDGSTEEVVKKRVEQIKNLIEAAEQDYEKEKLNERIAKLSGGVAVIQVGAQTETELKEKKLRVEDALNATKAAVEEGIVVGGGCTLLRLASKVDAIKETLANDEEKVGADIVKKALSYPLKLIAKNAGVNGSVVSEKVLSSDNPKHGYNAATGKYEDLMAAGIIDPTKVVRCCLEHASSVAKTFLMSDCVVVEIKEPESAAPAGNPMDNSGYGF

SEQ ID NO: 8894 - DNA, 1731 bp, Zea mays
  CDS (1)..(1731)
atgtaccgcgcggccgctagcctcgcctccaaggcgcggcaagccgggagcagctccgccgctcgccaggttggaagcaggcttgcctggagcaggaactatgctgccaaggacatcaagtttggtgttgaggcccgtgctctgatgttgaggggtgttgaggagttggcagacgctgtcaaagtgacaatgggtcctaaggggcgcaatgtggttattgagcaaagcttcggtgcaccgaaagtcacaaaggatggtgtgactgttgcgaagagcattgaatttaaggatagagtaaagaatgttggtgcgagccttgtgaaacaggttgctaatgcaactaatgacactgctggtgatggtaccacatgtgctactgttttgacaaaagcaatatttactgaggggtgcaaatctgttgcggctggaatgaatgcaatggatttaaggcgtggaatctcaatggctgttgatgctgttgtgaccaatctgaagggcatggccagaatgattagcacttcagaagaaattgcacaggtgggtacaatatcagcaaatggagaaagggaaattggtgagcttattgccaaggctatggagaaggttggcaaagagggtgtgatcactattgcggatggcaacaccctttataatgagcttgaagttgtggagggtatgaaacttgacagaggttacatctctccgtacttcattaccaactcaaaagcccagaaatgtgaactggaagacccattgatcttaattcatgacaagaaagtgacaaatatgcatgctgtggttaaggttttagaaatggctctaaagaaacaaaggcctctactgattgttgcagaagatgtggaaagtgaagcattaggtactctgattattaacaagcttcgtgcaggcatcaaggtctgtgctgtcaaagctcctggttttggggaaaacaggaaggcaaacttacaggacctcgctatccttaccggaggagaggtaataactgaagagctaggaatgaaccttgagaatgttgagcctcacatgctgggttcatgcaaaaaggtgactgtctctaaggatgacactgttattcttgatggcgctggagacaaaaagtctattgaagagagggcagaccagattagatcagcagttgagaacagcacttcagattatgacaaggaaaagctccaggaacggttggcaaagctctctggaggtgttgctgttctgaagattggaggagccagcgaagcagaagttggtgagaagaaggatagagtgacagatgcactgaatgctactaaagctgctgttgaagagggcattgtaccaggtggtggtgttgctcttctctatgcatcgaaggagctcgataagttgcagacagcaaattttgatcagaagattggtgtgcaaatcattcagaatgctttgaagacacctgtacacaccattgcctccaatgctggggtggagggagcagtagttgtgggcaagcttttggagcaaggaaacactgaccttggttatgatgctgctaaagacgaatacgttgacatggtgaaggctggtatcattgatccgctaaaggtcatcagaactgcattggtggatgctgctagtgtgtcgtccctgatgaccaccacggaatccataattgtagagatccccaaggaagaggcaccggctccagcaatgggtggcatgggtggaatggattactaa

SEQ ID NO: 8895 - protein, 576 aa, Zea mays
MYRAAASLASKARQAGSSSAARQVGSRLAWSRNYAAKDIKFGVEARALMLRGVEELADAVKVTMGPKGRNVVIEQSFGAPKVTKDGVTVAKSIEFKDRVKNVGASLVKQVANATNDTAGDGTTCATVLTKAIFTEGCKSVAAGMNAMDLRRGISMAVDAVVTNLKGMARMISTSEEIAQVGTISANGEREIGELIAKAMEKVGKEGVITIADGNTLYNELEVVEGMKLDRGYISPYFITNSKAQKCELEDPLILIHDKKVTNMHAVVKVLEMALKKQRPLLIVAEDVESEALGTLIINKLRAGIKVCAVKAPGFGENRKANLQDLAILTGGEVITEELGMNLENVEPHMLGSCKKVTVSKDDTVILDGAGDKKSIEERADQIRSAVENSTSDYDKEKLQERLAKLSGGVAVLKIGGASEAEVGEKKDRVTDALNATKAAVEEGIVPGGGVALLYASKELDKLQTANFDQKIGVQIIQNALKTPVHTIASNAGVEGAVVVGKLLEQGNTDLGYDAAKDEYVDMVKAGIIDPLKVIRTALVDAASVSSLMTTTESIIVEIPKEEAPAPAMGGMGGMDY

SEQ ID NO: 8896 - DNA, 1734 bp, Zea mays
  CDS (1)..(1734)
atgtaccgcgcggccgctagcctcgcctccaaggcgcggcaagccgggaacagcctcgccgcccgccaggttggaagcaggcttgcctggagcaggaactatgctgcgaaggacatcaagtttggtgttgaggcccgtgctctgatgttgaggggtgttgaggagttggcagatgctgtcaaagtgacaatgggacctaagggccgcaatgtggttattgagcaaagctttggtgcacccaaagtcacaaaggatggtgtgactgtagcaaagagcattgaatttaaggatagagtaaagaatgttggtgcaagccttgtgaaacaggttgctaatgcaactaatgacactgctggcgatggtaccacatgtgccactgttttgacaaaagcaatatttactgaggggtgcaaatctgttgcggctggaatgaatgcgatggatttaaggcgtggaatctcaatggctgttgacgctgttgtgaccaatctgaaaggcatggccagaatgatcagcacttcagaagaaattgcacaggtgggtacaatatcagcaaatggggaaagggaaattggtgagcttattgccaaggctatggagaaggttggcaaagagggtgtcatcactattgcggacggtaacaccctttataatgagcttgaagttgtggagggtatgaaactagacagaggttacatctctccgtacttcattaccaacccaaaaacccagaaatgtgaattggaagacccattgatcttaattcatgacaagaaggttacgaacatgcatgctgtggttaaggttttagaaatggctctgaagaaacaaaagcctctactgattgttgcagaagatgtggaaagtgaagcattgggcactttgattattaacaagcttcgtgcaggcatcaaggtctgtgctgtcaaagctcctggttttggggaaaacaggaaggcaaacttacaggaccttgcaatccttactggaggagaggtaataactgaagaactaggaatgaaccttgagaattttgagcctcacatgctgggtacatgcaaaaaggtgaccgtctctaaggatgacactgttattcttgatggagccggagacaagaagtccattgaagagagggcagagcagattagatcagcaattgagaatagcacttcagattatgataaggaaaagctccaggagcggttggcaaagctctctggaggtgttgctgttctgaagattggaggagccagcgaagcagaagttggtgagaagaaggatagagtgacagatgcactgaatgctactaaagctgccgttgaagagggtattgtaccaggtggtggtgttgctcttctctatgcatcgaaggagcttgataaattgcagacagcgaacttcgatcagaagattggtgtgcaaatcattcagaatgctttgaagacacctgtacacacaattgcctcaaatgctggggtggagggagcagtagttgtaggaaagcttttggagcaagaaaatactgacctgggttatgatgctgctaaaggtgaatatgttgacatggtgaagaccggtatcattgacccgctaaaggttatcagaactgctttggtggatgctgctagtgtgtcgtccctgatgacaaccacggaatccataattgtagagatacccaaggaagaggcaccggctccagcaatgggtggcggcatgggtggcatggattactaa

SEQ ID NO: 8897 - protein, 577 aa, Zea mays
MYRAAASLASKARQAGNSLAARQVGSRLAWSRNYAAKDIKFGVEARALMLRGVEELADAVKVTMGPKGRNVVIEQSFGAPKVTKDGVTVAKSIEFKDRVKNVGASLVKQVANATNDTAGDGTTCATVLTKAIFTEGCKSVAAGMNAMDLRRGISMAVDAVVTNLKGMARMISTSEEIAQVGTISANGEREIGELIAKAMEKVGKEGVITIADGNTLYNELEVVEGMKLDRGYISPYFITNPKTQKCELEDPLILIHDKKVTNMHAVVKVLEMALKKQKPLLIVAEDVESEALGTLIINKLRAGIKVCAVKAPGFGENRKANLQDLAILTGGEVITEELGMNLENFEPHMLGTCKKVTVSKDDTVILDGAGDKKSIEERAEQIRSAIENSTSDYDKEKLQERLAKLSGGVAVLKIGGASEAEVGEKKDRVTDALNATKAAVEEGIVPGGGVALLYASKELDKLQTANFDQKIGVQIIQNALKTPVHTIASNAGVEGAVVVGKLLEQENTDLGYDAAKGEYVDMVKTGIIDPLKVIRTALVDAASVSSLMTTTESIIVEIPKEEAPAPAMGGGMGGMDY

SEQ ID NO: 8898 - DNA, 1815 bp, Zea mays; identical to SEQ ID NO: 8844
  CDS (1)..(1815)

SEQ ID NO: 8899 - protein, 604 aa, Zea mays
MASAFGTASTCGIKHAPAGVALAAPMKHLSLVSPSLVSLPRKMRPRRKYNFRVNAAKELHFNKDGSAIRKMQNGVNKLADLVGVTLGPKGRNVVLESKYGSPKIVNDGVTVAKEVELEDPVENIGAKLVRQAAAKTNDLAGDGTTTSVVLAQGMITEGVKVVAAGANPVQITRGIEKTAKALVSELQKMSKEVEDSELADVAAVSAGNNYEIGNMIAEAMKKVGRQGVVTLEEGKSAENNLYSVEGMQFDRGYISPYFVTDSEKMTVEYENCKLLLVDKKINNARDLITILEDAIRSGYPILIVAEDIEQEALATLVVNRLRGALKIAAIKAPGFGERKSQYLDDIATLTGGTVIREEVGLSLDKADNAVLGTAAKVVVTKDSTTIVGDGTTQEEVNKRVTQIKNQIEATEQEYEREKLNERIAKLSGGVAVIQVGAQTETELKEKKLRVEDALNATKAAVEEGIVGGGCTLLRLASKVDAIIETLENDEQKVGAEIVRKSLSYPLKLIAKNAGVNGSVVTEKVLANENFRYGYNAATGEYEDLMAAGIIDPTKVVRCCLEHAASVAKTFITSDAVVVDAKVAEQAPSSPANPMAMGGGSGFGF

SEQ ID NO: 8900 - DNA, 1755 bp, Zea mays
  CDS (1)..(1755)
atggccaccattccgaccaccgattctggcctcgtcctcagttcctccgctctcctccggaggactaggagggccgcctcatccgtcaccgccaggctgccagccgtcgcccgccgtcgcccgcagctcctcgtgcgtgcctccgccaaggagatcgcctttgaccagggctccagagccgcccttcaggccggcgtcgagaagctcgccgccgcggtcggcgtcaccctcggacccagaggaaggaatgttgtcttggatgagtttggaacccccaaagtggtcaatgatggagttaccattgcccgcgctattgagcttgctgatcccatggagaatgctggtgcttccttgattcgtgaagttgctagcaagacgaatgactcggctggtgatggaaccacaactgcctctgttctcgctagggagatcatcaaattgggcatgttgagcattacttcaggggcaaatccagtgtccgttaagaagggcattgataagactgttcagaaattggtggaggaacttgagaagaaatcaaggccggtcaagggtagtggggatattaaagctgttgctgccatatcagctggaaatgatgaatttgttgggactatgatcgccgaagctattgacaaggttggccctgatggtgtcctctcaattgagtcgtcatcgtcgtttgagaccacagttgaagttgaagaagggatggagcttgacagaggatatatctcccctcagtttgtcactaaccttgaaaaatctattgttgagttcgaaaatgctcggattcttgtcactgatcagaagatatcatcgataaaagaaattattcctctgttggagcagacaacacagttaagagcaccacttcttataattgcagaggatgtaagtggcgaggcgctggcaacattagtcataaacaagcttagaggaattttaaatgtggctgcaatcaaagctcctggttttggtgagaggcgtaaagctcttcttcaggacattgccattgttacaggtgctgaatatcaatccaaagatcttggtctactagttgaggatacaacagtggagcagcttggcatagctcggaaagttacaatctcaagttcctcgacgaccattatagcagatgctgctagcaaagacgatatccaggccagaatcgcgcagctgaagagagagctttctcagacggactcgacgtatgactctgagaagttggcagagagaattgcaaagctttcaggtggagttgctgtggttaaggttggagcatcgaccgaggcagagctagaggaccgcaagctccgcatagaggacgcgaagaatgcgacttttgcagcaatagaggaaggtattgttccaggaggcggtgcagcgtatgtccatctatcgacattcgtaccggctatcaaggagacgttggatgatcctgaggagcgcctaggtgctgatatcattcagaaggctttggtggcacctgcagcgctgatagcccataatgctggggtggaaggtgaggtgattgtggataaaatccgggaaagcgagtgggagttcggttacaacgccatggcggacaagcacgagaacctggtggaggctggtgtgatcgaccctgccaaagtgactaggtgcgccctgcagaacgctgcctccgtggctggaatggtgctgactacccaagcaatcgttgtggagaagcccaagaaggctccagcagcagctgctgcagcggcaccatag

SEQ ID NO: 8901 - protein, 584 aa, Zea mays
MATIPTTDSGLVLSSSALLRRTRRAASSVTARLPAVARRRPQLLVRASAKEIAFDQGSRAALQAGVEKLAAAVGVTLGPRGRNVVLDEFGTPKVVNDGVTIARAIELADPMENAGASLIREVASKTNDSAGDGTTTASVLAREIIKLGMLSITSGANPVSVKKGIDKTVQKLVEELEKKSRPVKGSGDIKAVAAISAGNDEFVGTMIAEAIDKVGPDGVLSIESSSSFETTVEVEEGMELDRGYISPQFVTNLEKSIVEFENARILVTDQKISSIKEIIPLLEQTTQLRAPLLIIAEDVSGEALATLVINKLRGILNVAAIKAPGFGERRKALLQDIAIVTGAEYQSKDLGLLVEDTTVEQLGIARKVTISSSSTTIIADAASKDDIQARIAQLKRELSQTDSTYDSEKLAERIAKLSGGVAVVKVGASTEAELEDRKLRIEDAKNATFAAIEEGIVPGGGAAYVHLSTFVPAIKETLDDPEERLGADIIQKALVAPAALIAHNAGVEGEVIVDKIRESEWEFGYNAMADKHENLVEAGVIDPAKVTRCALQNAASVAGMVLTTQAIVVEKPKKAPAAAAAAAP

SEQ ID NO: 8902 - DNA, 1719 bp, Saccharomyces cerevisiae
  CDS (1)..(1719)
atgttgagatcatccgttgttcgtagtcgcgctactttaaggcctttattgcgtcgtgcttactcctctcataaagaattgaaattcggtgtagaaggaagagcctcccttcttaagggtgtcgaaactttagctgaagcggttgctgctactttgggtccaaagggtagaaacgttttaatcgaacagcctttcggtcctccaaagattactaaggatggtgttacagttgccaaatctattgtgttgaaggacaagtttgaaaatatgggtgccaagttactacaagaagttgcctccaaaaccaatgaggctgctggtgacggtactacttctgctactgtcttaggtagagccatcttcacagaatccgtcaaaaatgtcgccgctggttgtaaccctatggatttgagaaggggttctcaagttgcagttgaaaaagtgattgaatttttgagcgccaacaagaaagaaattaccacatctgaggaaattgctcaagtagcaaccatttctgccaatggggactctcatgttggtaagttactagcttcagctatggaaaaggttggaaaagaaggtgtcatcactatcagagaaggtagaacattggaagatgaacttgaggttactgaaggtatgaggtttgatcgtggttttatttctccatacttcatcactgatccaaagtcgagcaaggtggaatttgaaaagccattgctattgttgagtgaaaagaaaatttcttccattcaagatatcttgccagctttggaaatttccaatcaaagcagaagacctttgttgatcattgctgaagatgttgacggtgaagctcttgcggcttgtattttgaacaagttgaggggtcaagttaaggtttgtgctgtgaaggcgcctggtttcggtgataatagaaagaatacaattggtgatattgcagtcttgacgggcggtactgtttttactgaggagttggatttgaaaccagaacaatgtaccatagaaaacttgggttcttgtgactctattaccgttactaaggaagacaccgttatcctgaacggtagtggtccaaaggaagctattcaagagagaattgaacaaatcaaaggctccatcgacattaccaccacaaattcatatgagaaggagaaactgcaagagcgtttggccaaattgtccgggggtgttgctgtcatcagggtcggtggtgcatctgaagttgaagttggtgaaaagaaggaccgttacgatgatgctttgaacgctaccagagctgcagttgaggaaggtatcttgccaggtggtggtactgccttagtgaaggcatctagagttttggatgaagttgttgtcgacaatttcgatcaaaaattgggtgtcgatatcataagaaaggccattacaagaccagccaagcagatcattgaaaacgctggtgaagaaggttcagttatcatcggcaaattgattgatgaatatggtgatgattttgccaagggttacgatgcctctaagtcagaatacaccgacatgttagccactggtatcatcgatccatttaaagtggttagatccggtttagttgatgcttctggtgttgcctcactattagctactaccgaagttgctattgttgatgccccagaaccaccagcagctgctggcgctggtggtatgccaggtggtatgccaggaatgccaggtatgatgtaa

SEQ ID NO: 8903 - protein, 572 aa, Saccharomyces cerevisiae
MLRSSVVRSRATLRPLLRRAYSSHKELKFGVEGRASLLKGVETLAEAVAATLGPKGRNVLIEQPFGPPKITKDGVTVAKSIVLKDKFENMGAKLLQEVASKTNEAAGDGTTSATVLGRAIFTESVKNVAAGCNPMDLRRGSQVAVEKVIEFLSANKKEITTSEEIAQVATISANGDSHVGKLLASAMEKVGKEGVITIREGRTLEDELEVTEGMRFDRGFISPYFITDPKSSKVEFEKPLLLLSEKKISSIQDILPALEISNQSRRPLLIIAEDVDGEALAACILNKLRGQVKVCAVKAPGFGDNRKNTIGDIAVLTGGTVFTEELDLKPEQCTIENLGSCDSITVTKEDTVILNGSGPKEAIQERIEQIKGSIDITTTNSYEKEKLQERLAKLSGGVAVIRVGGASEVEVGEKKDRYDDALNATRAAVEEGILPGGGTALVKASRVLDEVVVDNFDQKLGVDIIRKAITRPAKQIIENAGEEGSVIIGKLIDEYGDDFAKGYDASKSEYTDMLATGIIDPFKVVRSGLVDASGVASLLATTEVAIVDAPEPPAAAGAGGMPGGMPGMPGMM

SEQ ID NO: 8904 - DNA, 1656 bp, Mesorhizobium loti MAFF303099
  CDS (1)..(1656): transl_table=11
atggctgctaaagacgtaaaattctctcgtgatgcccgtgagcgcatgctgcgcggcgtcaacatcctcgccgacgcggtgaaggttacgctcggccccaagggccgcaacgtcgtcatcgacaagtcgttcggcgccccgcgcatcaccaaggacggcgtcaccgtcgccaaggaaatcgagcttgaggacaagttcgagaacatgggcgcgcagatggtccgcgaagttgcttcgaagaccaacgacatcgccggcgacggcaccacgaccgcgaccgttctggcgcagtcgatcgtccaggaaggccacaaggcggttgccgccggcatgaacccgatggacctgaagcgcggcatcgacctcgccgtcagcgaagtcgtcgcggcgcttggcaaggctgccaagaagatcaagacctccgaggaagttgcccaggtcggcacgatctcggccaatggcgacgagtcggtcggcaagatgatcgcggaagcgatgcagaaggtcggcaacgaaggcgtcatcacagtcgaggaagccaagaccgccgaaaccgaactcgaagttgtcgaaggcatgcagttcgaccgcggctatctctcgccctacttcgtcaccaacgccgacaagatggttgccgatctcgaggacgcctacatcctgctccacgagaagaagctctccaacctgcaggccatgctgccggttctcgaagccgtcgtgcagacctcgaagccgctgctcatcatctcggaagacgtcgaaggcgaggctctggccacgctggtcgtcaacaagctgcgtggcggcctgaagatcgccgccgtcaaggctccgggcttcggtgatcgccgcaaggccatgctggaagacatcgccatcctcaccggtggccaggtcatctcggaagacctcggcatcaagctcgagaatgtcggcctcaacatgcttggccgcgccaagaaggtgtcgatctccaaggagaacaccaccatcgtcgacggcgccggcaagaaggcagagatccaggggcgcgttgcccagatcaagcagcagatcgaagagaccacttcggactacgacaaggagaagctgcaggaacgtctcgccaagctcgcgggcggcgttgcggtgatccgcgtcggcggtgcgacggaagtcgaagtcaaggaaaagaaggatcgcgttgacgatgcgctgaacgcgacccgcgcggccgtggaagaaggcatcgttgccggcggtggcgtggccctgctgcgcgcttcggccaacatcaaggctgccggcgccaatgccgaccaggccgctggcatcaacatcgtgcgtcgcgctctgcaggctccggcccgccagatcgcctcgaacgccggtgcggaagcatcgatcgttgccggcaagatccttgagaacaagggcgcgaccttcggctacaacgcccagaccggcgaatatggcgacatgatcgccatgggtatcgtcgatccggtcaaggttgtgcgcacggctctccaggatgcggcctcggtcgccggcctgctcgtcaccaccgaagccatgatcgcggaggctccgaagaaggagtcggctggcggcggcatgcctggcggcatgggcggcggcggcatgggcggcatgggtggcatggacttctaa

SEQ ID NO: 8905 - protein, 551 aa, Mesorhizobium loti MAFF303099
MAAKDVKFSRDARERMLRGVNILADAVKVTLGPKGRNVVIDKSFGAPRITKDGVTVAKEIELEDKFENMGAQMVREVASKTNDIAGDGTTTATVLAQSIVQEGHKAVAAGMNPMDLKRGIDLAVSEVVAALGKAAKKIKTSEEVAQVGTISANGDESVGKMIAEAMQKVGNEGVITVEEAKTAETELEVVEGMQFDRGYLSPYFVTNADKMVADLEDAYILLHEKKLSNLQAMLPVLEAVVQTSKPLLIISEDVEGEALATLVVNKLRGGLKIAAVKAPGFGDRRKAMLEDIAILTGGQVISEDLGIKLENVGLNMLGRAKKVSISKENTTIVDGAGKKAEIQGRVAQIKQQIEETTSDYDKEKLQERLAKLAGGVAVIRVGGATEVEVKEKKDRVDDALNATRAAVEEGIVAGGGVALLRASANIKAAGANADQAAGINIVRRALQAPARQIASNAGAEASIVAGKILENKGATFGYNAQTGEYGDMIAMGIVDPVKVVRTALQDAASVAGLLVTTEAMIAEAPKKESAGGGMPGGMGGGGMGGMGGMDF

SEQ ID NO: 8906 - DNA, 1836 bp, Arabidopsis thaliana
  CDS (1)..(1836)
atggctttctcacaagctgctctctctgcgttgcctctttctgatcgaactttccgcaaaaagccatcttcttcttcttcatcttcaccgaatttcgttctgagagtaagagctgctgcaaaagaagttcactttaaccgtgatggctctgtcaccaagaagcttcaggcaggtgcagatatggtggctaaactattaggcgtgacgttaggtccaaagggacgaaacgtggtgttgcagaacaagtacgggcctcctaggattgtcaatgacggtgaaactgttcttaaagagattgaattggaggacccgttagagaatgttggagtgaaacttgtgaggcaagcgggtgctaagactaatgaccttgccggtgatggttccactacatctataattcttgctcatggccttattactgaaggtattaaggtgatttctgctggaacaaatcccatccaagttgcccgtggtattgagaaaaccacaaaagctcttgttttagagctcaagtcaatgtccagagagattgaagatcatgagcttgctcatgttgcagcagttagtgcggggaatgactacgaagtgggaaacatgatttccaatgcttttcaacaagtaggaaggactggtgtagtaacaatagagaaaggaaaataccttgtgaacaatctcgagattgtggaaggaatgcagtttaatcgtggctacttatcgccatactttgtcactgatcgaaggaagagggaagctgaattccatgattgcaagctgcttttggtagataagaaaataacaaatccaaaagatatgttcaagatattggattctgctgttaaagaggaatttccagttctaatagttgccgaagatattgagcaagacgctcttgctcctgttattaggaacaaactaaaaggtaacctgaaggtggcagccatcaaagctcctgcttttggggagcgcaagagtcactgcttggatgatcttgcaatctttactggagccaccgtgatcagagatgagatgggcctgagcttagaaaaggctggaaaggaggtcttaggaacagcaaaaagggttcttgttactaaggattcaacactgattgttaccaacggattcacccagaaagcagtcgacgaaagggtttcgcagattaaaaatcttatcgagaacaccgaggagaattttcagaagaagatcctcaatgaaagagtagccagattatctggtggaattgcaataatccaggtaggtgcactgacacaagttgagttgaaggataaacagctaaaggttgaagatgccctgaatgcaactaagtcagcaattgaagaagggattgtagttggtggtggttgcgccctcttgcgactggctacaaaagtggacagaatcaaagagacccttgacaacacagaacagaagattggagctgaaatcttcaagaaagcattgagctaccccataagacttatagccaaaaacgcagacacaaatggcaatatcgtcatagaaaaggtcttatcgaacaaaaacaccatgtacggttacaatgctgcaaagaatcaatatgaagatctgatgttggctggtataattgatccaaccaaggttgtgagatgttgcttggaacacgcttcatcagtggctcaaacgtttctgacatcggattgcgttgtagttgagatcaaagaaatcaaaccaagaccaatcattaatccaccattacctacttcttctccagctacctcctccatgttccctgacagaaaattaccaagatttcctcaaattatgccaagaactcgaagccactttccacggaagtag

SEQ ID NO: 8907 - protein, 611 aa, Arabidopsis thaliana
MAFSQAALSALPLSDRTFRKKPSSSSSSSPNFVLRVRAAAKEVHFNRDGSVTKKLQAGADMVAKLLGVTLGPKGRNVVLQNKYGPPRIVNDGETVLKEIELEDPLENVGVKLVRQAGAKTNDLAGDGSTTSIILAHGLITEGIKVISAGTNPIQVARGIEKTTKALVLELKSMSREIEDHELAHVAAVSAGNDYEVGNMISNAFQQVGRTGVVTIEKGKYLVNNLEIVEGMQFNRGYLSPYFVTDRRKREAEFHDCKLLLVDKKITNPKDMFKILDSAVKEEFPVLIVAEDIEQDALAPVIRNKLKGNLKVAAIKAPAFGERKSHCLDDLAIFTGATVIRDEMGLSLEKAGKEVLGTAKRVLVTKDSTLIVTNGFTQKAVDERVSQIKNLIENTEENFQKKILNERVARLSGGIAIIQVGALTQVELKDKQLKVEDALNATKSAIEEGIVVGGGCALLRLATKVDRIKETLDNTEQKIGAEIFKKALSYPIRLIAKNADTNGNIVIEKVLSNKNTMYGYNAAKNQYEDLMLAGIIDPTKVVRCCLEHASSVAQTFLTSDCVVVEIKEIKPRPIINPPLPTSSPATSSMFPDRKLPRFPQIMPRTRSHFPRK

SEQ ID NO: 8908 - DNA, 1761 bp, Arabidopsis thaliana
  CDS (1)..(1761)
atggcgtctgcaaacgctctctcttccgcctccgtcctctgttcttcccgtcagagtaagttgggaggaggaaatcagcagcaaggtcagagagttagctacaacaagaggacaatcagacgttttagtgttagagctaatgtaaaggaaatagcttttgaccagcactctagagctgctctacaagctggtattgataagcttgctgattgtgttggtctcactcttggccctagagggaggaatgttgtgttggatgaatttggaagtcctaaggttgtgaatgatggagtcaccattgctagagctattgagttacctaatgccatggaaaatgctggtgcagcgcttattcgtgaggttgcgagtaagactaatgactctgctggtgatgggacaaccactgcgtctatccttgctcgggagataatcaaacatggattgttgagcgtcacttctggtgcgaatcccgtttcactcaagaggggaattgataagactgttcaaggtctgatcgaagagcttcagaagaaagctaggcccgtgaaaggtcgtgatgacatcagagctgtggcttctatctctgctggaaatgatgaccttatagggtcaatgattgctgatgccatcgacaaagttggacctgatggtgttttgtccattgaatcttcatcttcttttgagaccacggtcgaagttgaagaagggatggagattgacagaggttacatctcgcctcagtttgttacaaaccctgagaaactactagctgagtttgagaatgctagggtattgatcactgatcagaagatcactgcgatcaaagacatcatccctattttggagaagaccactcagcttcgtgctccgttgttgattattgcagaggatgttactggtgaagccttagctacccttgtcgtgaacaagcttcgtggtgtcctcaatgttgttgccgttaaagcgccaggatttggagaaagaagaaaagccatgcttcaagatattgcaatcttgacaggagctgagtacctagccatggacatgagcttactggttgaaaacgcaaccatagatcaattgggtattgcccgaaaagtcacgattagcaaagattcgactaccctcattgcagatgcagcttccaaggacgaattacaagctcggattgctcagctgaagaaagaactattcgagactgattctgtgtatgactcagagaagctcgctgagagaattgcgaagctatctggaggtgttgctgtcattaaagtcggagcagcaactgaaactgagcttgaggaccgtaagcttcgtatcgaggatgcaaagaacgcaacatttgctgctatcgaggaaggcatagttccaggtggtggtgctgctttggtgcatctctccactgttattcccgccattaaggagacttttgaggatgctgatgaacgtttgggagctgacatagtacaaaaggcattgctgtcaccagctgctcttattgctcagaacgctggagttgaaggagaagttgttgtggaaaagattatgttcagcgattgggagaatgggtacaacgcaatgactgatacatatgagaatctgttcgaagctggagtgattgatccggctaaagtgacaagatgtgcgctacagaacgctgcttccgtagcaggaatggtactgaccactcaggccattgttgttgacaaaccgaaacccaaggctcctgctgctgctgctcctgagggtctcatggtgtaa

SEQ ID NO: 8909 - protein, 586 aa, Arabidopsis thaliana
MASANALSSASVLCSSRQSKLGGGNQQQGQRVSYNKRTIRRFSVRANVKEIAFDQHSRAALQAGIDKLADCVGLTLGPRGRNVVLDEFGSPKVVNDGVTIARAIELPNAMENAGAALIREVASKTNDSAGDGTTTASILAREIIKHGLLSVTSGANPVSLKRGIDKTVQGLIEELQKKARPVKGRDDIRAVASISAGNDDLIGSMIADAIDKVGPDGVLSIESSSSFETTVEVEEGMEIDRGYISPQFVTNPEKLLAEFENARVLITDQKITAIKDIIPILEKTTQLRAPLLIIAEDVTGEALATLVVNKLRGVLNVVAVKAPGFGERRKAMLQDIAILTGAEYLAMDMSLLVENATIDQLGIARKVTISKDSTTLIADAASKDELQARIAQLKKELFETDSVYDSEKLAERIAKLSGGVAVIKVGAATETELEDRKLRIEDAKNATFAAIEEGIVPGGGAALVHLSTVIPAIKETFEDADERLGADIVQKALLSPAALIAQNAGVEGEVVVEKIMFSDWENGYNAMTDTYENLFEAGVIDPAKVTRCALQNAASVAGMVLTTQAIVVDKPKPKAPAAAAPEGLMV

SEQ ID NO: 8910 - DNA, 1791 bp, Arabidopsis thaliana
  CDS (1)..(1791)
atggcatcgacattcactgccacgtcttcccttggttcgttgcttgctcccaatgctatcaagttgtcttctgcgactagcatctcttcaagctcgtttggaaggagacataacgtgtgcgtcagaagatcccgtcctgccatagtatgtgcagccaaggagttgcatttcaataaggatgggactaccataaggaaacttcagactggtgttaacaagctcgcggaccttgttggtgtcacacttggaccaaaagggagaaatgttgttcttgagagcaagtatggatccccaagaattgttaatgatggtgtcactgttgcgagggaggtcgagttggaggacccggttgagaacattggtgcaaagcttgtaaggcaagcagctgcaaagaccaatgacttggctggtgacggtacaacaacatctgttgttcttgcacaaggttttattgctgagggtgtcaaggtggtggctgcaggtgcgaaccctgtattgatcactagggggattgagaagactgcaaaggctttggttaacgagctgaaacttatgtctaaggaggttgaagacagtgaacttgctgatgtggcagctgttagtgcgggtaataaccacgaagttggaagtatgattgctgaagcaatgagcaaagtgggcaggaagggtgtggtgaccctggaggagggaaaaagcgctgagaacaacctttatgttgtggaaggaatgcaatttgaccgtggttatatctccccatactttgtgacagacagtgagaaaatgtctgttgagtatgacaattgcaagttgcttcttgttgacaagaaagtaaccaatgcaagggatcttgttggggttctagaggatgcgattagaggcggatacccaatcctcataattgcagaagatattgaacaagaagccttagctactcttgttgttaacaagcttagaggcacactgaagattgcagctctcaaagctcctggatttggagagcgcaagagccaataccttgacgatattgccattctaactggagcaactgtgatcagagaggaagttggtctttctcttgacaaagctggaaaagaggttctgggtaacgcttccaaggttgtcctgacaaaggaaatgacaacaattgtgggtgatgggaccacacaagaagcagtgaacaagcgtgttgtacagattaggaatcttattgagcaagcggagcaagactacgagaaggaaaaattaaatgagagaattgcgaagctctctggtggagttgctgtaattcaggttggagctcaaactgagacagagctcaaagaaaagaagctgagagtggaagatgctcttaatgctacaaaggctgctgttgaggaaggtattgtcgttggtggtggttgcactctgctccggcttgcatcaaaggtcgatgccatcaaggatacccttgaaaatgatgaagaaaaggttggagcggaaattgttaaaagagcactgagttaccctctgaaattgatagctaagaatgctggtgttaatggaagtgttgtcagcgagaaggtgctggctaacgataatgtgaaatttggatacaatgctgcaaccggcaagtatgaagacctgatggctgcaggcatcatcgacccgacaaaggttgtgagatgttgcttagaacatgccgcctcagttgcaaagacgttcttgatgtctgactgtgtggttgttgagatcccagagccagagccagttcctgctggtaacccaatggacaactcaggttatggatactaa

SEQ ID NO: 8911 - protein, 596 aa, Arabidopsis thaliana
MASTFTATSSLGSLLAPNAIKLSSATSISSSSFGRRHNVCVRRSRPAIVCAAKELHFNKDGTTIRKLQTGVNKLADLVGVTLGPKGRNVVLESKYGSPRIVNDGVTVAREVELEDPVENIGAKLVRQAAAKTNDLAGDGTTTSVVLAQGFIAEGVKVVAAGANPVLITRGIEKTAKALVNELKLMSKEVEDSELADVAAVSAGNNHEVGSMIAEAMSKVGRKGVVTLEEGKSAENNLYVVEGMQFDRGYISPYFVTDSEKMSVEYDNCKLLLVDKKVTNARDLVGVLEDAIRGGYPILIIAEDIEQEALATLVVNKLRGTLKIAALKAPGFGERKSQYLDDIAILTGATVIREEVGLSLDKAGKEVLGNASKVVLTKEMTTIVGDGTTQEAVNKRVVQIRNLIEQAEQDYEKEKLNERIAKLSGGVAVIQVGAQTETELKEKKLRVEDALNATKAAVEEGIVVGGGCTLLRLASKVDAIKDTLENDEEKVGAEIVKRALSYPLKLIAKNAGVNGSVVSEKVLANDNVKFGYNAATGKYEDLMAAGIIDPTKVVRCCLEHAASVAKTFLMSDCVVVEIPEPEPVPAGNPMDNSGYGY

SEQ ID NO: 8912 - DNA, 1734 bp, Arabidopsis thaliana
  CDS (1)..(1734)
atgtatcgtttcgcttctaacctcgcctccaaggcaaggattgctcaaaacgctcgccaggtttccagcagaatgagctggagcaggaactatgcagcgaaagagattaagtttggtgttgaagctcgagctttgatgcttaagggtgttgaagatcttgctgatgctgttaaagtcaccatgggtcccaagggacgtaatgttgtgattgagcaaagttggggtgctcctaaagtgacaaaagatggtgttactgttgccaaaagtattgagttcaaagacaaaattaagaacgttggtgctagtcttgtgaagcaggttgcaaatgctactaatgatgttgctggtgatggtactacttgtgctactgtcctcacccgggctatatttgccgaaggatgcaaatcagttgccgcaggaatgaatgcaatggacttgcgaagaggtatttccatggcagttgatgctgtggtgacaaaccttaaaagcaaggctaggatgatcagcacatctgaagagattgctcaggttggaaccatttctgctaatggagagagggaaattggtgaacttattgccaaggctatggagaaggttggcaaagaaggtgttatcacaatccaagatggaaagacattgtttaacgagttggaagttgtagaggggatgaaattggacagaggttatacttcaccatactttatcactaatcaaaaaacccaaaaatgtgaactagacgatcctctcattcttatccacgagaagaagatctcaagcatcaactctatagtgaaagtgttggagttggctctgaagaggcaaagaccactattgattgtttctgaagatgtggaaagtgatgctcttgcaactcttatccttaacaagctccgtgccggaattaaggtctgtgccatcaaggcccctgggtttggagagaataggaaggccaatttgcaagaccttgctgcccttactggtggagaggttatcacagacgagcttggcatgaatctggagaaggtggacctaagcatgctaggaacctgcaaaaaggttacagtctccaaggacgacactgttattcttgatggggctggcgacaagaaaggaattgaggaaagatgtgaacagattaggtcagcaattgaactgagcacctcagattatgacaaggaaaaactgcaagaaaggttggctaagctctctggaggtgttgcagtgttgaagattggaggagcaagtgaagctgaagttggtgagaagaaagacagagtgacagatgctttgaatgccactaaagcagcagttgaagagggtattttaccaggaggaggtgtggctcttctatacgcagcaagagagttggaaaaacttccaacagccaactttgaccagaagattggtgtccagattattcagaacgcattgaagactcctgtttacacaatcgcttcaaatgctggagttgaaggtgctgttattgttggcaagctcttggagcaagataacccagacctcggttatgatgctgctaaaggtgaatatgtggatatggtgaaagctggaatcatagaccctctgaaagtgatcaggacagctttggttgatgctgcgagtgtgtcatctttgttgacgacaacggaagctgtagtggttgatcttccgaaagacgaaagcgagtcaggagcagcaggagcaggcatgggtggaatgggaggcatggactactag

SEQ ID NO: 8913 - protein, 577 aa, Arabidopsis thaliana
MYRFASNLASKARIAQNARQVSSRMSWSRNYAAKEIKFGVEARALMLKGVEDLADAVKVTMGPKGRNVVIEQSWGAPKVTKDGVTVAKSIEFKDKIKNVGASLVKQVANATNDVAGDGTTCATVLTRAIFAEGCKSVAAGMNAMDLRRGISMAVDAVVTNLKSKARMISTSEEIAQVGTISANGEREIGELIAKAMEKVGKEGVITIQDGKTLFNELEVVEGMKLDRGYTSPYFITNQKTQKCELDDPLILIHEKKISSINSIVKVLELALKRQRPLLIVSEDVESDALATLILNKLRAGIKVCAIKAPGFGENRKANLQDLAALTGGEVITDELGMNLEKVDLSMLGTCKKVTVSKDDTVILDGAGDKKGIEERCEQIRSAIELSTSDYDKEKLQERLAKLSGGVAVLKIGGASEAEVGEKKDRVTDALNATKAAVEEGILPGGGVALLYAARELEKLPTANFDQKIGVQIIQNALKTPVYTIASNAGVEGAVIVGKLLEQDNPDLGYDAAKGEYVDMVKAGIIDPLKVIRTALVDAASVSSLLTTTEAVVVDLPKDESESGAAGAGMGGMGGMDY

SEQ ID NO: 8914 - DNA, 1728 bp, Arabidopsis thaliana
  CDS (1)..(1728)
atgttcgccgtatcaccgtcgtcattctcgccgacaaccatttctccgcgccgtagtggacagaggaacgaacctcgaaaattctcggtggtgagagctggagctaagagaatactatacggtaaagatagcagagagaaactccaagccggaatcgataagttagctgatgctgtttccatcaccttaggccctagagggcgtaatgtagtgcttgctgaaaaagatacaatcaaagtgattaacgatggtgtcaccattgctaaatctattgagcttcctgacactattgagaacgctggagcaacattaatccaagaggttgcgattaaaatgaacgaatcagcgggtgacgggacaaccactgcaatcattttggctagagaaatgatcaaagctggttctttggctattgcttttggagctaatgctgtttctgtgaagaatggaatgaataagactgttaaagagttggtcagggtgttgcagatgaaaagtattcctgttcaagggaagaatgatattaaagctgtggcttcaatctctgctggtaacgatgaatttgtggggaatttgattgctgagactgtggaaaagattggccctgatggtgtcatctccattgaatcatcttccacttcagaaacgtctgttatagttgaggaaggaatgaagtttgacaagggctatatgtcgcctcatttcatcacaaatcaggagaaatctacggtggaattcgacaaagctaaaattcttgtgacggatcagaaaatcacttcagccaaagaattagttccgttactggagaaaacctcacaactgagtgttccgctccttataattgcagaagatatctctgcggaagtgcttgagatactggtggtgaacaagaagcaaggtttgatcaatgtcgcagttgtgaaatgtccaggaatgttggatgggaaaaaggctttgctacaagacattgcactcatgacaggagctgattatctttccggagatttaggcatgtcgctcatgggtgcaacttcagatcagctgggtgtttctcgtagagtagtaattacagctaattcaacaactatagtcgcagacgcttctactaaaccagagattcaggcaagaattgctcagatgaagaaggatctagctgagacagataattcatatctttcaaaaaaaatagcagagagaattgctaagctcacaggaggcgtggctgtaataaaggttggaggccacactgaaacagaacttgaggacagaaaactaagaatagaggacgcgaagaatgctacatttgcagccatgagagaaggtatagttccaggtggtggtgctacttatatccatcttttagatgagataccgagaatcaagaagaatctaatggaagattcatacgaacaaataggtgcagatattgtagcaatggcactcactgcacctgcaatggccatagcaaccaatgctggggttgatggatcagttgtggtgcagaaaaccagagaactcgaatggagaagtggttacaacgcaatgtctggaaagtatgaggatcttctaaacgctggaatcgcagatccttgtcgggtttcaagattcgcccttcaaaacgcagtttccgttgccggcattattctcacaactcaagcagtactcgtggagaagatcaagcaacctaaacctgctgttcctcaagttcctggcatacccacatcataa

SEQ ID NO: 8915 - protein, 575 aa, Arabidopsis thaliana
MFAVSPSSFSPTTISPRRSGQRNEPRKFSVVRAGAKRILYGKDSREKLQAGIDKLADAVSITLGPRGRNVVLAEKDTIKVINDGVTIAKSIELPDTIENAGATLIQEVAIKMNESAGDGTTTAIILAREMIKAGSLAIAFGANAVSVKNGMNKTVKELVRVLQMKSIPVQGKNDIKAVASISAGNDEFVGNLIAETVEKIGPDGVISIESSSTSETSVIVEEGMKFDKGYMSPHFITNQEKSTVEFDKAKILVTDQKITSAKELVPLLEKTSQLSVPLLIIAEDISAEVLEILVVNKKQGLINVAVVKCPGMLDGKKALLQDIALMTGADYLSGDLGMSLMGATSDQLGVSRRVVITANSTTIVADASTKPEIQARIAQMKKDLAETDNSYLSKKIAERIAKLTGGVAVIKVGGHTETELEDRKLRIEDAKNATFAAMREGIVPGGGATYIHLLDEIPRIKKNLMEDSYEQIGADIVAMALTAPAMAIATNAGVDGSVVVQKTRELEWRSGYNAMSGKYEDLLNAGIADPCRVSRFALQNAVSVAGIILTTQAVLVEKIKQPKPAVPQVPGIPTS

SEQ ID NO: 8916 - DNA, 1791 bp, Arabidopsis thaliana
  CDS (1)..(1791)
atggcatcaacctttagcgcaacgtcgtcaatgggttcatctttggctcctccttcgaatcgattgtcatcttttgtttcgatctcatcaagctcttttggaaggactcagagtattgctcagaggaaagcaaggtttcctaaaatatatgcggctaagcaattgcatttcaataaggacgggactgcgattaagaagcttcaagctggtgtgaataaacttgcggatttagttggggttactttaggtcctaaaggcaggaatgttgttctagagagcaaatacggttcccctagaatcgttaatgatggtgttacggtcgctagagaggttgagcttgaggatccagttgagaacattggtgctaagctagtgagacaagctgcttccaagactaatgacttagctggtgatggaacaacgacttctgttgttcttgctcaaggtcttattgctgaaggtgtaaaggtttctgctggtgcaaatcctgttttgattaccagaggtattgagaaaaccaccaaagctcttgtggctgagttgaagaaaatgtcaaaggaggttgaagacagtgaactagcagatgttgcagcagttagtgcaggaaacaattacgaagtaggcaatatgattgcagaagcaatggcaaaagttggtcgtaaaggtgttgtcactctagaggaaggcaaaagcgctgagaacagcctttacgttgttgaaggaatgcaatttgatcgtggttatatctctccttactttgtcaccgacagtgagaaaatgtgtgcagaatatgagaactgcaagttgtttcttgttgacaaaaagataacaaatgctagagatattattagcattctggaagatgcgattaaaggtggatacccgcttttgatcattgctgaagatattgagcaagagccattagcgactcttgttgttaacaagcttcgtgggacaataaaagttgctgctttgaaagctcctggatttggagagaggaaaagccagtaccttgatgacattgctgcgcttacaggagctactgtgattagggaagaagttggacttcagttggagaaagttggaccagaagttttgggtaatgctggtaaagtggttctcacaaaagatactacaacgatagttggtgatggaagtactgaagaagttgtgaagaagagagttgaacagatcaagaatcttatcgaggctgctgaacaagactatgaaaaggaaaagcttaatgagagaattgctaaattatcaggcggtgttgctgtaattcaggttggagcacaaactgagacagagcttaaggagaagaaattaagagttgaagatgctcttaatgctacaaaggctgctgtggaagaaggtattgttgttggcggaggatgtactctgctaagacttgcatcgaaagtggacgctattaaagagactctagcaaacgatgaagaaaaggttggagctgacattgttaagaaagcattgagctacccactgaagttaatcgccaagaacgctggtgtcaatggcagcgttgtcagtgagaaggttctttctagtgacaaccctaaacatggttacaatgctgcaactggcaaatacgaagatctcatggctgcaggaatcattgatccaaccaaagttgtgagatgttgcctagagcatgcttcatctgtggcaaagacattcttgatgtctgattgtgttgttgtggagatcaaggagcctgaatcagcagctcctgctggtaaccctatggacaattcaggttacggcttctaa

SEQ ID NO: 8917 - protein, 596 aa, Arabidopsis thaliana
MASTFSATSSMGSSLAPPSNRLSSFVSISSSSFGRTQSIAQRKARFPKIYAAKQLHFNKDGTAIKKLQAGVNKLADLVGVTLGPKGRNVVLESKYGSPRIVNDGVTVAREVELEDPVENIGAKLVRQAASKTNDLAGDGTTTSVVLAQGLIAEGVKVSAGANPVLITRGIEKTTKALVAELKKMSKEVEDSELADVAAVSAGNNYEVGNMIAEAMAKVGRKGVVTLEEGKSAENSLYVVEGMQFDRGYISPYFVTDSEKMCAEYENCKLFLVDKKITNARDIISILEDAIKGGYPLLIIAEDIEQEPLATLVVNKLRGTIKVAALKAPGFGERKSQYLDDIAALTGATVIREEVGLQLEKVGPEVLGNAGKVVLTKDTTTIVGDGSTEEVVKKRVEQIKNLIEAAEQDYEKEKLNERIAKLSGGVAVIQVGAQTETELKEKKLRVEDALNATKAAVEEGIVVGGGCTLLRLASKVDAIKETLANDEEKVGADIVKKALSYPLKLIAKNAGVNGSVVSEKVLSSDNPKHGYNAATGKYEDLMAAGIIDPTKVVRCCLEHASSVAKTFLMSDCVVVEIKEPESAAPAGNPMDNSGYGF

SEQ ID NO: 8918 - DNA, 1638 bp, Aquifex aeolicus VF5
  CDS (1)..(1638): transl_table=11
atggcagcaaaggcaattatctacaacgaggaagcaagggcaaaactaaaggctggtgttgataaactcgcaaacgcagttaaggttaccttaggtccaaaaggtagggaagttatcttaggaaagaactggggaactcccgttgtaaccaaggacggtgttacggtagctaaggaaattgaactcaaggacaagtttgaaaatatcggagctcaactcgtaaaagaagttgcttccaagaccgcggacgtagcaggtgacggaactaccaccgcaacggtactcgcacaggcaatattccacgaaggactcagggttgcagcaagcggtgcaaacgtaatggaagtaaagaggggaattgacaaggccgtaaagaaaattgttgaagaactcaagaaactctccaaggacgtaaaggaaaggaaggaaatagaacaggtagctaccatatccgctaacaacgatcccgaaatcggaaagataatagcggacgctatggaagaagttggaaaggacggggttataactgttgaagaaagcaagtccgcggaaaccaccctcgaagtagttaagggaatgcagtttgacagaggatacctatctccgtactttgtaacagatcctgagaagatggaatgcgtactagaaaatccctacatactcatatacgaaaagaagataaccaacgtaaaggaacttcttccaatacttgaacaagtagtaagaagcggaagaccacttctggttatagctgaagacgtagaaggtgaagcactcgcaacactcgttgtaaaccacatcaaaggagtactcaaggcttgtgcagtaaaggctcccggattcggacaaaggagaaaggactacctcggagatattgcagttctcacaggcggacaggctataactgaagacctcggaattaagcttgaaagcgtaacacttgacatgctcggacaggctgaaaaggtagtggttgataaagaacacaccaccataataggcggtaagggagatcccgaacaaataaaggcaaggatagaacaaataaagagacaaattcaggaaacaacctctgactacgacagggaaaagctacaagaaagactcgctaaactctcaggtggagttgcaataataagggtaggtgctgcaaccgaagctgaactcaaagagaagaagtacagagttgaagacgcggtacacgcaaccaaggctgcagtagaagaaggaatagttcccggtggtggagtagcacttgtgagggcatccgaagcacttgaagacctcaaaggtgacaaccacgatcaacaactcggaatagacataatcaagaaggctgtaaggacacccctcaagcaaatagcttacaacgcaggatacgacggatccgtagtactcgaaaaggtgattgaactcggaaaggaaaaaggtgtaagctggggattcaacgcggcaaccggagagtacgttgacatgtacgaagccggaataatagatccgaccaaagtcgtaagaaccgctatagaaaacgcggcatccgtagcaggaacgatgctcaccgctgaagcactgatagcagaccttcccgaagaaaagaagaaagacataactcccactgacatgcctgaacttgactaa

SEQ ID NO: 8919 - protein, 545 aa, Aquifex aeolicus VF5
MAAKAIIYNEEARAKLKAGVDKLANAVKVTLGPKGREVILGKNWGTPVVTKDGVTVAKEIELKDKFENIGAQLVKEVASKTADVAGDGTTTATVLAQAIFHEGLRVAASGANVMEVKRGIDKAVKKIVEELKKLSKDVKERKEIEQVATISANNDPEIGKIIADAMEEVGKDGVITVEESKSAETTLEVVKGMQFDRGYLSPYFVTDPEKMECVLENPYILIYEKKITNVKELLPILEQVVRSGRPLLVIAEDVEGEALATLVVNHIKGVLKACAVKAPGFGQRRKDYLGDIAVLTGGQAITEDLGIKLESVTLDMLGQAEKVVVDKEHTTIIGGKGDPEQIKARIEQIKRQIQETTSDYDREKLQERLAKLSGGVAIIRVGAATEAELKEKKYRVEDAVHATKAAVEEGIVPGGGVALVRASEALEDLKGDNHDQQLGIDIIKKAVRTPLKQIAYNAGYDGSVVLEKVIELGKEKGVSWGFNAATGEYVDMYEAGIIDPTKVVRTAIENAASVAGTMLTAEALIADLPEEKKKDITPTDMPELD

SEQ ID NO: 8920 - DNA, 1617 bp, Thermotoga maritima MSB8
  CDS (1)..(1617): transl_table=11
atgccgaagattctgaagttcaatgaagaagcgagaagagcactcgaaagaggtgtggacaaggtcgctaacgcggtaaaggtgactctcggaccaaagggaaggaacgttgttatcgaaaaatcgtggggttctccaacaataaccaacgacggtgtttccatagccaaggagattgagctcgaggacaaattcgaaaaccttggagctcagctcgtgaaagaggttgcttccaaaacaaacgatgttgccggtgacggtacaacaacggctacggttctcgcacaggctatgatcaaagaaggtctcaagaatgttgcagcgggtgccaatccaattctcctcaagagaggtatagacaaagccgttgagaaggccgttgaagagatcaagaaggtttccaagaaactttccggtagggaagacatcgcccatgttgccgccatatctgcgaacagcgctgaaataggagaactcatcgcagaagctatggacaaggtaggagaagacggagtcatcactgtggaagattccaaaacactcgaaacatacgttgaattcaccgaaggtatgcagtttgacaggggttacatttcaccgtacttcgtcacggatgccgagaagatggaagtcgttctgaaggaacccttcatactcatcactgacaggaagctcagcgctgtgaagcctctcattccgatccttgaaaaagtcgctcagaccggaaaaccacttctcgtcatagcggaagacgttgaaggagaagttctgacaacacttgttctcaacaagctcaagggtactctccagtcctgtgctgtaaaggctcctggattcggtgaaagaagaaaagccatgcttcaggacatagcgatactcaccggaggtcaggtggcaagtgaagagctcggaatcaatctcgaggatctcaccctcgaagatctcggaagagccgatcttgtgagggtcaagaaagatgaaaccatcataattggaggaaaaggtgatccggaggctatcaagaagagaatcgctcagatcaaagcccagatagaggaaaccacatccgagtacgaaaaagaaactctccaggaaaggatggcaaaactcgcaggaggagtagccgtcataaaggttggagcggccaccgaaacagagctcaaggaaaagaaacacagaattgaagacgcactgagcgccacgagagcagctgtcgaagaaggaatcgttccaggtggaggagtaacactcctgagagcaagaaaagccgttgaaaaggtcatagaagagctcgaaggcgacgagaaaataggagcccagatcgtttacaaggcactctcagcccctattaagcagattgctgaaaacgcgggatacgacggagcggtgatcattgagaagatactttcgaatgacgatccagcctatggattcgacgcactcagaggagaatactgcaacatgtttgaaagaggaatcattgacccagcaaaggttacaaggagcgccctgcagaatgctgcatccatcgctggaatgctcctgacaacggaagtgctcatcgttgaaaaacccgaggagaagaaagaaacaccgagcatgcctgaagaattctga

SEQ ID NO: 8921 - protein, 538 aa, Thermotoga maritima MSB8
MPKILKFNEEARRALERGVDKVANAVKVTLGPKGRNVVIEKSWGSPTITNDGVSIAKEIELEDKFENLGAQLVKEVASKTNDVAGDGTTTATVLAQAMIKEGLKNVAAGANPILLKRGIDKAVEKAVEEIKKVSKKLSGREDIAHVAAISANSAEIGELIAEAMDKVGEDGVITVEDSKTLETYVEFTEGMQFDRGYISPYFVTDAEKMEVVLKEPFILITDRKLSAVKPLIPILEKVAQTGKPLLVIAEDVEGEVLTTLVLNKLKGTLQSCAVKAPGFGERRKAMLQDIAILTGGQVASEELGINLEDLTLEDLGRADLVRVKKDETIIIGGKGDPEAIKKRIAQIKAQIEETTSEYEKETLQERMAKLAGGVAVIKVGAATETELKEKKHRIEDALSATRAAVEEGIVPGGGVTLLRARKAVEKVIEELEGDEKIGAQIVYKALSAPIKQIAENAGYDGAVIIEKILSNDDPAYGFDALRGEYCNMFERGIIDPAKVTRSALQNAASIAGMLLTTEVLIVEKPEEKKETPSMPEEF

SEQ ID NO: 8922 - DNA, 1635 bp, Bacillus halodurans C-125
  CDS (1)..(1635): transl_table=11
atggcaaaagatattaagtttagcgaagacgcacgtcgctctatgcttcgtggtgtagataaacttgctgacgcagtaaaagtaacgctaggaccaaaaggtcgtaacgtcgttcttgaaaagaaattcggttctccacttattacaaatgacggtgtaaccatcgcaaaggaaatcgaattagaagatgcgtttgaaaacatgggtgcaaagcttgttgcagaagtggcaagcaagacaaatgacattgctggggacggtacaacaacagcaacggtccttgcacaagcgatgattcgcgaaggcttgaaaaacgtcacgtctggcgcgaacccaatggtgattcgtaaaggaatcgaaaaagcgactcaagtagccgttgaagaactttctaaaatctctaagccaatcgaaggcaaagattcaatcgctcaagttgcggcgatttcttctgctgacgatgaagtagggaaaatcattgctgaagcaatggagcgcgtaggcaacgacggcgttattacgattgaagagtctaaaggattctctacagagctagaagtggttgaaggtatgcaatttgaccgcggctatgcgtctccttacatggtgacagactctgacaagatggaagcggttcttgacaacccttatgtcttgatcacagataagaagatttctaacatccaagaagtattaccagttcttgagcaagttgtacaacaaggcaagccaatccttatcattgctgaggatgtagaaggtgaagctcttgcaacacttgtggtgaacaaacttcgtggaacatttaacgcagtagcggttaaagctcctggattcggtgatcgtcgtaaagcaatgcttgaagacattgcgatccttactggcggtgaagtgatcacagaagacctagggcttgacttgaaatctgcgaacatcacacagcttggtcgcgcaagtaaagtcgttgtaacgaaagagaacacaacgattgttgaaggtgctggcgaaagcgataaaatcgcagctcgcgttaatcaaatcaaagcacaaatcgaagaaacaacatctgacttcgataaagaaaaacttcaagagcgcttagcgaagcttgctggtggcgtcgctgttcttaaagtcggtgcagctactgaaactgaaatgaaagagcgcaaacttcgcattgaagacgcgttgaactctactcgcgcggctgtagaagaaggaatcgttgctggtggtggtactgcccttgtgaacgtgattaaagcagtctctagcatcggtgcagaaggtgacgaagcaacaggtgtgaacatcgttcttcgtgcccttgaagagccagttcgtcaaattgctcacaacgcaggtcttgaaggctctgtgatcgtcgagcgcctcaagaaagaagaagctggcttcggtttcaacgcagcaactggtgaatgggtgaacatggttgaagctggtatcgttgacccaacgaaagtaactcgttcagcgcttcagcacgcagcatctgtatccgctatgttcctcacaacagaagcggtgatcgctgataagcctgaggagaacgagggcggcggcggaatgcctgacatgggcggaatgggtggcatgggcggcatgatgtaa

SEQ ID NO: 8923 - protein, 544 aa, Bacillus halodurans C-125
MAKDIKFSEDARRSMLRGVDKLADAVKVTLGPKGRNVVLEKKFGSPLITNDGVTIAKEIELEDAFENMGAKLVAEVASKTNDIAGDGTTTATVLAQAMIREGLKNVTSGANPMVIRKGIEKATQVAVEELSKISKPIEGKDSIAQVAAISSADDEVGKIIAEAMERVGNDGVITIEESKGFSTELEVVEGMQFDRGYASPYMVTDSDKMEAVLDNPYVLITDKKISNIQEVLPVLEQVVQQGKPILIIAEDVEGEALATLVVNKLRGTFNAVAVKAPGFGDRRKAMLEDIAILTGGEVITEDLGLDLKSANITQLGRASKVVVTKENTTIVEGAGESDKIAARVNQIKAQIEETTSDFDKEKLQERLAKLAGGVAVLKVGAATETEMKERKLRIEDALNSTRAAVEEGIVAGGGTALVNVIKAVSSIGAEGDEATGVNIVLRALEEPVRQIAHNAGLEGSVIVERLKKEEAGFGFNAATGEWVNMVEAGIVDPTKVTRSALQHAASVSAMFLTTEAVIADKPEENEGGGGMPDMGGMGGMGGMM

SEQ ID NO: 8924 - DNA, 1644 bp, Pasteurella multocida subsp. multocida str. Pm70
  CDS (1)..(1644): transl_table=11
atggcagcaaaagacgtaaaatttggtaatgatgcacgtgtcaaaatgttagcgggtgtcaatattcttgcggatgcagtaaaagttaccttaggtcctaaaggtcgtaatgtcgtattagataaatctttcggtgcaccgactatcactaaagatggtgtatcagtggcgcgtgaaatcgaattagaagataaattcgaaaatatgggtgcacaaatggtaaaagaagtggcgtcaaaagcgaatgatgcggcaggtgacggtaccacgacagcaaccgttttagcacaagctatcgtcaatgaaggcttaaaagcggtggcagcgggtatgaacccaatggatttaaaacgtggtatcgacaaagcggtaaccgcagtggttacagaattaaaagccctttcaaaaccttgtgaaacctcaaaagaaatcgaacaagtgggaacaatctctgctaactcagacagtattgttggtcaaatcattgcacaagcgatggataaagtaggtaaagaaggcgtgatcaccgttgaagatggcacaggtttagaagacgaacttgccgttgtagaagggatgcaattcgatcgcggttatttatcaccttacttcatcaacaaaccagaaacagcaacagttgaattagacaatccatttattttattagtggacaaaaaagtgtccaacattcgtgaattgttaccggtgttagaaggtgtagcaaaagcgggcaaaccattattaattatcgcagaagatgtcgaaggtgaagcacttgcaaccttagtcgtgaacacaatgcgtggaattgtgaaagtcgcagcagtgaaagcacctggctttggtgaccgtcgtaaagccatgttacaagatatcgcgatcttaacggctggtacggttatttctgaagaaatcggtatggaattagaaaaagccacacttgaagatcttggtcaagcaaaacgtgtagtcatcaacaaagacaataccacgattattgatggtatcggtgacgaagcacaaatccaaggtcgtgtggcacaaattcgtcaacaaatcgaagaatccacctctgattacgacaaagaaaaattacaagagcgcgtagctaaactcgctggcggtgtcgcagttattaaagtgggtgcagcaaccgaagtagaaatgaaagagaaaaaagcgcgcgtagaagacgcactccacgcaacacgtgcggcggttgaagaaggtatcgttgctggtggtggtgttgccttaatccgtgccgctagcaaagtcgctggtcttcaaggtgataatgaagaacaaaatgtgggaatcaaacttgccttacgtgcaatggaagccccattacgtcagatcgtagccaacgcaggtgaagaagcgtctatcgtagcaagtgcagtgaaaaatggcgaaggtaacttcggttataacgcaggtacagaacagtacggcgatatgatcgaaatgggtatcttagacccaacaaaagttacccgttctgcattacaatttgcggcttctgttgctggcttaatgatcaccactgaatgtatggtcactgacctaccaaaagaggataaagccgacttaggtgctgctggtatgggtggcatgggtggtatgggcggtatgatgtaa

SEQ ID NO: 8925 - protein, 547 aa, Pasteurella multocida subsp. multocida str. Pm70
MAAKDVKFGNDARVKMLAGVNILADAVKVTLGPKGRNVVLDKSFGAPTITKDGVSVAREIELEDKFENMGAQMVKEVASKANDAAGDGTTTATVLAQAIVNEGLKAVAAGMNPMDLKRGIDKAVTAVVTELKALSKPCETSKEIEQVGTISANSDSIVGQIIAQAMDKVGKEGVITVEDGTGLEDELAVVEGMQFDRGYLSPYFINKPETATVELDNPFILLVDKKVSNIRELLPVLEGVAKAGKPLLIIAEDVEGEALATLVVNTMRGIVKVAAVKAPGFGDRRKAMLQDIAILTAGTVISEEIGMELEKATLEDLGQAKRVVINKDNTTIIDGIGDEAQIQGRVAQIRQQIEESTSDYDKEKLQERVAKLAGGVAVIKVGAATEVEMKEKKARVEDALHATRAAVEEGIVAGGGVALIRAASKVAGLQGDNEEQNVGIKLALRAMEAPLRQIVANAGEEASIVASAVKNGEGNFGYNAGTEQYGDMIEMGILDPTKVTRSALQFAASVAGLMITTECMVTDLPKEDKADLGAAGMGGMGGMGGMM

SEQ ID NO: 8926 - DNA, 1647 bp, Escherichia coli O157:H7 EDL933
  CDS (1)..(1647): transl_table=11
  misc_feature (478)..(478): w is a or t
atggcagctaaagacgtaaaattcggtaacgacgctcgtgtgaaaatgctgcgcggcgtaaacgtactggcagatgcagtgaaagttaccctcggtccgaaaggccgtaacgtagttctggataaatctttcggtgcaccgaccatcaccaaagatggtgtttccgttgctcgtgaaatcgaactggaagacaagttcgaaaacatgggtgcgcagatggtgaaagaagttgcctctaaagcgaacgacgctgcaggcgacggtaccaccactgcaaccgtactggctcaggctatcatcactgaaggtctgaaagctgttgctgcgggcatgaacccgatggacctgaaacgtggtatcgacaaagctgttaccgctgcagttgaagaactgaaagcgctgtccgtaccgtgctctgactctaaagcgattgctcaggttggtactatctccgctaactccgacgaaaccgtaggtwaactgatcgctgaagcgatggacaaagtcggtaaagaaggcgttatcaccgttgaagacggtaccggtctgcaggacgaactggacgtggttgaaggtatgcagttcgaccgtggctacctgtctccttacttcatcaacaagccggaaactggcgcagtagaactggaaagcccgttcatcctgctggctgacaagaaaatctccaacatccgcgaaatgctgccggttctggaagccgttgccaaagcaggcaaaccgctgctgatcatcgctgaagatgtagaaggcgaagcgctggcaactctggttgttaacaccatgcgtggcatcgtgaaagttgctgcagttaaagctccgggcttcggcgatcgtcgtaaagctatgctgcaggatatcgcaaccctgactggcggtaccgtaatctctgaagagatcggtatggagctggaaaaagcaaccctggaagacctgggtcaggctaaacgcgttgtgatcaacaaagacaccaccaccatcatcgatggcgtgggcgaagaagctgcaatccagggccgtgttgctcagatccgtcagcagattgaagaagcaacttctgactacgaccgtgaaaaactgcaggagcgcgtagcgaaactggcaggcggcgttgcagttatcaaagtaggtgctgctaccgaagttgaaatgaaagagaaaaaagcacgcgttgaagacgccctgcacgcgacccgtgctgcggtagaagaaggcgtggttgctggtggtggtgttgcgctgatccgcgtagcgtctaaactggctgacctgcgtggtcagaacgaagaccagaacgtgggtatcaaagttgcactgcgtgcaatggaagctccgctgcgtcagatcgtcctgaactgcggcgaagaaccgtctgttgttgctaacaccgttaaaggcggcgacggcaactacggttacaacgcagcaaccgaagaatacggcaacatgatcgacatgggtatcctggacccaaccaaagtaacccgttctgctctgcagtacgcggcttctgtggctggcctgatgatcaccaccgaatgcatggttaccgacctgccgaaaaacgatgcagctgacttaggcgctgctggcggcatgggtggcatgggtggcatgggcggcatgatgtaa

SEQ ID NO: 8927 - protein, 548 aa, Escherichia coli O157:H7 EDL933
  misc_feature (160)..(160): The Xaa at location 160 stands for Stop, or Lys.
MAAKDVKFGNDARVKMLRGVNVLADAVKVTLGPKGRNVVLDKSFGAPTITKDGVSVAREIELEDKFENMGAQMVKEVASKANDAAGDGTTTATVLAQAIITEGLKAVAAGMNPMDLKRGIDKAVTAAVEELKALSVPCSDSKAIAQVGTISANSDETVGXLIAEAMDKVGKEGVITVEDGTGLQDELDVVEGMQFDRGYLSPYFINKPETGAVELESPFILLADKKISNIREMLPVLEAVAKAGKPLLIIAEDVEGEALATLVVNTMRGIVKVAAVKAPGFGDRRKAMLQDIATLTGGTVISEEIGMELEKATLEDLGQAKRVVINKDTTTIIDGVGEEAAIQGRVAQIRQQIEEATSDYDREKLQERVAKLAGGVAVIKVGAATEVEMKEKKARVEDALHATRAAVEEGVVAGGGVALIRVASKLADLRGQNEDQNVGIKVALRAMEAPLRQIVLNCGEEPSVVANTVKGGDGNYGYNAATEEYGNMIDMGILDPTKVTRSALQYAASVAGLMITTECMVTDLPKNDAADLGAAGGMGGMGGMGGMM

SEQ ID NO: 8928 - DNA, 1635 bp, Agrobacterium tumefaciens str. C58
  CDS (1)..(1635): transl_table=11
atggcagctaaagaagtcaaattcggccgctcagcgcgcgaaaagatgctcaagggcgtcgacattcttgccgatgcagtgaaagtaaccctcggcccgaagggccgtaacgtcgttatcgacaagtccttcggcgctccgcgcatcaccaaggacggcgtttccgtcgccaaggaaatcgaactggaagacaagttcgagaacatgggcgcacagctcgttcgcgaagttgcctccaagaccaacgacatcgccggtgacggcaccaccaccgcaacggttctggcccaggccatcgttcgcgaaggtgcaaaggcagttgctgccggcatgaacccgatggacctcaagcgcggtatcgatctggccgttgctgaagtcgtcaaggaccttcaggccaaggccaagaagatcaacacgtctgaagaagttgcacaggtcggcacgatctctgcaaacggcgagcgtcagatcggtctcgacattgctgaagcaatgcagcgcgtcggcaacgaaggcgtcatcaccgttgaagaagccaagactgctgaaaccgaactcgaagtcgtcgaaggcatgcagttcgaccgcggctacctgtcgccttacttcgtaaccaacccggaaaagatggttgcggacctcgaagacgcttacatccttctgcacgaaaagaagctctcgaaccttcaggccatgctgcctgttctcgaagccgtcgttcagaccggcaagccgctcgtcatcatcgctgaagacgtcgaaggcgaagctcttgcaacgctcgtcgtcaacaagctgcgtggcggcctcaagatcgctgccgtcaaggctcctggcttcggcgatcgccgcaaggccatgctggaagacatcgccatcctgaccggtggtaccgtcatttccgaagacctcggcatcaagctcgaaagcgttaccctcgacatgctcggcaagtcgaagaaggtttcgatctccaaggaaaacaccacgatcgttgacggtgccggccagaagtccgacatcgaaggccgcgttgcccagatcaaggcacagatcgaggaaaccacttccgactacgaccgcgaaaagctgcaggaacgtcttgccaagctcgctggcggcgttgccgtgatccgcgttggcggttcgacggaagttgaagtgaaggaaaagaaggaccgcatcgacgacgctctcaacgcgacgcgcgctgctgttcaggaaggcatcgtaccgggcggcggcgttgccctgctgcgttcttccacgaagatcaccgtcaagggtgtgaacgacgatcaggaagccggcatcaacatcgtgcgcaaggctctgcagtctctggttcgccagatcgcagaaaacgctggtgatgaagcttccatcgttgttggcaagatcctcgacaagaacgaagacaactacggctacaacgcccagaccggcgaatatggcgatctgatcgctctcggcatcgtcgacccggtcaaggttgtacgtaccgctctgcagaacgcagcttcggttgcttcgctgctgatcaccaccgaagcgatgatcgccgagcttcctaagaaggaatcggcaatgccgcagatgcccggcggcggcatgggcggcatggacttctaa

SEQ ID NO: 8929 - protein, 544 aa, Agrobacterium tumefaciens str. C58
MAAKEVKFGRSAREKMLKGVDILADAVKVTLGPKGRNVVIDKSFGAPRITKDGVSVAKEIELEDKFENMGAQLVREVASKTNDIAGDGTTTATVLAQAIVREGAKAVAAGMNPMDLKRGIDLAVAEVVKDLQAKAKKINTSEEVAQVGTISANGERQIGLDIAEAMQRVGNEGVITVEEAKTAETELEVVEGMQFDRGYLSPYFVTNPEKMVADLEDAYILLHEKKLSNLQAMLPVLEAVVQTGKPLVIIAEDVEGEALATLVVNKLRGGLKIAAVKAPGFGDRRKAMLEDIAILTGGTVISEDLGIKLESVTLDMLGKSKKVSISKENTTIVDGAGQKSDIEGRVAQIKAQIEETTSDYDREKLQERLAKLAGGVAVIRVGGSTEVEVKEKKDRIDDALNATRAAVQEGIVPGGGVALLRSSTKITVKGVNDDQEAGINIVRKALQSLVRQIAENAGDEASIVVGKILDKNEDNYGYNAQTGEYGDLIALGIVDPVKVVRTALQNAASVASLLITTEAMIAELPKKESAMPQMPGGGMGGMDF

SEQ ID NO: 8930 - DNA, 1626 bp, Synechocystis sp. PCC 6803
  CDS (1)..(1626): transl_table=11
atggctaaatccatcatttacaatgacgaagctcgccgtgccctagagcggggcatggacattctggcggaagccgttgccgttaccctcggccctaaaggtcgtaacgtggtgctcgagaagaaatttggctctccccaaattattaacgacgggatcacgattgccaaagagattgaactggaagaccatgtagaaaatactggggtttccttaattcgccaagcggcttctaaaaccaatgatgtggctggggatggtaccaccaccgctacggttttggcccacgccattgttaaagaaggtttacgcaacgtggccgctggtgccaaccccatttccctcaagcggggtattgataaggccactgatttcctcgttgctcggattaaagagcatgcccaacccgtgggagattccaaggcgatcgcccaggtgggagccatttccgccggtaacgacgaagaagttggccaaatgattgccaatgccatggataaagtcggccaagaaggggttatttccctcgaagaaggcaaatccatgaccaccgagttggaaatcaccgaagggatgcgcttcgataagggttatatctccccttacttcgtcaccgatgcggaacggatggaagctgtcctggaagatccccgcattttgatcactgacaaaaaaatcaacttggtgcaagacctggtgcccatccttgaacaagtggcccgtcaaggtaagcccctgttgatcattgccgaagatattgaaaaagaagctttggctaccctcgtagttaaccgtctccggggtgtgttgaatgtggccgctgtgaaagcccccggctttggcgatcgccgtaaacaaatgttagaagacattgccaccctcaccggcggtcaagtaatcagcgaagatgctggtctgaaactggaaagcgccactgtggatagcctcggttctgcccgtcgcatcaacatcaccaaagacaacaccaccattgtggccgaaggcaacgaagccgccgttaagtcccgctgtgagcaaatccgtcgccagatcgaagaaaccgattctagctacgacaaagaaaaactccaagagcgcttggctaaattggccggtggtgtagcggtaatcaaagtcggtgctgctaccgaaaccgaaatgaaagaccgtaaactccgcctggaagatgccatcaatgccaccaaagccgctgtggaagaaggtattgttcccggtggtggtaccaccctggcccacttggctccccaattggaagactgggccactggcaacctcaaagatgaagagttaaccggtgccctgattgtagcccgggctctgcctgctcccctcaaacggattgccgaaaacgccggtcaaaacggtgcggttatctccgagcgagtcaaagagaaggagttcaacgttggttacaatgccgctagcctggaatatgtagatatgctggccgctggcattgttgaccctgccaaagtgacccgttccgctctgcaaaatgccgcttccatcgctggcatggtattgaccaccgaatgcattgttgtggacaaacctgaaaaagaaaaagcccccgctggtgcccccggtggtgacttcgactactaa

SEQ ID NO: 8931 - protein, 541 aa, Synechocystis sp. PCC 6803
MAKSIIYNDEARRALERGMDILAEAVAVTLGPKGRNVVLEKKFGSPQIINDGITIAKEIELEDHVENTGVSLIRQAASKTNDVAGDGTTTATVLAHAIVKEGLRNVAAGANPISLKRGIDKATDFLVARIKEHAQPVGDSKAIAQVGAISAGNDEEVGQMIANAMDKVGQEGVISLEEGKSMTTELEITEGMRFDKGYISPYFVTDAERMEAVLEDPRILITDKKINLVQDLVPILEQVARQGKPLLIIAEDIEKEALATLVVNRLRGVLNVAAVKAPGFGDRRKQMLEDIATLTGGQVISEDAGLKLESATVDSLGSARRINITKDNTTIVAEGNEAAVKSRCEQIRRQIEETDSSYDKEKLQERLAKLAGGVAVIKVGAATETEMKDRKLRLEDAINATKAAVEEGIVPGGGTTLAHLAPQLEDWATGNLKDEELTGALIVARALPAPLKRIAENAGQNGAVISERVKEKEFNVGYNAASLEYVDMLAAGIVDPAKVTRSALQNAASIAGMVLTTECIVVDKPEKEKAPAGAPGGDFDY

SEQ ID NO: 8932 - DNA, 1659 bp, Synechocystis sp. PCC 6803
  CDS (1)..(1659): transl_table=11
atgtctaaacttatttcctttaaggatgaatccagacgctctttggaagcggggattaatgccctggctgatgcggtgcggattaccctcggccccaaaggtcgcaatgttttattagaaaagcagtacggtgctccccagattgtcaacgatggcatcaccgtagccaaagaaattgaactgtccaacccggaagaaaatgctggagctaagctaatccaggaagttgcttccaaaaccaaggaaattgctggggatggcaccaccaccgccactattattgctcaagctttagtgcgggaaggtctgcgcaacgtcgccgccggtgctaatcccgtggctctccgtcggggcatcgaaaaagttaccactttcctcgttcaagaaattgaggctgtggctaaacccgtggaaggttcggcgatcgcccaagtggccaccgtatcctccggtaacgatcccgaagttggggccatgattgccgatgccatggacaaagtcaccaaagatggcgtcatcaccgtggaggagtccaaatccctcaacaccgaattggaagtggtggaagggatgcagatcgaccggggctatatttctccctacttcatcaccgatagcgatcgccagttggtggagtttgataatcctttaatcctcatcaccgataaaaaaatcagtgccattgcggaattggttcccgtactggaagctgtggcccgggccggtcgtcccctgttaatcattgcggaagacattgaaggagaagcccttgctaccctagtggtcaataaagcccggggtgtactcaacgtggccgccattaaagcccccgcctttggcgatcggcgtaaagctgtgttgcaagatatcgctatcctcaccggtggtagcgtcatttccgaagacattggcctgagcctcgacaccgtcagcttggatcaattgggccaagccgttaaagccactttggaaaaagacaacaccatcctcgtcgctggggccgacaaacgggcttccgctggagtcaaagagcggattgagcagttgcggaaagaatatgctgcttctgattccgattacgacaaagaaaaaatccaagagcgcattgccaaactagccggtggtgtagctgtgattaaagtcggggccgcaacggaaaccgaactcaaagaccgcaaactccgcattgaagatgccctcaatgccaccaaagccgcagtggaagaaggtattgttcccggtggtggtacaaccctaattcgtttagcgggcaaaattgaaagctttaaagcccaactcagcaacgatgaagagcgggttgccgccgacatcatcgccaaagccctggaagctcccctgcaccagttggccagcaatgctggggtagagggttccgtcattgtggaaaaagttaaagaagctactggcaatcaaggttacaacgtcatcactggcaaaattgaagacctgatagccgctggcatcatcgaccccgctaaagtggtacgttctgctctgcaaaatgccgcttccattgctgggatggtgttgaccactgaagctttagtagtggaaaaacctgaacctgcggctcccgctatgcccgatatgggtggcatgggcggaatgggtggtatgggcggcatgggcatgatgtaa

SEQ ID NO: 8933 - protein, 552 aa, Synechocystis sp. PCC 6803
MSKLISFKDESRRSLEAGINALADAVRITLGPKGRNVLLEKQYGAPQIVNDGITVAKEIELSNPEENAGAKLIQEVASKTKEIAGDGTTTATIIAQALVREGLRNVAAGANPVALRRGIEKVTTFLVQEIEAVAKPVEGSAIAQVATVSSGNDPEVGAMIADAMDKVTKDGVITVEESKSLNTELEVVEGMQIDRGYISPYFITDSDRQLVEFDNPLILITDKKISAIAELVPVLEAVARAGRPLLIIAEDIEGEALATLVVNKARGVLNVAAIKAPAFGDRRKAVLQDIAILTGGSVISEDIGLSLDTVSLDQLGQAVKATLEKDNTILVAGADKRASAGVKERIEQLRKEYAASDSDYDKEKIQERIAKLAGGVAVIKVGAATETELKDRKLRIEDALNATKAAVEEGIVPGGGTTLIRLAGKIESFKAQLSNDEERVAADIIAKALEAPLHQLASNAGVEGSVIVEKVKEATGNQGYNVITGKIEDLIAAGIIDPAKVVRSALQNAASIAGMVLTTEALVVEKPEPAAPAMPDMGGMGGMGGMGGMGMM

SEQ ID NO: 8934 - DNA, 1647 bp, Salmonella enterica subsp. enterica serovar Typhimurium str. LT2
  CDS (1)..(1647): transl_table=11
atggcagctaaagacgtaaaattcggtaacgacgctcgtgtgaaaatgctgcgcggcgtaaacgtactggcagatgcagtgaaagttaccctcggtccgaaaggccgtaacgtggttctggataaatctttcggtgcgccgactatcactaaagatggtgtttccgtagcgcgtgaaatcgaactggaagacaagtttgaaaacatgggcgcgcaaatggtgaaagaagttgcctctaaagcgaacgatgctgcaggcgacggcaccaccaccgcgaccgtactggcgcagtccatcattaccgaaggcttgaaagccgttgctgcgggcatgaacccgatggacctgaaacgtggtatcgacaaagcggttgctgcggcggttgaagagctgaaagccctgtccgtaccgtgctccgactctaaagcgattgctcaggtaggtactatctccgctaactccgacgaaaccgtaggtaaactgatcgcggaagcgatggataaagtcggtaaagaaggcgtcatcaccgttgaagacggtaccggtctgcaggacgaactggacgtggttgaaggtatgcagtttgaccgcggctacctgtctccttacttcatcaacaagccggaaactggcgcagtagagctggaaagcccgttcatcctgctggctgataagaaaatctccaacatccgcgaaatgctgccggttctggaagccgttgcaaaagcaggcaaaccgctgctgatcatcgctgaagatgttgaaggcgaagcgctggctaccctggttgttaacaccatgcgtggcatcgtgaaagtggctgctgttaaggcacctggcttcggcgatcgtcgtaaggcgatgctgcaggatatcgctaccctgaccggcggtaccgtaatctctgaagagatcggtatggagctggaaaaagcaaccctggaagacctgggtcaggcgaaacgtgttgtgatcaacaaagacaccaccaccatcatcgatggcgtgggtgaagaagctgccatccagggccgtgttgctcagatccgtcagcagattgaagaagcgacctccgactacgatcgtgaaaaactgcaggagcgcgtagcgaaactggcaggcggcgttgcggttatcaaagttggcgctgcgaccgaagttgaaatgaaagagaagaaagcccgcgttgaagatgccctgcacgcgacccgtgctgcggtagaagaaggcgtggttgctggtggtggcgttgcgctgatccgcgttgcttctaaaattgctgacctgaaaggccagaacgaagaccagaacgtgggtatcaaagttgcgctgcgcgcaatggaagctccgctgcgtcagatcgtgctgaactgcggcgaagagccgtctgttgtcgctaacaccgttaaaggcggcgacggtaactacggttacaacgcagcaactgaagaatacggcaacatgatcgatatgggtatcctggacccaaccaaagttacccgttctgcgctgcagtacgctgcttctgtggctggtctgatgatcactaccgagtgcatggtgaccgacctgccgaaaagcgatgctcctgatttaggcgctgctggcggcatgggtggtatgggtggtatgggcggcatgatgtaa

SEQ ID NO: 8935 - protein, 548 aa, Salmonella enterica subsp. enterica serovar Typhimurium str. LT2
MAAKDVKFGNDARVKMLRGVNVLADAVKVTLGPKGRNVVLDKSFGAPTITKDGVSVAREIELEDKFENMGAQMVKEVASKANDAAGDGTTTATVLAQSIITEGLKAVAAGMNPMDLKRGIDKAVAAAVEELKALSVPCSDSKAIAQVGTISANSDETVGKLIAEAMDKVGKEGVITVEDGTGLQDELDVVEGMQFDRGYLSPYFINKPETGAVELESPFILLADKKISNIREMLPVLEAVAKAGKPLLIIAEDVEGEALATLVVNTMRGIVKVAAVKAPGFGDRRKAMLQDIATLTGGTVISEEIGMELEKATLEDLGQAKRVVINKDTTTIIDGVGEEAAIQGRVAQIRQQIEEATSDYDREKLQERVAKLAGGVAVIKVGAATEVEMKEKKARVEDALHATRAAVEEGVVAGGGVALIRVASKIADLKGQNEDQNVGIKVALRAMEAPLRQIVLNCGEEPSVVANTVKGGDGNYGYNAATEEYGNMIDMGILDPTKVTRSALQYAASVAGLMITTECMVTDLPKSDAPDLGAAGGMGGMGGMGGMM

SEQ ID NO: 8936 - DNA, 1683 bp, Nostoc sp. PCC 7120
  CDS (1)..(1683): transl_table=11
atggcaaaaattatttcgtttgatgaagaatcacggcgtgctttagagcggggtgtcaatgccctggctgatgctgtaaaaattaccttaggccccaagggtcgcaacgtgcttttagaaaaaaaatatggcacaccccaaattgtgaacgatggtattaccgtcgctaaagaaattgaattagaagatcctttagaaaatactggtgccagattaattcaagaggtagcatccaaaaccaaggatgtagctggcgatggcacaactacggctaccgttttagtacaagccctaattagagaaggtttgaagaacgtcgcggctggtactaacccagttagtctcaagcgcggtatagataaaactaccgaggctttggtagcggaaattgctaaggtcgccaagcctgtagaaggtagtgcgatcgctcaagttgccactgtctcatctggtaatgatgaagaagttggtgccatgattgcccaagcggtggaaaaagtcaccaaagacggtgtaatcactgtagaagaatctaaatccctgacaactgaactagaagtagtcgaagggatgcagattgacagaggttatatttccccctacttcatcaccaacaacgagcgccaaacggtggagttggaaaatgtgcggattttgattactgacaaaaaaatcagcagtattcaagaattagtccccgttctagaaaaagtagctcgtttgggtcaacccttactgatcattgctgaagatgtagaaggagatgccctagcaactttggtggtgaacaaagcacggggtgtactttctgtggcggcaattaaagccccaggatttggcgaacgccgcaaagcattgttgcaagatatcgctatcctcacagacggtcaactaatttcggaagaaattggcttaagcttagataccgcttctctagaagctttgggtacggcgcagaaaatcacaattgaaaaagacaacaccacaattgttgctggtaatactactaagccagaaatccaaaagcggattgcacaaattcgccgacagttggaagagactgactctgagtacgatagcgagaaattgcaagaacgtattgccaagttagctggtggtattgcagtgatcaaagtcggtgcagcaactgaaaccgaactcaaagaccgcaaactgagaatcgaagacgcactcaacgccaccaaagctgctgttgctgaaggtatcgttcctggtggcggcaaaactctgatttacttggcgagtaaggtagacgagattaagaaaaactttgacgaagaagaaaaaatcggtgctgacatcgttaaacgggctttagaagctcctttacgtcagattgccgataatgctggtgcagaaggttctgtcatcgtctccagagtcaaagacagcgatttcaacatcggttacaacgctgctactggggaatttgaagacctgattgcggctggtattattgaccctgcaaaagttgtgcgttcagcattgcaaaatgccgcttccattgccggtctagttttaaccaccgaagcgatcgttgtggaaaaaccagagaaaaaatctgctgctcctgctgatgccggtatgggtggcatgggcggcatgggtggtatgggcggtatgggtggcatgggcggtatgggtggtatgggtatgttctaa

SEQ ID NO: 8937 - protein, 560 aa, Nostoc sp. PCC 7120
MAKIISFDEESRRALERGVNALADAVKITLGPKGRNVLLEKKYGTPQIVNDGITVAKEIELEDPLENTGARLIQEVASKTKDVAGDGTTTATVLVQALIREGLKNVAAGTNPVSLKRGIDKTTEALVAEIAKVAKPVEGSAIAQVATVSSGNDEEVGAMIAQAVEKVTKDGVITVEESKSLTTELEVVEGMQIDRGYISPYFITNNERQTVELENVRILITDKKISSIQELVPVLEKVARLGQPLLIIAEDVEGDALATLVVNKARGVLSVAAIKAPGFGERRKALLQDIAILTDGQLISEEIGLSLDTASLEALGTAQKITIEKDNTTIVAGNTTKPEIQKRIAQIRRQLEETDSEYDSEKLQERIAKLAGGIAVIKVGAATETELKDRKLRIEDALNATKAAVAEGIVPGGGKTLIYLASKVDEIKKNFDEEEKIGADIVKRALEAPLRQIADNAGAEGSVIVSRVKDSDFNIGYNAATGEFEDLIAAGIIDPAKVVRSALQNAASIAGLVLTTEAIVVEKPEKKSAAPADAGMGGMGGMGGMGGMGGMGGMGGMGMF

SEQ ID NO: 8938 - DNA, 1635 bp, Nostoc sp. PCC 7120
  CDS (1)..(1635): transl_table=11
atggcaaagcgcattatctacaacgaaaacgctcgtcgcgctctagaacgaggcatcgatatcctggctgaggctgtagctgttacccttggccccaaaggtcgtaacgtagtattagagaaaaaatttggtgcgccgcaaatcgttaatgacggtgtaaccatcgctaaagaaatagaattagaagatcatattgaaaacactggtgttgctctgattcgccaagctgcttccaaaacaaacgatgcagcaggtgacggtacaaccactgcaaccgttttggctcacgccattgtcaaagaaggtttgcggaacgtagcggctggcgctaacgcaattctgttgaagcgcggtattgataaagctaccggtttcttggttgacagaatcaaagaacacgctcgtcctgtagaagattctaaatctattgctcaagttggctcaatctctgctggtaacgacgatgaagtcggtcagatgattgccgaagcaatggacaaagtaggtaaagaaggcgttatctctctagaagaaggtaagtctgtaactaccgaattggaaatcaccgaagggatgcgctttgacaaaggctatatctccccctacttcgctaccgacccagagcggatggaagcgattttcgatgagcctttcttgttgttgaccgataagaaaattgctctcgtccaagatttagtaccagttctagagcaagtagctcgtgctggtcgtcctctggtgattatcgctgaagatattgaaaaagaagctctagcaaccctagtagttaaccgtttacgcggtgtactcaacgttgctgctgtgaaggctcctggctttggcgatcgccgtaaggctatgctagaagatatcgctatcctcaccggcggtcaactaatcaccgaagatgctggtctgaagctggaaaacactaagctggaaagcttgggtaaagcgcgccgcatcaccatcaccaaagacagcaccacaattgttgctgaaggtaacgacgttgccgtcaaaggtcgtgtagaacaaatccgtcgtcaaatggaagaaactgaatcttcctacgacaaagaaaaactacaagaacgtttggctaaactttctggtggtgtagctgtagttaaagttggtgcagctaccgaaaccgaaatgaaagacaagaaactccgcctagaagacgctatcaacgctaccaaggcggctgtggaagaaggtatcgttcctggtggcggtacaaccctagctcacctcactcctgaattggaagtttgggctaacagcaacctcaaagatgaagagttgactggtgctttgattgtcgctcgtgcattacccgcacctctgaagagaattgcggaaaacgctggtcaaaacggcgctgtaattgctgaacgcgtcaaagaaaaagcgttcaacgttggtttcaacgctgctaccaacgaatttgtagatatgttcgaggctggtatcgttgaccccgcgaaggttacacgttctgcactgcaaaacgctgcttccatcgctggaatggtgttgacaaccgagtgcatcgttgttgacaagccagaacccaaagataacgctcctgctggcgctggcgctggcggcggtgacttcgattactaa

SEQ ID NO: 8939 - protein, 544 aa, Nostoc sp. PCC 7120
MAKRIIYNENARRALERGIDILAEAVAVTLGPKGRNVVLEKKFGAPQIVNDGVTIAKEIELEDHIENTGVALIRQAASKTNDAAGDGTTTATVLAHAIVKEGLRNVAAGANAILLKRGIDKATGFLVDRIKEHARPVEDSKSIAQVGSISAGNDDEVGQMIAEAMDKVGKEGVISLEEGKSVTTELEITEGMRFDKGYISPYFATDPERMEAIFDEPFLLLTDKKIALVQDLVPVLEQVARAGRPLVIIAEDIEKEALATLVVNRLRGVLNVAAVKAPGFGDRRKAMLEDIAILTGGQLITEDAGLKLENTKLESLGKARRITITKDSTTIVAEGNDVAVKGRVEQIRRQMEETESSYDKEKLQERLAKLSGGVAVVKVGAATETEMKDKKLRLEDAINATKAAVEEGIVPGGGTTLAHLTPELEVWANSNLKDEELTGALIVARALPAPLKRIAENAGQNGAVIAERVKEKAFNVGFNAATNEFVDMFEAGIVDPAKVTRSALQNAASIAGMVLTTECIVVDKPEPKDNAPAGAGAGGGDFDY

SEQ ID NO: 8940 - DNA, 1707 bp, Caenorhabditis elegans
  CDS (1)..(1707)
atgcttcgcctcgccagaaagggacttcagaccgccgtcgtcagatcttacgccaaggacgtcaagttcggagccgaaggacgacaggccatgctcgtcggagtcaacctgctcgccgacgccgtctctgtcactatgggcccaaaaggaagaaacgtgatcatcgagcagtcgtggggaagcccaaagatcacaaaggacggagtcaccgtcgcgaaatccatcgacctcaaggacaaataccagaacctgggagccaagctcattcaagatgtcgccaacaaggctaatgaggaggctggagacggaaccacctgcgccacagttctcgccagagccatcgccaaagagggattcgagagcattcgtcaaggcggaaacgctgtcgagatccgtcgtggagtcatgaacgccgtcgaagtcgtcgttgcagagctcaagaagatctccaagaaggtcaccacccccgaagagatcgctcaagtcgccacaatttccgccaatggagacaccgtcgtcggaaatctcatcagtgacgccatgaagaaggtcggaaccactggagtcatcactgttaaggacggaaaaacgctgaacgatgagctcgagcttatcgagggaatgaagttcgacagaggatacatctcgccgtactttatcacctctgcgaaaggagctaaagtcgagtacgagaaggctcttgtcttgttgagcgagaagaagatcagccaagttcaggatattgtgccggctcttgagctcgccaacaagctccgccgtccattggttatcattgccgaggatgttgatggagaggctcttaccactcttgttcttaatagacttaaggtcggacttcaagtcgtcgcaatcaaggctccaggattcggagataaccgcaagaacacgctcaaggatatgggaattgcgacgggagcaacgatctttggagatgactcgaatctcattaagatcgaggatatcacagccaacgatctcggagaagtcgatgaggtcaccatcaccaaggacgatactcttcttcttcgcgggcgtggagatcaaacagagatcgagaagcgaatcgagcacatcaccgatgaaattgagcaatcgacgagcgattacgagaaggagaagcttaatgagcgtctcgccaagttgagcaagggagtcgctgtgctcaagattggaggaggatctgaagttgaagttggagagaagaaggaccgtgtcaccgatgctctgtgtgccacgcgtgccgctgtcgaagaaggaatcgttccaggaggaggtgttgctcttctcagatctctgacagcactcaaaaactacaaagcagccaacgaggatcaacagatcggtgtgaatatcgtcaagaaggctctcactcagccaatcgccacaatcgtcaaaaatgccggtcttgagccatcgtcgattattgatgaagtcaccggaaacagcaatacatcatatggttatgatgcgctcaacggaaagttcgttgacatgttcgaggctggaattatcgatccaactaaggtggttcgcacagctctccaagatgcttcaggagtcgcctcacttctcgccacaaccgaatgcgtagtcaccgaaattccaaaggaagaagcagttggtggaccagccggtggaatgggtggaatgggtggaatgggcggtatgggaggaatgggattctaa

SEQ ID NO: 8941 - protein, 568 aa, Caenorhabditis elegans
MLRLARKGLQTAVVRSYAKDVKFGAEGRQAMLVGVNLLADAVSVTMGPKGRNVIIEQSWGSPKITKDGVTVAKSIDLKDKYQNLGAKLIQDVANKANEEAGDGTTCATVLARAIAKEGFESIRQGGNAVEIRRGVMNAVEVVVAELKKISKKVTTPEEIAQVATISANGDTVVGNLISDAMKKVGTTGVITVKDGKTLNDELELIEGMKFDRGYISPYFITSAKGAKVEYEKALVLLSEKKISQVQDIVPALELANKLRRPLVIIAEDVDGEALTTLVLNRLKVGLQVVAIKAPGFGDNRKNTLKDMGIATGATIFGDDSNLIKIEDITANDLGEVDEVTITKDDTLLLRGRGDQTEIEKRIEHITDEIEQSTSDYEKEKLNERLAKLSKGVAVLKIGGGSEVEVGEKKDRVTDALCATRAAVEEGIVPGGGVALLRSLTALKNYKAANEDQQIGVNIVKKALTQPIATIVKNAGLEPSSIIDEVTGNSNTSYGYDALNGKFVDMFEAGIIDPTKVVRTALQDASGVASLLATTECVVTEIPKEEAVGGPAGGMGGMGGMGGMGGMGF

SEQ ID NO: 8942 - DNA, 1722 bp, Drosophila melanogaster
  CDS (1)..(1722)
atgttccgtttgccagtttcgcttgctcgctcctccattagccgccagttggccatgcgcggctatgccaaggatgtgcgtttcggacccgaggtgcgcgccatgatgctccagggcgtcgatgtgctggccgatgctgtggcagtgaccatgggccccaagggtcgcaatgtgatcattgagcagtcgtggggctcgcccaaaatcaccaaggacggcgtcactgtggccaagtccattgagctgaaggacaagttccagaacatcggtgccaagctggtccaggatgtggccaacaataccaacgaggaggccggtgatggcaccaccacggccaccgttctggctcgcgccattgccaaggagggcttcgagaagatctccaagggcgccaatcccgtcgagattcgtcgcggtgtcatgctggccgttgagaccgtcaaggacaaccttaagaccatgtcgcgccccgttagcacgcccgaggagatcgcccaggtggccaccatctcggccaacggtgatcaggccatcggcaatctcatcagcgaggccatgaagaaggtgggacgcgatggcgttatcaccgtcaaggatggcaagaccctcaccgatgagttggaggttatcgagggcatgaagttcgatcgcggctacatctcgccgtacttcatcaactcctcgaagggcgccaaggtggagttccaagatgccctcctcctgctgtccgagaagaagatctcatcggtgcagagcatcattcccgctctggagctggccaatgcgcagcgcaagccgctggtcatcattgccgaggatatcgatggtgaggccctgagcaccctggtggtgaaccgcctcaagatcggccttcaggtggctgccgtcaaggcacccggcttcggcgacaaccgcaagagcaccctcaccgatatggccatcgcctccggcggcattgtcttcggcgatgatgctgatctcgtcaagctggaggacgtcaaggttagcgatttgggccaggtcggcgaggtggtgatcaccaaggacgacaccctgctgctgaagggcaagggcaagaaggacgatgtgctccgtcgcgccaatcagatcaaggaccagatcgaggacaccacctccgagtacgagaaggagaagctgcaggagcgtctggcccgcttggcctccggcgttgccctgctgcgcgttggcggctccagcgaggtggaggtcaacgagaagaaggatcgcgtccatgatgccctgaacgccacccgtgctgccgtcgaagagggaatcgttcccggaggcggcaccgctctgctgcgttgcattgagaagctcgagggtgtcgagaccaccaacgaggatcagaaactcggcgtggagattgtgcgtcgtgccctgcgcatgccatgcatgacgattgccaagaacgccggcgttgatggcgccatggtggtggccaaggtggagaatcaggccggtgactacggctacgatgcgctgaagggcgaatacggcaacctgatcgagaagggcatcatcgatcccaccaaggtggtgcgcaccgccatcacagacgcctccggtgtggcctcactgctgaccaccgccgaggctgtcgtcaccgagatccccaaggaggatggcgctcctgccatgcccggcatgggtggtatgggcggcatgggaggcatgggcggcatgggtggcatgatgtaa

SEQ ID NO: 8943 - protein, 573 aa, Drosophila melanogaster
MFRLPVSLARSSISRQLAMRGYAKDVRFGPEVRAMMLQGVDVLADAVAVTMGPKGRNVIIEQSWGSPKITKDGVTVAKSIELKDKFQNIGAKLVQDVANNTNEEAGDGTTTATVLARAIAKEGFEKISKGANPVEIRRGVMLAVETVKDNLKTMSRPVSTPEEIAQVATISANGDQAIGNLISEAMKKVGRDGVITVKDGKTLTDELEVIEGMKFDRGYISPYFINSSKGAKVEFQDALLLLSEKKISSVQSIIPALELANAQRKPLVIIAEDIDGEALSTLVVNRLKIGLQVAAVKAPGFGDNRKSTLTDMAIASGGIVFGDDADLVKLEDVKVSDLGQVGEVVITKDDTLLLKGKGKKDDVLRRANQIKDQIEDTTSEYEKEKLQERLARLASGVALLRVGGSSEVEVNEKKDRVHDALNATRAAVEEGIVPGGGTALLRCIEKLEGVETTNEDQKLGVEIVRRALRMPCMTIAKNAGVDGAMVVAKVENQAGDYGYDALKGEYGNLIEKGIIDPTKVVRTAITDASGVASLLTTAEAVVTEIPKEDGAPAMPGMGGMGGMGGMGGMGGMM

SEQ ID NO: 8944 - DNA, 1719 bp, Arabidopsis thaliana
  CDS (1)..(1719)
atgtatcgagtgctatcaaagttatcttcttcaattggctcgtctacttccaggaaactggtttctgggcggattataagtagcagaaactatgcggccaaggatatcagtttcgggatcggagctcgggcagctatgttgcagggtgtatccgaggttgcagaagctgtgaaagtcactatgggaccaaagggaagaaatgtgataattgagagcagttatggcggaccaaagatcacaaaggatggtgtcaccgtggcaaaaagcatatcatttcaagctaaagctaagaacattggtgccgaactcgtcaaacaggttgcaagtgccactaacaaggttgctggagatggtaccacttgtgccactgttttgactcaggcgatactcatcgaaggctgcaagtcggtggctgcaggtgtaaatgtgatggatttgcgtgttggaattaatatggcaattgctgcagttgtctctgatttgaaaagcagagctgttatgattagcaccccagaagagatcacacaggttgccactatatctgcaaatggggagcgtgaaataggggaactaattgcaagagccatggagaaagttggaaaggaaggggttatcactgttgctgatggtaacactttagataacgagctggaagtagtggaaggaatgaagctagccagaggttacatttctccttattttatcacggatgagaagacccagaaatgcgagcttgaaaatcccatcatcctcattcatgagaagaagatttcagacattaactctttgttgaaagttttagaagcggctgtgaaaagtagtagaccacttcttattgtagcagaagatgttgagagtgatgcattagctatgcttattctcaataagcatcatggtgggcttaaggtatgtgctatcaaggctccggggtttggtgacaacaggaaagcaagcttggatgatcttgcagttcttactggtgcagaggttatctctgaggagcgtgggctatctctagaaaaaattcgccctgaattgcttggaactgcgaagaaggttaccgttacccgtgatgacactattatcctacatggtggtggtgataaaaagctaattgaagaaagatgtgaagagttaagatcagccaatgaaaagagtacatccacttttgatcaagagaaaacgcaagaaagactctcaaagctatcaggtggtgttgcagtcttcaaggtgggaggggcaagtgaatctgaagttggagagagaaaagacagagtcactgatgctttaaacgccacaagagcagctgtagaagaaggcatcataccgggtggtggtgtggctctattatatgcgacaaaggctttagacaaccttcaaactgaaaacgaggatcaaagaagaggtgttcagattgttcagaatgctctcaaggctcctgcatttacaatagctgcaaatgccggttacgatggttctttagtggttggcaagttattagagcaagacgattgcaattttggtttcgatgcagccaaaggtaaatatgtggatatggtgaaagctggaatcatagacccagtcaaggtgatcagaaccgccttaaccgatgctgctagcgtttctttgcttttgacaacaacagaggcctcagtgcttgtgaaggcagacgagaacactccaaaccatgtccctgatatggccagcatgggcatgtga

SEQ ID NO: 8945 - protein, 572 aa, Arabidopsis thaliana
MYRVLSKLSSSIGSSTSRKLVSGRIISSRNYAAKDISFGIGARAAMLQGVSEVAEAVKVTMGPKGRNVIIESSYGGPKITKDGVTVAKSISFQAKAKNIGAELVKQVASATNKVAGDGTTCATVLTQAILIEGCKSVAAGVNVMDLRVGINMAIAAVVSDLKSRAVMISTPEEITQVATISANGEREIGELIARAMEKVGKEGVITVADGNTLDNELEVVEGMKLARGYISPYFITDEKTQKCELENPIILIHEKKISDINSLLKVLEAAVKSSRPLLIVAEDVESDALAMLILNKHHGGLKVCAIKAPGFGDNRKASLDDLAVLTGAEVISEERGLSLEKIRPELLGTAKKVTVTRDDTIILHGGGDKKLIEERCEELRSANEKSTSTFDQEKTQERLSKLSGGVAVFKVGGASESEVGERKDRVTDALNATRAAVEEGIIPGGGVALLYATKALDNLQTENEDQRRGVQIVQNALKAPAFTIAANAGYDGSLVVGKLLEQDDCNFGFDAAKGKYVDMVKAGIIDPVKVIRTALTDAASVSLLLTTTEASVLVKADENTPNHVPDMASMGM

SEQ ID NO: 8946 - DNA, 1749 bp, Schizosaccharomyces pombe
  CDS (1)..(1749)
atggtgagcttcctttcttccagtgtatctcgtctacctttaagaattgctggtcgtcgaatccccggcagatttgccgtccctcaagttcgtacatatgctaaagacttaaaatttggtgttgatgctcgcgcatctttactcaccggtgtcgatactcttgctcgtgccgtatctgtaactttgggaccaaagggccgtaatgtcttgattgaccaaccttttggttcccctaaaatcactaaggacggtgtaactgtcgcccgtagtgtaagtttgaaagataaattcgaaaaccttggtgcaagactagttcaggatgttgcaagcaagactaatgaagttgctggtgatggtaccactactgctactgttttaactcgtgccatcttttctgagactgttcgtaacgtggctgccggttgcaaccctatggaccttcgccggggaattcaacttgctgttgataacgtcgtcgaatttttgcaagccaataagcgtgatattactacttctgaagagatttcccaagtcgctaccatctctgctaacggtgacactcatatcggtgagcttcttgctaaagccatggaacgtgttggtaaagaaggcgttatcaccgtcaaagaagggcgcacaataagcgacgaattagaggttactgagggtatgaagtttgatcgtggttacatttctccttactttattaccgatgtcaaatcacaaaaggttgaatttgaaaatcctcttattcttctttctgaaaagaaagtgtctgctgtccaagacattcttccctctttggagcttgccgctcagcagcgtcgtcccttagttatcatcgcagaggacgttgatggtgaagctttggctgcttgtatcttaaacaagcttcgtgggcaattacaagttgttgctattaaagcccctggctttggtgacaaccgtcgtaatatgcttggagatttagccgtcttgactgatagtgccgtgttcaatgatgaaattgatgtttccatcgaaaaggctcaaccccatcatttgggtagctgtggctctgtaactgtcaccaaggaagacactatcattatgaaaggtgctggtgaccatgttaaagttaacgaccgttgtgaacagattcgtggtgtcatggccgaccctaatctcactgaatacgaaaaagaaaagcttcaagagagattggccaaattgagcggtggtattgctgttattaaggttggaggctccagtgaagttgaagtcaacgagaagaaagaccgtattgttgatgcattgaatgctgttaaggctgctgtttccgagggtgttctcccaggtgctggtacctcttttgttaaggctagtcttcgcttaggagacattcctacaaataactttgatcaaaagcttggcgtcgaaattgttcgcaaagctatcactcgtcccgctcaaaccattcttgaaaatgctggattagagggtaacttgattgttggtaaacttaaggagctttatggcaaggaatttaacatcggttatgatattgctaaggatcgttttgttgatttaaatgaaattggtgttttggatcccctaaaggtcgtacgtaccggtttagttgatgctagtggagtcgcctcattaatgggtaccaccgaatgtgccatcgtcgatgctcctgaagagtccaaggcccctgctggtcctcccggaatgggtggcatgggtggaatgcccggtatgatgtaa

SEQ ID NO: 8947 - protein, 582 aa, Schizosaccharomyces pombe
MVSFLSSSVSRLPLRIAGRRIPGRFAVPQVRTYAKDLKFGVDARASLLTGVDTLARAVSVTLGPKGRNVLIDQPFGSPKITKDGVTVARSVSLKDKFENLGARLVQDVASKTNEVAGDGTTTATVLTRAIFSETVRNVAAGCNPMDLRRGIQLAVDNVVEFLQANKRDITTSEEISQVATISANGDTHIGELLAKAMERVGKEGVITVKEGRTISDELEVTEGMKFDRGYISPYFITDVKSQKVEFENPLILLSEKKVSAVQDILPSLELAAQQRRPLVIIAEDVDGEALAACILNKLRGQLQVVAIKAPGFGDNRRNMLGDLAVLTDSAVFNDEIDVSIEKAQPHHLGSCGSVTVTKEDTIIMKGAGDHVKVNDRCEQIRGVMADPNLTEYEKEKLQERLAKLSGGIAVIKVGGSSEVEVNEKKDRIVDALNAVKAAVSEGVLPGAGTSFVKASLRLGDIPTNNFDQKLGVEIVRKAITRPAQTILENAGLEGNLIVGKLKELYGKEFNIGYDIAKDRFVDLNEIGVLDPLKVVRTGLVDASGVASLMGTTECAIVDAPEESKAPAGPPGMGGMGGMPGMM

SEQ ID NO: 8948 - DNA, 1617 bp, Corynebacterium glutamicum ATCC 13032
  CDS (1)..(1617): transl_table=11
atggcaaagctcattgcttttgaccaggacgcccgcgaaggcattctccggggcgttgacgctctggcaaacgctgtcaaggtaaccctcggcccacgcggccgtaacgtggttcttgataaggcattcggcggacctctggtcaccaacgacggtgtcaccattgcccgcgacatcgaccttgaggatccttttgagaacctcggtgcgcagctggtgaagtccgttgctgttaagaccaacgacatcgctggtgacggcaccacgactgcaactctgcttgctcaggcactcattgctgaaggcctgcgcaacgttgctgctggcgcaaacccaatggagctcaacaagggtatttctgcagctgcagaaaagaccttggaagagttgaaggcacgcgcaaccgaggtgtctgacaccaaggaaatcgcaaacgtcgctaccgtttcatcccgcgatgaagttgtcggcgagatcgttgctgcagcgatggaaaaggttggcaaggacggtgtcgtcaccgttgaggagtcccagtccatcgagactgctctcgaggtcaccgaaggtatttctttcgacaagggctacctttccccttatttcatcaacgacaacgacactcagcaggctgtcctggacaaccctgcagtgctgcttgttcgcaacaagatttcttccctcccagacttcctcccattgctggagaaggttgtggagtccaaccgtcctttgctgatcatcgcagaagacgtcgagggcgagcctttgcagaccctggttgtgaactccatccgcaagaccatcaaggtcgttgcagtgaagtccccttacttcggtgaccgacgcaaggcgttcatggatgacctggctattgtcaccaaggcaactgtcgtggatccagaagtgggcatcaacctcaacgaagctggcgaagaagttttcggtaccgcacgccgcatcaccgtttccaaggacgaaaccatcatcgttgatggtgcaggttccgcagaagacgttgaagcacgtcgcggccagatccgtcgcgaaatcgccaacaccgattccacctgggatcgcgaaaaggcagaagagcgtttggctaagctctccggtggtattgctgtcatccgcgttggtgcagcaactgaaaccgaagtcaacgaccgcaagctgcgtgtcgaagatgccatcaacgctgctcgcgcagcagcacaagaaggcgttatcgctggtggcggttccgctttggttcagatcgctgagactctgaaggcttacgccgaagagttcgaaggcgaccagaaggtcggcgttcgcgcactggctactgctttgggcaagccagcgtactggatcgcctccaacgcaggtcttgacggctctgttgttgttgcacgcactgctgctctgccaaacggcgagggcttcaacgctgcaactttggaatacggaaacctgatcaacgacggtgtcatcgacccagtcaaggtcacccattccgcagtagtgaatgcaacctctgttgcacgcatggttctgaccactgaggcttctgttgttgagaagcctgcagaagaagcagccgatgcacatgcaggacatcatcaccactaa

SEQ ID NO: 8949 - protein, 538 aa, Corynebacterium glutamicum ATCC 13032
MAKLIAFDQDAREGILRGVDALANAVKVTLGPRGRNVVLDKAFGGPLVTNDGVTIARDIDLEDPFENLGAQLVKSVAVKTNDIAGDGTTTATLLAQALIAEGLRNVAAGANPMELNKGISAAAEKTLEELKARATEVSDTKEIANVATVSSRDEVVGEIVAAAMEKVGKDGVVTVEESQSIETALEVTEGISFDKGYLSPYFINDNDTQQAVLDNPAVLLVRNKISSLPDFLPLLEKVVESNRPLLIIAEDVEGEPLQTLVVNSIRKTIKVVAVKSPYFGDRRKAFMDDLAIVTKATVVDPEVGINLNEAGEEVFGTARRITVSKDETIIVDGAGSAEDVEARRGQIRREIANTDSTWDREKAEERLAKLSGGIAVIRVGAATETEVNDRKLRVEDAINAARAAAQEGVIAGGGSALVQIAETLKAYAEEFEGDQKVGVRALATALGKPAYWIASNAGLDGSVVVARTAALPNGEGFNAATLEYGNLINDGVIDPVKVTHSAVVNATSVARMVLTTEASVVEKPAEEAADAHAGHHHH

SEQ ID NO: 8950 - DNA, 1731 bp, Drosophila melanogaster
  CDS (1)..(1731)
atgatgcgcatgttccgttacaccaacacattgcagcgtactgcaaagatcagtcacgtcctgtgggcccgtaactatgcaaaggatgttaggttcgggccggaggtgagggccatgatgctgcagggagtggacgtgctggcggatgccgtggccgtgaccatgggaccaaagggacgcaacgtgatcatcgagcagagctggggatcgccaaagattaccaaggacggcgtgacggtggccaagtcgattgccctcaaggacaagttccagaatatcggcgccaaactggtgcaggatgtggcgaacaacacgaacgaggaggcaggtgatggcaccaccacggccaccgttctggcccgcgccattgccaaggagggattcgagaagatttcacggggtgccagtccggtggagatccgccgcggagttatgctagccatcgagacggtcaaggacaaccttcgtcggttgtcccggccagttaacacgcccgaggagatctgccaggtggcgacgatctctgcgaacggcgacaagtcggtgggaaacctcatcagcgaggccatcaagaaggtgggtcgagacggcgttatcactgtcaaggatggcaagaccctttgcgacgaactggaggtgatcgagggcatgaaatttgaccgtggttacatttcgccttactttattaacacctccaagggagcaaaggtggagttccaggacgcgcttctcctcttttgcgagaagaaaatcaagtcggcacctagcatcgtgcctgccctggagttggccaacgctcagcgcaagcccttggtcattatcgctgaggacttggaggcggaggcactcagcactctggtggtgaaccgcctaaaggtgggcctccaagtgtgcgcggtgaaggcacccggttttggtgacaatcgcaaggagaatctgatggacatggccgtggccaccggtggaatcgtgtttggagacgaagccaatatggtacggctcgaggatatcaagatgagcgactttggacgtgtaggcgaggtagtagtctcgaaagacgacacaatgctgctcaagggcaagggacagaaggcagaggtggagaaaagggtcgagggtctgcgcgaggccatcaaggagtcgacttcctcctacgagaaggagaagatgcaagagcgcttggcccgcctctcctccggtgtcgccttgctgcgagtgggcggttccagtgacgtggaggttagcgagaagaaggatcgagtcatcgatgccctgaatgccacccgtgctgccgtggaggagggaatcgtgcccgggggcggcaccgccctgctgcgttgcatccagaaactgaacgatttgaaaggcgccaacgaggatcaaaacatgggcatcgagatcatccgacgtgcgctgcgcatgccctgtctcacgattgccaagaatgctggcgtagatggtgcaatggtggtggccaaggtggagatcctcgacggtgactatggctacgatgccctgaagggcgagtatggcaacatgatcgaacgcggtattatcgatcccaccaaggtggtgcgcaccgccatctcggacgcagccggagtcgcctctcttctgaccactgccgaggctgtagttacggagttgccgttggaggaggccgccgctgctggagcggcagccggattaggagctctcggcggtatgggcatgggcggaatgggcatgtaa

SEQ ID NO: 8951 - protein, 576 aa, Drosophila melanogaster
MMRMFRYTNTLQRTAKISHVLWARNYAKDVRFGPEVRAMMLQGVDVLADAVAVTMGPKGRNVIIEQSWGSPKITKDGVTVAKSIALKDKFQNIGAKLVQDVANNTNEEAGDGTTTATVLARAIAKEGFEKISRGASPVEIRRGVMLAIETVKDNLRRLSRPVNTPEEICQVATISANGDKSVGNLISEAIKKVGRDGVITVKDGKTLCDELEVIEGMKFDRGYISPYFINTSKGAKVEFQDALLLFCEKKIKSAPSIVPALELANAQRKPLVIIAEDLEAEALSTLVVNRLKVGLQVCAVKAPGFGDNRKENLMDMAVATGGIVFGDEANMVRLEDIKMSDFGRVGEVVVSKDDTMLLKGKGQKAEVEKRVEGLREAIKESTSSYEKEKMQERLARLSSGVALLRVGGSSDVEVSEKKDRVIDALNATRAAVEEGIVPGGGTALLRCIQKLNDLKGANEDQNMGIEIIRRALRMPCLTIAKNAGVDGAMVVAKVEILDGDYGYDALKGEYGNMIERGIIDPTKVVRTAISDAAGVASLLTTAEAVVTELPLEEAAAAGAAAGLGALGGMGMGGMGM

SEQ ID NO: 8952 - DNA, 1626 bp, Streptomyces coelicolor A3(2)
  CDS (1)..(1626): transl_table=11
atggccaagatcatcgcgttcgacgaggaggcgcggcgcggcctcgagcgcggcatgaaccagctcgcggacgccgtcaaggtgacgctcggccccaagggccgcaacgtcgtcctcgagaagaagtggggcgcccccacgatcaccaacgatggtgtctccatcgccaaggagatcgagctcgaggacccgtacgagaagatcggcgccgagctggtcaaggaagtcgccaagaagacggacgacgtcgccggtgacggtacgaccaccgcgaccgttctcgcccaggccctggtcaaggaaggcctgcgcaacgtcgcggccggcgccaacccgatggccctgaagcgcggtatcgagaaggccgtcgaggccgtctccgccgccctgctcgagcaggccaaggacgtcgagaccaaggagcagatcgcctccacggcctcgatctccgccgccgacacccagatcggcgagctcatcgccgaggccatggacaaggtcggcaaggaaggcgtcatcaccgtcgaggagtcccagaccttcggtctggagctggagctcaccgagggtatgcgcttcgacaagggctacatctcggcgtacttcgccaccgacatggagcgtatggaggcgtcgctcgacgacccgtacatcctgatcgccaactccaagatcggcaacgtcaaggacctgctgccgctcctggagaaggtcatgcagtcgggcaagccgctgctgatcatcgccgaggacgtcgagggcgaggccctgtcgaccctggtcgtcaacaagatccgcggcaccttcaagtccgtcgccgtcaaggctccgggcttcggcgaccgccgcaaggccatgctcggcgacatcgccatcctcacgggcggcgaggtcatctccgaggaggtcggcctcaagctcgagaacgccacgctggacctgctgggcagcgcgcgcaaggtcgtcatcaccaaggacgagaccacgatcgtggacggcgccggttcggccgaccaggttcagggccgcgtcaaccagatccgcgccgagatcgagaacagcgactcggactacgaccgcgagaagctccaggagcgcctggcgaagctggccggcggcgtggccgtcatcaaggccggtgccgccaccgaggtcgagctcaaggagcgcaagcaccgcatcgaggacgccgttcgcaatgcgaaggcggccgtcgaggagggcatcgtcgccggtggtggcgtggccctgctccaggcctcccaggtcttcgagaagctggagctgacgggtgacgaggcgaccggcgccaacgccgtgaagctcgccctggaggccccgctgaagcagatcgccgtcaacggcggtctcgagggcggcgtcgtcgtggagaaggtccgcaacctgaccgtcggccacggcctgaacgccgccaccggtgagtacgtcgacatgatcgccgaaggcatcatcgacccggcgaaggtgacccgctctgccctgcagaacgccgcctccatcgccgcgctgttcctcaccaccgaggccgtcatcgccgacaagcccgagaaggccgctccggcgggcgccccgggcggcatgccgggtggtgacatggacttctga

SEQ ID NO: 8953 - protein, 541 aa, Streptomyces coelicolor A3(2)
MAKIIAFDEEARRGLERGMNQLADAVKVTLGPKGRNVVLEKKWGAPTITNDGVSIAKEIELEDPYEKIGAELVKEVAKKTDDVAGDGTTTATVLAQALVKEGLRNVAAGANPMALKRGIEKAVEAVSAALLEQAKDVETKEQIASTASISAADTQIGELIAEAMDKVGKEGVITVEESQTFGLELELTEGMRFDKGYISAYFATDMERMEASLDDPYILIANSKIGNVKDLLPLLEKVMQSGKPLLIIAEDVEGEALSTLVVNKIRGTFKSVAVKAPGFGDRRKAMLGDIAILTGGEVISEEVGLKLENATLDLLGSARKVVITKDETTIVDGAGSADQVQGRVNQIRAEIENSDSDYDREKLQERLAKLAGGVAVIKAGAATEVELKERKHRIEDAVRNAKAAVEEGIVAGGGVALLQASQVFEKLELTGDEATGANAVKLALEAPLKQIAVNGGLEGGVVVEKVRNLTVGHGLNAATGEYVDMIAEGIIDPAKVTRSALQNAASIAALFLTTEAVIADKPEKAAPAGAPGGMPGGDMDF

SEQ ID NO: 8954 - DNA, 1626 bp, Streptomyces coelicolor A3(2)
  CDS (1)..(1626): transl_table=11
atggcgaagatcctgaagttcgacgaggacgcccgtcgcgccctcgagcgcggcgtcaacaagctcgccgacaccgtgaaggtgacgatcggccccaagggccgcaacgtcgtcatcgacaagaagttcggcgcccccaccatcaccaacgacggcgtcaccatcgcccgcgaggtcgaggtcgaggacccgtacgagaacctcggcgcccagctggtgaaggaggtggcgaccaagaccaacgacatcgcgggtgacggcaccaccaccgccaccgtgctcgcccaggcgctcgtgcgcgagggcctgaagaacgtcgccgccggtgcctccccggcgctgctgaagaagggcatcgacgcggccgtcgccgccgtgtcggaagaccttctcgccaccgcccgcccgatcgacgagaagtccgacatcgccgccgtggccgcgctgtccgcccaggaccagcaggtcggcgagctgatcgccgaagcgatggacaaggtcggcaaggacggtgtcatcaccgtcgaggagtccaacaccttcggtctggagctggacttcaccgagggcatggccttcgacaagggctacctgtcgccgtacttcgtgacggaccaggagcgcatggaggccgtcctcgacgacccgtacatcctgatcaaccagggcaagatctcctccatcgcggacctgctgccgctgctggagaaggtcatccaggccaacgcctccaagccgctgctgatcatcgccgaggacctggagggcgaggcgctctccaccctcgtcgtcaacaagatccgcggcaccttcaacgcggtggccgtcaaggcccccggcttcggcgaccgccgcaaggcgatgctgcaggacatggccgtcctcaccggcgccacggtcatctccgaggaggtcggcctcaagctcgaccaggtcggcctcgaggtgctcggcaccgcccgccgcatcaccgtcaccaaggacgacaccacgatcgtcgacggtgccggcaagcgcgacgaggtccagggccgcatcgcccagatcaaggccgagatcgagaacacggactccgactgggaccgcgagaagctccaggagcgcctcgcgaagctggccggcggcgtgtgcgtgatcaaggtcggcgccgccaccgaggtggagctgaaggagcgcaagcaccgtctggaggacgccatctccgcgacccgcgccgcggtcgaggagggcatcgtctccggtggtggctccgcgctggtccacgccgtcaaggtgctcgagggcaacctcggcaagaccggcgacgaggccaccggtgtcgcggtcgtccgccgcgccgcggtcgagccgctgcgctggatcgccgagaacgccggcctggagggttacgtcatcacctccaaggtcgccgacctcgacaagggccagggcttcaacgccgccaccggcgagtacggcgacctggtcaaggccggcgtcatcgacccggtgaaggtcacccgctccgccctggagaacgccgcctccatcgcctccctcctgctgacgaccgagaccctggtcgtcgagaagaaggaagaggaagagccggccgccggtggccacagccacggccactcccactga

SEQ ID NO: 8955 - protein, 541 aa, Streptomyces coelicolor A3(2)
MAKILKFDEDARRALERGVNKLADTVKVTIGPKGRNVVIDKKFGAPTITNDGVTIAREVEVEDPYENLGAQLVKEVATKTNDIAGDGTTTATVLAQALVREGLKNVAAGASPALLKKGIDAAVAAVSEDLLATARPIDEKSDIAAVAALSAQDQQVGELIAEAMDKVGKDGVITVEESNTFGLELDFTEGMAFDKGYLSPYFVTDQERMEAVLDDPYILINQGKISSIADLLPLLEKVIQANASKPLLIIAEDLEGEALSTLVVNKIRGTFNAVAVKAPGFGDRRKAMLQDMAVLTGATVISEEVGLKLDQVGLEVLGTARRITVTKDDTTIVDGAGKRDEVQGRIAQIKAEIENTDSDWDREKLQERLAKLAGGVCVIKVGAATEVELKERKHRLEDAISATRAAVEEGIVSGGGSALVHAVKVLEGNLGKTGDEATGVAVVRRAAVEPLRWIAENAGLEGYVITSKVADLDKGQGFNAATGEYGDLVKAGVIDPVKVTRSALENAASIASLLLTTETLVVEKKEEEEPAAGGHSHGHSH

SEQ ID NO: 8956 - DNA, 1638 bp, Thermosynechococcus elongatus BP-1
  CDS (1)..(1638): transl_table=11
atggcgaaacgcattatctacaacgaaaatgctcgtcgtgcccttgaaaaagggatggacatcttggccgaatctgtggctgtgacccttggtccgaaaggtcggaacgtggttctggagaaaaaatttggggcgccgcaaattgtcaatgatggcgtcaccattgctaaagaaattgaactcgaagatcacattgaaaacaccggcgtggctctaattcgccaagctgcctccaagaccaatgatgctgccggtgacggtaccacgacggcgacggttcttgcccatgccatggtgaaagaggggctgcgcaacgttgctgctggtgctaaccccattgccctgaaacgtggcattgacaaagccacccaattccttgttgaaaaaattgctgaacatgcccgtccagtggaggactccaaagccattgcccaagtggcggcgatctctgccgggaacgatgaagaagtgggtcggatgattgccgacgctatggacaaagtgggcaaagagggcgtgatctccctcgaagagggcaaatccatgaccacggaactggaggtcaccgaggggatgcgctttgacaagggctacatttccccctactttgccactgacaccgagcgcatggaagctgtgctcgatgagcccttcgtgctggtcaccgacaagaaaattaccttggtgcaagatctggtgccgatcctcgaacaggtggctcgcgccggtaagcccttggtcatcattgccgaagacattgagaaagaggccttggcgaccctggtggtcaaccgtctgcgcggtgtcttgaatgtagctgctgtgaaagctcccggctttggcgatcgccgtaaagcgatgctcgaagatattgccgtcctcacagcgggtcaagtgatcaccgaagatgcgggtctgaagctggaaaatgccaagctggatatgctcggtaaagctcgccgcatcacgatcaccaaagatcacaccacgattgtggccgaaggcaatgaaaaagccgtcaaggctcgctgcgagcaaatccgtcgccaaatcgaagaaactgactccagctacgacaaagaaaaactgcaggagcggttggccaaactggcgggtggtgtggcagtgattaaagtcggtgctgccaccgaaactgaaatgaaggatcgcaaactccgtctggaagatgcgattaacgccaccaaagccgctgttgaagaggggattgttcccggcggcggtaccaccttggttcacttggctcctgagttgagcaactgggccgctgagcacctaacgggtgaagaactgattggtgccaacattgttgagcgtgccctcagcgctcccctgcgtcgcattgccgaaaacgcgggtcaaaatggtgccatcattgtcgagcgggtcaaagaaaaacccttcgatgtgggttatgatgccgccaaagatgaatatgtcaacatgttcgatgccggtatcgttgaccctgccaaagttacccgctcggctctgcaaaatgcggcctctattgccggtatggtcctgaccaccgagtgcatcatcgttgacaagcccgaacccaaggaaaataatcctgcgggcagcggtgcgggtatgggcggtgacttcgactactaa

SEQ ID NO: 8957 - protein, 545 aa, Thermosynechococcus elongatus BP-1
MAKRIIYNENARRALEKGMDILAESVAVTLGPKGRNVVLEKKFGAPQIVNDGVTIAKEIELEDHIENTGVALIRQAASKTNDAAGDGTTTATVLAHAMVKEGLRNVAAGANPIALKRGIDKATQFLVEKIAEHARPVEDSKAIAQVAAISAGNDEEVGRMIADAMDKVGKEGVISLEEGKSMTTELEVTEGMRFDKGYISPYFATDTERMEAVLDEPFVLVTDKKITLVQDLVPILEQVARAGKPLVIIAEDIEKEALATLVVNRLRGVLNVAAVKAPGFGDRRKAMLEDIAVLTAGQVITEDAGLKLENAKLDMLGKARRITITKDHTTIVAEGNEKAVKARCEQIRRQIEETDSSYDKEKLQERLAKLAGGVAVIKVGAATETEMKDRKLRLEDAINATKAAVEEGIVPGGGTTLVHLAPELSNWAAEHLTGEELIGANIVERALSAPLRRIAENAGQNGAIIVERVKEKPFDVGYDAAKDEYVNMFDAGIVDPAKVTRSALQNAASIAGMVLTTECIIVDKPEPKENNPAGSGAGMGGDFDY

SEQ ID NO: 8958 - DNA, 1632 bp, Thermosynechococcus elongatus BP-1
  CDS (1)..(1632): transl_table=11
atggcaaagttagttgcatttcatgaagagtcccggcgatcgctcgaacgcggaattaatgcccttgccgatgccgtgaaaattacccttggccccaaagggcgcaatgtggtgctcgagaaaaagtatggtgcaccgcaaattgttaacgatggcgtgacgatcgccaaggaaatcgaactggaagatgcctacgaaaatactggtgctcaactcatgcgggaagtggccgccaaaaccaatgatgtggttggggatggcaccaccaccgcaaccgtccttgcccaagccctgatccgcgaaggtctcaaaaacgtggctgccggcaccaaccccattgctcttaagcggggcatggaaaaagccatcaaaacaattgtggatggcattgccgaagtagccaaacccgttgagggggatatgattgcccaagtggcaactgtttctgccggcaacgaccccgaagtgggggcaatgattagtgaagccatggccaaggtgggcaaagatggcgtgatcaccattgaagaatcgaaatccctgcagacagaaatggaaattgttgaggggatgcaatttgatcgcggttacatctccccctactttgtgaccgatccagagcggatgattgtccaactcaacaatgcttatctactcctaacggacaaaaaaattacgagcatccaagacctgattcccaccctagaaagagtggctcgcagtggtcgtcccctcgtgattattgctgaagacgtggaaggagaagccctggccaccctggtggtcaataaactgcggggcgtcctcaatgtcgtcgctgtcaaggctccagcctttggcgaacgccgtaaagccatgctccaagacattgccattctcacgggtggtcaagtcatttctgaagaagtcggtctgaccctagaggatgtggaactgacaatgctaggggaagcctcctcggtcaccgtcaccaaagacacgacaatccttgtgtcggagaagggcaataaagccgatattcaaaagcgggtcgaacagctcaagcagcagttagccgagaccgactccgaatacgacaaagaaaagctacaagagcggattgccaagctcgtggggggtgtggctgtgatcaaagtgggtgccgccactgaaacggaattgaaggatcgcaaactccgcctggaggatgccctcaatgccacaaaagcagcagtggctgaagggattgtccctggcggtggcgtgacgttgctccacttggccagtcgcattgacgcactcctgcctagccttagtcctgaggagcaaacaggggcgcgcatcgtcgccagtgccttggcagcgccagtggctcaaattgctgacaatgcgggtgccgaaggagccgttgtcgtcgaaaatgtccgtgctggcgactttaactatggctttaatgctgcaaccggcgcctatgaggatttggtcagtgcaggtattattgaccctgccaaagtggtacgctctgccctgcaaaatgcaggttcgatcgctggcatggtactgaccacagaagcccttgtggtcgaaaaaccggaacctaaacctgcagcccccgctaatggcggtatggggggcatgggcggcatgatgtag

SEQ ID NO: 8959 - protein, 543 aa, Thermosynechococcus elongatus BP-1
MAKLVAFHEESRRSLERGINALADAVKITLGPKGRNVVLEKKYGAPQIVNDGVTIAKEIELEDAYENTGAQLMREVAAKTNDVVGDGTTTATVLAQALIREGLKNVAAGTNPIALKRGMEKAIKTIVDGIAEVAKPVEGDMIAQVATVSAGNDPEVGAMISEAMAKVGKDGVITIEESKSLQTEMEIVEGMQFDRGYISPYFVTDPERMIVQLNNAYLLLTDKKITSIQDLIPTLERVARSGRPLVIIAEDVEGEALATLVVNKLRGVLNVVAVKAPAFGERRKAMLQDIAILTGGQVISEEVGLTLEDVELTMLGEASSVTVTKDTTILVSEKGNKADIQKRVEQLKQQLAETDSEYDKEKLQERIAKLVGGVAVIKVGAATETELKDRKLRLEDALNATKAAVAEGIVPGGGVTLLHLASRIDALLPSLSPEEQTGARIVASALAAPVAQIADNAGAEGAVVVENVRAGDFNYGFNAATGAYEDLVSAGIIDPAKVVRSALQNAGSIAGMVLTTEALVVEKPEPKPAAPANGGMGGMGGMM

SEQ ID NO: 8960 - DNA, 1641 bp, Pseudomonas putida KT2440
  CDS (1)..(1641): transl_table=11
atggctgctaaagacgtaaaatttggtgattccgctcgtaagaaaatgctggttggtgtcaacgttctggctgacgcggtaaaagcgaccctgggcccgaaaggccgtaacgtggtactggccaagagcttcggcgcgccgaccatcaccaaggacggcgtttccgtcgccaaagaaatcgagctgaaagacgctttcgaaaacatgggcgcccagctggtcaaggaagttgcttccaaggccaacgacgctgccggtgacggcaccaccaccgctaccgttctggctcaggccatcgtcaacgaaggcctgaaagccgtcgctgccggcatgaacccgatggacctgaagcgcggtatcgacaaggccactgctgccgtcgttgccgaactgaagaacctgtccaagccatgcgccgactccaaggccatcgcccaggtaggtaccatctctgccaactccgacaactccatcggtgaaatcatcgccgaagccatggaaaaagtcggtaaagaaggcgtgatcaccgttgaagaaggctcgggcctggaaaacgaactgtccgtcgtagaaggcatgcagttcgaccgcggctacctgtcgccgtacttcgtcaacaagccggacaccatggttgccgagctggaaggcccgctgctgctgctggtcgacaagaaaatctccaacatccgtgagctgctgccagttctggaagccgttgccaaggccggccgcccactgctgatcgttgccgaagacgttgaaggtgaagcgctggctaccctggtagtcaacaacatgcgcggcatcgtcaaggttgctgcagtcaaggctccgggcttcggcgatcgccgcaaggccatgctgcaggacatcgctgtcctgactggcggccaggtcatctccgaagaaatcggcctgtccctggaaaccgctaccctggagcacctgggtaacgccaagcgcgtcatcctgtccaaggaaaacaccaccatcatcgacggtgctggcgctgacaccgagatcgaagcacgcgtcaagcagatccgtgcccagatcgaagaaacttcctcggactacgaccgtgagaagctgcaagagcgtctggccaagctggctggcggtgttgccgtgatcaaggtcggtgccggcaccgaagttgaaatgaaagagaagaaagcccgcgttgaagacgccctgcacgctacccgtgcagccgttgaagaaggcgtggtgcctggcggtggtgttgccctggttcgcgccctggcagccatcatcgacctgaaaggcgacaacgaagaccagaacgtcggtatcgcgctgctgcgtcgcgctgttgaatccccgctgcgccagatcactgccaacgccggtgatgagccaagcgtggttgctgacaaggtcaagcaaggttcgggcaacttcggctacaacgccgctaccggtgaatacggcgacatgatcgagatgggtatcctggacccagccaaggtcactcgctcggcgctgcaagctgctgcttcgatcggcggtctgatgatcaccaccgaagccatggttgccgacctgccggaagacaagccagctgctggcatgcctgatatgggtggcatgggtggcatgggcggcatgatgtaa

SEQ ID NO: 8961 - protein, 546 aa, Pseudomonas putida KT2440
MAAKDVKFGDSARKKMLVGVNVLADAVKATLGPKGRNVVLAKSFGAPTITKDGVSVAKEIELKDAFENMGAQLVKEVASKANDAAGDGTTTATVLAQAIVNEGLKAVAAGMNPMDLKRGIDKATAAVVAELKNLSKPCADSKAIAQVGTISANSDNSIGEIIAEAMEKVGKEGVITVEEGSGLENELSVVEGMQFDRGYLSPYFVNKPDTMVAELEGPLLLLVDKKISNIRELLPVLEAVAKAGRPLLIVAEDVEGEALATLVVNNMRGIVKVAAVKAPGFGDRRKAMLQDIAVLTGGQVISEEIGLSLETATLEHLGNAKRVILSKENTTIIDGAGADTEIEARVKQIRAQIEETSSDYDREKLQERLAKLAGGVAVIKVGAGTEVEMKEKKARVEDALHATRAAVEEGVVPGGGVALVRALAAIIDLKGDNEDQNVGIALLRRAVESPLRQITANAGDEPSVVADKVKQGSGNFGYNAATGEYGDMIEMGILDPAKVTRSALQAAASIGGLMITTEAMVADLPEDKPAAGMPDMGGMGGMGGMM

SEQ ID NO: 8962 - DNA, 1623 bp, Bradyrhizobium japonicum USDA 110
  CDS (1)..(1623): transl_table=11
atggctgccaaggaagtgaaattctccacagacgcccgtgaccgggtgttgcggggagtggatacgctggcgaatgcggtcaaggtcacgctcggccccaaggggcggaatgtcgtgatcgagaaatccttcggtgcgccgcgcatcaccaaggatggcgtgaccgtcgccaaggagatcgaactggaggacaagttcgagaacatgggcgcgcagatggtgcgggaggtcgcctccaagacgagtgacctcgcaggcgacgggacgaccaccgcgaccgtactggcccaggccatcgtcaaggaaggcgcgaaatccgtcgccgccggcatgaacccgatggacctcaagcgcggcatcgatctggccgtagaagccatcgtcaatgatttgaaggcgcacgccaaaaaagtcaccaccaacgaggagatcgcccagatcgcgaccatctcggccaatggcgatattgagatcggccgctttctcgccgacgccatgcagaaggtcggtaacgacggggtcatcaccgtcgaggaggccaagagcctcgataccgagctcgaggtggtcgaaggcatgcagttcgatcgcggctatgcgtcaccctacttcgtcaccaatgccgagaagatgcgggtcgagttcgaagacccctacatcctcatccatgagaagaagctgtcgaccctgcagtccatgctgccgctgctcgaagccgtcgtgcagtccggcaagccgctgctcgtcgttgccgaggatgtcgaaggtgaagcgctcgcgaccctcgtcgtcaaccggctgcgcggcgggttgaaggtcgcggccgtgaaggcgcccggcttcggcgatcgccgcaaggccatgctggaggacatcgcgatcctgacgggtggccaggcgatctcggaggatctcggcatcaagctcgagaacgtcacgctcaagatgctcggccgcgccaagaaggtcgtcatcgacaaggagaacacgaccatcgtcaacggtgcggggtccaagaaggacatcgaggcccgcgtcacccagatcaagatgcagatcgaggagactacctccgactacgatcgcgagaagttgcaggagcggcttgcgaagctcgccggcggcgtcgcggtgatccgcgttggtggcgcgaccgaagtcgaggtcaaggaacgcaaggatcgcgtcgatgacgcgatgcacgcgaccagggcggcagtcgaggaaggcatcctgcccggcggcggcgtcgcgctgctgcgcggcctgaaggcgctcgatgccatcaagaccgtgaatgccgaccagaaggccggcgtcgacatcgtgcgccgcgcgatccaggtgccggcgcggcagattgtgcagaacgccggcgaagacggctcgctggtggtcggtaagctgctggagaactccagctacaattggggcttcaatgccgccagcggcgaataccaggacctggcgaaggcaggcgtgatcgatcccgccaaggtcgttcgcaccgcgttgcaggatgcggcttccgtcgccgcgctgctgatcacgacggaagcgctgatcgccgagaagccgaagaagtccgagccggcgcccgcagcgccgccgatggacttctag

SEQ ID NO: 8963 - protein, 540 aa, Bradyrhizobium japonicum USDA 110
MAAKEVKFSTDARDRVLRGVDTLANAVKVTLGPKGRNVVIEKSFGAPRITKDGVTVAKEIELEDKFENMGAQMVREVASKTSDLAGDGTTTATVLAQAIVKEGAKSVAAGMNPMDLKRGIDLAVEAIVNDLKAHAKKVTTNEEIAQIATISANGDIEIGRFLADAMQKVGNDGVITVEEAKSLDTELEVVEGMQFDRGYASPYFVTNAEKMRVEFEDPYILIHEKKLSTLQSMLPLLEAVVQSGKPLLVVAEDVEGEALATLVVNRLRGGLKVAAVKAPGFGDRRKAMLEDIAILTGGQAISEDLGIKLENVTLKMLGRAKKVVIDKENTTIVNGAGSKKDIEARVTQIKMQIEETTSDYDREKLQERLAKLAGGVAVIRVGGATEVEVKERKDRVDDAMHATRAAVEEGILPGGGVALLRGLKALDAIKTVNADQKAGVDIVRRAIQVPARQIVQNAGEDGSLVVGKLLENSSYNWGFNAASGEYQDLAKAGVIDPAKVVRTALQDAASVAALLITTEALIAEKPKKSEPAPAAPPMDF

SEQ ID NO: 8964 - DNA, 1626 bp, Lactobacillus plantarum WCFS1
  CDS (1)..(1626): transl_table=11
atggctaaagaattaaagttctctgaagatgcacgttcagcgatgctaaaaggtgtcgatcaattagctgacacagttaagtcaacgttaggtcctaagggtcgcaacgttgttttggaacaatcatatggttcaccaacaattactaatgatggtgtaacgattgctaaggcgatcgaattagacgatcatttcgaaaacatgggtgctaagttagtttctgaagttgcttcaaagactaatgacatcgctggtgatgggacgactactgcaacggtcttaacacaatcaatcgttaatgaaggtatgaagaacgttacggccggtgctaaccctgttggcattcgtcgtgggattgaagaagctactaagacggcggttgactcattacacgctatggcacacgaagttaagacgcaagaagatattgcgcaaatcgcttctgtatcttcagcaagtgaagaaactggtaaattgattgccgaagccatggaaaaagttggtcatgacggtgttatcacgattgaagaatcacgtggtgttgatactagcttagacgttgttgaagggatgcaattcgaccgcggctacttatcacaatacatggttactgataatgataagatggaagcggatcttgacaatccatatatcttaattactgataagaagatttcaaacattcaagatatcttaccactattacaatccatcgttgaacaaggcaagccattgttgatcattgctgatgacatttctggtgaagctttaccaaccttagtcttgaacaagatgcgtgggacgtttaacgttgtcgccgttaaggcacccggttttggtgatcggcgtaaggaacaattacaagatatcgctatcttaactggcgggacggttatcactgacgaccttggccttgaattgaaggacacgaccatcgatcaattaggtcaagccaacaaagttacggttactaaggataacaccaccattgttgaaggcgctggttccaaggatgctatctcagaacgggttgaatttatccgtaaccaaatcggtgaaacaacttctgactttgacaaagaaaagttacaagaacgtttagctaaattagctggtggggttgccgttgttcgtgtcggtgccgctactgaaactgaattgaaggaacgtaaataccggattgaagatgctttgaacgcaactcgggccgccgttgaagaaggctttgttgctggtggtggtactgctttgattaacgttatcaaagatgttgctgcattgaaggaaactggtgacgttcaaactgggatcaacattgttaaacgtgctttggaagaaccagttcgccaaatcgctgaaaatgctggtttagaaggctctgttatcgttgaaaagatgaaggaacaaaagccaggtgttggtttcaacgccgcaactgatgaatgggttgacatgatcaaagctggtatcgtggacccaactaaggtaacgcgttctgctttacaaaatgccgcttctgtttcagcccttctcttaacgactgaagccgttgtcgctgaaaaacctgaagaaaatgcaccagctgcaccagccgcaccaaacccaggtatgggcggtatgatgtaa

SEQ ID NO: 8965 - protein, 541 aa, Lactobacillus plantarum WCFS1
MAKELKFSEDARSAMLKGVDQLADTVKSTLGPKGRNVVLEQSYGSPTITNDGVTIAKAIELDDHFENMGAKLVSEVASKTNDIAGDGTTTATVLTQSIVNEGMKNVTAGANPVGIRRGIEEATKTAVDSLHAMAHEVKTQEDIAQIASVSSASEETGKLIAEAMEKVGHDGVITIEESRGVDTSLDVVEGMQFDRGYLSQYMVTDNDKMEADLDNPYILITDKKISNIQDILPLLQSIVEQGKPLLIIADDISGEALPTLVLNKMRGTFNVVAVKAPGFGDRRKEQLQDIAILTGGTVITDDLGLELKDTTIDQLGQANKVTVTKDNTTIVEGAGSKDAISERVEFIRNQIGETTSDFDKEKLQERLAKLAGGVAVVRVGAATETELKERKYRIEDALNATRAAVEEGFVAGGGTALINVIKDVAALKETGDVQTGINIVKRALEEPVRQIAENAGLEGSVIVEKMKEQKPGVGFNAATDEWVDMIKAGIVDPTKVTRSALQNAASVSALLLTTEAVVAEKPEENAPAAPAAPNPGMGGMM

SEQ ID NO: 8966 - DNA, 1644 bp, Vibrio parahaemolyticus RIMD 2210633
  CDS (1)..(1644): transl_table=11
atggctgctaaagacgttaaatttggtaatgacgcacgagttaagatgctagaaggtgtaaacgttctggctgacgcagtgaaagtaacactgggtcctaaaggtcgtaacgtagttctagataaatctttcggtgctccaaccatcactaaagacggtgtatctgtagcgcgtgaaattgagctggaagacaagttccagaacatgggcgcgcaaatggttaaagaagtagcgtctaaagcaaacgacgctgcgggtgacggtacaacaacagcaaccgtactagcgcaagcaatcgtaaacgaaggtctaaaagcagttgcagcgggtatgaacccaatggatcttaagcgcggtatcgacaaagctgttgcagcggcagtagagcaactaaaagagctttctgttgagtgtaacgacaccaaagcaatcgctcaggttggtactatctctgcgaactctgacgcaagcgtaggtaacatcattgctgaagcaatggaacgcgttggccgcgacggtgttatcactgttgaagaaggtcaggctctacaagacgagctagacgtagtagaaggtatgcagttcgatcgcggttacctatctccttacttcatcaacaaccaagaagcgggcagcgttgagctagaaaacccattcatccttctagttgataagaagatctcaaacattcgtgagcttctaccaactctagaagcagtagcaaaagcatctcgtccactgctaatcatcgcagaagacgtagaaggcgaagctctagcgacattggttgtgaacaacatgcgtggcatcgtgaaagttgctgcggttaaagcgcctggttttggtgaccgtcgtaaagcaatgctacaagacatcgctatcctaactggcggtactgtgatttctgaagaaatcggtctagaactagaaaaagtaacgcttgaagatctaggtcaggctaagcgcgtaagcatcacgaaagaaaactcaaccatcatcgatggtgcgggtgaagaagcgatgatccaaggccgcgttgctcaaattcgtcaacaaatcgaagacgcaacttcagactacgacaaagagaaactgcaagagcgcgttgctaaactggctggcggtgttgcagtaatcaaagttggtgcagcgactgaagttgaaatgaaagagaaaaaagaccgcgtagaagacgcgctacacgcgactcgcgcagcggttgaagaaggcgtagttgcaggtggtggtgttgcactaatccgcgctgcatctaagattgttgacctagaaggcgacaacgaagaacaaaacgttggtatccgcgttgcgctacgcgcaatggaagcaccaatccgtcaaatcacgaagaacgcaggtgacgaagactctgttgttgcgaacaacgtgaaagcgggtgaaggttcttacggctacaacgcagcgacgggtgaatacggtgacatgctagagatgggtatcctagacccaactaaagtaactcgtagcgctctacaatttgcagcgtctgtcgctggtctcatgatcacaacagaagcgatggtaactgacctaccacaaaaagaaagcgcaggcatgcctgacatgggtggtatgggcggtatgggtggcatgggcatgatgtaa

SEQ ID NO: 8967 - protein, 547 aa, Vibrio parahaemolyticus RIMD 2210633
MAAKDVKFGNDARVKMLEGVNVLADAVKVTLGPKGRNVVLDKSFGAPTITKDGVSVAREIELEDKFQNMGAQMVKEVASKANDAAGDGTTTATVLAQAIVNEGLKAVAAGMNPMDLKRGIDKAVAAAVEQLKELSVECNDTKAIAQVGTISANSDASVGNIIAEAMERVGRDGVITVEEGQALQDELDVVEGMQFDRGYLSPYFINNQEAGSVELENPFILLVDKKISNIRELLPTLEAVAKASRPLLIIAEDVEGEALATLVVNNMRGIVKVAAVKAPGFGDRRKAMLQDIAILTGGTVISEEIGLELEKVTLEDLGQAKRVSITKENSTIIDGAGEEAMIQGRVAQIRQQIEDATSDYDKEKLQERVAKLAGGVAVIKVGAATEVEMKEKKDRVEDALHATRAAVEEGVVAGGGVALIRAASKIVDLEGDNEEQNVGIRVALRAMEAPIRQITKNAGDEDSVVANNVKAGEGSYGYNAATGEYGDMLEMGILDPTKVTRSALQFAASVAGLMITTEAMVTDLPQKESAGMPDMGGMGGMGGMGMM

SEQ ID NO: 8968 - DNA, 1635 bp, Bacillus cereus ATCC 14579
  CDS (1)..(1635): transl_table=11
atggcaaaagatattaaatttagtgaagaagcacgtcgttcgatgcttcgcggtgtcgacactcttgcaaacgcagtaaaagttacgcttggaccaaaaggtcgtaacgttgtacttgagaaaaaatttggttcaccacttattacaaatgatggtgtaacaatcgcaaaagaaatcgaattagaagatgcattcgaaaacatgggtgcgaaattagtagcagaagttgctagcaaaacaaatgacgtagctggtgacggaacaacaactgcaactgtattagcgcaagctatgattcgtgaaggtcttaaaaacgtaacagctggtgcgaacccaatggggcttcgtaaaggtatcgaaaaagctgttactgctgcaattgaagaattaaaaacgatttctaaaccaatcgaaggcaaatcttctatcgcacaagtagctgctatttctgcagctgacgaagaagtaggtcaattaatcgctgaagcaatggagcgcgttggtaacgacggcgttattactttagaagagtctaaaggattcacaacagaattagacgtagtagaaggtatgcaatttgatcgtggatatgcatctccttacatgattactgattctgacaaaatggaagcagttcttgataacccatacatcttaattactgacaaaaagatttctaacattcaagaaatcttaccagtattagagcaagtggtacaacaaggtaaaccacttcttatcattgctgaagatgtagaaggcgaagctttagctacattagtagtgaacaaacttcgtggtacattcaacgtagtagctgttaaagctcctggatttggtgaccgtcgtaaagcaatgctagaagatatcgcaatcttaacaggtggcgaagtaatcactgaagaattaggtcgtgacttaaaatctgctacagttgaatctttaggacgcgctggtaaagttgttgttacaaaagaaaacacaactgtagttgaaggtgtaggaagcacagaacaaatcgaagctcgcatcggtcaaatccgtgcgcaattagaagaaacaacttctgaattcgatcgtgaaaaattacaagagcgtcttgctaaactagcaggtggcgtaccagtaattaaagtaggtgcagcaactgaaactgagttaaaagagcgcaaacttcgcattgaagatgcacttaactcaactcgtgcagcagtagaagaaggtatcgttgcaggtggtggtacttcacttatgaacgtatacacaaaagtagcttctatcgtagctgaaggcgacgaagcaacaggtatcaacatcgtacttcgcgcactagaagagccagttcgtcaaatcgcaatcaacgctggtctagaaggatctgtagttgtagagcgtctaaaaggcgaaaaagtaggcgttggtttcaacgcagctactggcgaatgggttaacatgcttgagtctggtatcgtagatccagctaaagtaactcgttctgcacttcaaaacgcagcatctgttgcagctatgttcttaacaactgaagctgtagtagctgacaagccagaaccaaatgcaccagcaatgcctgacatgggcggcatgggcatgggcggtatgggcggaatgatgtaa

SEQ ID NO: 8969 - protein, 544 aa, Bacillus cereus ATCC 14579
MAKDIKFSEEARRSMLRGVDTLANAVKVTLGPKGRNVVLEKKFGSPLITNDGVTIAKEIELEDAFENMGAKLVAEVASKTNDVAGDGTTTATVLAQAMIREGLKNVTAGANPMGLRKGIEKAVTAAIEELKTISKPIEGKSSIAQVAAISAADEEVGQLIAEAMERVGNDGVITLEESKGFTTELDVVEGMQFDRGYASPYMITDSDKMEAVLDNPYILITDKKISNIQEILPVLEQVVQQGKPLLIIAEDVEGEALATLVVNKLRGTFNVVAVKAPGFGDRRKAMLEDIAILTGGEVITEELGRDLKSATVESLGRAGKVVVTKENTTVVEGVGSTEQIEARIGQIRAQLEETTSEFDREKLQERLAKLAGGVPVIKVGAATETELKERKLRIEDALNSTRAAVEEGIVAGGGTSLMNVYTKVASIVAEGDEATGINIVLRALEEPVRQIAINAGLEGSVVVERLKGEKVGVGFNAATGEWVNMLESGIVDPAKVTRSALQNAASVAAMFLTTEAVVADKPEPNAPAMPDMGGMGMGGMGGMM

SEQ ID NO: 8970 - DNA, 1803 bp, Arabidopsis thaliana
  CDS (1)..(1803)
atggcgtcaactttcactgccacatcttctattggttcaatggttgctccgaatggtcacaaatctgataagaaacttatcagcaagttgtcttcaagctcatttggaaggagacaaagtgtgtgtcctagacccagaagatccagttctgcaattgtgtgcgcagcaaaggaattacatttcaacaaagatgggactaccattaggagacttcaagctggtgtcaacaagctcgcagatcttgttggtgttacacttggacccaaaggacgaaatgttgttcttgagagcaagtatggatcaccacgaattgttaatgatggtgtgactgttgcaagagaggttgagttggaagacccggttgagaacattggcgctaagcttgtgaggcaagcggctgccaaaaccaatgacttggctggtgacggtacaacaacatctgttgttcttgcacaaggttttatcgctgagggtgtcaaggtggtagctgctggtgcaaaccctgttttgatcaccagaggtattgagaagacagcaaaggctttggttaccgagctcaagaaaatgtctaaggaggttgaagacagtgaacttgcagatgttgcagctgttagtgcgggtaacaacgacgaaattggaaatatgattgctgaagcaatgagcaaagtgggcaggaaaggtgtggtgacccttgaggagggtaaaagtgccgagaacaacctctacgtcgtagaaggaatgcaatttgaccgtggttatatctctccttactttgtgacagacagcgagaaaatgtccgtcgagttcgacaattgcaagttacttctcgttgacaagaaaattaccaatgcaagggatcttgttggtgttttggaggatgcaattagaggcggatacccaatattaattattgctgaagacattgaacaagaagctttagcgactcttgttgtaaacaagcttagaggtacactgaagatagcagctctcagagctccagggtttggagagcgcaagagccaataccttgatgatattgccattctaactggagcaactgtgatccgtgaggaagttggtctttcacttgacaaagctggaaaagaggttcttggtaatgcttcaaaggttgtcctcacaaaggagacctcgaccatagtgggtgatggaagcacacaggatgcagtgaaaaagcgtgttacacagattaaaaatcttattgagcaagcggagcaagattacgagaaggagaaactcaatgagagaattgcaaagctctctggtggagttgctgtgattcaggttggagcacaaactgagacagaactcaaagagaagaagttgagagttgaagatgctcttaatgcaacaaaggccgctgtcgaggaaggtattgttgttggtggtggttgcactctgcttcgtcttgcttccaaggttgatgccattaaagccacgcttgataatgatgaagaaaaggttggagcggatatagttaaaagagcactaagttaccccctaaaactaatcgccaagaatgctggtgttaatggaagtgtagttagcgagaaggtgctttccaacgataacgtgaaattcggttacaatgctgcaaccggcaagtacgaggatttgatggctgcaggaatcatcgatccaacaaaggttgtgagatgttgcttggaacacgcagcttcggttgcaaagactttcttgatgtcggactgcgttgttgttgagatcaaggaacctgaaccagttcccgtcggcaacccaatggacaactcaggatatggatactaa

SEQ ID NO: 8971 - protein, 600 aa, Arabidopsis thaliana
MASTFTATSSIGSMVAPNGHKSDKKLISKLSSSSFGRRQSVCPRPRRSSSAIVCAAKELHFNKDGTTIRRLQAGVNKLADLVGVTLGPKGRNVVLESKYGSPRIVNDGVTVAREVELEDPVENIGAKLVRQAAAKTNDLAGDGTTTSVVLAQGFIAEGVKVVAAGANPVLITRGIEKTAKALVTELKKMSKEVEDSELADVAAVSAGNNDEIGNMIAEAMSKVGRKGVVTLEEGKSAENNLYVVEGMQFDRGYISPYFVTDSEKMSVEFDNCKLLLVDKKITNARDLVGVLEDAIRGGYPILIIAEDIEQEALATLVVNKLRGTLKIAALRAPGFGERKSQYLDDIAILTGATVIREEVGLSLDKAGKEVLGNASKVVLTKETSTIVGDGSTQDAVKKRVTQIKNLIEQAEQDYEKEKLNERIAKLSGGVAVIQVGAQTETELKEKKLRVEDALNATKAAVEEGIVVGGGCTLLRLASKVDAIKATLDNDEEKVGADIVKRALSYPLKLIAKNAGVNGSVVSEKVLSNDNVKFGYNAATGKYEDLMAAGIIDPTKVVRCCLEHAASVAKTFLMSDCVVVEIKEPEPVPVGNPMDNSGYGY

SEQ ID NO: 8972 - DNA, 1758 bp, Arabidopsis thaliana
  CDS (1)..(1758)
atgtatcggcttgtctccaacgttgcttccaaagctaggattgccagaaagtgtacaagccagattggaagcaggctcaattctactaggaattatgcagcaaaagacataaggttcggtgttgaagctcgggctttaatgcttaggggtgttgaggatcttgctgatgcagttaaagtcactatgggacccaagggtcgtaatgtcatcatcgaacaaagctggggtgcaccaaaggtgacaaaggatggtgtgactgttgccaagagcattgagttcaaggatagaattaagaacgttggtgccagtcttgtgaaacaggttgctaacgccacaaatgacgtagctggtgatggaacaacgtgtgccacagtccttactagagctatcttcacggaaggttgtaaatcagttgccgctggaatgaatgcaatggacctaagacgtggtatcaaattggcagttgatactgttgtgacgaacttgcagagccgagcacgcatgattagcacctctgaagaaatcgcccaagttggaacaatatcagctaatggagatagggaaattggtgaactgattgcaaaggctatggaaactgtcggcaaagagggagtgatcacaattcaagatggcaagaccttgtttaatgagctggaagttgttgagggtatgaagattgacaggggatacatctccccgtacttcataactaacccgaaaacacaaaaatgtgaactagaagatcctctcattcttatccacgagaagaaaatttccaatataaacgcaatggtgaaagtattagaactggccctcaagaagcaaaggccgctgctgatcgttgctgaggatgtggagagcgatgctcttgccaccctaattctgaacaaacttcgtgctaatatcaaggtctgtgctgtgaaggcccctggttttggagagaaccgaaaggccaatttacatgatctagctgccctcactggagcccaggtaataacagaagagttgggtatgaatctagacaacattgacctcagtatgtttggaaactgcaagaaggtaacggtatccaaagatgatactgttgttctcgatggggctggtgacaagcaagcaattggggaacgatgtgaacagatacgatccatggttgaagcaagcacttctgattatgacaaggagaagttgcaagaaaggttggctaagctttcgggtggtgttgctgtactaaagattggaggagcaagtgagacagaagttagtgaaaagaaagatagagtaacggatgctctaaatgccactaaagcagccgtagaggagggtattgttccaggtggtggtgttgctcttttgtatgcttcgaaagaacttgagaagctttccacagctaactttgatcagaaaattggtgttcaaatcattcaaaacgcactcaagacacctgtttacacgattgcttccaatgctggagtcgagggtgcagttgtcgtaggcaagcttttggaacaagataatcctgaccttggttatgatgctgctaaaggagaatatgtggacatgataaaggctggtattatcgatcctttgaaagtgatcagaaccgcattagttgatgctgcaagtgtttcgtctttgttgacaacgacggaagcagttgtgactgagattccaacgaaagaggtagcatctccgggtatgggcggtggtggcatgggcggcatgggtggcatgggcggtatgggaggaatgggtttctga

SEQ ID NO: 8973 - protein, 585 aa, Arabidopsis thaliana
MYRLVSNVASKARIARKCTSQIGSRLNSTRNYAAKDIRFGVEARALMLRGVEDLADAVKVTMGPKGRNVIIEQSWGAPKVTKDGVTVAKSIEFKDRIKNVGASLVKQVANATNDVAGDGTTCATVLTRAIFTEGCKSVAAGMNAMDLRRGIKLAVDTVVTNLQSRARMISTSEEIAQVGTISANGDREIGELIAKAMETVGKEGVITIQDGKTLFNELEVVEGMKIDRGYISPYFITNPKTQKCELEDPLILIHEKKISNINAMVKVLELALKKQRPLLIVAEDVESDALATLILNKLRANIKVCAVKAPGFGENRKANLHDLAALTGAQVITEELGMNLDNIDLSMFGNCKKVTVSKDDTVVLDGAGDKQAIGERCEQIRSMVEASTSDYDKEKLQERLAKLSGGVAVLKIGGASETEVSEKKDRVTDALNATKAAVEEGIVPGGGVALLYASKELEKLSTANFDQKIGVQIIQNALKTPVYTIASNAGVEGAVVVGKLLEQDNPDLGYDAAKGEYVDMIKAGIIDPLKVIRTALVDAASVSSLLTTTEAVVTEIPTKEVASPGMGGGGMGGMGGMGGMGGMGF

SEQ ID NO: 8974 - DNA, 1635 bp, Synechococcus sp. WH 8102
  CDS (1)..(1635): transl_table=11
atggctaagcgcatcatttacaacgagaacgcccgccgcgctctcgaaaaaggcatcgacatcctggccgagtccgtggccgtgaccctgggaccaaagggccgcaacgtggtgctcgagaaaaagttcggtgctcctcagatcattaatgacggtgtcaccatcgccaaggagatcgagctcgaggatcacatcgagaacaccggtgttgctctgatccgtcaggccgcctccaagaccaacgacgctgccggtgacggcacaaccaccgccaccgtcctggcccacgccatggtcaaggccggtctgcgcaacgtggccgccggtgccaacgccatcaccctgaagaaaggcatcgacaaggcctccgacttcctggtcagcaagatcaaggagcaggccaagcccatcgccgacagcaacgccatcgcccaggtgggcaccatctccgccggcaacgacgaagaagtcggcaagatgattgccgatgccatggacaaggttggcaaggaaggcgtgatttccctggaagagggcaagtccatggagaccgaactagaggtcaccgagggcatgcgcttcgacaagggctacatctccccgtatttcgccaccgacaccgagcggatggaagcggtgctcgacgagccctacatcctgctgaccgacaagaagatcggtctggtgcaggacctggtgcccgtgctcgagcagatcgcccgcaccggcaagcctctgatgatcatcgctgaggacatcgagaaggaagccctggccaccctggtggtgaaccgcctgcgcggtgtgctgaacgtggccgccgtcaaggctcctggcttcggtgaccgccgcaaggccatgctcgaagacatggctgtgctgaccaacggtcagctgatcaccgaggacgctggtctcaagctggagaacgccaagctggagatgttgggcaccgcccgtcgcgtcaccatcaacaaggacaccaccaccatcgttgccgaaggcaatgaggcggctgtcggcgctcgctgcgagcagatcaagaagcagatggacgagaccgactccacctatgacaaggagaagctgcaggagcgtctggccaagctggccggtggcgttgctgtggtgaaagtgggtgcggccaccgaaaccgagatgaaggacaagaagcttcgtctcgaggacgccatcaacgccaccaaggctgcggtggaagagggcatcgtccctggcggcggcaccaccctggcccacctggctccttcccttgaggagtgggccaacggcaacctgtccggtgaagagctgatcggcgccaacatcgtggctgctgccctgacggcaccgctgatgcgcatcgctgaaaacgctggtgccaacggcgctgttgtggctgagaacgtcaagtcccgcgccatcagcgagggctacaacgctgccaccggcgattacgtcgacatgctggctgccggcatcgtcgatcccgccaaggtgactcgctccggtctgcagaatgccgcctccatcgctggcatggtgctgaccaccgagtgcatcgtggctgatctgcccgagaagaaggacgcagctcctgccggcggcggcatgggcggtggcgacttcgactactga

SEQ ID NO: 8975 - protein, 544 aa, Synechococcus sp. WH 8102
MAKRIIYNENARRALEKGIDILAESVAVTLGPKGRNVVLEKKFGAPQIINDGVTIAKEIELEDHIENTGVALIRQAASKTNDAAGDGTTTATVLAHAMVKAGLRNVAAGANAITLKKGIDKASDFLVSKIKEQAKPIADSNAIAQVGTISAGNDEEVGKMIADAMDKVGKEGVISLEEGKSMETELEVTEGMRFDKGYISPYFATDTERMEAVLDEPYILLTDKKIGLVQDLVPVLEQIARTGKPLMIIAEDIEKEALATLVVNRLRGVLNVAAVKAPGFGDRRKAMLEDMAVLTNGQLITEDAGLKLENAKLEMLGTARRVTINKDTTTIVAEGNEAAVGARCEQIKKQMDETDSTYDKEKLQERLAKLAGGVAVVKVGAATETEMKDKKLRLEDAINATKAAVEEGIVPGGGTTLAHLAPSLEEWANGNLSGEELIGANIVAAALTAPLMRIAENAGANGAVVAENVKSRAISEGYNAATGDYVDMLAAGIVDPAKVTRSGLQNAASIAGMVLTTECIVADLPEKKDAAPAGGGMGGGDFDY

SEQ ID NO: 8976 - DNA, 1617 bp, Chromobacterium violaceum ATCC 12472
  CDS (1)..(1617): transl_table=11
atggctgcgaaagaagtccgcttccacgacaacgcccgtgagcgcatcgtcaacggcgtcaatgtgctggccgatgccgtgaaagtcaccctgggcccgaaaggccgcaacgtgctgctggcgcgcagcttcggcgcgccgcacatcaccaaggacggcgtgtctgtcgccaaggagatcgaactgaaggatccgttcgagaacatgggcgcgcagatggtgaaggaagtggcgtccaagaccgccgacgtggcgggcgacggcaccaccaccgccaccgtgctggcccaggccatcgtgcaggaaggcatgaaatacgtggcctccggcatgaacccgatggacctgaagcgcggcatcgacaaggccgtccatgccgtaatcaaagaactgcaaaccctgtccaaaccggtgaccaacagcaaggaaaccgcccaggtggccgcgctgtccgccaattccgacgaagccatcggcaagatcatcgccgacgcgatggacaaggtgggcaaggaaggcgtgatcaccgtcgaggacggcaagtcgctggacaacgagctggccgtggttgagggcatgcagttcgaccgcggctacctgtcgccgtatttcatcaccgatccggaaaagcagaccgccgtgctggaagacccgctggtgctgctctacgacaagaagatcagcaatatccgcgacctcttgccggtgctggagcaagtggccaaggccggcaagccgctgctgatcgtcgccgaggacgtggagggcgaagcgctggccaccctggtggtgaacagcatgcgcggcatcctgaaggtggccgccgtcaaggctccgggcttcggcgaccgccgcaaagccatgctggaagacatcgccatcctcaccggcggcaccgtcatcgccgaggaaaccggcctcacgctggaaaaagccggcctggccgagctgggcagcgccaagcgcgtggaaatcggcaaggaaaacaccaccatcatcgacggcgccggcgacaaggccaagatcgacgcgcgcgtgcaagccatccgcgcccagatcgacgcggcgaccagcgactatgaccgcgagaagctgcaggagcgcgtggccaagctgtccggcggcgtggcggtgatccgcatcggcgcggccaccgaagtggaaatgaaagagaagaaagaccgcgtggacgacgcgctgcacgccacccgcgccgcggtggaagaaggcatcgtcgccggcggcggcgtggccctgctgcgcgcccgcgcccacatcaaggagctgaagggcgacaaccccgaccaggacgccggcatccagatcgtgctgcgcgcgctggaagcgccgctgcgcgccatcgccgccaatgccggcgacgagccgtcggtgatcgtcaacaaggtgctggagggcaagggcaaccacggctacaacgccgccagcggccagttcggcgacctggtggaaatgggcgtgatcgacccgaccaaggtgacgcgcaccgcgctgcaaaacgcggcctccatcgccagcctgatcctgactaccgacgccaccgtggccgaagcggggcaggacagcaaggccaaagccccggcggagctggattactga

SEQ ID NO: 8977 - protein, 538 aa, Chromobacterium violaceum ATCC 12472
MAAKEVRFHDNARERIVNGVNVLADAVKVTLGPKGRNVLLARSFGAPHITKDGVSVAKEIELKDPFENMGAQMVKEVASKTADVAGDGTTTATVLAQAIVQEGMKYVASGMNPMDLKRGIDKAVHAVIKELQTLSKPVTNSKETAQVAALSANSDEAIGKIIADAMDKVGKEGVITVEDGKSLDNELAVVEGMQFDRGYLSPYFITDPEKQTAVLEDPLVLLYDKKISNIRDLLPVLEQVAKAGKPLLIVAEDVEGEALATLVVNSMRGILKVAAVKAPGFGDRRKAMLEDIAILTGGTVIAEETGLTLEKAGLAELGSAKRVEIGKENTTIIDGAGDKAKIDARVQAIRAQIDAATSDYDREKLQERVAKLSGGVAVIRIGAATEVEMKEKKDRVDDALHATRAAVEEGIVAGGGVALLRARAHIKELKGDNPDQDAGIQIVLRALEAPLRAIAANAGDEPSVIVNKVLEGKGNHGYNAASGQFGDLVEMGVIDPTKVTRTALQNAASIASLILTTDATVAEAGQDSKAKAPAELDY

SEQ ID NO: 8978 - DNA, 1641 bp, Wolinella succinogenes DSM 1740
  CDS (1)..(1641): transl_table=11
atggcatctaaggaaattaacttctctgacagcgcacgcaacaagctttatgaaggcgttcgacaactcgctgatgcggtcaaagtgaccatgggaccaagaggacgaaatgtccttatccaaaaaagctttggtgctccctctatcaccaaagatggcgtctctgttgccaaagagattgagctagccgatgcgatcagcaacatgggggctcaactcgtcaaagaggtagcaagcaaaaccgcagacgccgcaggtgatggaaccaccacagcgaccgttttggctcatggaatcttcaaagagggcttgcgcaacatcaccgcgggcgcgaatcctatcgaagtcaaaagaggaatggacaaagccaccgctgcaatcattgatgagctaaagaaactctccaagaaagttaatgacaaaaaagagattgcacaagtggctaccatctccgccaactctgatgaaaacatcggtagtctcatcgctgaagctatggaaaaagtaggcaaagatggtgttatcaccgttgaagaggccaaaggaatcaacgatgaactcaatgtggttgagggaatgcagtttgatcgaggctacctctctccctattttgtaaccaacagcgacaagatggaggccgtcctagaaaatccttatatcctgctcacagacaagaaaatcacctccatgaaagatattcttccccttcttgagggcaccatgaagagcggcagacctcttcttatcgtggctgaagatattgaaggtgaagctctcaccacgcttgtggtcaacaaacttcgaggcgtcctcaatgtggccgcggttaaagcccctggttttggcgatcgaagaaaagagatgctcaaagacattgctaccctcacaggtggaagcgtcatcagcgaagagattggcaaaacccttgagagcgcaactatcgctgatctaggccaagccgctagagtggtaatcgacaaagacaactctactatcgtggatggaaaaggctccaaggatgaagtgaacgctcgcgtggctcaaatccgaacccaaatcgaagccaccacttctgattatgaccgagagaaactccaagagcgattggccaagctaagcggcggtgtcgcagtcatcaaagtgggtgcagctagcgaagtggagatgaaagagaaaaaagatcgcgtggatgacgccctctctgcaaccaaagcagctgtcgaagaaggaattgttatcggcgggggcgcagccctcattcgagccgctgctaaagtgaaactagagctaagcggtgatgagaaaatcggctatgagatcatcaaacgcgccatctctgctcccttgaagcaaatcgctcaaaacgctggttttgacgcaggtgtcgttgcaaacaatgtagagcaaaacggcaatgaaaactttggcttcaacgccgccaatggagagtatgtcgatatgttcgccgagggaatcattgaccccctcaaagtcgcgagaatcgccctccaaaacgctgtctcagtctctagcttgctcctcactaccgaagcaactatcagtgagattaaagaagacaaacctgctatgcccgacatgagtggcatgggtgggatgggaggcatgggcgggatgatgtaa

SEQ ID NO: 8979 - protein, 546 aa, Wolinella succinogenes DSM 1740
MASKEINFSDSARNKLYEGVRQLADAVKVTMGPRGRNVLIQKSFGAPSITKDGVSVAKEIELADAISNMGAQLVKEVASKTADAAGDGTTTATVLAHGIFKEGLRNITAGANPIEVKRGMDKATAAIIDELKKLSKKVNDKKEIAQVATISANSDENIGSLIAEAMEKVGKDGVITVEEAKGINDELNVVEGMQFDRGYLSPYFVTNSDKMEAVLENPYILLTDKKITSMKDILPLLEGTMKSGRPLLIVAEDIEGEALTTLVVNKLRGVLNVAAVKAPGFGDRRKEMLKDIATLTGGSVISEEIGKTLESATIADLGQAARVVIDKDNSTIVDGKGSKDEVNARVAQIRTQIEATTSDYDREKLQERLAKLSGGVAVIKVGAASEVEMKEKKDRVDDALSATKAAVEEGIVIGGGAALIRAAAKVKLELSGDEKIGYEIIKRAISAPLKQIAQNAGFDAGVVANNVEQNGNENFGFNAANGEYVDMFAEGIIDPLKVARIALQNAVSVSSLLLTTEATISEIKEDKPAMPDMSGMGGMGGMGGMM

SEQ ID NO: 8980 - DNA, 1629 bp, Gloeobacter violaceus PCC 7421
  CDS (1)..(1629): transl_table=11
atggcaaagcaagtcgtattcgatgagaccgcccgccgcgccctcgagcgcggcatcgacgccctcgccaacgcggtgcgcgtcaccctcggccccaagggccgcaacgtcgtacttgagaaaaagttcggcgcgccccagatcatcaacgacggtgtgacgatcgccaaagaaatcgagcttgaaaataagctcgaaaataccggcgcccaactgatcaaagaagtcgcctctaagaccaacgatgtggcgggcgacggcaccaccaccgcctgcgtgctggcccagtcgctggtcaaagagggtctcaaaaacgtcgccgccggttccaacccgatgaacctcaagcgcggcatggagaagaccgtccgccacctggtggctgaactggagaaagtcgccaagccggtcgaaggctcccaggcgatcgcccaggtcgcggccgtctccgccggcaacgacgatgaaatcggcgagatgatcgcccgcgccatggagaccgtcggcaaagaaggcgtgatcaccgtcgaagaatcgaagtccctgaccaccgaactggaggtgaccgagggcatgcagttcgaccgcggctacgtctcgccctacctggttaccgaccaggagcgcatggaagcggtcttcgacgagcccttcttgctgattaccgacaaaaagatctcgatcatcaccgacctggtgccgattcttgaaaaagtcgcccgcgccggccgaccgctggtaatcatcgccgaggacatcgaaaaagaagccctcgccaccctcgtagtcaacaagctgcgcggcgtcctcaacgtggctgccgtcaaggcccccggcttcggcgaccggcgcaaggcgatgctgcaagatattgcggtgctcaccgacggcgaagtgatctccgaagacaccggcatcaagctcgagaacgtcaccaccgaccagctcggcaaggcccgaaaaatgacgatcaccaaggacaacaccacgatcgtggccgagggcaacgaagccgccgtcaaggcccgctgcgctcagatcaagcagcagatcgaagagaccgactccgagtacgaccgcgagaagctccaggagcgccttgccaagctctcgggcggtgtggcggtgatcaaagtcggtgcggcgaccgagaccgaactcaaagaccgcaagctgcgcatcgaggatgccgtcaacgccaccaaggcggccatcgccgaggggatcgtcccgggcggcggtacggcgctgttgcacctggcggccggtatgggcgggttcatcgacagcctgagcggcgaagagaaaatcggggcgcgcatcatccagaaggccctcgaaggtcccctgcgccagatcgccgagaacgccggcctcgaaggctcggtgatcgccgagaaggtgcgcaacttggagttcaacttcggcttcaacgcgatgaccaacgagtatgaggacctggtcgccgccgggatcatcgacccggtgaaggtgacccgctcggcactgcagaatgccgcctcgattgccgcgatggtgctcaccaccgagtgcatcgtggtcgacaagcccgaggatgataagaccccggccggtgccggcggtggcggcatgcccgacttcgactga

SEQ ID NO: 8981 - protein, 542 aa, Gloeobacter violaceus PCC 7421
MAKQVVFDETARRALERGIDALANAVRVTLGPKGRNVVLEKKFGAPQIINDGVTIAKEIELENKLENTGAQLIKEVASKTNDVAGDGTTTACVLAQSLVKEGLKNVAAGSNPMNLKRGMEKTVRHLVAELEKVAKPVEGSQAIAQVAAVSAGNDDEIGEMIARAMETVGKEGVITVEESKSLTTELEVTEGMQFDRGYVSPYLVTDQERMEAVFDEPFLLITDKKISIITDLVPILEKVARAGRPLVIIAEDIEKEALATLVVNKLRGVLNVAAVKAPGFGDRRKAMLQDIAVLTDGEVISEDTGIKLENVTTDQLGKARKMTITKDNTTIVAEGNEAAVKARCAQIKQQIEETDSEYDREKLQERLAKLSGGVAVIKVGAATETELKDRKLRIEDAVNATKAAIAEGIVPGGGTALLHLAAGMGGFIDSLSGEEKIGARIIQKALEGPLRQIAENAGLEGSVIAEKVRNLEFNFGFNAMTNEYEDLVAAGIIDPVKVTRSALQNAASIAAMVLTTECIVVDKPEDDKTPAGAGGGGMPDFD

SEQ ID NO: 8982 - DNA, 1662 bp, Gloeobacter violaceus PCC 7421
  CDS (1)..(1662): transl_table=11
atggcaaagatgattgtgtttgacgagacggcccgccgggcgctcgagcggggcgtcaacgccctggccgacgcggtgcgggtgaccctcggacccaagggccgcaacgtcgtgcttgagaaaaaattcggtgcgccccagattgtcaacgacggcgtcaccatcgccaaagaaattgaactcgaagatccgctggaaaataccggcgctcagctcatccgcgaagtggcctccaagaccaacgacgtggccggcgacggcaccaccaccgccacggtgctcgcccaggcgctcatccgcgagggcctgcgcaacgtggccgccggggccaacccgatgagcctcaagcgcggcatggagaagaccgtggcgaagctggtgcaagaaatcgccgccatggccaagccggtcgaagacaacaagacaatcgccgaggtggcgacgatctcctcgggcaacgacgaagaaatcggccagatgatcgccgaggcgatggacaaagtcggcaaagaaggcgtgatcaccgtcgaagaatccaagtccctggtcaccgaactggatgtggtcgagggcatgcagttcgacaagggctacgtctcgccctactttgtcaccgacaccgagcggatgatcaccgatctcgacgagccgttcattctactcaccgacaaaaaaatctcgattattcaagatctgatcccggtgcttgagaaggttgcccgcgccgggcggcccttgctcatcatctccgaggatctcgaaggcgaagcgctcgcgacgctggtggtcaataaactgcgcggcgtgctcaactgcgtggcggtcaaggcccccggcttcggcgaccggcgcaaggcgatgctgcaagatatcgcggtgctcaccggcggcgatgtgatctccgaggacatcggcctcaagctcgaaaacgtcaccatcgacatgctgggcaaggcccgcaaggtgacgatcaccaaggacaaaaccacgatcgtggccggtacagacaacaaagccgccgtcgagaagcgcatcgcccagatccacaagcagatggaggacaccgactccgactttgaccgcgagaagctccaagagcgcctcgccaagctcgcgggcggtgtggcggtaatcaaagtcggtgcggcgaccgagaccgaactcaaagaccgcaagctgcgcattgaagatgccctcaacgccaccaaagcggcggtcgaagaaggcatcgtgccgggcggcggtacgaccctgctgcacctgaccaagaagatcgacgccatcaaggcgggactggccgacgacgagaagaccggtgcggacttgatcgcccgcgccctggaggcgcctttgcgccagattgccgataatgccggcgtcgaagggtcggtgatcgcccagaaggtgcgcgagctggacttcaacatcggctacgacgccatgaagggcgaatttgtcgacatgcttgccgcgggcgtggccgacccggccaaggtagtccgctcggcgctgcagaacgccgcgtcgatcgccgcgatggtgctcaccaccgaggtgctgatcgtcgacaagcccgagaagaaaaaagccggcgccggtgcccccgacatgggcggtatgggtggcatgggcggtatgggtggcatgggcggcatgatgtag

SEQ ID NO: 8983 - protein, 553 aa, Gloeobacter violaceus PCC 7421
MAKMIVFDETARRALERGVNALADAVRVTLGPKGRNVVLEKKFGAPQIVNDGVTIAKEIELEDPLENTGAQLIREVASKTNDVAGDGTTTATVLAQALIREGLRNVAAGANPMSLKRGMEKTVAKLVQEIAAMAKPVEDNKTIAEVATISSGNDEEIGQMIAEAMDKVGKEGVITVEESKSLVTELDVVEGMQFDKGYVSPYFVTDTERMITDLDEPFILLTDKKISIIQDLIPVLEKVARAGRPLLIISEDLEGEALATLVVNKLRGVLNCVAVKAPGFGDRRKAMLQDIAVLTGGDVISEDIGLKLENVTIDMLGKARKVTITKDKTTIVAGTDNKAAVEKRIAQIHKQMEDTDSDFDREKLQERLAKLAGGVAVIKVGAATETELKDRKLRIEDALNATKAAVEEGIVPGGGTTLLHLTKKIDAIKAGLADDEKTGADLIARALEAPLRQIADNAGVEGSVIAQKVRELDFNIGYDAMKGEFVDMLAAGVADPAKVVRSALQNAASIAAMVLTTEVLIVDKPEKKKAGAGAPDMGGMGGMGGMGGMGGMM

SEQ ID NO: 8984 - DNA, 1635 bp, Geobacter sulfurreducens PCA
  CDS (1)..(1635): transl_table=11
atggcagccagaatcatcaagttcgaccaggaagggcgcaacgccatcctgaaaggtgtcaataccctcgccgacgcggtgaaggttaccctcggccccaaaggccgcaacgtggtcatcgagaaggccttcggctccccccttatcaccaaggacggcgtcaccgtggccaaggaaatcgagctcgaggacaagttcgagaacatgggcgcccagctcgtgaaggaagtcgcctccaagacctccgacgttgccggtgacggcaccaccaccgccacggtcctcgcccaggccatctatcgccagggctccaagctggtggccgccggccacaaccccatggagatcaagcgcggcatcgacaaggccgtcgagaccatcgtggccgagctcaagagcatctccaagccgatcaaggatcacaaggaaatcgcccaggtgggcaccatctccgccaacaacgacaagaccatcggcgacatcatcgcccaggccatggaaaaagtcggcaaggaaggggtaatcactgtcgaggaagccaaggccatggaaaccagcctggagaccgtcgaggggatgcagttcgaccgcggctacctctccccctacttcgtgaccgatccggagcggatggaggcgtcgcttgagaacgccatgatcctgatccacgacaagaagatctccaacatgaaggaccttctcccggtgctggagcagaccgccaagagcggccgtccgctgctgatcatcgccgaagacatcgagggcgaggctcttgccaccctggtcgtgaacaagctgcgcggcgtgctcaacatctgcgccgtcaaggccccgggcttcggtgaccgccgcaaggccatgctggaagatatcgccatcctcaccggcggccaggtcatctccgaggagatcggcaacaagctcgaaaacaccaccatggacatgctcggccgcgccaagcggatcaccgtggacaaggacaacaccaccatcatcgacggcgacggcaaggaagccgacatccagggccgcgtcaagcagatccgcgcccagatcgaggagaccaccagcgactacgaccgcgagaagctccaggagcgcctggccaagctcgtgggcggggttgccgtaatcaaggtcggtgccgccaccgagaccgagatgaaagagaagaaagcccgcgtcgaagatgccctgcacgccacccgcgccgcagtggacgaggggatcgtccccggaggcggcgttgcctacctgcgcgcccttgcttcccttgatgccctcagccttcctaccgagcagcagttcggcgtcaacgtcatcaagcgctccctggaggagcccatccgccagatcgcccagaacgcgggtgtcgacggctccatcgtggtcgacaaggtgaagaacagcaaggatgctttcggctataacgccgccgaggacgagtacgtggacatgctcgccgccgggatcatcgacccgaccaaggtgtcccgttccgccctgcagaacgcggcttctgtcgccggactcatgctcaccaccgaagccatgatcgccgacaagccgaaggaagaagctcctatgcctgccatgcccggcggcatgggcggcatgggcggcatgatgtaa

SEQ ID NO: 8985 - protein, 544 aa, Geobacter sulfurreducens PCA
MAARIIKFDQEGRNAILKGVNTLADAVKVTLGPKGRNVVIEKAFGSPLITKDGVTVAKEIELEDKFENMGAQLVKEVASKTSDVAGDGTTTATVLAQAIYRQGSKLVAAGHNPMEIKRGIDKAVETIVAELKSISKPIKDHKEIAQVGTISANNDKTIGDIIAQAMEKVGKEGVITVEEAKAMETSLETVEGMQFDRGYLSPYFVTDPERMEASLENAMILIHDKKISNMKDLLPVLEQTAKSGRPLLIIAEDIEGEALATLVVNKLRGVLNICAVKAPGFGDRRKAMLEDIAILTGGQVISEEIGNKLENTTMDMLGRAKRITVDKDNTTIIDGDGKEADIQGRVKQIRAQIEETTSDYDREKLQERLAKLVGGVAVIKVGAATETEMKEKKARVEDALHATRAAVDEGIVPGGGVAYLRALASLDALSLPTEQQFGVNVIKRSLEEPIRQIAQNAGVDGSIVVDKVKNSKDAFGYNAAEDEYVDMLAAGIIDPTKVSRSALQNAASVAGLMLTTEAMIADKPKEEAPMPAMPGGMGGMGGMM

SEQ ID NO: 8986 - DNA, 1641 bp, Bdellovibrio bacteriovorus HD100
  CDS (1)..(1641): transl_table=11
atgagtaaagtaatcacattctcagaagacgctcgtacacacatccttaaaggtgtgaacactctggcgaacgcagtaaaagtaactttgggccctaaaggtcgcaacgttgttatcgacaaatctttcggctccccactgatcactaaagacggtgtgactgttgcgaaagaaatcgaacttgaaaacaaattcgaaaacatgggcgctcagatggttaaggaagttgcttccaaaaccaacgacgaagctggtgacggtacaacaactgcaacagttttggcgcaagctatctaccgtgaaggcgcgaaacttgtttccgctggtcacaacccaatgtctatcaaacgtggtatcgacaaagctgttggcatcatcattgaagaattgaagtccatgtccaaaccggtaaaaggttccaacgaagtggctcaagttggcgctatctctgcaaacaatgacaaagaaatcggtcagatgttggcagacgctatggataaagtaggccgtgaaggcgttatcactatcgaagaatccaaaactgcaaaaacggaagtgactgtagttgaaggtatgcaattcgaccgtggttacctttctccatacttcgtaaccaacgcagaaagaatggaagcagttcttgagaacgcttacgttcttgtttacgacaaaaaaatctcttccatgaaagacatgatcggtatccttgaaggcgttgcaaaacaaggccgtcaattgttgatcatcgctgaagacgttgaaggcgaagcattggcaactttggttgttaataagctgcgcggcactctgcacattgctgcagttaaagctccgggcttcggtgaccgtcgtaaagctatgcttgaagacatcgcgatcctgactggcgcgaaagtgatctctgaagacgttggtttgaaacttgaggcggcgactgttgctgaccttggtgttgcaaaacgcatcgttgtagacaaagacaacacaacaatcatcgatggcgctggtaaaaagaacgacatcaatggccgtgttggtcagatcaaagctcagatcgaagaaacttcttctgactatgacaaagaaaaactgaaagagcgtctggctaaattggctggcggtgttgcagttatccacgttggtgctccttctgaagttgagatgaaagagaaaaaacaccgcgtagaagacgctttgaacgcgactcgcgctgcggttgaagaaggtatcgttgctggtggtggtactgctttgcttcgtgcttccactaaaatcgacaaatccaaattctctgaagaagagcaattcggtgcgacgatcatcaaacgtgcttgcgaagagccaatccgtcaaatcgcggctaacgctggtttggatggcgcgatcgttttggatcgtatccttcagaacaagtccacgacttggggcttcaacgcttactctgacgaatacactgatctgatcaaagacggtgttatcgatccagttaaagttgttcgttgcgctttgactaacgcagcttccgtttcttctttgatgctgactacagagactatgatcgctgaagcacctaagaaagaatctgcagctcctgcaatgcctggccacgacggtatgggcggcatgggtggcatgatgtag

SEQ ID NO: 8987 - protein, 546 aa, Bdellovibrio bacteriovorus HD100
MSKVITFSEDARTHILKGVNTLANAVKVTLGPKGRNVVIDKSFGSPLITKDGVTVAKEIELENKFENMGAQMVKEVASKTNDEAGDGTTTATVLAQAIYREGAKLVSAGHNPMSIKRGIDKAVGIIIEELKSMSKPVKGSNEVAQVGAISANNDKEIGQMLADAMDKVGREGVITIEESKTAKTEVTVVEGMQFDRGYLSPYFVTNAERMEAVLENAYVLVYDKKISSMKDMIGILEGVAKQGRQLLIIAEDVEGEALATLVVNKLRGTLHIAAVKAPGFGDRRKAMLEDIAILTGAKVISEDVGLKLEAATVADLGVAKRIVVDKDNTTIIDGAGKKNDINGRVGQIKAQIEETSSDYDKEKLKERLAKLAGGVAVIHVGAPSEVEMKEKKHRVEDALNATRAAVEEGIVAGGGTALLRASTKIDKSKFSEEEQFGATIIKRACEEPIRQIAANAGLDGAIVLDRILQNKSTTWGFNAYSDEYTDLIKDGVIDPVKVVRCALTNAASVSSLMLTTETMIAEAPKKESAAPAMPGHDGMGGMGGMM

SEQ ID NO: 8988 - DNA, 1692 bp, Ashbya gossypii ATCC 10895
  CDS (1)..(1692)
atgttgagatccagtggtaccaagtctgttttgagaggcttgcggttctactcgcacaaggagttgaagttcggcgtggagggccgggcagcactgctgcgcggtgtcgagacgctggcggatgctgtgtctgccactctagggccaaagggtagaaacgtgcttatcgagcaacagtttggcgcaccaaagatcactaaggacggtgtgactgttgcacgggccatcaccttggaggaccactttgaaaacatgggcgctaaactattgcaggaggttgcatccaagaccaacgaggctgcgggtgacggtactacatctgccaccgtgctcgggcgcgcgatcttcacggagtctgtcaagaacgttgcggccggctgcaacccaatggatctgcgcaggggtacgcaggcagctgtggagaaggtcattgagtttttgagcaagaacaagaaggagatcactacctctgctgagattgcgcaggtggccacgatctccgccaacggcgattcgcacgtcgggaagctgctagcatctgccatggagaaggtgggcaaggagggtgttatcaccatcaaggagggccgcaccttagaggacgagctagaagtgactgagggtatgcgcttcgatcgcggtttcatctccccatacttcatcaccgatgcgaaggccaacaaggtggaattcgagaagccactgttgcttttgtccgagaagaagatctcctccatccaggacatcatcccagcgcttgaaatttcgaaccaatccagaaggccattgttgatcattgctgaggatatcgatggcgaggcgctagctgcctgtatcctgaacaagctacgtggccaggttcaggtctgcgctgtcaaggccccaggctttggtgacaacagaaagaacaccttaggtgatatcgcagttttgaccggcggtaccgtgttcaccgaggaactagacttgaagccagagaacgccaccctgcagcacttgggttctgcagactccatcaccatcaccaaggaggacaccgtcgtcttgaacggtaacggtaccaaggagaacattgaggcccgtatcgagcagatccggaactccatcgacttgaccactaccaactcctacgagaaggagaagctacaagagcgtctagccaagctatccggcggtgttgccgttatcagagtcggcggtgcgtcggaggttgaagtcggagagaagaaggaccgttacgacgacgccctaaatgctaccagagctgccgtcgaggagggtatcttgccaggtggaggtaccgccttgttgaaggccaccagagttctcgatgaggtcaagaccgagaacttcgaccagaagctgggtgttgatatcatcagaagagctatcgctcaacctgcccgcaagatcattgagaacgccggagaggagggcgccgtcattgtcggcaagatcatcgacgactttggagaagacttcaccaagggctacgacgccgccaagggcgagtacaccgacatgttggctgccggtatcatcgacccgttcaaggtcgttagaagcggaattgtggacgcctctggtgtggcctccttgtggcttactaccgaggtcgccattggggacgcccctaagcccgctaatgcggctccacctgccggcatgccaggcatgccgggcatgatgtag

SEQ ID NO: 8989 - protein, 563 aa, Ashbya gossypii ATCC 10895
MLRSSGTKSVLRGLRFYSHKELKFGVEGRAALLRGVETLADAVSATLGPKGRNVLIEQQFGAPKITKDGVTVARAITLEDHFENMGAKLLQEVASKTNEAAGDGTTSATVLGRAIFTESVKNVAAGCNPMDLRRGTQAAVEKVIEFLSKNKKEITTSAEIAQVATISANGDSHVGKLLASAMEKVGKEGVITIKEGRTLEDELEVTEGMRFDRGFISPYFITDAKANKVEFEKPLLLLSEKKISSIQDIIPALEISNQSRRPLLIIAEDIDGEALAACILNKLRGQVQVCAVKAPGFGDNRKNTLGDIAVLTGGTVFTEELDLKPENATLQHLGSADSITITKEDTVVLNGNGTKENIEARIEQIRNSIDLTTTNSYEKEKLQERLAKLSGGVAVIRVGGASEVEVGEKKDRYDDALNATRAAVEEGILPGGGTALLKATRVLDEVKTENFDQKLGVDIIRRAIAQPARKIIENAGEEGAVIVGKIIDDFGEDFTKGYDAAKGEYTDMLAAGIIDPFKVVRSGIVDASGVASLWLTTEVAIGDAPKPANAAPPAGMPGMPGMM

SEQ ID NO: 8990 - DNA, 1761 bp, Strongylocentrotus purpuratus
  CDS (1)..(1761)
atgcatagaatatccagcgtactgaggcccctcgcctccagggctctcacaccctcaataagcagagctgtgtgcccacacctcaccaggagctatgctaaggacatcaagtttggcgcagaggccaggggtatgatgcttcagggcgtcgacctcttagctgatgctgtagcagtcacaatgggacctaaggggcgcaatgtaattatagagcagagctggggcagtcctaaaatcaccaaagacggagtcacagtcgctaaggccattgaactcaaagacaaatggcagaacattggagctaaacttgtccaagacgttgcaaacaacacaaacgaggaggccggcgatggaaccacaacggcaactgtgttggcacgagccatcgccaaggagggctttgacaacatcagccgaggtgcaaaccccactgaaatcaggaaaggcatcatgaacgctgtcgatgtcgtcatcaaagagttacagagacagtccaagccagtcacaacaccagaagaaattgcacaggttgctaccatctcggctaacggcgatgcaggaatcggtgagctcatctccagggcgatgaagaaggttggtcgccatggcgtcatcacggtcaaggacggcaagacgttgaatgatgagctagaggtcattgagggtctcaagtttgaccgaggttacatctcaccgtacttcatcaactcgcctaaaggtcagaaggttgagttccaggatgctctcctcctcctgagtgagaagaagatctctaccatccaggccatcgtcccagccttagagctagccaacgcccagaggaaacctctcgtcatcatcgctgaggatgtcgatggtgaagccctcagcacattggttcttaacaggttgaaggttggtcttcaggttgcagcagtcaaggcaccagggttcggtgataacaggaagaaccagcttcatgacatggccgtctcaacaggaggaatcgtatttggtgatgaagctatggaagtcaagattgaagagcttcagatccaggatctaggtcaggttggtgagatcgctatcaccaaggatgatacgctcatcctcaagggtatgggaaagcaggaggatgtagacagaagagtcgctgagatcgcagaacaggtggagaacaccaactcagagtacgagagagagaagctcaacgaacgtcttgccaagctttctgacggtgtagcagtactcaaggtcggaggttcaagtgatattgaggtgaacgagaagaaggaccgtgtgacagatgctctgaacgccactagggctgctgtggaggaaggcatcgtgcttggtgggggaaccgctctcatcaggtgcttgacatctctcctcaacatcccagtagagaactctgaccagaagattggaatcgagatcgtcaggagagcactccgcatcccaacccagaccatcgctaacaacgctggtgtagagggctccctcattgttgagaaggtgattgaagcatcagaagagattggttataatgctctaacaggagagtttgttgatatggtcaaggctggtatcattgatcctactaaggttgtaaggacagcgctcctggatgcatccggcgtcgcatctctcctgacgacagccgaggccgtcatcaccgagacccccaaggagaccccggagatgccaatgggcggcggcggtggcatgggcggcatgggaggtatgggaggaatgggcggtatgggaggcatgatgtga

SEQ ID NO: 8991 - protein, 586 aa, Strongylocentrotus purpuratus
MHRISSVLRPLASRALTPSISRAVCPHLTRSYAKDIKFGAEARGMMLQGVDLLADAVAVTMGPKGRNVIIEQSWGSPKITKDGVTVAKAIELKDKWQNIGAKLVQDVANNTNEEAGDGTTTATVLARAIAKEGFDNISRGANPTEIRKGIMNAVDVVIKELQRQSKPVTTPEEIAQVATISANGDAGIGELISRAMKKVGRHGVITVKDGKTLNDELEVIEGLKFDRGYISPYFINSPKGQKVEFQDALLLLSEKKISTIQAIVPALELANAQRKPLVIIAEDVDGEALSTLVLNRLKVGLQVAAVKAPGFGDNRKNQLHDMAVSTGGIVFGDEAMEVKIEELQIQDLGQVGEIAITKDDTLILKGMGKQEDVDRRVAEIAEQVENTNSEYEREKLNERLAKLSDGVAVLKVGGSSDIEVNEKKDRVTDALNATRAAVEEGIVLGGGTALIRCLTSLLNIPVENSDQKIGIEIVRRALRIPTQTIANNAGVEGSLIVEKVIEASEEIGYNALTGEFVDMVKAGIIDPTKVVRTALLDASGVASLLTTAEAVITETPKETPEMPMGGGGGMGGMGGMGGMGGMGGMM

SEQ ID NO: 8992 - DNA, 1770 bp, Aspergillus terreus NIH2624
  CDS (1)..(1770)
atgcagcgtgctctctcttctcggacttcggtcctctctgccgcttccaagcgcgctcctttctacagatctaccggtctcaacctccagcagcagcgtttcgctcacaaggagctcaagttcggtgttgaagctcgtgcccagctcctcaagggtgttgacactcttgcgaaggcggtgacttcgacgcttggtcccaagggtcgtaacgtcctcatcgagtctccttatggctctcccaagatcaccaaggacggtgtgaccgtggccaaggctatccagcttcaggacaagttcgagaacctcggtgctcgcctcctccaggatgtcgcttccaagaccaacgaactcgccggtgacggtaccaccactgctaccgttctcgctcgtgctatcttctccgagaccgtgaagaacgttgctgccggctgcaaccccatggacctccgtcgcggtatccaggccgctgtcgatgccgttgtcgactacctccagcagaacaagcgcgacatcaccaccggtgaggagatcgcccaggtcgctactatctccgccaacggtgacactcacgtcggtaagctcatctccactgccatggagagagtcggcaaggagggtgtcatcaccgtgaaggagggcaagaccctcgaggatgagctcgaggtcactgagggtatgcgtttcgaccgtggatacacctctccttacttcatcaccgaccccaaggcccagaaggtcgagttcgagaagcccctgatcctcctctctgagaagaagatctccgccgtccaggacatcatccccgccctcgaggcctccaccactctccgtcgccctctcgtgatcatcgctgaggacattgagggtgaggcccttgctgtctgtatcctgaacaagctccgtggtcagctccaggtcgccgccgtcaaggcccctggcttcggtgacaaccgcaagagcatccttggtgacctggctgtcctgaccaacggtaccgtcttcaccgacgagcttgacatcaagctcgagaagctgacccccgacatgctcggttccaccggtgccatcaccatcaccaaggaggacaccatcatcctcaacggtgagggcagcaaggactccatcgctcagcgctgcgagcagatccgtggtgtcatggccgaccccaccacctccgagtacgagaaggagaagctccaggagcgtctggccaagctttccggtggtgttgccgtcatcaaggtcggtggcgcctccgaggttgaggtcggtgagaagaaggaccgcgttgttgacgccctgaacgccacccgtgctgccgtcgaggagggtatcctccctggtggtggtaccgccctcctcaaggcctccgccaacggcctgagcgacgtcaagtccgccaacttcgaccagcagctcggtgtcagcatcattaagaacgccatcacccgccctgctcgtaccattgtcgagaacgccggtctcgagggcagcgtcatcgttggcaagctgaccgacgagttctccaaggacttcaaccgtggctacgacagctccaagagcgagtacgtcgacatgatcgccaccggtattgtcgatcccctcaaggttgtccgcaccgccctggttgacgccagcggcgttgcctccctcctcggtaccaccgaggttgccattgtcgaggcccctgaggagaagggccctgccgctcctgctggcggcatgggtggcatgggcggtatgggcggcatgggcggtggtatgttctaa

SEQ ID NO: 8993 - protein, 589 aa, Aspergillus terreus NIH2624
MQRALSSRTSVLSAASKRAPFYRSTGLNLQQQRFAHKELKFGVEARAQLLKGVDTLAKAVTSTLGPKGRNVLIESPYGSPKITKDGVTVAKAIQLQDKFENLGARLLQDVASKTNELAGDGTTTATVLARAIFSETVKNVAAGCNPMDLRRGIQAAVDAVVDYLQQNKRDITTGEEIAQVATISANGDTHVGKLISTAMERVGKEGVITVKEGKTLEDELEVTEGMRFDRGYTSPYFITDPKAQKVEFEKPLILLSEKKISAVQDIIPALEASTTLRRPLVIIAEDIEGEALAVCILNKLRGQLQVAAVKAPGFGDNRKSILGDLAVLTNGTVFTDELDIKLEKLTPDMLGSTGAITITKEDTIILNGEGSKDSIAQRCEQIRGVMADPTTSEYEKEKLQERLAKLSGGVAVIKVGGASEVEVGEKKDRVVDALNATRAAVEEGILPGGGTALLKASANGLSDVKSANFDQQLGVSIIKNAITRPARTIVENAGLEGSVIVGKLTDEFSKDFNRGYDSSKSEYVDMIATGIVDPLKVVRTALVDASGVASLLGTTEVAIVEAPEEKGPAAPAGGMGGMGGMGGMGGGMF

SEQ ID NO: 8994 - DNA, 1746 bp, Chaetomium globosum CBS 148.51
  CDS (1)..(1746)
atgcagcgtgcgttgacaagagcctcggtctcttccccgcttggggccgccagagtccggtcgacccagcagctccgcttcgctcacaaggagctgaagttcggtgtcgagggccgtgccgctctcctcaacggtgtcgagaccctggccaaggccgtggccaccaccctcggccctaagggtcgcaacgtcctcatcgagtcaagcttcggctcgcccaagatcaccaaggcagatggtgtaacggtcgcgagggccatttccctcaaggacaagttcgagaacctcggtgctaagcttctggccgatgtcgcctccaagacgaacgaggttgccggtgacggtaccaccacggcgactgtgctcgcccgtgccatcttctccgagaccgtcaagaacgtggctgctggctgcaaccccatggatctccgccgtggtatccaggccgctgttgagtcggtcgtcgagtacctccagacccacaagcgcgacatcaccaccagcgccgagatcgcccaggtcgctaccatcagcgccaacggcgatgaacacattggcgccctgatcgccaacgccatggagaaggtcggcaaggagggtgtcatcaccgtcaaggagggcaagaccatgcaggacgagctctcggtcaccgagggcatgcgcttcgatcgcggtttcgtctccccctactttatcaccgacgccaaggcccagaaggttgagtttgagaagcctctgatcctcatgtcggagcagaagatctcggccgccgtggacatcatccccgccctcgagatctccaacaagctccgccgccctctcgtcatcattgccgaggacttcgagggtgaggcccttgccgtctgcatcctcaacaagctccgtggccagctcgaggtcgccgccgtcaaggcccccggtttcggtgacaaccgcaagtccatccttggcgatcttgccgtcctaaccaacggcaccgtcttcaccaacgagctggacgtcaagctcgagaagctcacccctgacatgctcggcagcaccggctccatcaccatcaccaaggaggacactatcatcctcaacggcgagggtagcaaggacgccatcgctcagcgctgcgagcagatccgcggcgtcatggccgaccccaccacctccgagtacgagaaggagaagctccaggagcgtcttgccaagctttctggcggtgttgccgtcatcaaggtcggcggctcctccgaggttgaggtgggcgagaagaaggaccgcttcgttgatgccctcaacgccacccgtgccgccgtggaggagggtatcctccccggtggtggcactgcgctcatcaaggcctcatgcaacgctctcaacgacctgaagcctgccaacttcgaccaacagcttggcgttagcatcgtcaagaacgccatcacccgcccggcgcggaccattgtcgagaacgccggcctcgagggctctgtggtcattggcaagctcagcgatgagtatgccggcgatttcaacaagggctttaacagcgccaagggcgaatacgtcgacatgatcgaggccggtattcttgaccccctcaaggtcgtccggactggcctgatcgacgccagcggtgtcgcctcgctcctcggcaccaccgaggtggccatcgtcgaggctgctgatgacaagcccatcggcggtggcggcatgcccggtggcatgggtggcatgggcggtatgggcggcatgatgtaa

SEQ ID NO: 8995 - protein, 581 aa, Chaetomium globosum CBS 148.51
MQRALTRASVSSPLGAARVRSTQQLRFAHKELKFGVEGRAALLNGVETLAKAVATTLGPKGRNVLIESSFGSPKITKADGVTVARAISLKDKFENLGAKLLADVASKTNEVAGDGTTTATVLARAIFSETVKNVAAGCNPMDLRRGIQAAVESVVEYLQTHKRDITTSAEIAQVATISANGDEHIGALIANAMEKVGKEGVITVKEGKTMQDELSVTEGMRFDRGFVSPYFITDAKAQKVEFEKPLILMSEQKISAAVDIIPALEISNKLRRPLVIIAEDFEGEALAVCILNKLRGQLEVAAVKAPGFGDNRKSILGDLAVLTNGTVFTNELDVKLEKLTPDMLGSTGSITITKEDTIILNGEGSKDAIAQRCEQIRGVMADPTTSEYEKEKLQERLAKLSGGVAVIKVGGSSEVEVGEKKDRFVDALNATRAAVEEGILPGGGTALIKASCNALNDLKPANFDQQLGVSIVKNAITRPARTIVENAGLEGSVVIGKLSDEYAGDFNKGFNSAKGEYVDMIEAGILDPLKVVRTGLIDASGVASLLGTTEVAIVEAADDKPIGGGGMPGGMGGMGGMGGMM

SEQ ID NO: 8996 - DNA, 1785 bp, Coccidioides immitis RS
  CDS (1)..(1785)
atgcatagagctctctcagcttcctcaagggcttcggtcctttcttccgctgcttccacccgcggacagctatctcatttcagacctgccttgtcctccgggctgaacctccagcagcaaagatatgctcacaaggaactcaaattcggcgttgaaggacgtgcagccctcctcaagggtgtcgacacgctcgccaaagctgttaccaccacattgggtcccaagggaaggaatgttttgattgagtcttcatacggctccccaaaaattactaaagacggtgtcacggttgccaaagctatctcattgcaagacaaattcgagaatctcggcgcccgtcttctccaagacgttgcttccaagacaaacgaaattgctggtgatggaacgacaacggcgaccgtgcttgcacgtgctatcttttccgagaccgtcaagaatgttgctgctggctgcaacccaatggacttgagaagaggcattcaggccgccgttgactccgtcgtcgaatatcttcaagcaaataagagagagatcaccaccagcgaagagattgcgcaggtggctacgatctctgctaacggggacacccatatcggaaagttgatctccaacgcaatggaaagagttggaaaggaaggtgtgattacggttaaggacggaaagaccattgaagacgagcttgaggttaccgagggcatgcgatttgaccgcggctatgtttccccttactttatcaccgataccaaaactcagaaggttgagtttgaaaagcctcttattctcctctctgagaagaagatctctgccgtccaggatattatccccgcccttgaggcctctaccaccctccgccgaccgctagttatcattgctgaggatattgagggcgaggctctcgcagtctgcattctcaataaactgcgtggccaacttcaagtcgctgccgtcaaggctcctggcttcggtgataaccgcaagagcatccttggtgacattggtatcttgaccaactctaccgtgttcacagatgagcttgatatgaagcttgacaaggctaccccagatatgctcggctccacgggctccatcaccatcaccaaggaggacactattatcctgaacggtgagggcagcaaggatgccattgctcagaggtgcgagcaaattagaagcatcattgctgatcctgccacctccgaatacgagaaggagaagcttcaggagcgtctagctaaactctctggtggtgttgctgtcatcaaggtcggcggtgcttctgaagttgaagttggagagaagaaggaccgtgttgttgatgccctgaacgctacccgcgctgctgttgaggagggtattctccctggcggaggtaccgctttgctcaaggcttccgccaatggtttgaaagacgtcaagccagccaactttgaccagcagctgggtgtcagcattgttaagagtgccatccagagacctgctcgtactattgttgagaatgctgggttggagggtagcgtcattgtgggcaagcttaccgatgaatttgcgggagatttcaacagaggcttcgatagcgccaagggagagtacgttgatatgattggggctggaattgtcgacccattgaaggttgttcgcaccgctctcgtcgatgccagtggtgttgcatccctactcggtaccaccgaggtcgcaatcgttgaagctcctgaggagaaggcgcctgctgctgctggtatgggcggcatgggcggcatgggaggaatgggcggtatgtactaa

SEQ ID NO: 8997 - protein, 594 aa, Coccidioides immitis RS
MHRALSASSRASVLSSAASTRGQLSHFRPALSSGLNLQQQRYAHKELKFGVEGRAALLKGVDTLAKAVTTTLGPKGRNVLIESSYGSPKITKDGVTVAKAISLQDKFENLGARLLQDVASKTNEIAGDGTTTATVLARAIFSETVKNVAAGCNPMDLRRGIQAAVDSVVEYLQANKREITTSEEIAQVATISANGDTHIGKLISNAMERVGKEGVITVKDGKTIEDELEVTEGMRFDRGYVSPYFITDTKTQKVEFEKPLILLSEKKISAVQDIIPALEASTTLRRPLVIIAEDIEGEALAVCILNKLRGQLQVAAVKAPGFGDNRKSILGDIGILTNSTVFTDELDMKLDKATPDMLGSTGSITITKEDTIILNGEGSKDAIAQRCEQIRSIIADPATSEYEKEKLQERLAKLSGGVAVIKVGGASEVEVGEKKDRVVDALNATRAAVEEGILPGGGTALLKASANGLKDVKPANFDQQLGVSIVKSAIQRPARTIVENAGLEGSVIVGKLTDEFAGDFNRGFDSAKGEYVDMIGAGIVDPLKVVRTALVDASGVASLLGTTEVAIVEAPEEKAPAAAGMGGMGGMGGMGGMY

SEQ ID NO: 8998 - DNA, 1767 bp, Neosartorya fischeri NRRL 181
  CDS (1)..(1767)
atgcagagagctctttcttccaggacgtctgtcctctccgctgcctccaagcgggctgctttcaccaagcccgctggccttaacctgcagcagcagcgttttgcccacaaggagctcaagttcggtgtcgaagcccgtgctcagctcctcaagggtgttgacactctggccaaggccgtgacctcgactcttggtcctaagggtcgtaacgtccttatcgagtctccctatggctctcctaagatcaccaaggatggtgtctctgttgccaaggccatcactctccaagacaagttcgagaacctcggtgctcgcctcctccaggatgtcgcttctaagaccaacgagattgctggtgacggtaccaccaccgctaccgtccttgcccgtgccatcttctctgagaccgtgaagaacgttgctgctggctgcaaccccatggatctgcgccgtggtatccaggctgctgttgatgctgtcgtcgactacctccagaagaacaagcgtgacattaccaccggtgaggagatcgctcaggttgctactatctccgccaacggtgacacccacatcggtaagctgatctccaccgccatggagcgtgtcggcaaggagggtgtcatcactgtcaaggagggcaagaccattgaggatgagctggaggtcactgagggtatgcgcttcgaccgtggatacacctccccctacttcatcaccgatgccaagtcccagaaggttgagttcgagaagcccctgattctgctgtctgagaagaagatctctgccgttcaggacatcatccccgcccttgaggcctccaccaccctccgccgccccctggtcatcatcgccgaggacattgagggtgaggctctcgccgtctgcattctgaacaagctccgtggccagctgcaggtcgctgccgtcaaggctcccggattcggtgacaaccgcaagagcatccttggcgatcttgccgtccttaccaacggtaccgtcttcactgatgagctcgacatcaagctcgagaagctcacccccgacatgcttggttccaccggcgccatcaccatcaccaaggaggataccatcatcctgaacggtgagggcagcaaggacgccattgcccagcgctgcgagcagatccgcggtgtcatggcggaccccagcacctctgaatacgagaaggagaagctccaggagcgtctggccaagctctctggcggtgttgccgtcatcaaggtcggtggtgcctccgaggttgaggtcggtgagaagaaggaccgtgttgtcgatgctctcaacgctacccgtgctgctgttgaggagggtatcctccccggtggtggtaccgcccttctcaaggccgccgccaacggccttgacaatgtcaagcccgagaacttcgaccagcaactcggtgtcagcatcatcaagaacgccatcacccgccccgctcgcaccattgttgagaacgccggcctcgagggcagcgtcattgtcggcaagctgaccgacgagttcgccaaggacttcaaccgcggtttcgacagctccaagggcgagtacgtcgacatgatctccagcggtatcctcgatcctctcaaggtcgttcgcaccgctctgctcgatgccagcggtgtcgcctccctgctcggtaccaccgaggttgccatcgttgaggcccctgaggagaagggccctgctgctcccggcggcatgggtggtatgggcggtatgggcggcatgggtggcggcatgttctaa

SEQ ID NO: 8999 - protein, 588 aa, Neosartorya fischeri NRRL 181
MQRALSSRTSVLSAASKRAAFTKPAGLNLQQQRFAHKELKFGVEARAQLLKGVDTLAKAVTSTLGPKGRNVLIESPYGSPKITKDGVSVAKAITLQDKFENLGARLLQDVASKTNEIAGDGTTTATVLARAIFSETVKNVAAGCNPMDLRRGIQAAVDAVVDYLQKNKRDITTGEEIAQVATISANGDTHIGKLISTAMERVGKEGVITVKEGKTIEDELEVTEGMRFDRGYTSPYFITDAKSQKVEFEKPLILLSEKKISAVQDIIPALEASTTLRRPLVIIAEDIEGEALAVCILNKLRGQLQVAAVKAPGFGDNRKSILGDLAVLTNGTVFTDELDIKLEKLTPDMLGSTGAITITKEDTIILNGEGSKDAIAQRCEQIRGVMADPSTSEYEKEKLQERLAKLSGGVAVIKVGGASEVEVGEKKDRVVDALNATRAAVEEGILPGGGTALLKAAANGLDNVKPENFDQQLGVSIIKNAITRPARTIVENAGLEGSVIVGKLTDEFAKDFNRGFDSSKGEYVDMISSGILDPLKVVRTALLDASGVASLLGTTEVAIVEAPEEKGPAAPGGMGGMGGMGGMGGGMF

SEQ ID NO: 9000 - DNA, 1776 bp, Aspergillus clavatus NRRL 1
  CDS (1)..(1776)
atgcagagagctctctcttcccggacgtctgtcctttccgctgcttccaagcgggctgctttctccaagcccgctggtctgaaccttcagcagcagcgtttcgctcacaaggagctcaagttcggtgttgatgctcgcgctcagctcctgaagggtgttgacaccctcgccaaggccgtcacatccactcttggtcctaagggtcgcaatgtcctgatcgagtccccctacggttcccccaagatcaccaaggatggtgtctctgttgccaaggctatcactcttcaagacaagttcgagaacctcggtgctcgcctcctccaggatgttgcttccaagaccaacgagactgctggtgacggtactaccaccgcgaccgtccttgcccgtgccatcttctccgagaccgtcaagaacgtcgccgctggctgcaaccccatggatctgcgccgtggtattcaggctgctgtcgacgccgttgtcgactacctccagaagagcaagcgtgacatcaccactggtgaggagatcgctcaggtcgctaccatctctgccaacggcgacacccacgtcggtaagctgatctccactgccatggagagagttggcaaggagggtgtcattaccgtcaaggagggtaagacccttgaggacgagcttgaggtcaccgagggtatgcgcttcgaccgcggttacacttccccctacttcatcaccgacgccaaggcccaaaaggtcgagttcgagaagcctctgatcctgctctccgagaagaagatctccgccgtccaggacatcatccccgcccttgaggcctccaccactcttcgccgccctctggtcatcattgccgaggacatcgagggcgaggctctcgccgtctgcatcctgaacaagctccgtggccagctccaggttgctgctgttaaggctcccggtttcggtgacaaccgcaagagcatccttggtgatcttgccgtcctgaccaacggtaccgtcttcactgacgagctcgacatcaagctcgagaagctcacccccgacatgctcggctccactggcgccatcaccatcaccaaggaggacaccatcatcctgaacggtgagggcagcaaggacgccattgcccagcgctgcgagcagatccgtggcgtcatggccgaccccaccacctccgagtacgagaaggagaagcttcaggagcgtctcgctaagctctccggcggtgttgccgtcatcaaggttggcggtgcctccgaggttgaggttggtgagaagaaggaccgtgttgtcgacgcgctcaacgccacccgtgctgccgttgaggagggtatcctccccggtggtggtaccgctctcctcaaggcctccgctaacggtcttgagggtgtcaagcccgagaacttcgaccagcagctcggtgtcagcatcatcaagaaagctatcacccgtcctgctcgcactatcgtcgagaacgccggtctggagggtagcgtcattgtcggcaagctgactgatgagttctccaaggacttcaaccgcggcttcgacagctccaagagcgagtacgtcgacatgatcgcctccggtatcgttgatcccctcaaggtcgtccgcaccgccctggttgatgccagtggcgtcgcctctctgctcggtaccaccgaggttgccattgttgaggctcccgaggagaagggccctgctgctcctggcggcatgggtggtatgggtggtatgggtggcatgggcggcatgggtggcggcatgttctaa

SEQ ID NO: 9001 - protein, 591 aa, Aspergillus clavatus NRRL 1
MQRALSSRTSVLSAASKRAAFSKPAGLNLQQQRFAHKELKFGVDARAQLLKGVDTLAKAVTSTLGPKGRNVLIESPYGSPKITKDGVSVAKAITLQDKFENLGARLLQDVASKTNETAGDGTTTATVLARAIFSETVKNVAAGCNPMDLRRGIQAAVDAVVDYLQKSKRDITTGEEIAQVATISANGDTHVGKLISTAMERVGKEGVITVKEGKTLEDELEVTEGMRFDRGYTSPYFITDAKAQKVEFEKPLILLSEKKISAVQDIIPALEASTTLRRPLVIIAEDIEGEALAVCILNKLRGQLQVAAVKAPGFGDNRKSILGDLAVLTNGTVFTDELDIKLEKLTPDMLGSTGAITITKEDTIILNGEGSKDAIAQRCEQIRGVMADPTTSEYEKEKLQERLAKLSGGVAVIKVGGASEVEVGEKKDRVVDALNATRAAVEEGILPGGGTALLKASANGLEGVKPENFDQQLGVSIIKKAITRPARTIVENAGLEGSVIVGKLTDEFSKDFNRGFDSSKSEYVDMIASGIVDPLKVVRTALVDASGVASLLGTTEVAIVEAPEEKGPAAPGGMGGMGGMGGMGGMGGGMF

SEQ ID NO: 9002 - DNA, 1710 bp, Pichia stipitis CBS 6054
  CDS (1)..(1710): transl_table=12
atgttgagagccagtcgtccaaccgtgagaaacgctaccgtttcgtttgttcgtcatttgtcgcataaggaattgaagttcggagttgaaggaagagctgccttgttgaagggtgtcaacactttggccgatgccgtttccgtgactttaggaccaaagggtcgtaatgttttgattgaacaacagtttggtgctcctaagatcaccaaggatggtgtcactgtggccagatcaattaccttgcaagacaagtttgaagatatgggagccaagttgttgcaagaagtcgcttccaagaccaacgaaagcgccggtgacggtaccacttctgctaccatcttgggtagatctatctttaccgaatccgttaagaacgttgccgctggctgtaacccaatggacttgagaagaggatctcaggccgctgtggaggctgtggttaacttcttgcaacagaacaagaaggaaatcaccacttctgaggaaatcgctcaggttgccaccatttctgctaatggtgatgaacatatcggtaacttgttggcttcggctatggaaaaggttggtaaggaaggtgtcatcaccgtcaaggaaggtaagactttggaagacgagttggaagtcaccgaaggtatgagattcgaccgtggtttcatttctccttacttcatcaccaacaccaagtccggcaaagtcgaattcgaaaaccctttgatcttgttgtcggaaaagaagatctcttccatccaagacatcttgccatctttggaattgtccaaccaaaccagaagacccttgttaattctcgctgaagacgtcgatggtgaggccttggctgcttgtatcttgaacaagttgagaggacaagttcaggtctgtgccgtcaaggctcctggctttggtgacaacagaaagaacactttaggtgacattgcaatcctcactggtggtactgttttcactgaagaattggacatcaaaccagaaaacgccaccgtcgacttgttgggttctgctggttctattactgtcaccaaggaagacaccgttgtcttaaacggtgaaggttcaaaggacaacattgccgctagatgtgaacagatcagagtctctgtggaagatgctcttaccaccgaatacgaaaaggaaaagttgcaagaaagattggccaagttgtctggcggtgttgctgtcatcaaggtcgggggttcttctgaagtcgaagtaggtgaaaagaaggaccgttatgacgatgccttgaacgctaccagagctgctgttcaggaaggtatcttgccaggtggaggtaccgccttgatcaaggcttcgagaatcttggacgaagtcaaggctaattctgctaactttgaccaaaagttgggtgttgaagctatcaaggctgccatcactaagccagccaagagaatcatcgaaaacgctggtgaagaatcggctgttatcgtcggtaagatctatgacgacttatccttcaacaacggttacgattccgctaagggcgagttcactgacatgattgctgctggtatcattgatccattcaaggttgtcaagaacggtttggttgacgccagcggtgttgcttctttgttggccactaccgaatgtgctattgtcgatgctccagaaccaaagggtgctccagccgctccaccagccggtggtatgggtggtatgccaggtatgttctaa

SEQ ID NO: 9003 - protein, 569 aa, Pichia stipitis CBS 6054
MLRASRPTVRNATVSFVRHLSHKELKFGVEGRAALLKGVNTLADAVSVTLGPKGRNVLIEQQFGAPKITKDGVTVARSITLQDKFEDMGAKLLQEVASKTNESAGDGTTSATILGRSIFTESVKNVAAGCNPMDLRRGSQAAVEAVVNFLQQNKKEITTSEEIAQVATISANGDEHIGNLLASAMEKVGKEGVITVKEGKTLEDELEVTEGMRFDRGFISPYFITNTKSGKVEFENPLILLSEKKISSIQDILPSLELSNQTRRPLLILAEDVDGEALAACILNKLRGQVQVCAVKAPGFGDNRKNTLGDIAILTGGTVFTEELDIKPENATVDLLGSAGSITVTKEDTVVLNGEGSKDNIAARCEQIRVSVEDALTTEYEKEKLQERLAKLSGGVAVIKVGGSSEVEVGEKKDRYDDALNATRAAVQEGILPGGGTALIKASRILDEVKANSANFDQKLGVEAIKAAITKPAKRIIENAGEESAVIVGKIYDDLSFNNGYDSAKGEFTDMIAAGIIDPFKVVKNGLVDASGVASLLATTECAIVDAPEPKGAPAAPPAGGMGGMPGMF

SEQ ID NO: 9004 - DNA, 1764 bp, Aspergillus niger CBS 513.88
  CDS (1)..(1764)
atgcaacgcgctctctcttccaggacttccgtcctgtccgccgctgccaagcgtgcttctttccagagatcccccgtcagcctgcagcagcagcgttttgctcacaaggagctcaagttcggcgttgaggctcgtgcccagctcctcaagggtgtcgacactcttgccaaggccgtcacttctactcttggacccaagggtcgcaatgtcctgatcgagtccccctacggttcccccaagatcaccaaggacggtgttagcgttgccaaggccattcagctccaggacaagttcgagaacctcggtgctcgtcttctccaggatgtcgcttccaagaccaacgaacttgctggtgacggtaccaccactgccaccgtccttgcccgtgccatcttctccgagaccgtgaagaacgttgccgctggctgcaaccccatggacctccgtcgtggtatccaggctgccgttgacgctgttgtcgactacctccagcagaacaagcgtgacatcaccaccggtgaggagatcgcccaggtcgctaccatctccgccaacggcgacacccacgttggtaagctcatctccaccgccatggagagagttggcaaggagggtgttatcaccgtcaaggagggcaagaccctcgaggatgagcttgaggttaccgagggtatgcgcttcgaccgtggatacacttccccctacttcatcaccgacgccaagtcccagaaggttgaattcgagaagcccctgatcctgctttctgagaagaagatctccgccgttcaggacatcatccctgcccttgaggcctccaccaccctccgtcgtccccttgtcatcattgctgaggacattgagggtgaggctctcgccgtctgcatcctgaacaagctccgtggccagctccaggttgccgctgtcaaggcccctggcttcggtgacaaccgcaagagcatccttggtgatcttgccgttctcaccaacggtactgtcttcagcgatgagcttgacatcaagctcgagaagcttacccccgacatgctcggttccaccggtgccatcaccatcaccaaggaggacaccatcatcctcaacggtgagggcagcaaggacagcatctctcagcgctgcgagcagatccgtggtgtcatggctgaccccaccacctccgagtacgagaaggagaagctccaggagcgtctcgccaagctctctggcggtgttgccgtcatcaaggtcggtggtgcctccgaggttgaggtcggtgagaagaaggaccgtgttgtcgacgctctcaacgccactcgtgctgctgttgaggagggtatcctccccggtggtggtactgccctcctgaaggcctccgccaacggtcttagcaacgtccagaccgccaacttcgaccagcagctcggtgtcagcatcatcaagagcgccatcacccgccccgcccgcaccatcgtcgagaacgctggtctcgagggcagcgtcatcgttggcaagctcaccgatgacttcgccaaggacttcaaccgtggtttcgacagctccaagggcgagtacgtcgacatgatctccaccggtatcgtcgatcccctcaaggttgtccgcacctctctggttgacgccagcggtgttgcctccctcctcggtaccaccgaggttgccatcgttgaggcccctgaggagaagggccctgctcctgccggtggcatgggtggcatgggcggtatgggcggcatgggcggtggcatgttctaa

SEQ ID NO: 9005 - protein, 587 aa, Aspergillus niger CBS 513.88
MQRALSSRTSVLSAAAKRASFQRSPVSLQQQRFAHKELKFGVEARAQLLKGVDTLAKAVTSTLGPKGRNVLIESPYGSPKITKDGVSVAKAIQLQDKFENLGARLLQDVASKTNELAGDGTTTATVLARAIFSETVKNVAAGCNPMDLRRGIQAAVDAVVDYLQQNKRDITTGEEIAQVATISANGDTHVGKLISTAMERVGKEGVITVKEGKTLEDELEVTEGMRFDRGYTSPYFITDAKSQKVEFEKPLILLSEKKISAVQDIIPALEASTTLRRPLVIIAEDIEGEALAVCILNKLRGQLQVAAVKAPGFGDNRKSILGDLAVLTNGTVFSDELDIKLEKLTPDMLGSTGAITITKEDTIILNGEGSKDSISQRCEQIRGVMADPTTSEYEKEKLQERLAKLSGGVAVIKVGGASEVEVGEKKDRVVDALNATRAAVEEGILPGGGTALLKASANGLSNVQTANFDQQLGVSIIKSAITRPARTIVENAGLEGSVIVGKLTDDFAKDFNRGFDSSKGEYVDMISTGIVDPLKVVRTSLVDASGVASLLGTTEVAIVEAPEEKGPAPAGGMGGMGGMGGMGGGMF

SEQ ID NO: 9006 - DNA, 1785 bp, Ostreococcus lucimarinus CCE9901
  CDS (1)..(1785)
atgttcgccacgacgacgatgagcgccacggccgccactttttccgcgcgaacgcgcgtcgctgacggtaaaacgatcgccgtcaatgtgcgacgcgctggtggcgcgcgaacgcgcgcgccgttgagcgtggttgccgcggcgaagaatttgtacttcaacaaaaacgacgggtcggcgttgaagaagatgcaaaagggcgtcgataaactcgcgagcgtcgtgggcgtgacgctcggaccgaagggtcgtaacgtcgttttggagtccaagttcggttctccgaagattgtgaacgatggtgtgaccgtggccaaggaggttgacctcgaagacccggttgaaaacgtcggtgcgaagctcgtgagacaagcgtcgcaaaagacgaacgaccaagcaggcgacggcaccacgacggccaccgtgctctctgcggcgatgattgcggagggtatgaagattgtcatggctggtactaaccccgtgcagctcacgcgcggtatggacaagacggttaaggcgctcgttgaagttcttaaagggctctccaaggacgtcgccgacgaggaacttgcgaaggttgcctccatctccgccggcggtaacatggaagttggtgaaatgatcgccgccgccatggccaaggttggtcgcaagggtgtgatctctctcgaggaggcgcgatccgtcgacaacaacctgatcgtcgtcgaagggatgcaattcgatcgcggttacatctctccgtacttcgtcacggatcccgagcgcatgacgtgcgtgtacgatcaatgtaagttgctgctcgttgacaagaagattagcactgctcgcgacatgattggcatccttgaagccgcaattcagcaaggtttcccgctcatgatcatcgccgaagacatcgaacaagaagccctcgcgacgctcgtcgtgaacaaacttcgcggttcgctcaagatcaccgccatcaaggcgccaggtttcggcgagcgtaagagccaataccttgaagatatcgccatcctcaccggtggtaccgtcgtcaaggaagagctcggcttgagcttggacaagtgcggcgtcgaagtgctcggtaacgccgcgcgcgtcgaactcggcaaggagtctaccaccattgttggcgccggcgacaccgccgccgaagtggctgctcgcgtcaaacaaattaaccgcctcgtcgaagccaccgaagcagactacgagaaggagaagctcaacgaacgtgcggcgcgtctttcgggtggtgttgccattatccaagtcggtgctcaaactgagactgagctcaaggagaagaaacttcgtgtcgaggatgcgttgaacgccacgaaatccgccgtcgaagaaggcatcgtcattggcggtggttgcaccttcttgaagcttgcggcggctgtcgatgaaatcaaggcaaccttggagaacgacgagcaacgagtcggtgcggacatcatcaagcgtgctttgtcctacccgatccgtctcgtcgcgcacaacgccggtgtgaacggttccgtcgcgtgcgagaaagtcatgtcctctaaggacccgaactttggttacaacgcggcgactggggagtatgaggatctcatgaagggtggtgtgctcgatccgaccaaggtcattcgttgctctttggagaacgcttgctccgtcgcgaagatcttccttacttccgacgtggtggtgtgcgaaatcccggaggatgaagagcccgcagctggcggttcgccgatggacaactcgggctacggcaactaa

SEQ ID NO: 9007 - protein, 594 aa, Ostreococcus lucimarinus CCE9901
MFATTTMSATAATFSARTRVADGKTIAVNVRRAGGARTRAPLSVVAAAKNLYFNKNDGSALKKMQKGVDKLASVVGVTLGPKGRNVVLESKFGSPKIVNDGVTVAKEVDLEDPVENVGAKLVRQASQKTNDQAGDGTTTATVLSAAMIAEGMKIVMAGTNPVQLTRGMDKTVKALVEVLKGLSKDVADEELAKVASISAGGNMEVGEMIAAAMAKVGRKGVISLEEARSVDNNLIVVEGMQFDRGYISPYFVTDPERMTCVYDQCKLLLVDKKISTARDMIGILEAAIQQGFPLMIIAEDIEQEALATLVVNKLRGSLKITAIKAPGFGERKSQYLEDIAILTGGTVVKEELGLSLDKCGVEVLGNAARVELGKESTTIVGAGDTAAEVAARVKQINRLVEATEADYEKEKLNERAARLSGGVAIIQVGAQTETELKEKKLRVEDALNATKSAVEEGIVIGGGCTFLKLAAAVDEIKATLENDEQRVGADIIKRALSYPIRLVAHNAGVNGSVACEKVMSSKDPNFGYNAATGEYEDLMKGGVLDPTKVIRCSLENACSVAKIFLTSDVVVCEIPEDEEPAAGGSPMDNSGYGN

SEQ ID NO: 9008 - DNA, 1716 bp, Pichia guilliermondii ATCC 6260
  CDS (1)..(1716): transl_table=12
atgttgagtgcaagatctagtttaagaaaaaatgccatttctttagtgcgccactattcgcacaaggaattgaagttcggtgtggagggccgtgctgcactcttaaaaggtgtcaacaccttggctgatgcagtttctgtaaccttgggtccaaagggccggaatgtgttgattgagcaacaattcggttctcccaaaatcaccaaggatggtgtgactgtggccaagtccatcactttggaggacaaattcgaggacatgggtgccaagttgttacaggaggtggcgtcaaagaccaatgagtctgctggagatggtactacttctgctactgttttgggaagatccatctttactgaatcggtgaagaatgttgctgctggatgtaacccaatggacttgagaagaggatcgcaagctgctgtggaagcggttgttaactttttgcagcaaaacaagaaggaaattaccacttctgaggagattgctcaggtggctaccatttctgccaatggagacaagcacattggtgacttgttggcgtctgccatggaaaaggttggtaaggaaggtgtcatcaccgttaaggagggtaagactttggaagacgaattggaagttactgaaggtatgagatttgaccgtggttacatctctccttacttcatcaccaacaccaagctgggcaaagttgaatttgaaaacccattgattcttttgtctgagaagaagatctcttctatccaagacatcttgccctctttggagttgctgaaccagtctcgtagacctcttttgattctcgctgaggacatcgacggtgaggctttggctgcttgtatcctcaacaaattgagaggtcaagtccaagtgtgtgccgttaaggccccagggttcggtgacaacagaaagaacattttgggtgatattgccatcttgtctggtggtactgtcttcactgaggagttggacatcaagccagagaatgccactttggacttgttgggatcgtgtggctccatcaccatcaccaaggacgacacggttgttttgaacggtgaaggttcgaaagacaacatccagtccagatgtgaacaaattagaaccaccattgacgacccacaaaccaccgagtacgagaaggaaaagttgcaagaacgtttagccaagttgtccggaggtgttgctgttgttaaggtgggtggtacttccgaagtggaagttggtgagaagaaggaccgttacgacgatgccttgaatgccaccagagctgctgtgcaagacggtattttgcccggtggtggtactgccttgatcaaggcttccaagattttggatgccgtcaaggccgaagctgctaactttgaccaaaagttgggtgtggacattattaaggccgctattaccaagcctgccaagcgtatcattgagaatgctggtgaagaaggctccgtcattgtgggtaagatcttcgataacgactcgttcaacattggttacgactcagccaagggtgagtttaccgatatgattgctgctggtatcattgatcctttcaaggtggtcaagaacggtttggtagatgccagtggtgtagcctctcttttggctactactgagtgtgctgtcgtcgatgctccacaacctaagggacccgctgctccacctgccggtggcatgggtggcatgggcggtatgccaggaatgggcttctaa

SEQ ID NO: 9009 - protein, 571 aa, Pichia guilliermondii ATCC 6260
MLSARSSLRKNAISLVRHYSHKELKFGVEGRAALLKGVNTLADAVSVTLGPKGRNVLIEQQFGSPKITKDGVTVAKSITLEDKFEDMGAKLLQEVASKTNESAGDGTTSATVLGRSIFTESVKNVAAGCNPMDLRRGSQAAVEAVVNFLQQNKKEITTSEEIAQVATISANGDKHIGDLLASAMEKVGKEGVITVKEGKTLEDELEVTEGMRFDRGYISPYFITNTKLGKVEFENPLILLSEKKISSIQDILPSLELLNQSRRPLLILAEDIDGEALAACILNKLRGQVQVCAVKAPGFGDNRKNILGDIAILSGGTVFTEELDIKPENATLDLLGSCGSITITKDDTVVLNGEGSKDNIQSRCEQIRTTIDDPQTTEYEKEKLQERLAKLSGGVAVVKVGGTSEVEVGEKKDRYDDALNATRAAVQDGILPGGGTALIKASKILDAVKAEAANFDQKLGVDIIKAAITKPAKRIIENAGEEGSVIVGKIFDNDSFNIGYDSAKGEFTDMIAAGIIDPFKVVKNGLVDASGVASLLATTECAVVDAPQPKGPAAPPAGGMGGMGGMPGMGF

SEQ ID NO: 9010 - DNA, 1773 bp, Ajellomyces capsulatus NAm1
  CDS (1)..(1773)
atgcagcgtgctctttcgtctacctccagggcttcggtcctttcctctgcccccacacgcgcgcctgtgtctcgatttcgttccgctggtttgagccttcagcagcagagattcgcccataaggaactcaaattcggcgtagaaggtcgtgctgcactcctcaagggtattgacactcttgcaaaggctgtttccacaacactcggtcccaagggaagaaatgtcttgattgagtcttcctacggttcccccaagatcacgaaggacggtgtcactgttgcgaaggcagttacccttcaagacaagttcgagaatttgggtgctcgtctgctacaggacgtcgcgtcgaagactaacgaggtcgcaggcgacggaactaccactgcaactgtccttgctcgggcaattttctccgaaactgtcaagaatgtcgcggcgggatgcaacccaatggacctacggaggggcatccaggctgccgttgaggctgttgttgagtacctccaggcgaacaagagggatatcaccacaacggaggaaattgcccaggttgctactatttctgccaatggcgatacccatgttggcaagctgatctccaacgccatggagaaagtcggaaaggaaggtgtgattactgtcaaggacgggaagaccatcgaggatgagctggaagtcactgagggcatgcgattcgaccgcggatacgtctcgccttacttcatcaccgatactaaggcacagaaagttgagttcgagaagcccctgattcttctttctgagaagaaaatctccgccgtccaggacatcatccccgcccttgaagcctccaccactctgcgacgacccctcgtcatcatcgctgaagacattgagggtgaggctcttgctgtctgcatcctcaacaagctacgcggccaactgcaggtcgccgccgtcaaggctcccggcttcggcgacaaccgcaagagcatcctcggcgacatcggcattctcaccaatgctaccgtcttcaccgacgagctcgatatgaaacttgagaaggcgactgcggatatgctcggctccactggctccatcaccatcactaaggaagacaccataatcctcaacggcgatggcagcaaggattccatcgcacagcgctgtgaacagatccgtggcgtcatcgccgaccccaccacctccgactacgagaaggagaaactccaagaacgcctcgccaaactctccggcggtgttgctgttatcaaagttggcggtgcctctgaggttgaagtaggcgaaaagaaggaccgtgtcgttgacgccctcaatgccactcgcgccgctgttgaggaaggtatccttccaggtggtggcaccgctctcctgaaagccgcggctaacggcctcgcgtccgtgaagccgaccaacttcgaccagcagcttggtgtcagcatcgtcaagtccgccatcactcgccccgcacgcaccatcgtggagaatgcggggttggaagggagtgtcattgtcggcaagctgaccgatgagcacgccagcgacttcaataggggcttcgatagcgccaagggcgagtatgtcgatatgattgcttctggtattgttgatccgctcaaagttgttcgtaccgcgcttgtggatgcgagcggcgtcgcgtcgctacttggtaccactgaggtggctattgttgaggcgccagaggagaagggccctgctggacctcctggtggtatgggcggcatgggcggcatgggtggtggcatgttctaa

SEQ ID NO: 9011 - protein, 590 aa, Ajellomyces capsulatus NAm1
MQRALSSTSRASVLSSAPTRAPVSRFRSAGLSLQQQRFAHKELKFGVEGRAALLKGIDTLAKAVSTTLGPKGRNVLIESSYGSPKITKDGVTVAKAVTLQDKFENLGARLLQDVASKTNEVAGDGTTTATVLARAIFSETVKNVAAGCNPMDLRRGIQAAVEAVVEYLQANKRDITTTEEIAQVATISANGDTHVGKLISNAMEKVGKEGVITVKDGKTIEDELEVTEGMRFDRGYVSPYFITDTKAQKVEFEKPLILLSEKKISAVQDIIPALEASTTLRRPLVIIAEDIEGEALAVCILNKLRGQLQVAAVKAPGFGDNRKSILGDIGILTNATVFTDELDMKLEKATADMLGSTGSITITKEDTIILNGDGSKDSIAQRCEQIRGVIADPTTSDYEKEKLQERLAKLSGGVAVIKVGGASEVEVGEKKDRVVDALNATRAAVEEGILPGGGTALLKAAANGLASVKPTNFDQQLGVSIVKSAITRPARTIVENAGLEGSVIVGKLTDEHASDFNRGFDSAKGEYVDMIASGIVDPLKVVRTALVDASGVASLLGTTEVAIVEAPEEKGPAGPPGGMGGMGGMGGGMF

SEQ ID NO: 9012 - DNA, 1749 bp, Botryotinia fuckeliana B05.10
  CDS (1)..(1749)
atgcaacgtgctttgagttctagagcaagagcttcgatcctgaacggatcgacagcttcaaagcttcgtcctttacaacaattgagatttgcccacaaggagctcaaattcggtgttgagggcagagcagctcttcttgctggtgttgagactttggcaaaagctgttgctacaaccttgggtcccaaaggccgaaatgttcttattgagtcagcatatggctccccaaagatcactaaagatggtgtaaccgttgccagagctatttccctcaaggacaaattcgagaacctcggtgctagacttatccaagatgttgcctcgaaaaccaacgagaccgctggtgatggaaccacaaccgctactgtccttgctaaatctattttctccgagaccgtaaagaacgtcgccgcaggatgcaacccaatggacttgcgcagaggtacccaagctgccgtggaggccgttgttgagtttttgcaaaagaacaagcgtgatatcacaacaagcgaggaaatcgcacaagttgcgactatcagtgcaaacggtgatacccacatcggaaaattgattgccaacgctatggaaaaggttggaaaggaaggtgttatcacagttaaggaaggaaagaccatggaggacgaactcgatattaccgagggaatgagatttgaccgcggttatgtttccccatacttcatcaccgataccaagtcgcaaaaggtggaattcgagaagccattgattctcctttctgagaagaagatttcaaacgtccaagatattatcccagcacttgaggcgtctactcaacttcgtcgtcctttggtcatcattgctgaagatatcgatggagaagctctcgcagtatgcattcttaacaagctccgtggtcaactccaagttgccgctgtcaaggcccccggtttcggtgataaccgaaagtccatcctcggcgatctcggtatcttgaccaatgctaccgtcttcactgacgagcttgatctcaagctcgagaaggctaccgcagacatgctcggtaccactggatccatcaccatcaccaaggaggataccatcatcttgaacggtgagggaagcaaggatgccattgctcagcgatgcgagcaaatccgaggtgtcatgaacgaccctaccacatccgattacgagaaggagaagctccaagagcgtcttgctaagctttctggtggtgtagccgttatcaaggtcggtggcgcatccgaggtcgaggttggtgagaagaaggaccgattcgttgatgccctcaacgctactcgtgccgctgttgaagaaggtatcctcccaggtggtggaactgctctcctcaaggctgctggtcaagctcttggaggtcttaagcctgccaacttcgaccaacaacttggtattaacattatcaagagcgctatcaccaaaccagcccgcactatcgttgagaacgctggtactgaaggatcggttgtcgttggtaagctcatggatgaatttggatccgacttcaacaagggattcaacagcgcaactggagagtacgttgacatgattgctgctggtattgttgatccattcaaggttgtccgcactggcttggttgatgccagcggtgttgcctcattattgggtaccactgaagttgctattgtcgaggcaccagaagagaagggcccaccagctggtggtatgggtggcatgggaggaatgggcggtatgggaggaatgatgtaa

SEQ ID NO: 9013 - protein, 582 aa, Botryotinia fuckeliana B05.10
MQRALSSRARASILNGSTASKLRPLQQLRFAHKELKFGVEGRAALLAGVETLAKAVATTLGPKGRNVLIESAYGSPKITKDGVTVARAISLKDKFENLGARLIQDVASKTNETAGDGTTTATVLAKSIFSETVKNVAAGCNPMDLRRGTQAAVEAVVEFLQKNKRDITTSEEIAQVATISANGDTHIGKLIANAMEKVGKEGVITVKEGKTMEDELDITEGMRFDRGYVSPYFITDTKSQKVEFEKPLILLSEKKISNVQDIIPALEASTQLRRPLVIIAEDIDGEALAVCILNKLRGQLQVAAVKAPGFGDNRKSILGDLGILTNATVFTDELDLKLEKATADMLGTTGSITITKEDTIILNGEGSKDAIAQRCEQIRGVMNDPTTSDYEKEKLQERLAKLSGGVAVIKVGGASEVEVGEKKDRFVDALNATRAAVEEGILPGGGTALLKAAGQALGGLKPANFDQQLGINIIKSAITKPARTIVENAGTEGSVVVGKLMDEFGSDFNKGFNSATGEYVDMIAAGIVDPFKVVRTGLVDASGVASLLGTTEVAIVEAPEEKGPPAGGMGGMGGMGGMGGMM

SEQ ID NO: 9014 - DNA, 1740 bp, Sclerotinia sclerotiorum 1980
  CDS (1)..(1740)
atgcaacgagctttgagttctagagctagagcttcggtccttaccggatcgacagcttcaaagcttcgtcctttacaacaattgagattcgcccataaggagctcaaattcggtgttgaaggcagagcagctcttttggctggtgtggagactttagcaaaggctgttgccacaaccctaggacccaaaggacgaaatgttttgattgagtcagcatatggctccccaaagatcactaaagatggtgtaactgttgctagagcgattactctcaaggataaattcgagaatctcggtgctagacttattcaagatgttgcctcaaaaaccaacgagacagctggtgatggaaccacaaccgcaactgtccttgccaaatctatcttctccgagactgtaaagaacgttgctgcaggatgcaacccaatggacttgcgcaggggtacacaggctgctgtagaagctgttgttgagtttttgcaaaagaacaaacgtgatatcacgaccagcgaggaaattgcacaagtcgcaactatcagtgcaaatggcgatacccacattggaaaattgattgccaacgccatggagaaggttggaaaggaaggtgtaatcacagttaaggaaggaaagaccatggaagatgaactcgacattaccgagggaatgagatttgaccgcggttacgtctcgccatacttcatcaccgacaccaagtcgcaaaaagtggagttcgagaagccattgattctcctctctgagaagaagatctcaaacgttcaagacattatcccagcacttgaggcatctactcaacttcgtcgtcctttggtcatcattgctgaggatattgatggagaggcactcgctgtgtgcattctcaacaagctccgtggtcaactccaagttgcagctgtcaaggcacccggcttcggcgacaaccgaaagtccattcttggtgatcttggtatcttaaccaatgccaccgtctttactgatgagcttgatctcaagctcgagaaggctacagcagatatgctcggtaccactggatctatcactattaccaaggaagatactatcattttgaacggagagggtagcaaggatgccattgcccaacgatgcgagcaaattcgaggtgttatgaatgaccctgccacctcggactacgagaaagagaagctccaagagcgtcttgccaagctctctggtggtgtagctgttatcaaggtcggtggtgcatccgaggttgaggtgggtgagaagaaggaccgattcgttgatgctctcaatgctactcgtgccgctgttgaggagggcatccttccaggtggtggaactgctctcctcaaggctgctggtcaagctcttggtggtctcaagcctgccaactttgaccaacaactcggtatcaatattatcaagagcgctatcaccaaaccagcacgcactattgttgagaacgccggaacagaaggatcagtagtagttggtaaactcatggatgaatttggatccgacttcaacaagggattcaacagtgctactggagaatacgttgatatgatcgctgctggtatcgttgatcctttcaaggtcgtccgcactggtttggttgatgctagtggtgttgcctcattgttaggcaccactgaggttgccattgtcgaagcaccagaagagaagggacccccagccggcggtatgggtggcatgggaggaatgggaggaatgggttag

SEQ ID NO: 9015 - protein, 579 aa, Sclerotinia sclerotiorum 1980
MQRALSSRARASVLTGSTASKLRPLQQLRFAHKELKFGVEGRAALLAGVETLAKAVATTLGPKGRNVLIESAYGSPKITKDGVTVARAITLKDKFENLGARLIQDVASKTNETAGDGTTTATVLAKSIFSETVKNVAAGCNPMDLRRGTQAAVEAVVEFLQKNKRDITTSEEIAQVATISANGDTHIGKLIANAMEKVGKEGVITVKEGKTMEDELDITEGMRFDRGYVSPYFITDTKSQKVEFEKPLILLSEKKISNVQDIIPALEASTQLRRPLVIIAEDIDGEALAVCILNKLRGQLQVAAVKAPGFGDNRKSILGDLGILTNATVFTDELDLKLEKATADMLGTTGSITITKEDTIILNGEGSKDAIAQRCEQIRGVMNDPATSDYEKEKLQERLAKLSGGVAVIKVGGASEVEVGEKKDRFVDALNATRAAVEEGILPGGGTALLKAAGQALGGLKPANFDQQLGINIIKSAITKPARTIVENAGTEGSVVVGKLMDEFGSDFNKGFNSATGEYVDMIAAGIVDPFKVVRTGLVDASGVASLLGTTEVAIVEAPEEKGPPAGGMGGMGGMGGMG

SEQ ID NO: 9016 - DNA, 1719 bp, Nasonia vitripennis
  CDS (1)..(1719)
atgttcagactaccaacagttctccgcagcgctgctctgcgtcagatgcagcttcagtcacgcagctatgccaaagacgttcgctttggagctgaagtgcgggcactcatgctccaaggagtagatgtattggctgatgcggttgctgtcactatgggccccaagggacgcaatgtcattttggagcagagctggggtagcccaaagatcaccaaggatggtgttactgtagccaagggtgtggaactgaaggacaagttccagaacattggagcaaaattggtgcaagatgttgccaacaacaccaacgaagaagctggagatggaacaaccactgccactgttctggccagagccatcgccaaggaaggctttgaaaagatcagcaagggtgccaatcctgttgagattaggcgtggtgtaatgatggctgttgacaaagtcaaggaagagctcaaggctttgagcaaacctgttactacaccggaagaaattgcacaggtcgcaactatttctgctaatggcgacactgctattggcaaccttatttctgatgcaatgaagaaagttggaaaggagggagtcatcactgttaaagatggcaagactttgatcgatgaattggaagttatcgagggtatgaagtttgaccgtggatacatctcgccttacttcatcaactcttccaagggagctaaagtagaattccaggatgctctgatcttgttcagtgagaaaaagatttcatctgttcagagcatcatccctgctttggagctcgccaactcccaacgtaaaccacttgtcattgttgccgaggacattgatggtgaagctctttcaaccttggttgtgaaccgtttgaagattggattgcaagtagccgctgtgaaggcaccaggttttggtgacaacaggaaagctaccctgcaagatatggcaatcgctactggcggtattgttttcggagatgacgctaacttgatcaaaatcgaagacgtccagcctagtgatttgggacaagttggagaagtgcttatcacgaaagacgacacattgcttctgaaaggcaaaggaaagaagaccgatatcgacagaagagccgaccaactcagagatcagatcgaaaatacgacatcagattatgaaaaggagaaattgcaagaacgattggctaggcttgcatctggggtagcagttctcagagtaggaggaagcagcgaggtcgaagtgaacgagaagaaagaccgagtccacgatgccctcaatgctactcgcgctgccgttgaagagggcattgttcccggaggtggtactgctctcttgaggtgtgctccatccctgaaatctctgcatccagcaaatgaagatcagaagactggtatcaacatcgtagctaatgctcttcgcatgccatgcctgcaaattgcccagaacgctggggttgatggcagtgtcgttgtcgccaaggtctctgaaggcaaacttgggtatgacgctatgaacaacgagtacgtagatatgatcgagaagggtatcatcgacccgactaaagtcgtccgcacagctctcaccgatgccgctggagtcgcctcgctcttgacgaccgccgaagcagtggttactgagctgccaaaggaggacccaccaatgccaggtggtggtatgggtggaatgggtggcatgggaggaatgggtggcatgggcggtatgatgtaa

SEQ ID NO: 9017 - protein, 572 aa, Nasonia vitripennis
MFRLPTVLRSAALRQMQLQSRSYAKDVRFGAEVRALMLQGVDVLADAVAVTMGPKGRNVILEQSWGSPKITKDGVTVAKGVELKDKFQNIGAKLVQDVANNTNEEAGDGTTTATVLARAIAKEGFEKISKGANPVEIRRGVMMAVDKVKEELKALSKPVTTPEEIAQVATISANGDTAIGNLISDAMKKVGKEGVITVKDGKTLIDELEVIEGMKFDRGYISPYFINSSKGAKVEFQDALILFSEKKISSVQSIIPALELANSQRKPLVIVAEDIDGEALSTLVVNRLKIGLQVAAVKAPGFGDNRKATLQDMAIATGGIVFGDDANLIKIEDVQPSDLGQVGEVLITKDDTLLLKGKGKKTDIDRRADQLRDQIENTTSDYEKEKLQERLARLASGVAVLRVGGSSEVEVNEKKDRVHDALNATRAAVEEGIVPGGGTALLRCAPSLKSLHPANEDQKTGINIVANALRMPCLQIAQNAGVDGSVVVAKVSEGKLGYDAMNNEYVDMIEKGIIDPTKVVRTALTDAAGVASLLTTAEAVVTELPKEDPPMPGGGMGGMGGMGGMGGMGGMM

SEQ ID NO: 9018 - DNA, 1764 bp, Nematostella vectensis
  CDS (1)..(1764)
atgtatcgcctacctagtctactggcatcttctcaaagactggtctcagccagatcgctagctccgcgtcttgcggctagttttagtacctcacggttccaaaacagccccaaggaactcaagtttggtgcagaggctcgtgcggccatgcttcaaggtgttgacaccttggcggatgctgtagctgtcacgcttggaccaaagggcaaaaatgtaattatcgaacaaagttttggaggtccaaagatcaccaaggatggagttacagttgcaaaggccattgaacttaaagataagtaccagaatattggtgctcgcctggtgcaagatgttgcaaataacacaaacgaagaagctggcgatggcacaaccactgctacagtgctggcccgctccattgctacagaaggctttcttcatgtttccaaaggtgccaatccacaagaggtcagaagaggtgtcatgtgtgctgttgactctgttgttgagtccctgaaaaagatgtcaaaacctgttactactccggaagaaatagctcaggtcgcaacaatatctgccaatggcgacaaaaatattggagaactaatttcctctgctatgaagagagttggcaagaatggtgtcataactgtaaaggatggcaagacactccgagatgaacttgaagtcattgagggcatgaagttcgacagaggttacatctccccatatttcatcaatagctctaagggccagaaggtagaattccaagactgccttttgcttctctgccaaaagaagatttcttctgtgcagcagattgtcccagcactagaactggccaatagccatcgcaaacctctggtgattattgctgaggatgttgacggagaggctctaactacactggtgcttaacagactgaaggttggactacagatagctgctgtaaaagctccaggttttggtgacaacaggaaaaacatgcttcaggatatggctgtcagcacaggaggcatggtgtttggtgacgatgccattgagacaaagcttgaagatatcacaatccaagattttggtgaagttggcgagatatcaatcacaaaagatgacaccattcttttaaggggcaagggcaatgctgatgaaatagccaagcgttgtgaacaaattcgagatgagttagagtctacaaactctgactatgagaaggaaaagttcaacgaaaggcttgccaaactgtctgatggtgtggctattctgaaggttggtgggtcaagtgaagttgaggtgaatgaaaagaaagaccgagtgactgatgctttgaatgctacccgcgctgctgtggaggagggtattgtcccaggtggtggagtcgcccttttgagatgtgtgcctgcactaaatgatattaagatgccatcaaaggaccagcaattgggagtggatctggtgaagaaggctctgcgaaagccatgccagacaattgctgaaaatgctggtgtagaggctgcccttgttgtggagaaggtctcatcactggaaaacgcaatgggatacgatgcagctaacaacacctacgttgacatgatccaagctggtattatcgatcccaccaaagtcgtgcgcacagccatcactgatgcagcaggtgtcgcatccctgcttaccactgctgagactgttattgtagaagcaccaaaagaagagggcgccggtggtatgggcggaatgggtgggatgggaggaatgggtggcatgggtgggatgggaggaatgatgtaa

SEQ ID NO: 9019 - protein, 587 aa, Nematostella vectensis
MYRLPSLLASSQRLVSARSLAPRLAASFSTSRFQNSPKELKFGAEARAAMLQGVDTLADAVAVTLGPKGKNVIIEQSFGGPKITKDGVTVAKAIELKDKYQNIGARLVQDVANNTNEEAGDGTTTATVLARSIATEGFLHVSKGANPQEVRRGVMCAVDSVVESLKKMSKPVTTPEEIAQVATISANGDKNIGELISSAMKRVGKNGVITVKDGKTLRDELEVIEGMKFDRGYISPYFINSSKGQKVEFQDCLLLLCQKKISSVQQIVPALELANSHRKPLVIIAEDVDGEALTTLVLNRLKVGLQIAAVKAPGFGDNRKNMLQDMAVSTGGMVFGDDAIETKLEDITIQDFGEVGEISITKDDTILLRGKGNADEIAKRCEQIRDELESTNSDYEKEKFNERLAKLSDGVAILKVGGSSEVEVNEKKDRVTDALNATRAAVEEGIVPGGGVALLRCVPALNDIKMPSKDQQLGVDLVKKALRKPCQTIAENAGVEAALVVEKVSSLENAMGYDAANNTYVDMIQAGIIDPTKVVRTAITDAAGVASLLTTAETVIVEAPKEEGAGGMGGMGGMGGMGGMGGMGGMM

SEQ ID NO: 9020 - DNA, 1713 bp, Vanderwaltozyma polyspora DSM 70294
  CDS (1)..(1713)
atgtttagatccacttctgtagtacgtacccgttcttctatctctactatcttaaagagatcctattcttctcataaagaattgaaattcggtgtagaaggtagagctgctctactaagaggtgtagaaattttggctgaagctgtttccgccactttaggtccaaaaggtagaaacgtattgatcgaacaaccttttggtgctccaaaaattactaaagacggtgtaacagtagctaaatccattgttctagaagataaattcgaaaatatgggcgctaaattattacaagaagttgcctcaaagacaaacgaagctgctggtgatggtactacttccgctacagttttgggtagagcaatctttagcgaatctgttaaaaacgtcgctgctggttgtaacccaatggatttgagaagaggttctcaagctgctgtagaaaaagtcattcaattcttgagtgctaacaaaaaggaaattaccacttctgaagaaattgcccaagttgccactatctcagctaatggtgacgctcatgtaggtaagttattggcctctgccatggaaaaagtcggtaaagaaggtgtaatcaccattagagaaggtagaaccttagaagacgaattggaagtcactgaaggtatgaaattcgatcgtggtttcatttctccttactttatcactgatccaaaatctggtaaagtagaattcgaaaaacctttgatcttattaagcgaaaagaaaatttcctccattcaagatattctaccttctttggaaatctcaaatcaaactagaagacctttattgattgtggcagaagatatcgatggcgaagctttggctgcctgtatattaaacaaattgagaggccaagttaaagtttgtgcagttaaagccccaggttttggtgataacagaaaaaacactttaggcgatattgcaattttaactggcggtaccgtctttactgaagaactagatttgaaaccagaaaatgctaccgtagaaaacttgggctcctgtgattctataactattaccaaggaagataccgtcatcttaaatggtaacggtcctaaatcaaacattgaaactagaattgaacaaattaaaaactcaattgatatgactactactaactcctacgaaaaggaaaaattacaagaacgtttagctaaattgagtggtggtgttgctgttattagagttggtggttcatctgaagtagaagtaggtgaaaagaaagaccgttatgatgatgctctgaacgctacaagggctgctgttgaagaaggtattttgccaggtggtggtactgctctagtcaaagcttcaagagtcttggatgatgtgaaagttgaaaactttgaccaaaaattaggtgttgacatcattagaaaggcaatcactagaccagcaaaacaaattattgaaaatgctggtgaagaaggttctgtaattgttggtaaattaattgatgaatttggtgaagatttcgctaagggttatgattcttcaaagggtcaatacactgatatgttagctgctggtatcatcgatccatttaaagtcgtcagaacaggtttaactgatgcttctggtgtcgcttcattattggctacaactgaagttgccattgtagattctccacaaccacctgctgccggaggtgctccacaaggtatgccaggtatgccaggtatgatgtaa

SEQ ID NO: 9021 - protein, 570 aa, Vanderwaltozyma polyspora DSM 70294
MFRSTSVVRTRSSISTILKRSYSSHKELKFGVEGRAALLRGVEILAEAVSATLGPKGRNVLIEQPFGAPKITKDGVTVAKSIVLEDKFENMGAKLLQEVASKTNEAAGDGTTSATVLGRAIFSESVKNVAAGCNPMDLRRGSQAAVEKVIQFLSANKKEITTSEEIAQVATISANGDAHVGKLLASAMEKVGKEGVITIREGRTLEDELEVTEGMKFDRGFISPYFITDPKSGKVEFEKPLILLSEKKISSIQDILPSLEISNQTRRPLLIVAEDIDGEALAACILNKLRGQVKVCAVKAPGFGDNRKNTLGDIAILTGGTVFTEELDLKPENATVENLGSCDSITITKEDTVILNGNGPKSNIETRIEQIKNSIDMTTTNSYEKEKLQERLAKLSGGVAVIRVGGSSEVEVGEKKDRYDDALNATRAAVEEGILPGGGTALVKASRVLDDVKVENFDQKLGVDIIRKAITRPAKQIIENAGEEGSVIVGKLIDEFGEDFAKGYDSSKGQYTDMLAAGIIDPFKVVRTGLTDASGVASLLATTEVAIVDSPQPPAAGGAPQGMPGMPGMM

SEQ ID NO: 9022 - DNA, 1725 bp, Aedes aegypti
  CDS (1)..(1725)
atgttccgcttgccgacagtgttacgttgtaccgccgcccgccaggttgccgccggctaccgaggctacgccaaggatgtccgcttcggaccggaggtgcgcgccctgatgctgcagggcgtggatgtgctggccgatgccgtcgccgtcacgatgggacccaagggtcgcaacgtcatcctggagcagagctggggctcgcccaagatcaccaaggacggtgtcaccgtagccaagggtatcgagctgaagtgcaagttccagaacatcggcgccaagctggtccaggacgttgccaacaacaccaacgaggaagccggagatggcaccaccacggccaccgttttggcccgtgctatcgccaaggagggcttcgagaagatctccaagggtgccaacccagtggaaatccgccgtggcgtgatgctggccgtcgatgccgtcaaggatcacctgaagaccatgtcccgtgccgttacctctccggaagagattgcccaagttgccaccatctcggccaacggagaccgtgccatcggtgatctgatcagcgaagccatgaagcgcgtcggaaaggatggcgtcatcaccgttaaggacggcaagactcttcatgacgaactggagatcatcgagggaatgaagttcgatcgcggatacatttcgccgtactttatcaactccagcaagggagccaaggtcgaattccaggatgctctggtgctgttctcggagaagaagatctccagcgtccagtccatcattccggctctggaattggccaactcggcacgcaaaccactggtcatcattgccgaagatgtcgatggagaagctctgagcacgctggtcgtgaacagactgaagattggcctgcaggttgccgccgtcaaggctccaggattcggagataaccgcaagagcaccctgtccgatatggccatcagcaccggtggaatcgttttcggcgatgatgccaacttggtcaagctggaggatgtgcagatgtccgatttgggacaggtcggagagatcaccatcaccaaggatgattgcatgatgctgaagggcaagggcgattccaagcatgttgaagcccgcgttgaacagatccgtgaccagatcgccgaaactacctccgagtacgagaaggaaaagctgcaggaacgtttggctcgcctgtcgtcgggagttgccgtcctgaagatcggaggttccagcgaagtggaagtcaacgagaagaaggaccgcgtcaacgatgctctgtgcgccacccgcgctgccgtcgaggaaggtatcgttcccggaggtggcactgccctgctccgttgcatcaagactttggagaacctgaagggatcgaacgaggaccagaaggccggaattgacattgtgcgacgggctctgcaccaaccctgcactcagatcgccaagaacgccggagtcgacggatcggtcgttgtggccaaggttctggatcagcaagacgacttcggttacgatgccctgaacggtgagtatgtgaacatgatcgaaaagggaatcatcgacccgaccaaggtcgtccgaacggccttgaccgatgcctccggagttgcctcgctgctgtccaccgccgagtgcgtcgtgacggaggaacccaaaccggaaggtgccggcggtatgccaggcatgggcggtatgggaggaatgggcggcatgggaggtatgggtggaatgatgtaa

SEQ ID NO: 9023 - protein, 574 aa, Aedes aegypti
MFRLPTVLRCTAARQVAAGYRGYAKDVRFGPEVRALMLQGVDVLADAVAVTMGPKGRNVILEQSWGSPKITKDGVTVAKGIELKCKFQNIGAKLVQDVANNTNEEAGDGTTTATVLARAIAKEGFEKISKGANPVEIRRGVMLAVDAVKDHLKTMSRAVTSPEEIAQVATISANGDRAIGDLISEAMKRVGKDGVITVKDGKTLHDELEIIEGMKFDRGYISPYFINSSKGAKVEFQDALVLFSEKKISSVQSIIPALELANSARKPLVIIAEDVDGEALSTLVVNRLKIGLQVAAVKAPGFGDNRKSTLSDMAISTGGIVFGDDANLVKLEDVQMSDLGQVGEITITKDDCMMLKGKGDSKHVEARVEQIRDQIAETTSEYEKEKLQERLARLSSGVAVLKIGGSSEVEVNEKKDRVNDALCATRAAVEEGIVPGGGTALLRCIKTLENLKGSNEDQKAGIDIVRRALHQPCTQIAKNAGVDGSVVVAKVLDQQDDFGYDALNGEYVNMIEKGIIDPTKVVRTALTDASGVASLLSTAECVVTEEPKPEGAGGMPGMGGMGGMGGMGGMGGMM

SEQ ID NO: 9024 - DNA, 1704 bp, Caenorhabditis briggsae AF16
  CDS (1)..(1704)
atgcttcgcctcgccagaaagggagttcagaccgctgtcatcagatcctacgccaaggatgtgaagttcggcgctgaaggacgtgcagcaatgcttgttggagtcaaccttttggctgatgccgtctctgttactatgggtccaaagggaagaaacgtgatcatcgagcaatcatggggaagtccaaagatcacaaaagacggagtcaccgttgccaaatccatcgatctcaaggacaaataccagaatttgggagccaaactcatccaagacgtcgccaataaggccaacgaggaggctggagacggaaccacctgtgccaccgttcttgcccgtgccatcgctaaagaaggattcgagagcatccgtcagggaggaaacgccgttgagatccgtcgtggagtgatgaacgccgtcgatgtggttgttgccgagctgaagaagctttcgaaacaagtcaccaccccagaagagatcgctcaagtcgccacaatttccgccaatggagacaccgtcgttggaaacttgatctctgatgctatgaaaaaggttggaaccactggagttatcactgttaaggatggaaagacactcactgatgagttggagttgattgagggaatgaagttcgacagaggatacatctctccatactttatcacttctgccaagggagccaaggtcgagtatgagaaggctttggtgcttttgagtgagaagaagatcagtcaggtccaggatattgttccggctcttgagctcgctaacaagctccgccgtccattggttattattgctgaggatgttgatggagaagctctcaccactcttgttctcaatagacttaaggtcggactccaagtggtcgccgtcaaggctccaggattcggagacaaccgcaagaacaccctcaaggatatgggaatcgccaccggtgccacaatcttcggagacgactcgaaccttatcaagatcgaagacatcactgccaacgatcttggagaggttgacgaagtcaccatcaccaaggacgacactctccttcttcgcggacgtggagaagctgctgaaatcgagaagagaattgagcatatcgctgaggagattgaacaatcaaccagcgaatacgaaaaggagaaactcaacgaacgacttgccaaactctccaagggagtcgctgttcttaagatcggaggagcttctgaggtcgaggttggagagaagaaggatcgtgtcactgatgctctctgcgctacacgtgctgctgttgaagagggaatcgttccaggaggaggtgttgctcttttgagatctctccatgctcttaagacatacaaggctgccaatgaggaccaacaaattggagtgaatattgtgaagaagtcgttggtgcaaccaatttccaccattgtcaagaatgccggactcgagccatcgtctattattgatgaggttatgggaaatagcaatgctgcctacggttatgatgctcttaactccaaattcgtcaatatgttcgaggctggaattattgatccaaccaaggtcgtccgaactgccctccaagacgcatctggagtcgcctcccttctcgccaccaccgaatgcgttgtgaccgagattccaaaggaggagccagcaggaccagccggtggaatgggaggaatgggtggaatgggcggtatgggaggaatgggattctaa

SEQ ID NO: 9025 - protein, 567 aa, Caenorhabditis briggsae AF16
MLRLARKGVQTAVIRSYAKDVKFGAEGRAAMLVGVNLLADAVSVTMGPKGRNVIIEQSWGSPKITKDGVTVAKSIDLKDKYQNLGAKLIQDVANKANEEAGDGTTCATVLARAIAKEGFESIRQGGNAVEIRRGVMNAVDVVVAELKKLSKQVTTPEEIAQVATISANGDTVVGNLISDAMKKVGTTGVITVKDGKTLTDELELIEGMKFDRGYISPYFITSAKGAKVEYEKALVLLSEKKISQVQDIVPALELANKLRRPLVIIAEDVDGEALTTLVLNRLKVGLQVVAVKAPGFGDNRKNTLKDMGIATGATIFGDDSNLIKIEDITANDLGEVDEVTITKDDTLLLRGRGEAAEIEKRIEHIAEEIEQSTSEYEKEKLNERLAKLSKGVAVLKIGGASEVEVGEKKDRVTDALCATRAAVEEGIVPGGGVALLRSLHALKTYKAANEDQQIGVNIVKKSLVQPISTIVKNAGLEPSSIIDEVMGNSNAAYGYDALNSKFVNMFEAGIIDPTKVVRTALQDASGVASLLATTECVVTEIPKEEPAGPAGGMGGMGGMGGMGGMGF

SEQ ID NO: 9026 - DNA, 1734 bp, Chlamydomonas reinhardtii
  CDS (1)..(1734)
atggcaggcacccagatgcggtcgttccaggcgaagtcggcggcctcggctcgcggcgccgtccgtggcaggcgcagcgtggtcgttcaggccgccaaggagctgcacttcaaccgcaacatggaggcgctgaagaagatgcaggctggtgtggacaagctggccaccgtggtcggtgtgaccatcggccccaagggtcgcaacgtggtgttggagtccaagttcggctcgcccaagattgtgaacgacggtgtgaccattgctcgcgaggtggagctggaggaccccgtggagaacatcggcgccaagctggtccgccaggccgctgcccgcaccaacgacaccgctggtgatggcaccaccaccgccaccgtcctgtccgccgccttcatcgctgagggcatgaagatcgtggccgccggcaccaaccccgtgcagctgacccgcggcatggagaagaccgtgaacgcgctggtgaaggagctgaaggcagcctccagccaggtgcactccgacaaggacctgtccaacgtggccagtgtgtcggccggcggcaaccctgacgtgggcaagctgatcagcgacgccatggccaaggttggccgccagggtgtggttaccatggaggagtccaagaccgctgaggacgcgctgatctttgtggagggcatgcagttcgaccgcggctactactcgccctacttcgtcaccgaccccgagcgcatgctcgcggagtacgagaactgccgcatcctgctggtggacaagaagatttccaccgcccgcgacatcatcggcatcctggaggccgccatccgcggcaactacccgctgctgatcatggccgaggacgtggagcaggaggcgctggccaccctggtggtcaacaagctgcgcggcaccctcaaggtggtggctgtgaaggcgcccggcttcggcgagcgcaagagctcctacctggaggacattgccatcctgaccggcggcaccgtggttaaggacgagctgggcatcaccctggagaaggccaccgaggaggtgctgggcctggctgccaaggtgtcgatctccaaggaggccaccaccattgtgggtgacggccgcacgcagcagcaggtggagggccgcgtcaagcagatccgcaacctggcggcggagacggagcaggagtacgagaaggagaagctcaatgagcgcattgcgcgcctgtcgggcggcgtggccatcatccaggtgggcgcccagaccgagacggagctcaaggagaagaagctgcgcgtggaggacgccctgaacgccaccaaggccgctgtggaggagggcattgtcatcggtggtggctgcacgctgctgcgcctcagccagaaggtggactccatcaaggagaccctttccaacgaggagcagaagatgggcgccgacatcatcaagcgcgcgctcagctaccccatcaagctcatcgccaacaacgccggcaccaacggctccgtggtcatgcagcgcgtcatggacaacatcgaccagccgtactacggctacaacgccgccaccgacaccttcgaggacctgatggaggccggcatcatcgaccccaccaaggtggtccgctgctcgctggagaacgccgtgtcggtggccaagaccttcctgctggctgacgtggtggtcaccgagatccccgagaaggagaaggcgcccgcgcccgccgccggcggcggtgactacgactactaa

SEQ ID NO: 9027 - protein, 577 aa, Chlamydomonas reinhardtii
MAGTQMRSFQAKSAASARGAVRGRRSVVVQAAKELHFNRNMEALKKMQAGVDKLATVVGVTIGPKGRNVVLESKFGSPKIVNDGVTIAREVELEDPVENIGAKLVRQAAARTNDTAGDGTTTATVLSAAFIAEGMKIVAAGTNPVQLTRGMEKTVNALVKELKAASSQVHSDKDLSNVASVSAGGNPDVGKLISDAMAKVGRQGVVTMEESKTAEDALIFVEGMQFDRGYYSPYFVTDPERMLAEYENCRILLVDKKISTARDIIGILEAAIRGNYPLLIMAEDVEQEALATLVVNKLRGTLKVVAVKAPGFGERKSSYLEDIAILTGGTVVKDELGITLEKATEEVLGLAAKVSISKEATTIVGDGRTQQQVEGRVKQIRNLAAETEQEYEKEKLNERIARLSGGVAIIQVGAQTETELKEKKLRVEDALNATKAAVEEGIVIGGGCTLLRLSQKVDSIKETLSNEEQKMGADIIKRALSYPIKLIANNAGTNGSVVMQRVMDNIDQPYYGYNAATDTFEDLMEAGIIDPTKVVRCSLENAVSVAKTFLLADVVVTEIPEKEKAPAPAAGGGDYDY

SEQ ID NO: 9028 - DNA, 1740 bp, Malassezia globosa CBS 7966
  CDS (1)..(1740)
atggccattatgcgttctacggcggcggcatcgcggatgccgcgtatgctgaactcgcgcgccctgtcgacttcggcagctgcgctggcacacaaggaggtcaagttctcgaatgagggccgtgctgcgattctcaagggtgtgaatctgctagccaacgctgtgagcgtgaccctcggtccgaagggccgcaatgtaattattgaacagcctttcggtgggccaaagattaccaaggatggtgtcacagtggccaaggccattgacattaaggacaagtacgaaaaccttggtgctcgcctggtacaggatgtggcaagcaagacgaacgaggttgctggtgatggtacgacgacagccactgtgcttgcgcgtgccatctactcggagggtgtgaagaatgtggccgctggctgcaacccgatggacctgcgtcgcggaagccaggctgctgtggatgccgtcatcaagttcctcgaggaaaacaagcgtgaggtgacgacgtcggaggaaatcgcgcaggtcgcgacgatttcggcgaatggtgacaagcacgtcggcacgctcattgccactgctatggagaaggtcggcaaagagggtgtcattactgtgaaagagggcaggacgctcgaagacgagattgagattacggagggtatgcgctttgaccgtggctacatctcgccttactttatcacggacgtcaagacgcagcggactgagtttgaaaagccacttgtgcttctcagtgagaagaagatctcggcgctgcaggacatcctgccgacgctggaggcggctgtgacgatgcgccgtccgctgctgattattgccgaagacattgacggcgaagcgcttgctgcttgcattctgaacaagctgcgcggtcagctccaggtgtgcgctgtgaaggcacctggctttggtgacaaccgcaagagcatccttggcgacttggctatcctcacgggtggccaggtgttctcggacgagcttgatgtgaaactcgaacgtgccacgccagacatgctcggcacgacgggcagtgttacgatcacgaaggaagacacgatcttcatgaacggtgagggcaacaaggatgccatcacggctcgctgcgagcagattcgctcggctatgagcgacccatcgacgtcagagtacgaccggacgaagctgcaagagcgtcttgcgaagctgagtggtggtgtggctgtaattcgtgtgggtggctcgtccgaggtcgaggtgggcgagaagaaggaccgttacgatgatgctctgtgtgcaacgcgtgcagctgtggaagagggtattgtgccaggcggcggcgtggcgctactgaagggcacgaaggccctcgactccattgccactgctaactttgaccagcagttgggtgtgtcgatcattcgcaatgcgctgacgcgtccggcacgccagattgtcgagaacgccggtgaagagggctcggtcgttgtgggcaagttgctcgagaacccaggcgagtttggctacggctacgacgcgagtgttggtgaatacaaagacctgattgctgctggtgtgctggatccactgaaggtggtgcgcacagctcttcaggacgctgcgggtgtggcatcgttgctgacgacatcagagtgctgcatcgttgaagcacctgaagagaagcctatggccgctcctggtatgggcatgggcggcatgggtggcatgggtggcatgggcttctaa

SEQ ID NO: 9029 - protein, 579 aa, Malassezia globosa CBS 7966
MAIMRSTAAASRMPRMLNSRALSTSAAALAHKEVKFSNEGRAAILKGVNLLANAVSVTLGPKGRNVIIEQPFGGPKITKDGVTVAKAIDIKDKYENLGARLVQDVASKTNEVAGDGTTTATVLARAIYSEGVKNVAAGCNPMDLRRGSQAAVDAVIKFLEENKREVTTSEEIAQVATISANGDKHVGTLIATAMEKVGKEGVITVKEGRTLEDEIEITEGMRFDRGYISPYFITDVKTQRTEFEKPLVLLSEKKISALQDILPTLEAAVTMRRPLLIIAEDIDGEALAACILNKLRGQLQVCAVKAPGFGDNRKSILGDLAILTGGQVFSDELDVKLERATPDMLGTTGSVTITKEDTIFMNGEGNKDAITARCEQIRSAMSDPSTSEYDRTKLQERLAKLSGGVAVIRVGGSSEVEVGEKKDRYDDALCATRAAVEEGIVPGGGVALLKGTKALDSIATANFDQQLGVSIIRNALTRPARQIVENAGEEGSVVVGKLLENPGEFGYGYDASVGEYKDLIAAGVLDPLKVVRTALQDAAGVASLLTTSECCIVEAPEEKPMAAPGMGMGGMGGMGGMGF

SEQ ID NO: 9030 - DNA, 1647 bp, Physcomitrella patens subsp. patens
  CDS (1)..(1647)
atgaccgtgaaggccgctaagcagcttcacttcaacaaagatgggtctgctattaagaaaatgcaggctggagttgataaacttgctgatcttgttggtgtcactttggggcccaagggccgaaacgtcgtgcttgagagcaagtatggctcacccaaaattgtgaatgacggtgtcactgtggccaaggaggttgagcttgaggatccagtcgagaacatcggtgccaagttggtgaggcaagcggcagccaagacgaatgacttggctggtgacggtaccaccacctctgtcgttctcgcacaagggctcattgctgagggcgtcaaggttgttgcagcgggagccaatccagtacagatcacaagaggcattgaaaaaactgtggctgccctggtcaaggagttgaaaaagctttccaaggaagttgaagacagtgaactggctgatgtcgctgctgtcagtgccggtaataaccccgaggtcggtcagatgatcgccgaagccatgagcaaagtcgggcgcaggggtgttgtgaccttggaggaaggaaagagttctgagaacagcctgtacgtggtcgagggcatgcagtttgacagaggctacatttccccctattttgtgactgacccagagaagatgtctgtggagtatgataactgcaggcttctcctggtggataagaagatcgtaactgcccgtgacatgattggaattctggaggaatccatccgtggtggattcccacttttgattattgctgaggatattgagcaggaagctctctctacattggtggtcaacaagttgagaggttcacttaaggtcgctgctttgaaggcacctggttttggtgagagaaagagtcagtacttggacgacattgctattcttaccaacgccaccgtgattcgtgacgagactggtctcgctcttgacaaggttggcactgaagtgttgggtactgcggctaaggtcgttctcaccaaggatgcaaccaccattgtgggtgatggtagcacacaagatgcagttagcaggcgtgtgaaccaaatccgcaacctaatcgaagtcgccgagcaagagtatgagaaggagaagctgaatgagaggattgcgaagctgtctgggggagtagccattattcaggttggagctcaaactgagaccgagttgaaagagaagaaacttcgtgttgaagatgcgctgaatgcaaccaaggctgctgtggaggaaggcattgttgttggtggaggatgtaccttgttgagattagctagcaaagttagtgctattgtttcaaccttggataacgacgagcagagggttggcgctgagattgtgaggcgggccttgtgttaccctttgaaattgatcgccaagaatgctggtgtgaacggaagcgtggtggttgagaaggtgttggcgaatagcaacccatccttcggctacaatgccgctacaggtgtctacgaggacctcatggctgctggtatcatcgaccctaccaaggttgtcaggtgttgcttggagcatgccgcttccgtagcgaagatcttcttaacttctgatgttgttgttaccgaaatcaaggaagctgaggttgctgtcgccggcaacccaatggatgcatcaggtatttaa

SEQ ID NO: 9031 - protein, 548 aa, Physcomitrella patens subsp. patens
MTVKAAKQLHFNKDGSAIKKMQAGVDKLADLVGVTLGPKGRNVVLESKYGSPKIVNDGVTVAKEVELEDPVENIGAKLVRQAAAKTNDLAGDGTTTSVVLAQGLIAEGVKVVAAGANPVQITRGIEKTVAALVKELKKLSKEVEDSELADVAAVSAGNNPEVGQMIAEAMSKVGRRGVVTLEEGKSSENSLYVVEGMQFDRGYISPYFVTDPEKMSVEYDNCRLLLVDKKIVTARDMIGILEESIRGGFPLLIIAEDIEQEALSTLVVNKLRGSLKVAALKAPGFGERKSQYLDDIAILTNATVIRDETGLALDKVGTEVLGTAAKVVLTKDATTIVGDGSTQDAVSRRVNQIRNLIEVAEQEYEKEKLNERIAKLSGGVAIIQVGAQTETELKEKKLRVEDALNATKAAVEEGIVVGGGCTLLRLASKVSAIVSTLDNDEQRVGAEIVRRALCYPLKLIAKNAGVNGSVVVEKVLANSNPSFGYNAATGVYEDLMAAGIIDPTKVVRCCLEHAASVAKIFLTSDVVVTEIKEAEVAVAGNPMDASGI

SEQ ID NO: 9032 - DNA, 1815 bp, Physcomitrella patens subsp. patens
  CDS (1)..(1815)
atggctgctgcttccatggctatagccgggtctgctgcgactgcttctctcagggtgagctctgagagccgggcaccttcctccttgagttcttcctctgccattggccgcgtgggatttagtggcggtttgaaccagcggaggcagcgggttgcgcaccgtacgacggttaaggctgcgaaggagctgcacttcaataaggatggctctgctatcaagaagatgcaggctggagttgataagctcgcggatcttgtgggtgtcaccttgggccctaagggtcgcaacgtcgtgcttgagagcaagtacgggtctcctaagattgtgaatgacggagtcaccgtagccaaggaggtcgagctcgaagacccagtggagaatattggagccaagttggtgaggcaggcatctgcgaagaccaacgatttggctggagatggcaccactacctccgtggtgcttgcacaaggactcattgccgagggtgtcaaggttgtcgcagcaggagccaacccagttcaaattaccaggggcattgacagaactgttattgccttggtgaaggagctgaagaacatgtcaaaggaggtagaagacagcgaattggctgacgttgctgctgttagtgccggcaacaaccctgaaattgggcagatgattgccgaggctatgggcaaggtgggacgcaagggtgtggttaccatggaggaagggagaagtgctgagaaccacttgtacgtggtagagggtatgcagttcgacaggggctacatttccccctacttcgtgacagaccccgagaagatgtctgtggagtacgacaactgcaggctcctcttggtcgacaagaagatcaccactgctcgtgatatgattgggattttggaggaaaccatccgcggtgggttcccactcttgatcatagctgaggatattgagcaggaagccctgtctacactggtggtcaacaagttgagaggctcacttaaggttgctgctttgaaggcacctggtttcggtgagaggaagagccagtacctggatgatattgccatcctcaccagtggaaccgtgatccgggatgagattggtctggcccttgacaaagttggtactgaagtgttgggtactgccgccaaggttgtccttaccaaggattcaaccacgattgttggagatggcagtactcaagatgcagttgagaagcgtgtggcccaaatccgcaacctcatcgaaatcgccgagcaagaatatgaaaaggagaagttgaatgagagaattgctaagttgtctggaggtgtggccatcattcaggtgggagctcaaactgagacagaattgaaggagaagaagctccgtgttgaggatgcgctgaacgctaccaaagccgccgtggaggaaggtatcgttgtgggtggaggatgcactttgttgagactggccagcaaagtggatgctatcaaggaatctttagacaacgacgagcaaaaggttggtgcagacatcgtgaaacgggctttgtgctaccctctgaagcttattgccaagaatgccggcgtgaacgggagtgtggtggttgagaaggttctagccaatgaaaactcatccttcggttataatgctgctactggtgtgtacgaggatctcatggccgctggtatcatcgaccctgcaaaggttgtgaggtgttgcctggagcacgctgcctcggtcgccaagattttcttgacctctgatgttgtagttactgaaattaaggaaccagagcctgttcaagctggcaaccccatggatgcatcaggatatggttattaa

SEQ ID NO: 9033 - protein, 604 aa, Physcomitrella patens subsp. patens
MAAASMAIAGSAATASLRVSSESRAPSSLSSSSAIGRVGFSGGLNQRRQRVAHRTTVKAAKELHFNKDGSAIKKMQAGVDKLADLVGVTLGPKGRNVVLESKYGSPKIVNDGVTVAKEVELEDPVENIGAKLVRQASAKTNDLAGDGTTTSVVLAQGLIAEGVKVVAAGANPVQITRGIDRTVIALVKELKNMSKEVEDSELADVAAVSAGNNPEIGQMIAEAMGKVGRKGVVTMEEGRSAENHLYVVEGMQFDRGYISPYFVTDPEKMSVEYDNCRLLLVDKKITTARDMIGILEETIRGGFPLLIIAEDIEQEALSTLVVNKLRGSLKVAALKAPGFGERKSQYLDDIAILTSGTVIRDEIGLALDKVGTEVLGTAAKVVLTKDSTTIVGDGSTQDAVEKRVAQIRNLIEIAEQEYEKEKLNERIAKLSGGVAIIQVGAQTETELKEKKLRVEDALNATKAAVEEGIVVGGGCTLLRLASKVDAIKESLDNDEQKVGADIVKRALCYPLKLIAKNAGVNGSVVVEKVLANENSSFGYNAATGVYEDLMAAGIIDPAKVVRCCLEHAASVAKIFLTSDVVVTEIKEPEPVQAGNPMDASGYGY

SEQ ID NO: 9034 - DNA, 1815 bp, Physcomitrella patens subsp. patens
  CDS (1)..(1815)
atggctgccaccaccatggcaatggccggatccgctgccacttcttccctgagggtggcagctgagaacaaggctgcatcctccttgagttcctccgctgcttttggccgtgtgaactttggtggcgtcgcgaagttgcagaggcagcgggtggcgcatcgcttgccggtcaaggctgcgaaggagcttcatttcaacaaggatggctccgctatcaagaggatgcaggctggagttgacaagcttgcggatctagtcggtgtcactttgggacccaagggacgcaacgtcgtgcttgaaagtaagtacgggtcccccaagattgtgaacgacggtgtcaccgtggccaaggaggtcgagctcgaagacccagtcgagaatattggagccaagttggttaggcaagcttctgccaagaccaacgatttggctggtgatggtaccaccacctctgtggttcttgctcaagggctcattgccgagggtgtcaaggttgtcgctgcaggagccaacccagtgcaaatcaccagaggcattgacaaaactgtcgtcgctttggttaaagagttgaagaagatgtctaaggaggttgaagacagcgaattggctgatgtcgcggcggttagtgctggcaacaatcccgagattgggcaaatgattgctgaggccatgagcaaggtgggacggaagggtgttgtcacccttgaagaaggcaagagtgctgagaacaacttgtatgtggttgaggggatgcaattcgacagaggatacatttctccctactttgtgactgatcccgagaagatggatgttgagtacgacaactgcaggcttctcttggtcgataagaagatcacaactgcccgtgacatgatcggaattctggaggaaaccatccgtggcggattcccactcttgatcattgccgaggatattgagcaggaagccctgtctacgttggtagtcaacaaattgagaggttcgctcaaggttgctgccttgaaggcgcctggtttcggtgaaaggaagagccagtacctggatgatattgctatccttactaatggcaccgttgttcgtgatgagcttggtttatctcttgacaaagttggcacggaagtgttgggtactgccgccaaggtcgtcctcaccaaggactcaaccaccattgttggagacggtagcacgcaagatgcagtggagaagcgtgtggcccaaattcgcaaccttatcgaaattgctgagcaagagtacgagaaggagaagctgaatgagagaattgcgaagttatcgggaggtgtcgccattattcaggtcggagctcaaaccgagacagagttgaaggagaagaagctccgtgttgaggatgcgctaaatgccaccaaggctgctgtggaggaaggcatcgtcgtgggtggaggatgcaccttattgagattggctagccaagtggatgctatcaaagatactctggacaacgatgagcagaaggttggttcagaaattgtgaggcgggctttgagttaccctttgaagttgatcgccaaaaatgccggtgtgaatggaagcgtcgtagttgagaaggtgttggctaatgaaaaccctgccttcggttacaacgctgccacaggtgagtatcaggatcttatggccgctggaatcatcgaccctgccaaggtcgttaggtgctgcttagagcatgccgcctcagtagccaagattttcttgacctccgatgtagtagtgacggaaatcaaagaaccagagcctgttccagctggcaaccccatggatgcatcaggctatggttactga

SEQ ID NO: 9035 - protein, 604 aa, Physcomitrella patens subsp. patens
MAATTMAMAGSAATSSLRVAAENKAASSLSSSAAFGRVNFGGVAKLQRQRVAHRLPVKAAKELHFNKDGSAIKRMQAGVDKLADLVGVTLGPKGRNVVLESKYGSPKIVNDGVTVAKEVELEDPVENIGAKLVRQASAKTNDLAGDGTTTSVVLAQGLIAEGVKVVAAGANPVQITRGIDKTVVALVKELKKMSKEVEDSELADVAAVSAGNNPEIGQMIAEAMSKVGRKGVVTLEEGKSAENNLYVVEGMQFDRGYISPYFVTDPEKMDVEYDNCRLLLVDKKITTARDMIGILEETIRGGFPLLIIAEDIEQEALSTLVVNKLRGSLKVAALKAPGFGERKSQYLDDIAILTNGTVVRDELGLSLDKVGTEVLGTAAKVVLTKDSTTIVGDGSTQDAVEKRVAQIRNLIEIAEQEYEKEKLNERIAKLSGGVAIIQVGAQTETELKEKKLRVEDALNATKAAVEEGIVVGGGCTLLRLASQVDAIKDTLDNDEQKVGSEIVRRALSYPLKLIAKNAGVNGSVVVEKVLANENPAFGYNAATGEYQDLMAAGIIDPAKVVRCCLEHAASVAKIFLTSDVVVTEIKEPEPVPAGNPMDASGYGY

SEQ ID NO: 9036 - DNA, 1761 bp, Phaeosphaeria nodorum SN15
  CDS (1)..(1761)
atgcagagagcttttgcatcgcgggcgcggacttcggccctcaaccagagctccaagcttcggtcgacgagctatgccatccagcagcaaagatttgcccacaaggagctcaagttcggtgttgagggacgagcagcccttctcaagggtgtcgacacactggcaaaggctgtgtcaaccacactgggtcccaagggacgcaacgttctgatcgagtccagctacggctcgcccaagatcacaaaggacggtgtaacggtagcaaaggccatcaccctccaggacaagttcgagaacctcggtgctcgtctgctccaggatgtcgcctccaagaccaacgaggttgctggtgacggtaccactaccgccactgttctcgcccgcgccatcttctccgagacggtcaagaacgtagccgctggctgcaaccccatggacctgaggcgaggaacccaggctgctgtcgaggccgtcgttgagtacttgagggcaaacaagagggacatcaccaccagcgaggagatctcccaggtcgccaccatctccgccaacggggatacacatattggcaagctcctgtcgaacgcgatggagaaggtcggaaaggagggtgtcatcacagttaaggagggcaagaccactgaggacgagctcgaggtcactgagggtatgaagttcgaccgtggcttcatctcgccttacttcatcaccgacaccaagacccagaaggttgagttcgagaagcccctcatcctcctctctgagaagaagatctccgccgtccaggacattgtccccgcccttgaggcctcgcaacagctccgccgcccccttgtcatcattgctgaggacattgacggcgaggcgcttgctgtttgcattctcaacaagctccgtggtcagctccaggtcgctgccgtaaaggctcccggcttcggtgacaaccgcaagtccatcctcggtgaccttgctgtcctgaccaacggcaccgttttcagtgacgaccttgacatcaagctcgagaaggctacccctgacatgctcggatccaccggttccatcactatcaccaaggaggacaccgtcatcctcaacggcgagggttccaaggatgccgttagccagcgctgcgagcagatccgcggcgtcatggctgatgccaccacttctgagtacgagaaggagaagctccaggagcgtcttgccaagctctccggcggtgttgccgtcatcaaggtcggtggttcctccgaggtcgaggttggtgagaagaaggatcgcatcgtagatgccctgaacgccacccgcgccgccgttgaggagggtatcctgcccggaggtggtaccggtctgctcaaggccgctgccaacgcattgggcgacgtcaaggccgacaacttcgaccagcagctcggtatcaccatcgtcaagaatgccatcactcaccccgcacgcaagattgtcgagaacgctggtgctgagggctccgtcgttgttggcaaactcatggacgagtacaagggcgacttcaacaagggcttcaacagcgcaaagggcgagtacgtcgacatgatctctgccggtatcctcgaccccttcaaggttgtccgcactgctcttgtagacgccagcggtgtcgcatcgcttctcggtaccaccgaggttgccatcgtcgaggcgcctgaggagaaggctggaggcccacctccgggtatgggcggcatgggtggtatgggaggaatgggaggcatgggattctag

SEQ ID NO: 9037 - protein, 586 aa, Phaeosphaeria nodorum SN15
MQRAFASRARTSALNQSSKLRSTSYAIQQQRFAHKELKFGVEGRAALLKGVDTLAKAVSTTLGPKGRNVLIESSYGSPKITKDGVTVAKAITLQDKFENLGARLLQDVASKTNEVAGDGTTTATVLARAIFSETVKNVAAGCNPMDLRRGTQAAVEAVVEYLRANKRDITTSEEISQVATISANGDTHIGKLLSNAMEKVGKEGVITVKEGKTTEDELEVTEGMKFDRGFISPYFITDTKTQKVEFEKPLILLSEKKISAVQDIVPALEASQQLRRPLVIIAEDIDGEALAVCILNKLRGQLQVAAVKAPGFGDNRKSILGDLAVLTNGTVFSDDLDIKLEKATPDMLGSTGSITITKEDTVILNGEGSKDAVSQRCEQIRGVMADATTSEYEKEKLQERLAKLSGGVAVIKVGGSSEVEVGEKKDRIVDALNATRAAVEEGILPGGGTGLLKAAANALGDVKADNFDQQLGITIVKNAITHPARKIVENAGAEGSVVVGKLMDEYKGDFNKGFNSAKGEYVDMISAGILDPFKVVRTALVDASGVASLLGTTEVAIVEAPEEKAGGPPPGMGGMGGMGGMGGMGF

SEQ ID NO: 9038 - DNA, 1767 bp, Aspergillus oryzae RIB40
  CDS (1)..(1767)
atgcaaagagctctttcctccaggacatctgtcctttccgccgcttctaagcgcgctcccttctacagatcctctggcttcaacctccagcagcaacggtttgcccacaaggagctcaaattcggcgtcgaagcccgtgcccagctccttaagggtgttgacactcttgctaaggctgttacttccactcttggtcccaagggtcgcaatgtcctgattgacactccttacggctctcccaagatcaccaaggacggtgtgaccgttgccaaggccgttcagcttcaggacaagttcgagaaccttggtgctcgtctcctccaggatgttgcctccaagaccaacgaactcgccggtgacggtaccaccaccgctacctgccttgcccgtgccatcttctccgaaaccgtcaagaacgttgccgctggctgcaaccccatggatctgcgccgtggtatccaggctgctgtcgaggctgctgtcgactacctgcagcagaacaagcgtgacatcaccaccggcgaggagattgctcaggtcgctaccatctccgctaacggcgacacccacgttggtaagctcatctccactgctatggagagagtcggcaaggagggtgttatcaccgttaaggagggcaagacccttgaggatgaacttgaggtcactgagggtatgcgtttcgaccgcggttacacctccccttacttcatcaccgataccaagtcccagaaggtcgagttcgagaagcccttgatcctcctttccgagaagaagatctccgctgttcaggatatcattcccgcccttgaggcctccactaccctccgccgccctctcgtcatcattgctgaggacattgagggtgaggctctcgccgtctgcattctgaacaagctccgtggtcagctccaggttgctgccgtcaaggctcctggctttggtgacaaccgcaagagcatccttggtgatcttggtgttctcactaacggtactgtctttaccgatgagctcgacatcaagcttgagaagcttacccctgacatgctcggttccactggctccatcactatcactaaggaggacactatcatcctgaacggtgagggtaccaaggactccatcgctcagcgctgtgagcagatccgtggtgtcatggctgaccccaccacttccgaatatgagaaggagaagctccaggagcgtctggccaagctctccggtggtgttgctgtcatcaaggtcggtggttcctctgaggtcgaggtcggtgagaagaaggaccgtgtcgttgacgccctcaacgccactcgtgctgctgttgaggagggtatcctccctggtggtggtactgctctcctcaaggccgctgccaacggccttgacaacgtcaagcctgccaacttcgaccagcagctcggtgtcagcatcatcaagaatgctatcacccgccctgctcgccagatcgttgagaacgctggtcttgagggcagcgtcattgttggcaagcttactgaggagcacgccaaggacttcaaccgtggttttgacagctccaagggcgagtacgttgacatgatctccaagggtatcgtcgaccccctcaaggtcgtccgtactgccctggttgatgctagcggtgtcgcctctctccttggtaccactgaggtcgctattgttgatgcccctgaggagaaggcccctgccgctcctggtggtatgggtggcatgggtggtatgggcggcatgggtggtggcatgttctaa

SEQ ID NO: 9039 - protein, 588 aa, Aspergillus oryzae RIB40
MQRALSSRTSVLSAASKRAPFYRSSGFNLQQQRFAHKELKFGVEARAQLLKGVDTLAKAVTSTLGPKGRNVLIDTPYGSPKITKDGVTVAKAVQLQDKFENLGARLLQDVASKTNELAGDGTTTATCLARAIFSETVKNVAAGCNPMDLRRGIQAAVEAAVDYLQQNKRDITTGEEIAQVATISANGDTHVGKLISTAMERVGKEGVITVKEGKTLEDELEVTEGMRFDRGYTSPYFITDTKSQKVEFEKPLILLSEKKISAVQDIIPALEASTTLRRPLVIIAEDIEGEALAVCILNKLRGQLQVAAVKAPGFGDNRKSILGDLGVLTNGTVFTDELDIKLEKLTPDMLGSTGSITITKEDTIILNGEGTKDSIAQRCEQIRGVMADPTTSEYEKEKLQERLAKLSGGVAVIKVGGSSEVEVGEKKDRVVDALNATRAAVEEGILPGGGTALLKAAANGLDNVKPANFDQQLGVSIIKNAITRPARQIVENAGLEGSVIVGKLTEEHAKDFNRGFDSSKGEYVDMISKGIVDPLKVVRTALVDASGVASLLGTTEVAIVDAPEEKAPAAPGGMGGMGGMGGMGGGMF

SEQ ID NO: 9040 - DNA, 1803 bp, Coprinopsis cinerea okayama7#130
  CDS (1)..(1803)
atgcaccgcctttcgacgacctcttcccgctcgctgcgacgtgctgcccagcgccagttggctaagcagcaaacgcggggtgcgcataaggagattaagttctctaatgagggccgggcgagcattttgaagggtgttgatgttttggcaaacgctgtttctgttacgctgggtcctaagggtcgcaatgtgatcattgagcagcagtttggtggtccaaaaatcaccaaggacggtgttactgttgccaagtccatcacgctgaaggacaagtttgagaacctcggtgctcgtctcgtccaggatgtcgcgtcaaaaacgaacgaagtcgctggtgacggtaccaccacggccaccgtcctcgcccgtgccatctactcggagggtgtgaagaacgttgctgctggctgcaaccccatggacctccgccgaggttcccaagccgccgtcgaccgcgtcgtcaacttcctttcccaacacgccaagactgtcaccaccaccgctgaaatcgcccaagtcgccaccatttctgccaacggcgatacccacgttggtaacctcatcgcccaggccatggagaaggttggcaaggagggtgtcatcactgtgaaggagggcaagaccatcgaggatgagattgagattaccgagggcatgcgcttcgaccgtggtttcatctcgccctacttcatcaccgacgtcaagacccaaaaggtcgagttcgagaagcccctcgtcctcttgtccgagaagaagatttccctcctccaggacatccttccttccctcgaggccgccgcccagcagcgtcgacctctcatcatcattgccgaggatatcgatggcgaagctctcgctgcctgcattctcaacaagctccgtggccagctcaaggtctgcgccgtcaaggctcccggattcggcgacaaccgcaagtccatcctcggcgacattgccatcctcactggtggtaccgtcttcactgacgagctcgaggtcaagctcgagcaggccaccgtcgacatgctcggctctaccggctccatcaccgtcaccaaggacgacaccatcatcctcaacggtgagggctccaaggacgccatccaggcccgctgcgagcagatccgctcactcatcaacgaccccaccacctctgactacgaccgcaccaagctccaggagcgtctcgctaagctctccggtggtgtcgctgtcatcaaggtcggcggtgcctccgaggtcgaggtcggtgagaagaaggatcgctacgacgatgctttgaacgccacccgtgctgccgtcgaggagggtatcctccccggtggtggtaccgccctcctcaaggcttcccttcaacttgccaccacctccccttccgccaactcttcttcctcccccacctccccctccgccgagcctatccccaccgccaactttgaccaagaactcggtgtcgccatcatccgccgcgccatcacccaccccgcgcgcaccatcctcaagaacgctggagaggagtcgtctgtcattgtcggcacccttctcgagaagtacggtggtgaagaccagttcaactatggctacgatagtgccaagggtggctatgtggacatggttgagcagggcattgttgatcctttcaaggttgtgaggactgcgcttgttgatgctagtggtgttgctagtttgttgacgacgagtgaggcgtgtattgttgatgcgcctgaggaggagccgaagggcatgcctggtatgggagggatgggtggcatgggcggtatgggtggtatgggagggttctaa

SEQ ID NO: 9041 - protein, 600 aa, Coprinopsis cinerea okayama7#130
MHRLSTTSSRSLRRAAQRQLAKQQTRGAHKEIKFSNEGRASILKGVDVLANAVSVTLGPKGRNVIIEQQFGGPKITKDGVTVAKSITLKDKFENLGARLVQDVASKTNEVAGDGTTTATVLARAIYSEGVKNVAAGCNPMDLRRGSQAAVDRVVNFLSQHAKTVTTTAEIAQVATISANGDTHVGNLIAQAMEKVGKEGVITVKEGKTIEDEIEITEGMRFDRGFISPYFITDVKTQKVEFEKPLVLLSEKKISLLQDILPSLEAAAQQRRPLIIIAEDIDGEALAACILNKLRGQLKVCAVKAPGFGDNRKSILGDIAILTGGTVFTDELEVKLEQATVDMLGSTGSITVTKDDTIILNGEGSKDAIQARCEQIRSLINDPTTSDYDRTKLQERLAKLSGGVAVIKVGGASEVEVGEKKDRYDDALNATRAAVEEGILPGGGTALLKASLQLATTSPSANSSSSPTSPSAEPIPTANFDQELGVAIIRRAITHPARTILKNAGEESSVIVGTLLEKYGGEDQFNYGYDSAKGGYVDMVEQGIVDPFKVVRTALVDASGVASLLTTSEACIVDAPEEEPKGMPGMGGMGGMGGMGGMGGF

SEQ ID NO: 9042 - DNA, 1722 bp, Culex quinquefasciatus
  CDS (1)..(1722)
atgttccgactaccggcagtgatgcgttgtgcggcggcccgccaggtggcttaccgcggctatgccaaggacgttcgctttgggccggaggtgcgcgccctgatgctgcagggtgtggacgtgctggccgatgccgtggccgtgacgatgggcccgaagggtcgtaacgtgatcctggagcagagctggggctcaccgaagatcaccaaggatggcgtgacggtggccaagggcattgagctcaagtgcaagttccagaacatcggcgccaagctggttcaggacgtggccaacaacacgaacgaggaagccggtgacggtacgaccaccgcaaccgtgctggcccgtgccatcgccaaggagggcttcgagaagatctccaagggtgccaacccggtggagattcgtcgcggtgtcatgctggccgtcgatgccgtcaaggaccatctaaagtcgctgtcgcgaacggtgaccagccccgaggagattgcccaggttgcgaccatttccgccaacggagaccgcgccatcggagatctgatcagcgaagccatgaagcgcgtcggaaaggacggcgtcatcaccgtcaaggacggcaagacgctgatcgatgagctggaagtcatcgagggcatgaagttcgaccgcggatacatttcgccgtactttatcaactccagcaagggcgccaaggtggagttccaggacgcgctggtcctgttctcggagaagaaaatctcgaccgtccagtcgatcatcccggcgctggaactggccaacgcccagcgcaagccgctggtcatcattgccgaggacattgacggtgaagcgctgagcacgctggtcgtcaacaggctgaagattggtctgcaggtcgctgccgtcaaggcgcccggcttcggtgacaaccgcaagagcaccctctccgacatggccatcagcaccggcggcatcgtgttcggcgacgatgccaacctggtcaagctggaagatgtgcagctgtcggacctcggacaggtcggcgaaatctccatcaccaaggacgactgcatgctgctgaagggcaagggcaacgccgatcacgtctcggcccgcgctcagcaaatccgcgaccaaatcgaagaaactacctccgagtacgagaaggagaagctccaggaacgtctggcccgtctttcttccggtgtggccgtcctcaaggtcggtggctccagcgaagtcgaagtcaacgagaagaaggaccgcgtcaacgatgccctgtgcgcgactcgtgccgccgttgaggaaggaatcgtccccggaggtggcaccgccctgctccgttgcatcaaggcgctggacaacctgagcggtgccaacgacgaccagaaggccggcatcgacattgtgcgccgcgcgctgcaccaaccgtgcacccagatcgccaagaacgccggcgtcgacggatccgtcgtcgtcgcgaaggtgctcgacctgcagggagactttggctacgacgccctcaacagtgagtacgtcaacatgatcgaaaagggcatcattgacccgaccaaggtcgtccgaaccgcgctcaccgacgcctccggagtcgcctcgctgctctccacggccgagtgcgtcgtgacggaggaaccaaaggccgagggcgccgccggcggcatgcccggaatgggaggcatgggaggaatgggcggcatgggaggcatgggcggaatgatgtaa

SEQ ID NO: 9043 - protein, 573 aa, Culex quinquefasciatus
MFRLPAVMRCAAARQVAYRGYAKDVRFGPEVRALMLQGVDVLADAVAVTMGPKGRNVILEQSWGSPKITKDGVTVAKGIELKCKFQNIGAKLVQDVANNTNEEAGDGTTTATVLARAIAKEGFEKISKGANPVEIRRGVMLAVDAVKDHLKSLSRTVTSPEEIAQVATISANGDRAIGDLISEAMKRVGKDGVITVKDGKTLIDELEVIEGMKFDRGYISPYFINSSKGAKVEFQDALVLFSEKKISTVQSIIPALELANAQRKPLVIIAEDIDGEALSTLVVNRLKIGLQVAAVKAPGFGDNRKSTLSDMAISTGGIVFGDDANLVKLEDVQLSDLGQVGEISITKDDCMLLKGKGNADHVSARAQQIRDQIEETTSEYEKEKLQERLARLSSGVAVLKVGGSSEVEVNEKKDRVNDALCATRAAVEEGIVPGGGTALLRCIKALDNLSGANDDQKAGIDIVRRALHQPCTQIAKNAGVDGSVVVAKVLDLQGDFGYDALNSEYVNMIEKGIIDPTKVVRTALTDASGVASLLSTAECVVTEEPKAEGAAGGMPGMGGMGGMGGMGGMGGMM

SEQ ID NO: 9044 - DNA, 1794 bp, Laccaria bicolor S238N-H82
  CDS (1)..(1794)
atgcatcgtctgtcgaccacttcatccaggtctctccgccgtgcagctgcaaaagcagccaagcccacgttggctcgtggtgcgcacaaggagatcaagttctcgaacgagggcagagctagcattctcaagggtgtcgacgtccttgccaatgccgtcagcgtcacccttggtccaaagggtcgcaacgtcatcatcgaacagtcgtttggtggtcccaaaatcacaaaagatggtgttactgtcgcaaaatctatcactttaaaagacaagtttgagaaccttggtgctcgccttgtccaagacgttgcacaaaagacaaacgaaatcgcaggtgatggaacaacaaccgccaccgtcctcgctcgcgccatctactccgagggcgtcaagaacgtcgcggcaggctgcaaccccatggacctccgccgcggttcccaagcagccgtcgaccgcgtcgtcgagttcctctccgccaacacaaagaccatcaccaccaccgcagagattgctcaagtcgccaccatctccgcaaatggcgacacccacgtcggcaacctcattgcgcaggccatggaaaaagtcggcaaggaaggtgtcatcaccgtcaaagagggccgcacaatcgaggacgagatcgaaatcaccgaaggcatgcgcttcgaccgcggtttcatctccccctactttgtcacggacgttaaatcgcaaaaagtcgagtttgagaaaccgtacatcctcctgagcgagaagaagatttccttgctccaggatatcctcccctcactcgaagcagcagcccaagcccgtcgtccgctcgtcatcatcgcagaggacattgacggtgaagcgctagcagcgtgtatcctcaacaagctccgtggccaactccaagtcgcggccgtcaaagcacccgggttcggagacaaccgcaagtctatcctcggagacctcgccatcctcacggggggcaccgtcttcaccgacgagctcgacattaaactcgagcgcgcgaccgtcgacctgctcggctccaccggctccatcagcatcacgaaagaggacaccatcgtcctcaacggcgaaggatcaaaagatgccatccaggcccgctgcgaacagatccgcgcactcgttgcggaccctaccacgtctgactttgacaggagcaagctccaagaacggctggccaagctcagcggcggagtagccgtcatcaaagtcggtggatcctccgaagtcgaagtaggcgagaagaaggacaggtacgacgacgcgctcaacgctacccgtgccgctgtagaggaaggtattcttccaggcggaggcgtagccctcctcaaagcctccctccagctcgctacgagttctccagcagctgggtcgacgagttcccccgtctcacccgacgccaaacccatctcgacaatcaactttgatcaagaattgggcgtggcgattattagaagggcattgaccaaccccgcacgaacgatactgaccaacgccggtgaagaatctagcgttatcgttggtacgcttctgaaaacctacgggggagcggacaagtttgcgtgggggtacgatgctgcgaagggggaatatgtggatatgatcaaggcggggattgtggatcctttgaaggttgttaggacggcgcttgtggatgcgagtggggtcgcgagtttgttgacgacgagtgaggtgtgtgttgttgagagtgaggaggagaaggcgcccggtggtggcatgggtggtggcatgggggggatgggagggatgggagggttttaa

SEQ ID NO: 9045 - protein, 597 aa, Laccaria bicolor S238N-H82
MHRLSTTSSRSLRRAAAKAAKPTLARGAHKEIKFSNEGRASILKGVDVLANAVSVTLGPKGRNVIIEQSFGGPKITKDGVTVAKSITLKDKFENLGARLVQDVAQKTNEIAGDGTTTATVLARAIYSEGVKNVAAGCNPMDLRRGSQAAVDRVVEFLSANTKTITTTAEIAQVATISANGDTHVGNLIAQAMEKVGKEGVITVKEGRTIEDEIEITEGMRFDRGFISPYFVTDVKSQKVEFEKPYILLSEKKISLLQDILPSLEAAAQARRPLVIIAEDIDGEALAACILNKLRGQLQVAAVKAPGFGDNRKSILGDLAILTGGTVFTDELDIKLERATVDLLGSTGSISITKEDTIVLNGEGSKDAIQARCEQIRALVADPTTSDFDRSKLQERLAKLSGGVAVIKVGGSSEVEVGEKKDRYDDALNATRAAVEEGILPGGGVALLKASLQLATSSPAAGSTSSPVSPDAKPISTINFDQELGVAIIRRALTNPARTILTNAGEESSVIVGTLLKTYGGADKFAWGYDAAKGEYVDMIKAGIVDPLKVVRTALVDASGVASLLTTSEVCVVESEEEKAPGGGMGGGMGGMGGMGGF

SEQ ID NO: 9046 - DNA, 1734 bp, Podospora anserina DSM 980
  CDS (1)..(1734)
atgcagcgcgcactcacgagagcgtcggtctcttccccgctcaaggccgcccgcgtccgttccacacagcagctccgcttcgctcacaaggagctcaagttcggtgttgagggccgtgccgctctccttcagggtgtcgagaccctcgcaaaggccgttgctaccaccctcggtcccaagggtcgcaatgtcctcatcgagtccagcttcggctcccccaagatcaccaaggacggtgtaacggtcgcccgcgccatctccctcaaggacaagttcgagaacctcggtgccaagctcctcgccgaggtcgcctccaagaccaacgaggtcgccggtgacggtaccaccactgccaccgtcctcgcccgcgccatcttcgccgagacggtcaagaatgtcgctgccggctgcaaccccatggatctccgccgcggtatccaggctgccgtcgacaacgtcgtcgagtacctccagaagcacagccgcgacatcaccacctctgaggagatcgcccaggtcgccaccatctcggccaacggcgacgagcacattggcaagctgattgccaacgccatggagaaggtcggcaaggagggtgtcatcaccgtcaaggagggcaagactctcctcgatgagctcgaggtcaccgagggtatgcgcttcgaccgcggcttcgtctccccctacttcatcaccgacgccaaggcccagaaggtcgagttcgagaagcccctgatcctcctctctgagcaaaagatctcctccgccatggacatcatccccgctctcgagatctccaacaagctccgccgtcctctcgtcatcatcgccgaggactttgagggcgaggctctcgccgtctgcattctcaacaagctccgtggccagctcgaggttgccgccgtcaaggcccccggcttcggtgacaaccgcaagtccatcctcggcgatcttgctgtcctcaccaacgccaccgtcttcagcaccgagctcgatgtcaagcttgacaagctcacccctgacatgctcggctccaccggctccatcaccatcaccaaggaggacaccattctcctcaacggtgacggcagcaaggactcgattgctcagcgctgcgagcagattcgtggtgtcatggccgaccccaccacctccgagtacgagaaggagaagctccaggagcgcctcgccaagctctctggcggtgttgccgtcatcaaggtcggtggctcctccgaggtggaggttggcgagaagaaggaccgcttcgtggatgcgctcaacgccacccgcgctgccgttgaggagggcatcctcccgggcggtggtactgccctcatcaaggcctccatcaacgctctcaaggacctcaagcccgccaactttgaccagcagcttggtgtgagcatcgtcagaaacgccatcacccgccctgccagaaccattgttgagaacgccggtcttgagggctctgtcatcatcggcaagctccaggacgagtatgtcaatgacttcaacaagggcttcaacagcgccaagggcgagtacgttgacatgatctctgccggtatccttgatcccctcaaggttgtccgcactggtctcattgatgcctctggcgttgcctctctgcttggcaccaccgaggtggcgattgtcgaggccgaggacaagacgcctcctcccatgggcggtggcatgggcggcatgggcggcatgggcggcatgatgtaa

SEQ ID NO: 9047 - protein, 577 aa, Podospora anserina DSM 980
MQRALTRASVSSPLKAARVRSTQQLRFAHKELKFGVEGRAALLQGVETLAKAVATTLGPKGRNVLIESSFGSPKITKDGVTVARAISLKDKFENLGAKLLAEVASKTNEVAGDGTTTATVLARAIFAETVKNVAAGCNPMDLRRGIQAAVDNVVEYLQKHSRDITTSEEIAQVATISANGDEHIGKLIANAMEKVGKEGVITVKEGKTLLDELEVTEGMRFDRGFVSPYFITDAKAQKVEFEKPLILLSEQKISSAMDIIPALEISNKLRRPLVIIAEDFEGEALAVCILNKLRGQLEVAAVKAPGFGDNRKSILGDLAVLTNATVFSTELDVKLDKLTPDMLGSTGSITITKEDTILLNGDGSKDSIAQRCEQIRGVMADPTTSEYEKEKLQERLAKLSGGVAVIKVGGSSEVEVGEKKDRFVDALNATRAAVEEGILPGGGTALIKASINALKDLKPANFDQQLGVSIVRNAITRPARTIVENAGLEGSVIIGKLQDEYVNDFNKGFNSAKGEYVDMISAGILDPLKVVRTGLIDASGVASLLGTTEVAIVEAEDKTPPPMGGGMGGMGGMGGMM

SEQ ID NO: 9048 - DNA, 1728 bp, Pyrenophora tritici-repentis Pt-1C-BFP
  CDS (1)..(1728)
atgtctgctctaatggatttccaggatgaggggctgtcgtgctacaaccttcagcagcagaggtttgcgcacaaggaactgaagtttggcgttgaggcaagagcgtccctgctgaagggtgtcgacacactcgcaaaggctgtatcaacaacactgggccccaagggtcgcaatgtattgattgagtcgagttatggatcccccaagattaccaaggacggtgtaacagtcgcaaaggccatcactctccaagacaagttcgagaacctcggtgcccgcctccttcaggatgtcgcctccaagaccaacgaggctgctggtgatggtaccacaactgctactgtcctcgcccgcgccatcttctccgagaccgttaagaacgttgccgctggttgcaaccccatggacctgaggcggggtacccaggccgccgtagaggcggttgttgaatacctgagggcaaacaagagggacatcaccaccagcgaagagattgcccaggtcgccaccatctctgccaacggtgacacacacattggcaagcttctgtccaacgccatggagaaggttggaaaggagggtgtcatcactgttaaggagggcaagacgaccgaggacgaactcgaggtcactgaaggcatgaagttcgaccgtggttacatctccccctacttcatcaccgacaccaagaccgccaaggtagagtttgagaagcctctcatcctgctctccgagaagaagatctccgctgtccaggacattgtcccggctcttgaggcctcccagcagctccgccgcccccttgtcatcattgccgaggacattgacggtgaggcgcttgccgtctgcattctcaacaagctccgtggccagctccaggttgccgctgtcaaggcacccggcttcggtgacaaccgcaagtctatcctcggtgatctcgctgttctgaccaacggtaccgtcttcagcgatgatcttgatattaagcttgagaaggccactcccgacatgctcggctccaccggatccatcaccatcaccaaggaggacaccgttatcctcaacggcgagggtagcaaggaccaggtctcccagcgttgcgagcagatccgcggcgtcatcaacgacccaaccacgtccgagtacgagaaggagaagcttcaggaacgtcttgccaaactctctggtggtgttgccgtcatcaaggtcggtggctcatctgaggtcgaggttggcgagaagaaggaccgcatcgtcgatgctctgaacgccacccgtgctgccgtcgaggagggtatcctgcccggtggtggtactggtctgcttaaggcttcggccaacgctcttggatctgtcaaggcggccaactttgaccagcagcttggtatcaccattgtcaagaacgccatcacccaccccgctcgcaagatcgttgagaatgccggtgcggagggatccgtcatcgtcggcaagctcattgacgagtacaagagcgacttcaacaagggtttcaacagcgcaaagggcgaatacgtcgatatgatcgctgccggtatccttgaccccttcaaggttgtccgcactgctcttgttgatgctagtggtgttgcgtcgcttctcggtaccaccgaggtggcgattgttgaggcacccgaggagaagggtcctccaggcggcatgcctggcggtatgggtggtatgggaggcatgggcggcatgggcttctaa

SEQ ID NO: 9049 - protein, 575 aa, Pyrenophora tritici-repentis Pt-1C-BFP
MSALMDFQDEGLSCYNLQQQRFAHKELKFGVEARASLLKGVDTLAKAVSTTLGPKGRNVLIESSYGSPKITKDGVTVAKAITLQDKFENLGARLLQDVASKTNEAAGDGTTTATVLARAIFSETVKNVAAGCNPMDLRRGTQAAVEAVVEYLRANKRDITTSEEIAQVATISANGDTHIGKLLSNAMEKVGKEGVITVKEGKTTEDELEVTEGMKFDRGYISPYFITDTKTAKVEFEKPLILLSEKKISAVQDIVPALEASQQLRRPLVIIAEDIDGEALAVCILNKLRGQLQVAAVKAPGFGDNRKSILGDLAVLTNGTVFSDDLDIKLEKATPDMLGSTGSITITKEDTVILNGEGSKDQVSQRCEQIRGVINDPTTSEYEKEKLQERLAKLSGGVAVIKVGGSSEVEVGEKKDRIVDALNATRAAVEEGILPGGGTGLLKASANALGSVKAANFDQQLGITIVKNAITHPARKIVENAGAEGSVIVGKLIDEYKSDFNKGFNSAKGEYVDMIAAGILDPFKVVRTALVDASGVASLLGTTEVAIVEAPEEKGPPGGMPGGMGGMGGMGGMGF

SEQ ID NO: 9050 - DNA, 1719 bp, Acyrthosiphon pisum
  CDS (1)..(1719)
atgtacggtatctctgccgctcttgctagaaacaatgtacccaaatactttgctagaagctatgccaaggacattaagtttgggcctgaagtgcgaaaacttatgcttgagggagttgatatccttgctgatgctgttgctgtaactatgggcccaaaaggccgtaatgtcatcctagaacagagctggggttctcctaaaatcactaaggacggtgtaactgtcgccaaaggtattgaattacaagataaattccaaaacattggtgctaaacttgtacaagatgtagcaaataataccaatgatgaagctggcgatggcacaacaacagctactgtgttagcacgtgctatagctaaagaaggatttgaatcaattattgagggtgctaatccaattgaaattagacgaggcgtaatgttagctgttgatgaagttaaggttcaattaggtaatttatcaaagaaagttcagtctgcagaggagattgtacaagttgccacaatatctgctaatggtgatactagtattggacaacttatttcatcagctatggaaaaagtaggaaaagatggtgtgataacagtcaaagatggaaaaaccttagaagatgaattggaagttattgaaggtttgaaatttgatagagggtacatttccccatatttcatcaactctgctaaaggtgccaaagtagaattccaagatgctttggtgttgttcagcgagaaaaaaatttcatctgctcaatcattaattcctgctttagaattagctaatgcacaacgtaaaccacttgttatagttgctgaagaccttgatggtgaagttattggaatgctagttttaaatagattgaaaattggtctaaatgttgctgccgtcaaagcgcctggatttggagataatcgcaaatctacattgactgatatggcaattgcaactggaggtgttgtttttggccaagaaggtaatgaactgaagattgaagatatcaaagctggtgattttggtgaagtcaaagaagtagttatcaccaaagatgacactttgctgttgaaaggtaatggcataccatctgacattgaacaaagagctgaacaaataagagatcagatcaaggatacttcatctgaatatgaaaaagaaaaactgcaagaacgtcttgcaaggttagcatctggtgttgctgtattgaaaattggcggtagtagtgaagttgaagtcaatgagaaaaaagaccgtgttactgacgcactaaatgccacccgtgcagctgttgaagaaggtattgttcctggaggtggtactgcattaatccgttgtggacctggattaaatgcaatcaaagtagccaataaagatcagaaaattggtattgatattgtgcgtaaagcattaaccatgccatgtatgacaattgcccgaaatgccggtgttgatgctggtgttgtagttgctaaagtgtctgaaggtaaagacgcttttggatatgatgcaatgaacgacgaatatgttaacatggttgaaaaaggaatcatcgatccaaccaaagttgtcagaacagcaataactgatgctgcaggtgttgcgtcactattaactacagcagaagcagttatcactggattaccaaagaaagaggagccattaccaggaggtggtatgggaggaatgggtggaatgggcggtatgggaggaatgggtggcatgatgtaa

SEQ ID NO: 9051 - protein, 572 aa, Acyrthosiphon pisum
MYGISAALARNNVPKYFARSYAKDIKFGPEVRKLMLEGVDILADAVAVTMGPKGRNVILEQSWGSPKITKDGVTVAKGIELQDKFQNIGAKLVQDVANNTNDEAGDGTTTATVLARAIAKEGFESIIEGANPIEIRRGVMLAVDEVKVQLGNLSKKVQSAEEIVQVATISANGDTSIGQLISSAMEKVGKDGVITVKDGKTLEDELEVIEGLKFDRGYISPYFINSAKGAKVEFQDALVLFSEKKISSAQSLIPALELANAQRKPLVIVAEDLDGEVIGMLVLNRLKIGLNVAAVKAPGFGDNRKSTLTDMAIATGGVVFGQEGNELKIEDIKAGDFGEVKEVVITKDDTLLLKGNGIPSDIEQRAEQIRDQIKDTSSEYEKEKLQERLARLASGVAVLKIGGSSEVEVNEKKDRVTDALNATRAAVEEGIVPGGGTALIRCGPGLNAIKVANKDQKIGIDIVRKALTMPCMTIARNAGVDAGVVVAKVSEGKDAFGYDAMNDEYVNMVEKGIIDPTKVVRTAITDAAGVASLLTTAEAVITGLPKKEEPLPGGGMGGMGGMGGMGGMGGMM

SEQ ID NO: 9052 - DNA, 1878 bp, Drosophila ananassae
  CDS (1)..(1878)
atggacacgggaaaggggtcggaggactggagcccatcaatgccgcggggaatgaatttggcagccggcataaataaatttggacttgatgtaggtcagtactgtgtacgccagtctctcgtaacagacgaagagagtcctctcgtcatgattcgcatgttttccacttactccaccaccctgcagcgtggcattagaatcaaccggcatatgtggggcacccgcttctatgccaaggatgtcaagttcggtcccgaggtgagggccatgatgctgcagggggtggacgtgttggctgacgccgtggctgtgaccatgggtcccaagggacgcaatgtgatcatcgagcagagctggggatcccctaaaatcaccaaggatggtgtgacggtggccaagtcgattgccctcaaggacaagttccagaatattggggccaagctggtacaggacgtggccaacaacactaacgaggaggcgggcgacggcaccaccacagccaccgtcctggcccgtgccattgccaaggaaggtttcgagaagatttctcgcggcgccaatcccgtggagatccggcgcggtgttatgctggctatcgactcggtcaaggacaacttgcgtaaaatgtcgcgcccggtgagcaccccggaggagatctgccaggtggccaccatttcggccaatggcgacaagtcggtaggcaacctcatcagcgaggccatcaagaaagtgggccgcgacggagttatcacggtcaaggatggcaaaaccctctgcgacgaattggaagttatcgagggcatgaagtttgaccgcggctacatctcaccgtacttcattaacgcctccaagggggccaaggccgagttccaggatgccctgctgctcttctgcgaaaagaagatcaagtctgcccctagcatcgttccagccttggagctggcgaatgcgcagcgcaagccgctgataatcatagccgaggatgtcgagggcgaggcgctaagcaccatggtggttaaccgcctgaaagtgggcctccaggtgtgtgccgtgaaagcacccggcttcggggacaatcgcaaggagaccatggaggacatggccatcgccaccggaggcatcgtcttcggggatgaggccaacctagtgcgactcgaggacgtaaagctaagcgacttcgggcgagtcggcgaggtggtggtcaccaaggacgacaccatgctgttgaagggcaagggacaaaaggagcagatcgataagagagtggagaacctacgcgaggccatcaaggagtcgacctccacctacgagaaggagaagatgcaagagcgtctggcacgtctctcctcgggagtagccctgcttcgggtgggaggctccagcgacatagaggttagtgaaaagaaggatcgtgtcaatgacgccctgaacgccactcgtgctgccgtggaggagggcatcgtgcccggtgggggcaccgccttgcttcgctgcatccagaagctaaacgacatcaacggcgccaacgaggaccagaagctgggcgtcgaaatcatccggcgcgctcttcgcatgccgtgccttacaatcgccaagaacgctggcgtggatggagctatggtggttgccaaggttgagatcctggacggggactatggctacgatgccctgaagggcgagtacggcaacatgatagagcgtggcatcatcgaccccaccaaggtggtgcgcaccgccatcacggatgccgctggcgtggcttcgctcctgaccaccgccgaggcggttgtcaccgaactgccgcttgaggaggccgccgctgccggagctgcagccggactgggtgctctgggcggaatgggaggtatgggcatgtag

SEQ ID NO: 9053 - protein, 625 aa, Drosophila ananassae
MDTGKGSEDWSPSMPRGMNLAAGINKFGLDVGQYCVRQSLVTDEESPLVMIRMFSTYSTTLQRGIRINRHMWGTRFYAKDVKFGPEVRAMMLQGVDVLADAVAVTMGPKGRNVIIEQSWGSPKITKDGVTVAKSIALKDKFQNIGAKLVQDVANNTNEEAGDGTTTATVLARAIAKEGFEKISRGANPVEIRRGVMLAIDSVKDNLRKMSRPVSTPEEICQVATISANGDKSVGNLISEAIKKVGRDGVITVKDGKTLCDELEVIEGMKFDRGYISPYFINASKGAKAEFQDALLLFCEKKIKSAPSIVPALELANAQRKPLIIIAEDVEGEALSTMVVNRLKVGLQVCAVKAPGFGDNRKETMEDMAIATGGIVFGDEANLVRLEDVKLSDFGRVGEVVVTKDDTMLLKGKGQKEQIDKRVENLREAIKESTSTYEKEKMQERLARLSSGVALLRVGGSSDIEVSEKKDRVNDALNATRAAVEEGIVPGGGTALLRCIQKLNDINGANEDQKLGVEIIRRALRMPCLTIAKNAGVDGAMVVAKVEILDGDYGYDALKGEYGNMIERGIIDPTKVVRTAITDAAGVASLLTTAEAVVTELPLEEAAAAGAAAGLGALGGMGGMGM

SEQ ID NO: 9054 - DNA, 1722 bp, Drosophila ananassae
  CDS (1)..(1722)
atgttccgtttacctgtttctcttgcccgcacctccatcagccggcagctggccatgcgcggctatgccaaggatgtcaagttcggacccgaggtgcgcgccatgatgctccagggcgtggacgtgctggccgatgccgttgccgtcaccatgggccccaagggtcgtaacgtgatcatcgaacagtcgtggggctcgcccaagatcaccaaggacggtgtcaccgtcgccaagtccattgagctgaaggacaagttccagaacattggcgccaagctggtccaggacgtggccaacaacaccaacgaggaggccggcgacggcaccaccactgccaccgtgctggcccgcgccatcgccaaggaaggcttcgagaagatctccaagggagccaatcccgtagagatccgtcgcggcgtcatgctggccgtcgagactgtcaaggacaacctgaaggccatgtcgcgcaccgtgaagacgcccgaggagatcgcccaggtggccaccatctcggccaacggcgaccaggccatcggcaagctgatcagcgacgccatgaagaaggtgggacgcgacggcgtcatcaccgtcaaggacggcaagaccctcaacgacgagctggaggtgatcgagggcatgaagttcaatggcggttacttctttccctacttcatcaactcgaccaagggcgccaaggtcgagttccaggacgccctcctgctcctctccgagaagaagatctcctcggtgcagagcatcatccccgccctggagctggccaacgcccagcgcaagcccctggtcatcatcgccgaggacatcgatggcgaggccttgagcaccctggtggtgaaccgtctgaagatcggcctgcaggtggccgccgtcaaggctcccggattcggtgacaaccgcaagagcaccctcaccgacatggccatcgcttccggcggcattgtcttcggcgatgacgccgatctggtcaagctggaggacgtgaagatcagcgacctgggtcaggtgggcgaggtggtggtcaccaaggacgacaccctgctcctgaagggcaagggcaagaaggaggacgtggcccgtcgcgtcgaccagctcaaggatcagatcaccgagaccacctccgagtacgagaaggagaagctgcaggagcgtctggcccgcctggcatccggcgttgccctgctgcgcgtcggtggctccagcgaggtggaggtcaacgagaagaaggaccgtgtccacgatgccctgaacgctacccgggctgccgtcgaggagggaatcgttcccggaggcggcaccgctctcctgcgctgcatcgagaaactggatgacgtgaagacccagaacgaggatcagaaccttggcgtggaaatcgtgcgccgtgccctgcgcatgccctgcatgacgatcgccaagaacgccggcgttgatggctccatggtggtggccaaggttgagacccagaagggcgactacggctacgatgccctgaagggcgaatacggcaacctgatcgagaagggcatcatcgatcccaccaaggtggtgcgcaccgctatcaccgacgcctccggtgtcgcctctctcctgaccaccgccgaggccgtcgtcaccgagatccccaaggaggacgctggcccgggaatgggcggcatgggtggaatgggcggtatgggaggcatgggcggtatgggtggcatgatgtaa

SEQ ID NO: 9055 - protein, 573 aa, Drosophila ananassae
MFRLPVSLARTSISRQLAMRGYAKDVKFGPEVRAMMLQGVDVLADAVAVTMGPKGRNVIIEQSWGSPKITKDGVTVAKSIELKDKFQNIGAKLVQDVANNTNEEAGDGTTTATVLARAIAKEGFEKISKGANPVEIRRGVMLAVETVKDNLKAMSRTVKTPEEIAQVATISANGDQAIGKLISDAMKKVGRDGVITVKDGKTLNDELEVIEGMKFNGGYFFPYFINSTKGAKVEFQDALLLLSEKKISSVQSIIPALELANAQRKPLVIIAEDIDGEALSTLVVNRLKIGLQVAAVKAPGFGDNRKSTLTDMAIASGGIVFGDDADLVKLEDVKISDLGQVGEVVVTKDDTLLLKGKGKKEDVARRVDQLKDQITETTSEYEKEKLQERLARLASGVALLRVGGSSEVEVNEKKDRVHDALNATRAAVEEGIVPGGGTALLRCIEKLDDVKTQNEDQNLGVEIVRRALRMPCMTIAKNAGVDGSMVVAKVETQKGDYGYDALKGEYGNLIEKGIIDPTKVVRTAITDASGVASLLTTAEAVVTEIPKEDAGPGMGGMGGMGGMGGMGGMGGMM

SEQ ID NO: 9056 - DNA, 1956 bp, Drosophila erecta
  CDS (1)..(1956)
atgttccggtcgtgtgtgcccaaggcgattagctcaagtcgctgtttcgcgcgaatgtactcaaaggaagtgcgcttcggatccggagtccgggcactgatgatccggggcgttgatgttctggcggatgccgtggctgtgaccatggggcccaagggtcgcagtgtgatcgtggagcggccctggacctcgccgaagatcaccaaggacggcttcacggtggcgcgctcgattgccctgaaggaccagcacatgaatctgggcgccaagttggtgcaggatgtggccgataatacgaatgagtcggcgggtgacggcaccactacagcaactgttttggctcgagcgattgccaaggagggattcaatcagatcaccatgggggctaatcccgtggagattcgtcgcggtgtaatgttggccgtggatgtcgtgaaggagaagctgaaggaaatgtccaaggccgtggaaactcgtgaggagatccaacaagtagccaccctctccgcgaatggggatactgagattgggcgactcattggagaggccaccgataaagtgggtccaaaaggaactattacagttaaggagggcaagcgactgaaggatgagctcaacattatccaaggcctgcgcttcgacaacggctatgtgtcgccctttttcgtaaacagctccaaggggtccaaggtggagtttgccaacgcctttgtcatgatatccctgaagaagatcactggactctcgcagattgttaaaggtctggagcaatccctgcggcagcgtcggcccctgatcatcatagccgaggacatcagcggcgaagccctcaatgccttggttctgaacaagctacggttgggcctccaggtgtgcgccgttaagtcgcccagttatggacaccatcgcaaggagctcataggcgatatatccgctgccacgggagcaactatattcggcgatgacatcaactactccaaaatggaagatgctaagctggaggatctgggtcaggtgggcgaggctgtgatcagcaaggacagcaccatgctgctgcagggcaagccaaagtctggactgctggaaatgcgcatccagcagattcaagatgaactggccgacaagcaaaccaagccggagcagcgggatcgtctgcgccaacgtctatccgccctcacgaagggcgtggcagtgctccacattggcggaggcagcgaagtggaggtgaatgagaagaaagaccgtgtggtggacgccttgaatgccactcgagcggccatcgaagagggcatcgtccctggtggcggtactgccttcttgcgctgcattccctatctacaggagctccaaatggagagtgcagatctgcagaagggcgtcgatatcatctgcaatgccctgaggatgccttgccaaaccattgcccaaaacgccggagtggatggcccaatggtggtggccaaggtgttgactggctcgggggactacggctacgatgccatgggcgatgagtactgtccgctggtcgagaagggtattattgatcccacgaaagtgctgcggactgccatcacggatgcagctggagtggcctctcttctgagcaccaccgaggtggttatcaccgactcccggaacgatgatcttctgtccaagttggcaggagctggcggcggaatggatgatggaatggacatgaacatgggtggcttagaggagctggcagccttaagtggattgggtggcatgggaggaatgggaggaatgggtggtatgggtggtatgggagctatgggaggaatgggtggcggcttcggcggaatgggcggtggtggtggtatgagcgcttcttccagcagtgatggtcccactgccgaggagatgaacgaaatggtcaaggctattcccggcatggagcaagtagaggtgcgggacattgacagtggaatgatgtag

SEQ ID NO: 9057 - protein, 651 aa, Drosophila erecta
MFRSCVPKAISSSRCFARMYSKEVRFGSGVRALMIRGVDVLADAVAVTMGPKGRSVIVERPWTSPKITKDGFTVARSIALKDQHMNLGAKLVQDVADNTNESAGDGTTTATVLARAIAKEGFNQITMGANPVEIRRGVMLAVDVVKEKLKEMSKAVETREEIQQVATLSANGDTEIGRLIGEATDKVGPKGTITVKEGKRLKDELNIIQGLRFDNGYVSPFFVNSSKGSKVEFANAFVMISLKKITGLSQIVKGLEQSLRQRRPLIIIAEDISGEALNALVLNKLRLGLQVCAVKSPSYGHHRKELIGDISAATGATIFGDDINYSKMEDAKLEDLGQVGEAVISKDSTMLLQGKPKSGLLEMRIQQIQDELADKQTKPEQRDRLRQRLSALTKGVAVLHIGGGSEVEVNEKKDRVVDALNATRAAIEEGIVPGGGTAFLRCIPYLQELQMESADLQKGVDIICNALRMPCQTIAQNAGVDGPMVVAKVLTGSGDYGYDAMGDEYCPLVEKGIIDPTKVLRTAITDAAGVASLLSTTEVVITDSRNDDLLSKLAGAGGGMDDGMDMNMGGLEELAALSGLGGMGGMGGMGGMGGMGAMGGMGGGFGGMGGGGGMSASSSSDGPTAEEMNEMVKAIPGMEQVEVRDIDSGMM

SEQ ID NO: 9058 - DNA, 1734 bp, Drosophila erecta
  CDS (1)..(1734)
atgatgcgcatgttcaccagttacaccaacactgtgcagcacaccgcaaggatcagtcatgtcctgtgggcccgcagctacgccaaggatgtgaagttcgggccagaggtgagggccatgatgctgcagggagtggacgtgctggcggatgctgtggccgtgaccatgggaccaaaaggacgcaacgtgatcattgagcagagctggggatcccccaagatcaccaaggacggcgtgacggtggccaagtcgatcgcgctgaaggacaagttccagaacatcggagccaagctggtgcaggatgtggccaacaatacaaacgaggaggcgggcgacggcaccaccacggccaccgtgctggcgcgcgccattgccaaggagggattcgagaagatctcacggggtgccaatccggtggagatacgtcgcggagtgatgctggccatcgagacggtcaaggacaatctacgccggttgtcccggccagttagcacgcccgaggagatctgccaggtggcgaccatctctgcgaacggcgacaagtcggtgggaaacctcatcagcgaggccatcaaaaaggtgggtcgggacggggttatcacggtcaaggatggcaagaccctgtgcgacgaactggaggtgatcgagggcatgaagattgaccgcggctacatttcgccgtacttcatcaacacctccaaaggagcaaaggtggagttccaggacgccctgctcctcttctgcgagaagaaaatcaagtcggcacccagcatcgtgcctgccctggagttggccaatgcgcagcgcaagcccttggtgattatcgccgaggacttggaggcggaggcactcagcaccctggtggtgaaccgcctgaaggtgggcctccaggtgtgcgcggtgaaggcgcccggctttggggacaatcgcaaggagaatctgacggacatggccgtggccaccggtggcatcgtgttcggcgacgaggccaatctggtgcggctcgaggacatcaagatgagcgactttgggcgtgccggtgaggtggtggtcacaaaggacgacacaatgctgctcaagggcaagggacagaagggggatgtggataagagagtcgagggcctgcgcgaggccatcaaggagtccacctcctcctacgaaaaggagaaaatgcaggagcgcctggcgcgcctctcctccggcgtggccttgctgcgagtgggcggctccagtgatgtggaggttagcgagaagaaggatcgcgtcatcgatgccctgaatgccacccgcgctgccgtggaggagggaatcgtgcccggcggcggcaccgccctgctgcgttgcatccagaagctgaacgacctgaagggcgccaacgaggaccaaaacatgggcatcgagatcatccggcgtgccctgcgcatgccctgcctcacgattgccaagaacgccggcgtggatggcgcaatggtggtggccaaggtggagatcttcgacggcgactatggctacgatgcgttgaagggcgagtacggcaacatgatcgagcgcggtatcatcgatcccaccaaggtggtgcgcaccgccatctcggacgcggccggagtcgcctctcttctgaccaccgccgaggctgtggtcaccgagctgcctttggaggatgccgcagctgccggagcggcagccggaatgggcgcccttggcggcatgggcatgggcggaatgggcatgtag

SEQ ID NO: 9059 - protein, 577 aa, Drosophila erecta
MMRMFTSYTNTVQHTARISHVLWARSYAKDVKFGPEVRAMMLQGVDVLADAVAVTMGPKGRNVIIEQSWGSPKITKDGVTVAKSIALKDKFQNIGAKLVQDVANNTNEEAGDGTTTATVLARAIAKEGFEKISRGANPVEIRRGVMLAIETVKDNLRRLSRPVSTPEEICQVATISANGDKSVGNLISEAIKKVGRDGVITVKDGKTLCDELEVIEGMKIDRGYISPYFINTSKGAKVEFQDALLLFCEKKIKSAPSIVPALELANAQRKPLVIIAEDLEAEALSTLVVNRLKVGLQVCAVKAPGFGDNRKENLTDMAVATGGIVFGDEANLVRLEDIKMSDFGRAGEVVVTKDDTMLLKGKGQKGDVDKRVEGLREAIKESTSSYEKEKMQERLARLSSGVALLRVGGSSDVEVSEKKDRVIDALNATRAAVEEGIVPGGGTALLRCIQKLNDLKGANEDQNMGIEIIRRALRMPCLTIAKNAGVDGAMVVAKVEIFDGDYGYDALKGEYGNMIERGIIDPTKVVRTAISDAAGVASLLTTAEAVVTELPLEDAAAAGAAAGMGALGGMGMGGMGM

SEQ ID NO: 9060 - DNA, 1722 bp, Drosophila erecta
  CDS (1)..(1722)
atgttccgtttgccagtttcgcttgctcgctcctccatcagccgccagttggccatgcgcggctatgcgaaggacgtgcgtttcggtcctgaggtgcgcgccatgatgctccagggcgtcgatgtgctggccgatgctgtggcggtgaccatgggccccaagggtcgcaatgtgatcatcgagcagtcgtggggttcgcccaagatcaccaaggacggcgtcactgtggccaagtccattgagttgaaggacaagttccagaacattggtgccaagctggttcaggatgtggccaacaacactaatgaggaggctggtgatggcaccaccacggccaccgttctggcccgcgccatcgccaaggagggctttgagaagatctccaagggcgccaatcccgtcgagatccgtcgtggtgtcatgctggccgttgagaccgtcaaggataacttgaagtccatgtcgcgtcccgtgagcacgcccgaggagatcgcgcaggtggccaccatctcggccaacggcgatcaggccatcggcaacctcatcagcgaggccatgaagaaggtgggacgcgatggcgtcatcaccgtcaaggatggcaagaccctcaacgatgagctggaggtgatcgagggcatgaagttcgatcgcggctacatctctccctacttcatcaactcatcgaagggcgctaaggtggagtttcaggatgccctgctcctgctgtccgagaagaagatctcatcggtgcagagcatcattcccgctctggagctggccaacgcccagcgcaagcccctggtcatcattgccgaggatatcgatggtgaggccctgagcaccctggtggtgaaccgcctcaagatcggtctgcaggtggctgccgtcaaggctcccggattcggtgacaaccgcaagagcactctcaccgacatggccatcgcctccggcggcattgtcttcggcgatgatgctgatctcgtcaagctggaggatgtcaaggtcagcgatttgggccaggtcggcgaagtggtgatcaccaaggacgacaccctgctgctgaagggcaagggcaagaaggatgatgtgctccgtcgcgccaatcagatcaaggaacagatcgaggataccacctccgagtacgagaaggagaaactgcaggagcgtctggcccgcttggcctccggcgttgccctgctgcgcgttggtggctccagcgaggtggaggtcaacgagaagaaggatcgcgttcacgatgccctgaacgccacccgcgctgccgtcgaagagggaatcgttcccggaggcggcaccgctctgctgcgttgcattgagaagctggagggtgtccagaccaccaatgaggatcagaaactcggcgtggagattgtgcgtcgtgccctgcgcatgccatgcatgacgattgccaagaatgccggcgttgatggcgccatggtggtggccaaggtggagacccagaccggtgactacggctacgatgcgctgaagggcgagtacggcaacctgatcgagaagggcatcatcgatcccaccaaggtggtgcgcaccgccatcacagatgcctccggtgtggcctcgctgctgaccaccgccgaggctgtggttaccgagatccccaaggaggatggtgctccaggcatgcccggcatgggaggtatgggcggcatgggaggcatgggcggtatgggtggcatgatgtaa

SEQ ID NO: 9061 - protein, 573 aa, Drosophila erecta
MFRLPVSLARSSISRQLAMRGYAKDVRFGPEVRAMMLQGVDVLADAVAVTMGPKGRNVIIEQSWGSPKITKDGVTVAKSIELKDKFQNIGAKLVQDVANNTNEEAGDGTTTATVLARAIAKEGFEKISKGANPVEIRRGVMLAVETVKDNLKSMSRPVSTPEEIAQVATISANGDQAIGNLISEAMKKVGRDGVITVKDGKTLNDELEVIEGMKFDRGYISPYFINSSKGAKVEFQDALLLLSEKKISSVQSIIPALELANAQRKPLVIIAEDIDGEALSTLVVNRLKIGLQVAAVKAPGFGDNRKSTLTDMAIASGGIVFGDDADLVKLEDVKVSDLGQVGEVVITKDDTLLLKGKGKKDDVLRRANQIKEQIEDTTSEYEKEKLQERLARLASGVALLRVGGSSEVEVNEKKDRVHDALNATRAAVEEGIVPGGGTALLRCIEKLEGVQTTNEDQKLGVEIVRRALRMPCMTIAKNAGVDGAMVVAKVETQTGDYGYDALKGEYGNLIEKGIIDPTKVVRTAITDASGVASLLTTAEAVVTEIPKEDGAPGMPGMGGMGGMGGMGGMGGMM

SEQ ID NO: 9062 - DNA, 1740 bp, Drosophila grimshawi
  CDS (1)..(1740)
atgttgagatttttgactaagtccacgctgcaacgtagctcccaactggtgggacagaatctgtgtcgcggatatgccaaggatgtcaagtttggaccagaggtgagggcgatgatgctgcagggcgtggatgttcttgcagatgccgtcgccgtaaccatgggtcccaaaggacgtaatgtgatcatcgaacagagttggggatcaccgaaaataaccaaggatggggtgactgtggctaagtcaatagcgctaaaggataagttcatgaacatcggtgccaaactggtgcaggatgtggccaacaacacgaatgaggaggccggtgatggcaccacaacggcaacggtgctcgctcgtgccattgccaaggaaggattcgagaagatctcccgtggcgctaatcctgtggagatccgacgtggcgtcatgttggccattgactcggtcaaggagaatctgcgcagtatgtcgcggccggttagcactcccgaggagattgcccaggtggcaaccatctcggcaaatggtgacaaatcggtgggcaatctaatcagtaaggcaatcaagaaggtcggacgcgaaggcgtcattaccgtcaaggatggcaaaacgatgaatgatgagctggaggtgattgagggcatgaagtttgatcgaggctacatttcgccgtacttcatcaacagctccaagggcgccaaagttgaattccaggatgcattgctcctcttctgcgagaagaaaatcaagacggcgacgagcattgtgccagctcttgaattggccaatactcaacggaagcctttggtcatcattgccgaggatgtcgaaggtgaagcgttaagcaccatggtggtgaatcgcctcaaggtcggactgcaggtgtgcgctgtgaaggccccgggctttggggataatcgcaaagagtcgctggctgatatggctattgccaccggtggcatcgtctttggcgacgaatcgaatctggtgcgcctggaggacattaaggtgagcgattttgggcgagttggggaaattgtggtcaccaaggaggataccatgctgctgaagggttttggacagcgtccgatgattgataagcgtctggagaatctgcgcgatgccatcaaggaatctacttccaactatgagaaggagaaaatgcaagagcgtctggccaagctgtcgtcgggtgttgccctgctccgcgtcggaggctccagcgatgtggaggtgaatgagaaaaaggatcgtgtgaatgatgccctcaacgccactcgagcggccatcgaggagggcattgtaccaggaggcggcacagcgctactccgctgcatcggcaagttaaatgatctgcggggtgccaatgaggatcaaaatctgggcatcgatattatacgtcgtgctctgcgcatgccctgcatgacaattgcaaagaatgccggtgtcgatggtgccatggtggtggccaaggtcgagattctagacggcgactatggctacgatgcactcaagggcgaatacggcaacatgatcgagcgtggcatcatcgatcccaccaaggtggtacgcacggcgatcattgatgccgctggtgttgcatcgctgctgaccactgccgaggcggtcgtcaccgagctacccctggaggaggcaaatccaattgctggcatgggcggcatgggtggcatgggcggaatgggcggaatgggtggcatgggtggactgggcatgtag

SEQ ID NO: 9063 - protein, 579 aa, Drosophila grimshawi
MLRFLTKSTLQRSSQLVGQNLCRGYAKDVKFGPEVRAMMLQGVDVLADAVAVTMGPKGRNVIIEQSWGSPKITKDGVTVAKSIALKDKFMNIGAKLVQDVANNTNEEAGDGTTTATVLARAIAKEGFEKISRGANPVEIRRGVMLAIDSVKENLRSMSRPVSTPEEIAQVATISANGDKSVGNLISKAIKKVGREGVITVKDGKTMNDELEVIEGMKFDRGYISPYFINSSKGAKVEFQDALLLFCEKKIKTATSIVPALELANTQRKPLVIIAEDVEGEALSTMVVNRLKVGLQVCAVKAPGFGDNRKESLADMAIATGGIVFGDESNLVRLEDIKVSDFGRVGEIVVTKEDTMLLKGFGQRPMIDKRLENLRDAIKESTSNYEKEKMQERLAKLSSGVALLRVGGSSDVEVNEKKDRVNDALNATRAAIEEGIVPGGGTALLRCIGKLNDLRGANEDQNLGIDIIRRALRMPCMTIAKNAGVDGAMVVAKVEILDGDYGYDALKGEYGNMIERGIIDPTKVVRTAIIDAAGVASLLTTAEAVVTELPLEEANPIAGMGGMGGMGGMGGMGGMGGLGM

SEQ ID NO: 9064 - DNA, 1881 bp, Drosophila grimshawi
  CDS (1)..(1881)
atgttccgttcgtatgtccgtgagtcgatacgttccagtcgtgcctttgctcgtgcctactccaaggctgtcacgtttggcgccgaggcgcgtgcccgaatgctgcatggcgtggatgtgctcgcggatgcggtggccgtcacgcttggtcccaagggtcgctgtgtgatcctcgaacgaccctggacatcgccaaaaatcaccaaagatggcgtgtctgtggcacgcgccatttcactgaaggatcagcatatgcagatcggtgcacgtctcgttcaggatgtggcggacagtacaaatcaaacggccggagatggcaccacaacggccacagtgctggcccgtagcattgccaaggagggctcccaacacattacacgcggcgcgaatcccatcgagattcggcggggggtcatgctggccgtcgatcatgtgaggcaggagctgcaacagatgtcccgtgcggtggagacgcgcgacgagatcgaacaggtggccacaatatcggcaaacggtgattccgagattggcaaactgattgcccaggccactgaccacgttggcaccaccggcaccatcaccgtcaaggagggcaaacgcctgaaggatgaactggaggtgctgcagggtatgcaattcgacaagggctacatttcgccgttctttgtgaatacaccgaagggtgccaaggtggagtacacaaatgcctatgttctgatcaccctgaagaaaatcaaatctctcaagcagatcgtccggggactggagcaaacgttgcgccaacgccgtccgctgctcatcattgctgaggatctggatggtgaggcactcaacgccctcgtcctcaatcgcctcaagacgggactacaagtttgtgccgtcaaagcacccgcctatggcgagtatcgcaagcagctgttgggcgatattgctgcggcgacgggtgccaccatctttgggaatgacaatgattatgccaagattgaggatgcgaaactgaaggactttggcgaggtgggtgaactgattgttaccaaggactcgaccatgctaatggagggtaagggcacacccgaaacgctcaagcgacgcattcaggagctgcaggacgaactggatgatcccgcaacgaagcccgaacagaaggttcgtctgcgtgcccgcatctccacgctaaccaatggagtggccgtcattcacattggcggcaccagcgaggtggaggtgggcgagaaaaaggatcgcgtcaatgatgccctcaatgcgacaagggcggccattgaggagggcattgtgcccggtgggggtacagccctgttgcgctgcatccctcgtctgcagcagctggagccggacaacgaggatctcgcgcaaggcatcgccattgtgtgcaaggctctgcgcatgccctgcatgacgatcgccaacaatgccggcgtcaatgcggccatggtagttgccaaagtaatgaatggcagcggtgactttggctacgatgccatgagggatgaatacggcgatctgattgacaagggcatcatcgatccgacgaaggtggtgcgcacggccatacaggatgcggccggtgttgcctccatgttgagcaccaccgaagtggtcatcaccgaggtgctcactcaaagtgcattgaatgctttgggagatggcggtggcggcgctggcttggaggaggcattgggtggcttagatctaggcggcatgggtggcatggatgcgctagccgcactgggtggcatgggaatggacgaaatgggtgcaatggatggcattagtaaagctgctgagatgaacgacgcagtgaagagtattcccggcatggagaatgtggaagtccatgacattgacagcagtcaaatgtga

SEQ ID NO: 9065 - protein, 626 aa, Drosophila grimshawi
MFRSYVRESIRSSRAFARAYSKAVTFGAEARARMLHGVDVLADAVAVTLGPKGRCVILERPWTSPKITKDGVSVARAISLKDQHMQIGARLVQDVADSTNQTAGDGTTTATVLARSIAKEGSQHITRGANPIEIRRGVMLAVDHVRQELQQMSRAVETRDEIEQVATISANGDSEIGKLIAQATDHVGTTGTITVKEGKRLKDELEVLQGMQFDKGYISPFFVNTPKGAKVEYTNAYVLITLKKIKSLKQIVRGLEQTLRQRRPLLIIAEDLDGEALNALVLNRLKTGLQVCAVKAPAYGEYRKQLLGDIAAATGATIFGNDNDYAKIEDAKLKDFGEVGELIVTKDSTMLMEGKGTPETLKRRIQELQDELDDPATKPEQKVRLRARISTLTNGVAVIHIGGTSEVEVGEKKDRVNDALNATRAAIEEGIVPGGGTALLRCIPRLQQLEPDNEDLAQGIAIVCKALRMPCMTIANNAGVNAAMVVAKVMNGSGDFGYDAMRDEYGDLIDKGIIDPTKVVRTAIQDAAGVASMLSTTEVVITEVLTQSALNALGDGGGGAGLEEALGGLDLGGMGGMDALAALGGMGMDEMGAMDGISKAAEMNDAVKSIPGMENVEVHDIDSSQM

SEQ ID NO: 9066 - DNA, 1722 bp, Drosophila grimshawi
  CDS (1)..(1722)
atgttccgcctaccaatttcacttgcacgcaccaacatcagccgccaggtggcgctgcgccgctatgcaaaggatgtcaaattcggacccgaggtgcgcgccatgatgctgcagggcgttgatgtgctagcggacgccgtggccgtcaccatgggacccaagggtcgcaacgtgatcatcgagcagtcgtggggctcgcccaaaatcaccaaggatggagtgacggtggccaaatccattgagctcaaggacaaattccagaacattggtgccaaactcgtccaggatgtggccaataataccaatgaggaggccggcgatggcaccaccaccgccacagtgctggcccgtgccattgccaaggagggtttcgagaagatctcgaagggcgccaatcccgttgagatccgtcgcggcgtcatgctggccgtggacaccgtcaaggagaatctgaagagcatgtcgcggccggtgaagacgcccgaggagattgcccaggtggcaacgatatcggcgaacggtgacctggccatcggcaaactaatcagcgatgcgatgaagcgtgtgggacgcgatggcgtcatcaccgtcaaggatggcaaaaccctaatcgatgagctggaggtgattgagggtatgaaattcgatcgcggctacatttcgccgtatttcatcaactcgtcaaagggcgccaaggtggagttccaggatgccctcctgctgctctcggagaagaaaatctcctcggtgcagagcatcattcccgccctcgagttggccaactcgcagcgcaagccgctggtcatcattgccgaggacatcgatggtgaggcactcagcactctggtggtgaatcgcctgaagatcggtctccaggtggccgccgtcaaagcacctggtttcggtgataatcgcaagtcaacattgaccgatatggccatcgcctcgggcggcattgtgttcggtgatgatgccgatctcgtcaagctcgaagatgtcaagatcagcgatttgggccaagtgggtgaggtggtcgtcaccaaggatgacacactcttgctgaagggcaagggcaagaaggaggatgtgcagcgtcgcgtcgatcagatcaaggaacagatcaccgacaccacctccgaatacgagaaggagaagctgcaggagcgtttggcacgtctcgcctctggcgttgcgctgctgcgcgtcggtggctccagcgaggtggaggtcaacgagaagaaggatcgcgtccatgatgcattgaatgcaacacgcgctgccgttgaagagggcatcgtgcccggcggtggcaccgctctgctccgctgcatcgagaaactggatgccgtcgccactcagaatgaggatcagaacctgggcgtggacattgtgcgtcgagcactgcgcatgccctgcatgacaattgccaagaatgctggtgtcgatggcgccatggttgtggccaaggtggagacccaatcgggtgactatggctacgatgcgctcaagagcgaatatggcaacctgatcgagaagggcatcattgatcccaccaaggtggtgcgcacagccatcactgatgcagccggtgttgcctcgctgctgaccaccgctgaggctgttgtcaccgaaatacccaaggaggatgctgctcctggcatgggcggtatgggtggcatgggcggcatgggtggcatgggcggtatgggtggcatgatgtaa

SEQ ID NO: 9067 - protein, 573 aa, Drosophila grimshawi
MFRLPISLARTNISRQVALRRYAKDVKFGPEVRAMMLQGVDVLADAVAVTMGPKGRNVIIEQSWGSPKITKDGVTVAKSIELKDKFQNIGAKLVQDVANNTNEEAGDGTTTATVLARAIAKEGFEKISKGANPVEIRRGVMLAVDTVKENLKSMSRPVKTPEEIAQVATISANGDLAIGKLISDAMKRVGRDGVITVKDGKTLIDELEVIEGMKFDRGYISPYFINSSKGAKVEFQDALLLLSEKKISSVQSIIPALELANSQRKPLVIIAEDIDGEALSTLVVNRLKIGLQVAAVKAPGFGDNRKSTLTDMAIASGGIVFGDDADLVKLEDVKISDLGQVGEVVVTKDDTLLLKGKGKKEDVQRRVDQIKEQITDTTSEYEKEKLQERLARLASGVALLRVGGSSEVEVNEKKDRVHDALNATRAAVEEGIVPGGGTALLRCIEKLDAVATQNEDQNLGVDIVRRALRMPCMTIAKNAGVDGAMVVAKVETQSGDYGYDALKSEYGNLIEKGIIDPTKVVRTAITDAAGVASLLTTAEAVVTEIPKEDAAPGMGGMGGMGGMGGMGGMGGMM

SEQ ID NO: 9068 - DNA, 1758 bp, Drosophila mojavensis
  CDS (1)..(1758)
atgttgcgcatgatttcgaaatgctcaaaattccatcgcggatccagcttcgcttaccagctggtgggccgggagctgtgccgcacctatgccaaggatgtgaagttcggcccagaggtgcgtgccatgatgctgcagggcgtggacgtgttggctgatgctgtggccgtgaccatgggacccaagggacgcaacgtgatcatcgagcagagctggggctccccgaagataaccaaggatggcgtcacggttgccaagtccatagcgctcaaggataagttcatgaacattggcgccaagctcgtccaggatgtggccaacaatacgaacgaggaagccggcgatggcaccaccacggccactgtgctggcccgcgccattgccaaggagggcttcgacaagatctcacgcggcgccaatcccgtcgagatccggcgtggcgtcatgctggccatcgagtcggtcaaggagaacctaagaaagatgtcgcgcccggtgaacacgcccgaggagatcgcccaggtggccaccatctcggccaatggcgacaagtccgtgggcaatctgatcagcgaggccatcaagaaggtgggacgcgagggtgtcatcaccgtcaaggatggcaagaccatgaacgacgagctggaggtcatcgagggcctgaagttcgaccgtggctacatctcgccgtacttcatcaacagctccaagggcgccaaggtggagttccaggatgccctgctgctcttctgcgagaaaaagattaagtcggccactagcattgtgcccgctctggaactggcgaatgcccagcgcaagcccttggtcatcattgccgaggatgtggagggcgaggccttgagcacgatggtggtgaatcgcttaaaggtcggactgcaggtctgtgccgtgaaggcgcccggctttggcgacaatcgcaaggagacgctggcggacatggccattgccacgggcggtctggtgttcggagatgaagcgaacatggtgcggctcgaggacatcaaggtcagcgactttggacgtgtgggcgagatcgtggtcaccaaggaggacaccatgctgctgaagggccacggccagcggcagatgatcgacaagcgggtggagaatctgcgcgaggccatcaaggagaccacctcgggctatgagaaggagaagatgcaggagcgcctggccaagctctcctcgggcgtggccctgctgcgcgtcggcggctccagcgacgtggaggtgggcgagaagaaggatcgcgtgaatgatgcactcaatgccacgcgcgccgccatcgaggagggcatcgtgcccggcggaggcaccgccctgttgcgctgcatcgccaagctgatggatctgaagggcgccaacgaggatcagaatatgggcatcgagatcatacgacgtgccctgcgcatgccctgcctgaccattgccaagaatgccggcgtcgatggcgccatggtcgtggccaaggtggagattctcgacggggactatggctatgatgcgctcaagggcgaatatggcaacatgatcgagcgcggcatcatcgatcccaccaaggtggtgcgcacggcgatcatcgacgcggccggcgttgcctcgctgctgaccacggccgaggccgttgtcacggagctgcccctggaggaggccaatcccatgggcggcatgggcggcatgggtggcatgggcggcatgggaggcatgggcggcggcatgggcggtctgggcatgtag

SEQ ID NO: 9069 - protein, 585 aa, Drosophila mojavensis
MLRMISKCSKFHRGSSFAYQLVGRELCRTYAKDVKFGPEVRAMMLQGVDVLADAVAVTMGPKGRNVIIEQSWGSPKITKDGVTVAKSIALKDKFMNIGAKLVQDVANNTNEEAGDGTTTATVLARAIAKEGFDKISRGANPVEIRRGVMLAIESVKENLRKMSRPVNTPEEIAQVATISANGDKSVGNLISEAIKKVGREGVITVKDGKTMNDELEVIEGLKFDRGYISPYFINSSKGAKVEFQDALLLFCEKKIKSATSIVPALELANAQRKPLVIIAEDVEGEALSTMVVNRLKVGLQVCAVKAPGFGDNRKETLADMAIATGGLVFGDEANMVRLEDIKVSDFGRVGEIVVTKEDTMLLKGHGQRQMIDKRVENLREAIKETTSGYEKEKMQERLAKLSSGVALLRVGGSSDVEVGEKKDRVNDALNATRAAIEEGIVPGGGTALLRCIAKLMDLKGANEDQNMGIEIIRRALRMPCLTIAKNAGVDGAMVVAKVEILDGDYGYDALKGEYGNMIERGIIDPTKVVRTAIIDAAGVASLLTTAEAVVTELPLEEANPMGGMGGMGGMGGMGGMGGGMGGLGM

SEQ ID NO: 9070 - DNA, 1917 bp, Drosophila mojavensis
  CDS (1)..(1917)
atgtttcgttcgtatgtacggaaggccgttcggtctagccgggcattcgcccgggcctactccaaggatgtggcgtttggtgcagatgcgcgtgcaaggatgctgcgcggcgtggatgtactcacggatgctgtcgccgtcacactgggtcctaagggacgcagcgtcatattggagcgaccctggacctcgcctaaaataacgaaggacggtgtctcggtggcgcgtgcgatttctctgaaggatcagcacatgcagctgggcgctcgtctggtgcaggacgtcgcggacaatacgaatcagtcggccggcgacggcaccacaacggcaaccgtgctggctcgttgcattgccaaggagggctttcagtacataacgaagggtgccaatccagtagagatacgacgtggcgtaatgctggccgtcgagcatgtcaagcaggagctgaagctgatgtcgcgtacggtcgagacacgggaggagattgaacaggtggccacgatttcggcgaacggcgacacgcagattggacgcctcattgcggatgcaacggatcgtgtgggtcgcaccggcaccatcaccgtcaaggagggcaaacggctcaaggatgagctggaggtgctgcagggtctgcaatttgacaagggctacatctcgccctttttcgtgaacacggccaagggcgccaaggtggagtacaccaatgcctatgtgctgatcacacacaaaaagatcaattcgctcaagcagattctgcgagcgctggagcagtcgctgcgacaacgccgtcccctgctcatcattgcagaggacattgatggcgaggcgttgaacgctctggtgctcaaccggctcaagctgggtctgcaggtgtgcgccgtcaagccgcctgcctatggcgagtaccgcaagcagctgattggagatattgcggtcgccacgggcgccacggtgtttggggatgacgtaaactatgccaagatcgaggaggccaagattgatgactttggtcaggtgggcgagctggttgttaccaaggacacgaccatgctgctgcagagccagggcaagccggagctgctcaagcgacgcatcaaagagctacaggatgaactaaaggatcctgcaaccaagaacgagcagaaagaacgcctacgcactcgcatttcgacgctgaccaatggcgtcgccgtcatccacatcggcggcaccagcgaggtggaggtgggcgagaagcgggaccgcgtcaccgatgccctcaacgctacacgagctgccatcgaggagggcattgtgcctggaggtggcactgctctactccgttgtataccccgcctgctggaactgaatccggacaataaggacttgaagcatggcatcgacatagtcgcgcatgctctgcgcgtgccatgcctgaccattgcagcgaatgccggggtcgacgccgcccgggtggtggccaatgtgatgaatggggagggcgactttggctacgatgccatgaaaggtgaatacggtaatctcatcgacaagggcattattgatcccaccaaggtggtgcgtacggccatacaggatgcggctggcgttgcctcgctgctgagcaccaccgaggtcatcatcaccgatatccgcgataaggatcccctggctgctcttaatgccgccggtggtggtggtttagaggaagctctcggcggcatggatttaggcggcatgggcggcatggatgcactatctgcgttgggcggcatgggcggcatgggtggaatgggtggaatgggcagaatgggtggcatggatgacgtgggggaaatatgtaataagagtaaggccgcagagatgaacgaggcagttcagagtattcccggtatggaggatgtcacggtacatgatattgatagcactcagttgtag

SEQ ID NO: 9071 - protein, 638 aa, Drosophila mojavensis
MFRSYVRKAVRSSRAFARAYSKDVAFGADARARMLRGVDVLTDAVAVTLGPKGRSVILERPWTSPKITKDGVSVARAISLKDQHMQLGARLVQDVADNTNQSAGDGTTTATVLARCIAKEGFQYITKGANPVEIRRGVMLAVEHVKQELKLMSRTVETREEIEQVATISANGDTQIGRLIADATDRVGRTGTITVKEGKRLKDELEVLQGLQFDKGYISPFFVNTAKGAKVEYTNAYVLITHKKINSLKQILRALEQSLRQRRPLLIIAEDIDGEALNALVLNRLKLGLQVCAVKPPAYGEYRKQLIGDIAVATGATVFGDDVNYAKIEEAKIDDFGQVGELVVTKDTTMLLQSQGKPELLKRRIKELQDELKDPATKNEQKERLRTRISTLTNGVAVIHIGGTSEVEVGEKRDRVTDALNATRAAIEEGIVPGGGTALLRCIPRLLELNPDNKDLKHGIDIVAHALRVPCLTIAANAGVDAARVVANVMNGEGDFGYDAMKGEYGNLIDKGIIDPTKVVRTAIQDAAGVASLLSTTEVIITDIRDKDPLAALNAAGGGGLEEALGGMDLGGMGGMDALSALGGMGGMGGMGGMGRMGGMDDVGEICNKSKAAEMNEAVQSIPGMEDVTVHDIDSTQL

SEQ ID NO: 9072 - DNA, 1722 bp, Drosophila mojavensis
  CDS (1)..(1722)
atgttccgtttacccgtttcacttgcacgcacctctatcagccggcagctggcgatgcgcggctatgcaaaggatgttaaattcggcgctgaggtgcgcgccatgatgctgcagggcgtcgatgtgttagccgatgctgtggccgtgaccatgggacccaagggtcgcaacgtgatcattgagcagtcgtggggctcgccaaagatcaccaaggatggcgtgacagtggctaaggccattgagctgaaggacaagttccagaatatcggcgccaaactggtgcaggatgtggccaacaataccaatgaggaggccggcgatggcaccaccacggccaccgtgttggctcgcgccattgccaaggaaggctttgagaagatctcaaagggcgccaatcccgttgagattcgtcgcggcgtcatggtcgccgtcgagaccgtcaaggagaacctgaagaccatgtcgcgtcccgtcaagactccagaagagattgcccaggtggcgaccatctcggcaaacggtgaccaggccatcggcaaattgatcagcgacgccatgaagcgtgttggccgcgatggcgtcattaccgtcaaggatggcaagacccttatcgatgaactggaggtaatcgagggcatgaagttcgatcgtggctacatttcgccctacttcatcaactcgtcgaagggcgccaaggtcgagttccaagatgctttgttgttgctctccgagaagaagatctcctcagtgcagagcattatcccagctctcgagctggccaactcacagcgcaagcctctggtcatcattgccgaggatatcgatggcgaggctctcagcactctggtcgtcaatcgcttgaagatcggtctgcaggtggctgccgtcaaggcgcccggtttcggcgacaatcgcaaatccactctcaccgacatggccatcgcctcgggcggtattgtgttcggtgatgacgccgatctggttaaactggaggatgttaaggtcagcgatttgggccaagtgggcgaggtggtcatcacaaaggatgatacactgctgctgaagggcaagggcaagaaggaggatgtgcagcgtcgcgtcgatcagatcaaggaacagatcacagacaccacctctgagtacgagaaggagaaactgcaggagcgtctggctcgtcttgcctctggcgttgctctgctgcgcgtcggcggctccagcgaggtggaagtcaacgagaagaaggatcgtgtccatgatgctctgaacgccacacgcgctgccgtcgaagagggcatcgttcccggtggtggcaccgctctgctgcgctgcatcgagaaactggacgcagtcagcacacagaacgaggatcagaaactcggcgtggatattgtgcgtcgtgctctgcgcatgccctgcatgaccattgccaagaacgcgggcgttgatggcgccatggttgtggccaaggtggagacccaaaccggcgactatggctacgatgcactcaagggcgaatatggcaacctgattgagaagggcatcattgatcccaccaaggtggtgcgcaccgccatcaccgacgccgctggcgttgcctcgctgctgacgaccgccgaggctgtggtcactgagacgcccaaggacgatgctgctcctggcatgggcggcatgggtggtatgggaggcatgggtggtatgggtggtatgggtggcatgatgtaa

SEQ ID NO: 9073 - protein, 573 aa, Drosophila mojavensis
MFRLPVSLARTSISRQLAMRGYAKDVKFGAEVRAMMLQGVDVLADAVAVTMGPKGRNVIIEQSWGSPKITKDGVTVAKAIELKDKFQNIGAKLVQDVANNTNEEAGDGTTTATVLARAIAKEGFEKISKGANPVEIRRGVMVAVETVKENLKTMSRPVKTPEEIAQVATISANGDQAIGKLISDAMKRVGRDGVITVKDGKTLIDELEVIEGMKFDRGYISPYFINSSKGAKVEFQDALLLLSEKKISSVQSIIPALELANSQRKPLVIIAEDIDGEALSTLVVNRLKIGLQVAAVKAPGFGDNRKSTLTDMAIASGGIVFGDDADLVKLEDVKVSDLGQVGEVVITKDDTLLLKGKGKKEDVQRRVDQIKEQITDTTSEYEKEKLQERLARLASGVALLRVGGSSEVEVNEKKDRVHDALNATRAAVEEGIVPGGGTALLRCIEKLDAVSTQNEDQKLGVDIVRRALRMPCMTIAKNAGVDGAMVVAKVETQTGDYGYDALKGEYGNLIEKGIIDPTKVVRTAITDAAGVASLLTTAEAVVTETPKDDAAPGMGGMGGMGGMGGMGGMGGMM

SEQ ID NO: 9074 - DNA, 1731 bp, Drosophila sechellia
  CDS (1)..(1731)
atgatgcgcatgttccgatacaccaacacagtgcagcgtactgcaaagatcagtcacggcctgtgggtccgtagctatgccaaggatgttaagttcggaccggaggtgagggccatgatgctgcagggagtggacgtgctggcggatgccgtggccgtgaccatgggaccaaagggacgcaacgtgatcatcgagcagagctggggatcgccgaagattaccaaggacggcgtgacggtggccaagtcgattgccctcaaggacaagttccagaacatcggcgccaagctggtgcaggatgtggccaacaacacaaacgaggaggcgggtgatggcaccaccacggccaccgttctggcccgcgccattgccaaggagggattcgagaagatttcacggggtgccagtccggtggagatccgccgcggagtgatgctggccatcgagacggtcaaggacaaccttcgccggttgtcccgaccagttaacacgcccgaggagatctgccaggtggcgacgatctctgcgaatggtgacaagtcggtgggaaacctcatcagcgaggccatcaagaaagtgggtcgagacggcgttatcactgtcaaggatggcaagaccctttgcgatgaactggaggtgatcgagggcatgaaatttgaccgtggttacatttcaccgtacttcataaacacctccaagggagcaaaggtggagttccaggacgcgcttctcctcttttgcgagaagaaaatcaagtcggcacccagcatcgtgcctgccctggagttggccaacgcgcagcgcaagcccttggtcattatcgctgaggatttggaggcggaggcactcagcaccctggtggtgaaccgcctgaaggtgggcctccaagtgtgtgcggtgaaggcgcccggatttggagacaatcgcaaggagaatctgaaggacatggccgtggccaccggtggcatcgtgttcggagacgaggccaatatggtacggctcgaggatatcaagatgagtgattttggacgtgtcggcgaggtagttgtctcaaaggacgacacaatgctgctcaagggcaagggacagaaggcggatgtggagaaaagggtcgagggtctgcgcgaggccatcaaggagtcgacttcctcctacgagaaggagaagatgcaggagcgtttggcacgcctctcctccggtgtggccttgctgcgagtgggcggctccagcgacgtggaggtcagcgagaagaaggatcgagtcatcgatgccctgaatgccacccgtgctgccgtggaggagggaattgtgcccggtggcggcaccgccctgctgcgttgtatccagaagctgaacgacttgaagggcgccaacgaggaccaaaacatgggcatcgagatcatccggcgtgcgctgcgcatgccctgtctcacgattgccaagaatgctggcgtagatggtgcaatggtggtggccaaggtggagatcctcgacggcgactatggctacgatgccctgaagggcgagtacggcaacatgattgagcgcggtatcatcgatcccaccaaggtggtgcgcaccgccatctcggacgcagctggagtcgcctctcttctgaccactgcagaggctgtagttacggagttgccgttggaggaggccgccgctgctggagcggcagccggattgggtgctctcggcggcatgggcatgggcggtatgggcatgtaa

SEQ ID NO: 9075 - protein, 576 aa, Drosophila sechellia
MMRMFRYTNTVQRTAKISHGLWVRSYAKDVKFGPEVRAMMLQGVDVLADAVAVTMGPKGRNVIIEQSWGSPKITKDGVTVAKSIALKDKFQNIGAKLVQDVANNTNEEAGDGTTTATVLARAIAKEGFEKISRGASPVEIRRGVMLAIETVKDNLRRLSRPVNTPEEICQVATISANGDKSVGNLISEAIKKVGRDGVITVKDGKTLCDELEVIEGMKFDRGYISPYFINTSKGAKVEFQDALLLFCEKKIKSAPSIVPALELANAQRKPLVIIAEDLEAEALSTLVVNRLKVGLQVCAVKAPGFGDNRKENLKDMAVATGGIVFGDEANMVRLEDIKMSDFGRVGEVVVSKDDTMLLKGKGQKADVEKRVEGLREAIKESTSSYEKEKMQERLARLSSGVALLRVGGSSDVEVSEKKDRVIDALNATRAAVEEGIVPGGGTALLRCIQKLNDLKGANEDQNMGIEIIRRALRMPCLTIAKNAGVDGAMVVAKVEILDGDYGYDALKGEYGNMIERGIIDPTKVVRTAISDAAGVASLLTTAEAVVTELPLEEAAAAGAAAGLGALGGMGMGGMGM

SEQ ID NO: 9076 - DNA, 1752 bp, Drosophila virilis
  CDS (1)..(1752)
atgttgcgcatgctaacgaactctacgctgccgcgtggctcgcggatcgcgtgccagctggcggggcgcgagctgtggcgcggctatgccaaggatgtcaagtttgggcccgaggtgcgggccatgatgctgcagggcgtagacgtgctggcagatgccgtggccgtaacgatgggccccaagggtcgcaacgtaattattgagcagagctggggatcgccgaagataaccaaggacggcgtgacagtggccaagtccattgcattgaaggacaagttcatgaacattggcgccaaactggtgcaggatgtggctaacaatacgaatgaggaggcgggcgatggcaccaccacggccacggtgctggcacgcgccatcgctaaggagggcttcgagaagatctcacgtggcgcaaatcccgtggagatacgacgcggcgtcatgctggccattgattcggttaaggtgaatctgcgcaagatgtcgcggccggtcaatacgcccgaagagattgctcaagtggccaccatttcggccaacggcgacaaatctgtcggcaatctgatcagcgaggccatcaagaaggtgggacgcgatggcgtcattacggtcaaggatggcaagaccatgaacgacgagctcgaggtcatcgagggcatgaagttcgatcgcggctacatatctccatacttcatcaacagttccaagggcgccaaggtggagtttcaggatgcgctgctgctcttctgcgagaaaaagatcaagacggcggccagcattgtgcccgcgctcgagctggcaaatgctcagcgcaagccactggtcatcatagccgaggatgtcgagggcgaggcattgagcaccatggtcgtgaatcgtctgaaggtgggtctgcaagtgtgtgccgtcaaggcgcctggtttcggtgacaatcgcaaggagacactcgctgacatggccattgccacgggtggcctcgtcttcggggacgaggcaaacatggtgcgcttggaggatattaaggcgagcgatttcgggcgtgtcggtgagattgtcgtcaccaaggaggacaccatgctgctgaagggtcacggtcagcgtacaatgatcgagaagcggttggagaatctgcgcgaggccatcaaggagagcacctccaactatgagaaggagaagatgcaggagcgcctggccaagctatcctcgggcgtagcactgttgcgtgtcggcggctccagcgatgtggaggtgggcgagaaaaaggatcgtgtaaatgatgcactgaatgccacccgtgcggccatcgaggagggcattgtgcccggcggcggcactgctctgctgcgctgcatcaccaaactgaacgatctgaagggcatcaacgaggatcagaacatgggcattgaaataataagacgtgccctgcgcatgccctgcctgacaattgccaagaatgcgggcgtcgatggcgccatggtcgtggccaaggtggagattctggacggcgactatggctacgatgccctcaagggcgagtacggcaacatgattgagcgcggcatcattgatcccaccaaggtggtgcgcacggcgattatcgatgccgccggcgttgcatcactgctgaccaccgccgaggcggttgtcaccgagctgccattggaggatgccaatccgatgggcggcatgggcggcatgggtggcatgggtggtatgggtggcatgggcggcatgggcggcctgggcatgtaa

SEQ ID NO: 9077 - protein, 583 aa, Drosophila virilis
MLRMLTNSTLPRGSRIACQLAGRELWRGYAKDVKFGPEVRAMMLQGVDVLADAVAVTMGPKGRNVIIEQSWGSPKITKDGVTVAKSIALKDKFMNIGAKLVQDVANNTNEEAGDGTTTATVLARAIAKEGFEKISRGANPVEIRRGVMLAIDSVKVNLRKMSRPVNTPEEIAQVATISANGDKSVGNLISEAIKKVGRDGVITVKDGKTMNDELEVIEGMKFDRGYISPYFINSSKGAKVEFQDALLLFCEKKIKTAASIVPALELANAQRKPLVIIAEDVEGEALSTMVVNRLKVGLQVCAVKAPGFGDNRKETLADMAIATGGLVFGDEANMVRLEDIKASDFGRVGEIVVTKEDTMLLKGHGQRTMIEKRLENLREAIKESTSNYEKEKMQERLAKLSSGVALLRVGGSSDVEVGEKKDRVNDALNATRAAIEEGIVPGGGTALLRCITKLNDLKGINEDQNMGIEIIRRALRMPCLTIAKNAGVDGAMVVAKVEILDGDYGYDALKGEYGNMIERGIIDPTKVVRTAIIDAAGVASLLTTAEAVVTELPLEDANPMGGMGGMGGMGGMGGMGGMGGLGM

SEQ ID NO: 9078 - DNA, 1905 bp, Drosophila virilis
  CDS (1)..(1905)
atgttccgttcgtacgtgcgtgaggcggtgcgctccagccgggcattcgcccgtgcctactcgaaggatgtggcgttcggtgcagaggctcgggcgagaatgttgcggggcgttgatatgctgacggatgcggtggccgtaacgatgggccccaagggacgcagcgtgatactggagcgaccctggacgtcgccaaagattacgaaggatggcgtctcggtggcgcgcgccatttcgctaaaggatcagcacatgcagctgggcgctcgcctggtgcaggatgtggcggacaatacgaatcaggcggccggagatggcaccacaacggccacggtgctggcgcgctgcattgccaaggagggctttcagcatattacgcggggcgccaatcccgtcgagatacgacgcggcatcatgctggccgtcgaccatgtcaaacggaagctgaaggcaatgtcgcgtgctgtggagacacgcgaggagatcgaacaggtcgccacaatatcggcgaatggcgatgccgagatcggacgcctgatcgcggacgcaacagatcgggtgggccggacgggcaccatcaccgtcaaggagggcaaacggctcaaggatgagatggaggtgctccaaggcctacagttcgacaagggctacatctcgccgttctttgtgaacacgcccaaaggcgccaaggtagagtatgccaatgcctacgtcctgatcaccctcaagaagattaaatcccttaagcaaattgtgcgcggattggagcaatcgctgcgccagcgtcgcccgctgctcatcattgccgaggacattgatggcgaggcgctcaacgctctggtgctcaaccggctcaaggtaggcctgcaggtgtgcgccgtgaaggcgcccgcctatggcgagtaccgcaaggagatgctgggggacattgccgccgcgacgggcgcaacggtgtttggggatgatatcaactatgccaagattgaggaagccaagatcgaggactttggccaagtgggcgagcttgtggtcagcaaggactcgaccatgctgctgcagagtcagggcaagccggagctgctgaagcgtcgcatccaggagctggaggatgaactgcgcgatccggctaccaagcccgagcaaaaggaacgcctgcgcgcacgcatctcggtgctcaccaatggcgtcgctgtcatccacattggcggcacaagtgaggtggaggtcggcgagaagcgggatcgtgtcaacgatgctctcaacgccacacgagcggccatcgaggagggcattgtgcccggcggcggcactgctctgttgcgctgcataccgagcctgcagcgactggagccggacaacatggatctcaagaatggcatcaacattgtctgctcggccatgcgcataccctgcatgaccattgccgcaaatgctggcgtcgatgcggccacggtggtggcccgagtgctcaacggcgagggtgactttggctacgatgccatgaagggcgaatatgggaatctcttcgaaaagggcatcattgatcccaccaaggtggtgcgcaccgccatacaggatgcggcgggcgtggcatcgctcttgagcacaaccgaggtggtcatcacagaggtgcgtaatcaggatcctttgggtgctctggcaggcgacggtggcgggctggaggaagcgctgggcggtttggatctaggcggcatgggcggcatggaggctctgtccgcgctgggcggcatgggcggcatgggcggaatgggtgacatgggtatgggcggcatgggcatgggcatgggcggcatgagcaaggccgaggagatgaaccaagcagtccagagcatagccggcatggaagatgtcactgtgcacgatatcgacagcagtcagttatag

SEQ ID NO: 9079 - protein, 634 aa, Drosophila virilis
MFRSYVREAVRSSRAFARAYSKDVAFGAEARARMLRGVDMLTDAVAVTMGPKGRSVILERPWTSPKITKDGVSVARAISLKDQHMQLGARLVQDVADNTNQAAGDGTTTATVLARCIAKEGFQHITRGANPVEIRRGIMLAVDHVKRKLKAMSRAVETREEIEQVATISANGDAEIGRLIADATDRVGRTGTITVKEGKRLKDEMEVLQGLQFDKGYISPFFVNTPKGAKVEYANAYVLITLKKIKSLKQIVRGLEQSLRQRRPLLIIAEDIDGEALNALVLNRLKVGLQVCAVKAPAYGEYRKEMLGDIAAATGATVFGDDINYAKIEEAKIEDFGQVGELVVSKDSTMLLQSQGKPELLKRRIQELEDELRDPATKPEQKERLRARISVLTNGVAVIHIGGTSEVEVGEKRDRVNDALNATRAAIEEGIVPGGGTALLRCIPSLQRLEPDNMDLKNGINIVCSAMRIPCMTIAANAGVDAATVVARVLNGEGDFGYDAMKGEYGNLFEKGIIDPTKVVRTAIQDAAGVASLLSTTEVVITEVRNQDPLGALAGDGGGLEEALGGLDLGGMGGMEALSALGGMGGMGGMGDMGMGGMGMGMGGMSKAEEMNQAVQSIAGMEDVTVHDIDSSQL

SEQ ID NO: 9080 - DNA, 1722 bp, Drosophila virilis
  CDS (1)..(1722)
atgttccgcctaccagtttcacttgcacgcacctcgatcagccgacagctggcgatgcgcagctatgcgaaggatgtcaagtttggtgccgaggtgcgcgccatgatgctgcagggcgtcgatgtgctggccgatgctgtggccgtgaccatgggtcccaagggtcgcaacgtgatcattgagcagtcgtggggctcgccaaagatcaccaaggatggcgttacggtggccaaggccattgagctgaaggacaagttccagaacattggcgccaagctggtccaggatgtggccaacaataccaacgaggaggccggcgatggcaccaccacagccacagtgctggctcgtgccattgccaaggagggcttcgagaagatctcgaagggtgccaatcccgtggagattcgtcgcggcgtcatgttggccgtcgacaccgtcaaggacaacctaaagaccatgtcgcgtcccgtcaagacgcccgaagagatcgcccaggtggccacaatctcggcgaacggcgaccaggccattggcaagctcatcagcgatgcaatgaagcgtgtcggacgcgatggcgtcattaccgtcaaggatggcaagaccctcatcgatgagctggaggtgattgagggcatgaagttcgatcgcggttacatttcgccgtatttcatcaactcgtcgaagggcgccaaagttgagttccaggatgcattgctgctgctctcggagaagaaaatctcctcggtgcagagcatcatacccgcccttgagctggctaactcgcagcgcaagccgctggtcatcattgccgaggacatcgatggtgaggcgctcagcaccctggtggtgaatcgcctgaagatcggcctccaggtggccgccgtcaaggcgcccggcttcggtgacaatcgcaagtcgaccctcaccgacatggccatcgcctcgggcggcattgtttttggcgatgatgccgatctggtcaagctggaggatgtcaagatcagcgatctgggtcaggttggcgaggtggtcatcaccaaggatgacacactgctgctgaagggcaagggcaagaaggacgatgtgcagcgtcgcgtcgaccagatcaaggaacagatcacagacaccacatccgaatacgagaaggagaaactccaggagcgtctggcccgtctcgcctccggcgtcgctttgctgcgcgtcggcggctccagcgaggtcgaggtcaatgagaagaaggatcgcgtccatgatgcactcaacgccacccgtgctgccgtcgaagaaggcatcgtgcccggcggcggcaccgccctgctgcgctgcatcgagaaactggacagcgtcgccaccaccaacgaggatcagaacctcggcgtggacattgtgcgtcgcgcccttcgcatgccctgcatgacaattgccaagaacgcgggcgtcgatggcgccatggtcgtggccaaggtggagacccagtcgggcgactatggctacgatgcgctcaagggcgaatacggcaatctgatcgagaagggcatcatcgatcccaccaaggtggtgcgcaccgccatcaccgatgccgccggcgttgcttcgctgctgaccaccgccgaggctgttgtcaccgagatacccaaggaggatgctgctcctggcatgggcggcatgggtggcatgggcggcatgggaggcatgggcggtatgggtggcatgatgtaa

SEQ ID NO: 9081 - protein, 573 aa, Drosophila virilis
MFRLPVSLARTSISRQLAMRSYAKDVKFGAEVRAMMLQGVDVLADAVAVTMGPKGRNVIIEQSWGSPKITKDGVTVAKAIELKDKFQNIGAKLVQDVANNTNEEAGDGTTTATVLARAIAKEGFEKISKGANPVEIRRGVMLAVDTVKDNLKTMSRPVKTPEEIAQVATISANGDQAIGKLISDAMKRVGRDGVITVKDGKTLIDELEVIEGMKFDRGYISPYFINSSKGAKVEFQDALLLLSEKKISSVQSIIPALELANSQRKPLVIIAEDIDGEALSTLVVNRLKIGLQVAAVKAPGFGDNRKSTLTDMAIASGGIVFGDDADLVKLEDVKISDLGQVGEVVITKDDTLLLKGKGKKDDVQRRVDQIKEQITDTTSEYEKEKLQERLARLASGVALLRVGGSSEVEVNEKKDRVHDALNATRAAVEEGIVPGGGTALLRCIEKLDSVATTNEDQNLGVDIVRRALRMPCMTIAKNAGVDGAMVVAKVETQSGDYGYDALKGEYGNLIEKGIIDPTKVVRTAITDAAGVASLLTTAEAVVTEIPKEDAAPGMGGMGGMGGMGGMGGMGGMM

SEQ ID NO: 9082 - DNA, 1920 bp, Drosophila willistoni
  CDS (1)..(1920)
atgtttcgattctttgctcgcgatgctgcagtgtgcacgggtcgtaatttgtgccgagcctattcaaaggaggtgcgctttggacccgaggtgagagctttgatgatacgtggcgtcgatattctcgctgatgctgtggccgtcactatgggtccgaagggtcgtaatgttattgtcgaacgtccctggacatcgccaaagataaccaaagatggccatactgtggcaaggtccatttctctgaaggatcaacacatgaatttgggtgccaagctggtgcaagatgtggcagagaatacgaatcagtcggctggagatggcaccacaacagccactgtgctggctcgttccatagccaaagagggtttcagttacatttcacgtggcgctaatcctgtggagattcggcgtggtgtaatgttagctgtggataatgtaaagcagtcgctcatcgagatgtcccagcccgtgcagacacgcgaggagattcaacaagtggccaccatatcggcgaatggtgatgctgagattggccgcttgattgctgacgcaacggaacgtgtgggtcgcaagggcacgattacagttaaagaaggaaaacgcctcaaggacgaattgcttatcactcagggtctatgtttcgacaatggctatatatcaccgttctttgtcaatagcccgaagggttcaaaagtcgagtttgccaatgcctacgttttgttatcgctaaagaagattacttcgatctccaaaattgtcaaaggtctggagtactcgctgcgcgaacgtcgcccattggtgatcattgccgatgacattagcggtgaagctttgaatgccttggtattgaacagacttaaactaggtctgcagatttgcgctgtgaaggctcccagctatggagattatcgcaagcagcttattttcgatatagccgcagccactggagccacagtctttggagatgatatagactatgccaaaattgaggaagccaaaatcgaggatttgggtcaggtgggcgaggccatcataagcaaggatatcactatgttattgcagggacaaccaaagcctaatatgctggagagacgtattcaacagattcaagatgagattcaagataaacgtacaaaagccgagcatcgagctcgtctacgtgaacgtctctctgccttgaccaagggtgtggctgtcctacacatcggtggccaaagcgaggtggaggtaagtgagaaaaaggatcgtgtaattgatgcccttaattccactagagcggccattgaagagggaatcgttcccggaggtggcactgcttttctacgctgcataccacaattggagagcctcgtgccaggaagtcaggacttgcagcagggcattaatattgttcgcaatgctctgcgtatgccttgcatgaccatagcccgtaatgcaggagtcgatgctgccagtgttgtggccaaggtaatgaatcgcaaagatgactatggctacgatgctttccgggatgagtatggaatgctctatgacaaaggcatcattgatccgacaaaagtgatgcgtacagccattacggatgctgctggagtggcctctcttctgagcaccaccgaagtggtcattaccgatgctcgaaatgaagatcttctagccaaattggctcgagctggcggtggcatggatgaaatggctgggatgggaggaggaatgggagacatggaagcactggcagctctgggtggcatgggaggcatgggtggcatgggtggaatggatggatttgacgatataatggatgccatgggaggtggtgcttctgatggcggtgccagcgccaaagatctaaacgaaattgtcaaaaatatacccggcatggaagatgtcactgtcagtgatatagacagcagccaattttaa

SEQ ID NO: 9083 - protein, 639 aa, Drosophila willistoni
MFRFFARDAAVCTGRNLCRAYSKEVRFGPEVRALMIRGVDILADAVAVTMGPKGRNVIVERPWTSPKITKDGHTVARSISLKDQHMNLGAKLVQDVAENTNQSAGDGTTTATVLARSIAKEGFSYISRGANPVEIRRGVMLAVDNVKQSLIEMSQPVQTREEIQQVATISANGDAEIGRLIADATERVGRKGTITVKEGKRLKDELLITQGLCFDNGYISPFFVNSPKGSKVEFANAYVLLSLKKITSISKIVKGLEYSLRERRPLVIIADDISGEALNALVLNRLKLGLQICAVKAPSYGDYRKQLIFDIAAATGATVFGDDIDYAKIEEAKIEDLGQVGEAIISKDITMLLQGQPKPNMLERRIQQIQDEIQDKRTKAEHRARLRERLSALTKGVAVLHIGGQSEVEVSEKKDRVIDALNSTRAAIEEGIVPGGGTAFLRCIPQLESLVPGSQDLQQGINIVRNALRMPCMTIARNAGVDAASVVAKVMNRKDDYGYDAFRDEYGMLYDKGIIDPTKVMRTAITDAAGVASLLSTTEVVITDARNEDLLAKLARAGGGMDEMAGMGGGMGDMEALAALGGMGGMGGMGGMDGFDDIMDAMGGGASDGGASAKDLNEIVKNIPGMEDVTVSDIDSSQF

SEQ ID NO: 9084 - DNA, 1749 bp, Drosophila willistoni
  CDS (1)..(1749)
atgatgcgccttttaaacaattgtaataagttgggacgcctgtcatgcctgccccgtcatctggtggcatatcgctcgtatgcaaaggatgtgcgtttcgggcccgaagtgagggccatgatgttgcagggtgttgatgtcctggcggatgcagtggccgttaccatgggacccaaaggacgcaacgtcatcatcgaacagagttggggctcccccaagattaccaaggatggtgtgacagtggccaagtctattgccctgaaggataaattccagaacattggggctaagctggtgcaggatgtggccaataatacaaacgaggaggccggagatggcaccaccacagcaaccgtgttggcaagggcaattgccaaagaaggtttcgagaagatttcgagtggcgccaatcctgtggaaatacgccgcggtgtaatgttggccatagagacggtcaaggataatttgaagcaaatgtcccgtcccgttaacacgccggaggagatctgccaggttgccaccatatcggccaatggtgataagtcggtaggagatctcatcagtgaggccatcaagaaagtgggacgtgatggcgtcattaccgtaaaggatggcaagaccctggacgatgagttggaaattatcgaaggcatgaaatttgatcgcggctatatttcaccgtacttcatcaatgccgctaagggagccaaggtggaatttcaggatgctttgttgctcttctccgaaaagaaaatcaaatcggccccaagcattgtgcccgctctcgaattggccaattcgcagcgcaagcccttggtcatcattgccgaggatgttgagggtgaggccctaagcaccatggtggtgaatcgtttgaaggtcggtctgcaggtgtgcgctgtcaaagctccaggattcggcgacaatcgcaaggaaatgcttgccgacatggccatagccacaggaggtattgtatttggagatgatgccaatttggttcgtatcgaggatgtgaaggtcagtgatttcggtcgtgtgggtgaagtggttgtgaccaaggatgacacgatgctcctcaagggccatggccaacgtcctctgatcgacaagcgtatcgagaatctacgagatgccatcaaagagaccacatccagctacgagaaggagaagttgcaagagcgcttggccagactctcttcgggtgtggctctactacgtgtgggtggctctagcgatgtggaggtcaacgagaagaaggatcgagttcatgatgccctaaatgcaacacgtgcagccatcgaagagggcattgttccaggaggtggtactgctcttctccgttgcattaccaagctcgaggagatcaaaggtgcaaacgaggaccaaaatttgggcgttgagatcattcgccgcgccctgcgcatgccctgcatgactattgccaagaatgctggagtcgatggtgccatggtggtggccaaagttgagatcatggaaggcgactttggctacgatgctctgaaaggagaatatggcaatatgattgagcgcggcattattgatcccaccaaagtggtgcgcactgccatgaccgatgctgctggagtggcctctctcctaaccaccgctgaggctgtggtcactgaactgccaattgaggaagttgctggaggtgccggtggcatgggtggcatgggcggcttgggcggcatgggaggcatgggcggcatgggaggattaggcatgtaa

SEQ ID NO: 9085 - protein, 582 aa, Drosophila willistoni
MMRLLNNCNKLGRLSCLPRHLVAYRSYAKDVRFGPEVRAMMLQGVDVLADAVAVTMGPKGRNVIIEQSWGSPKITKDGVTVAKSIALKDKFQNIGAKLVQDVANNTNEEAGDGTTTATVLARAIAKEGFEKISSGANPVEIRRGVMLAIETVKDNLKQMSRPVNTPEEICQVATISANGDKSVGDLISEAIKKVGRDGVITVKDGKTLDDELEIIEGMKFDRGYISPYFINAAKGAKVEFQDALLLFSEKKIKSAPSIVPALELANSQRKPLVIIAEDVEGEALSTMVVNRLKVGLQVCAVKAPGFGDNRKEMLADMAIATGGIVFGDDANLVRIEDVKVSDFGRVGEVVVTKDDTMLLKGHGQRPLIDKRIENLRDAIKETTSSYEKEKLQERLARLSSGVALLRVGGSSDVEVNEKKDRVHDALNATRAAIEEGIVPGGGTALLRCITKLEEIKGANEDQNLGVEIIRRALRMPCMTIAKNAGVDGAMVVAKVEIMEGDFGYDALKGEYGNMIERGIIDPTKVVRTAMTDAAGVASLLTTAEAVVTELPIEEVAGGAGGMGGMGGLGGMGGMGGMGGLGM

SEQ ID NO: 9086 - DNA, 1728 bp, Drosophila willistoni
  CDS (1)..(1728)
atgttccgtctaccagtttcacttgctcgttcatccattagccggcaattggctttgtccagccgtggctatgccaaggatgtgaaattcggtcccgaagtgagggccatgatgctgcagggtgtcgatgtgcttgccgatgctgtggctgtgaccatgggaccaaagggccgtaatgtcatcattgagcagtcatggggttcacccaaaatcaccaaggatggcgtcacagtggccaagtccattgagctgaaggataaattccagaatattggtgccaaattggttcaggatgtggccaacaacaccaacgaggaggctggcgatggaaccaccacagcaacagtcttggctcgtgccattgccaaggagggcttcgagaagatctcgaagggtgccaatccagtggagattcgtcgcggtgtcatgcttgcggtcgagacggtcaaggacaatctgaaggcaatgtcccgcccagtgaacacacccgaagaaatcgcccaggtggccacaatctcggctaacggcgaccaagccattggtaatctcatcagcgaggccatgaagaaggtaggacgcgatggcgtcatcaccgtcaaggatggcaagaccctcaacgatgagctcgaggttatcgaaggcatgaaattcgatcgtggttacatttcaccatatttcatcaactcgtcgaagggtgccaaggtggaattccaggatgctttgcttctgttgtcggagaagaagatctcatcggtgcagagcatcattccggctcttgagctggccaatgcacagcgcaagccattggttatcattgccgaggacattgatggtgaggctctgagcactttggtggtgaaccgtctgaagatcggtctccaggtagccgcagtcaaggctcccggctttggtgacaaccgcaaatctactctcaccgacatggccattgcatcgggtggcattgtctttggcgatgatgccgatctggtcaaactagaggatgtgaaggtcagtgacctgggtcaggtgggtgaagttgtcattaccaaggatgacactctcctgctgaagggcaagggcaaaaaggaggatgtcacccgtcgcgttgatcaaatcaaggatcaaatctcagacaccacatccgaatatgagaaggagaaactgcaggagcgtctggcccgtttggcttccggtgttgccctattgcgcgtcggtggctccagtgaggtggaggtcaacgagaagaaggatcgcgtccatgatgccctaaatgccacccgtgctgcggtcgaagaaggcattgttcccggcggtggcactgctctgctccgttgcatcgagaaattggacagtgttggcactcagaacgaggatcagaacttgggcgttgaaattgtgcgtcgtgcccttcgcatgccttgcatgacaattgccaagaatgccggagtcgatggtgccatggtggtggccaaggtggagactcaagccggagatttcggttacgatgccctcaagggtgaatatggcaatctcatcgagaagggcattatcgatcccaccaaagtggtgcgcacagccatcacagatgcctctggtgttgcttccctgctgaccaccgcggaggctgttgtcactgaaattcccaaggatgatgctgcccctggcatgcccggcatgggtggtatgggcggtatgggaggcatgggcggtatgggtggcatgatgtaa

SEQ ID NO: 9087 - protein, 575 aa, Drosophila willistoni
MFRLPVSLARSSISRQLALSSRGYAKDVKFGPEVRAMMLQGVDVLADAVAVTMGPKGRNVIIEQSWGSPKITKDGVTVAKSIELKDKFQNIGAKLVQDVANNTNEEAGDGTTTATVLARAIAKEGFEKISKGANPVEIRRGVMLAVETVKDNLKAMSRPVNTPEEIAQVATISANGDQAIGNLISEAMKKVGRDGVITVKDGKTLNDELEVIEGMKFDRGYISPYFINSSKGAKVEFQDALLLLSEKKISSVQSIIPALELANAQRKPLVIIAEDIDGEALSTLVVNRLKIGLQVAAVKAPGFGDNRKSTLTDMAIASGGIVFGDDADLVKLEDVKVSDLGQVGEVVITKDDTLLLKGKGKKEDVTRRVDQIKDQISDTTSEYEKEKLQERLARLASGVALLRVGGSSEVEVNEKKDRVHDALNATRAAVEEGIVPGGGTALLRCIEKLDSVGTQNEDQNLGVEIVRRALRMPCMTIAKNAGVDGAMVVAKVETQAGDFGYDALKGEYGNLIEKGIIDPTKVVRTAITDASGVASLLTTAEAVVTEIPKDDAAPGMPGMGGMGGMGGMGGMGGMM

SEQ ID NO: 9088 - DNA, 1731 bp, Drosophila simulans
  CDS (1)..(1731)
atgatgcgcatgttccgttacaccaacactgtgcagcgtactgcaaagatcagtcacggcctgtggatccgtagctatgccaaggatgttaagttcggaccggaggtgagggccatgatgctgcagggagtggatgtgctggcggatgccgtggccgtgaccatgggaccaaagggacgcaacgtgatcatcgagcagagctggggatcgccgaagattaccaaggacggcgtgacggtggccaagtcaatttccctcaaggacaagttccagaacatcggcgccaaactggtgcaggatgtggccaacaacacaaatgaggaggcgggtgatggcaccaccacggccaccgttctggcccgcgccattgccaaggagggattcgagaagatttcacggggtgccagtccggtggagatccgccgcggagtgatgctggccatcgagacggtcaaggacaacctacgccggttgtcccgaccagttaacacgcccgaggagatctgccaggtggcgacgatctctgcgaacggcgacaagtcggtgggaaacctcatcagcgaggccatcaagaaggtgggtcgagacggtgttatcactgtcaaggatggcaagaccctttgcgacgaactggaggtgatcgagggcatgaaatttgaccgtggttacatttcaccgtactttattaacacctccaagggagcaaaggtggagttccaggacgcgcttctcctcttttgcgagaagaaaatcaagtcggcacccagcatcgtgcctgccctggagttggccaacgcgcagcgcaagcccttggtcattatcgctgaggatttggaggcggaggcactcagcaccctggtggtgaaccgcctgaaggtgggcctccaagtgtgcgcggtaaaggcgcccggatttggagacaatcgcaaggagaatctgaaggacatggccgtggccaccggtggcatcgtgttcggagacgaggccaatatggtacggctcgaggatatcaagatgagtgattttggacgtgtcggcgaggtagtggtctcaaaggatgacacaatgctgctcaagggaaagggacagaaggccgatgtggagaaaagggtcgagggtctgcgcgaggccatcaaggagtcgacttcctcctacgagaaggagaagatgcaggagcgtttggcgcgcctctcctccggtgtggccttgctgcgagtgggcggctccagcgacgtggaggtcagcgagaagaaggatcgagtcatcgatgccctgaatgccacccgtgctgctgtggaggagggaatcgtgcccggtggcggcaccgccctgttgcgttgcatccaaaagctgaacgatttgaaaggcgccaacgaggaccaaaacatgggcatcgagatcatacggcgtgcgctgcgcatgccttgccttacgattgccaagaatgctggcgtagatggtgcaatggtggtggccaaggtggagatcctcgacggcgactatggctacgatgccctgaagggcgagtacggcaacatgattgagcgcggtatcatcgatcccaccaaggtggtgcgcaccgccatctcggacgcagccggagtcgcctctcttctgaccactgccgaggctgtagttacggagttgccgttggaggaggccgccgctgctggagcggcagccggattgggtgctctcggcggcatgggcatgggcggaatgggcatgtaa

SEQ ID NO: 9089 - protein, 576 aa, Drosophila simulans
MMRMFRYTNTVQRTAKISHGLWIRSYAKDVKFGPEVRAMMLQGVDVLADAVAVTMGPKGRNVIIEQSWGSPKITKDGVTVAKSISLKDKFQNIGAKLVQDVANNTNEEAGDGTTTATVLARAIAKEGFEKISRGASPVEIRRGVMLAIETVKDNLRRLSRPVNTPEEICQVATISANGDKSVGNLISEAIKKVGRDGVITVKDGKTLCDELEVIEGMKFDRGYISPYFINTSKGAKVEFQDALLLFCEKKIKSAPSIVPALELANAQRKPLVIIAEDLEAEALSTLVVNRLKVGLQVCAVKAPGFGDNRKENLKDMAVATGGIVFGDEANMVRLEDIKMSDFGRVGEVVVSKDDTMLLKGKGQKADVEKRVEGLREAIKESTSSYEKEKMQERLARLSSGVALLRVGGSSDVEVSEKKDRVIDALNATRAAVEEGIVPGGGTALLRCIQKLNDLKGANEDQNMGIEIIRRALRMPCLTIAKNAGVDGAMVVAKVEILDGDYGYDALKGEYGNMIERGIIDPTKVVRTAISDAAGVASLLTTAEAVVTELPLEEAAAAGAAAGLGALGGMGMGGMGM

SEQ ID NO: 9090 - DNA, 1974 bp, Drosophila yakuba
  CDS (1)..(1974)
atgttccggtcgtgtgtgcccaaggcgattagctcaagtcgctgtttcgcgcgaatgtactcgaaggatgtgcgctttggatccggagtccgggcactgatgatccggggcgttgatgttctggcggatgccgtggctgtgactatggggcccaagggtcgcagtgtgatcgtggagcgaccctggacctcgccgaagatcaccaaggacggcttcacggtggcgcgctcaattgccctgaaggaccagcacatgaatctgggcgccaagttggtccaggatgtggccgataacacgaatgagtcggcgggtgacggcaccactacagcaactgttttggctcgagcgattgccaaggaaggattcaaccagatcaccatgggggctaatcccgtggagattcgccggggtgtaatgttggctgtggatgtcgtgaaggagaagctgaaggaaatgtccaaggccgtggaaactcgagaggagatccaacaggtagccaccctctccgcgaatggggatactgaaatagggcgtctcattggtgaggccaccgacaaagtgggtccaaaaggaactattactgtaaaggagggcaagcgcctgaaggatgagctaagtatcatccagggcctgcgcttcgacaacggctatgtgtcgccgttttttgtaaacagcgccaagggtaacaaggtggagtttgccaacgcctttgtaatgatatccctgaagaagatcacgggactctcacagattgtcaaaggtctggagcagtccctgcggcagcgtcgtcccctgatcatcatagccgaggacatcagcggtgaagctcttaatgctttggttctgaacaagctaaggttgggtctccaggtgtgcgccgtcaagtcgcccagttatggacaccatcggaaggagcttataggcgatatatccgctgccacgggtgcaactattttcggcgatgacgtcaactactccaaaatggaggaggctaagctggaggatctgggtcaggtgggcgaggctgtgatcagcaaggacagcaccatgctgctgcagggcaagcctaaggcaggacttttggaaatgcgcatccagcagattcaagatgagctggctgacaagcagaccaagccggagcagcgggatcgcctgcgccaacgcctctccgccctcacaaagggcgtggcagtgctccacattggcggaggcagtgaagtggaggtgaatgagaaaaaggaccgtgtggtggacgccttgaatgccacccgagcggccatcgaagagggaattgtcccgggtggcggtactgccttcttgcgctgcattccccacctccaggaactccaaatggagagtgcagatctcaagaagggcgtcgatattatctgcaatgccctgcggatgccttgccaaaccattgcccaaaacgccggagtggatggcccaatggtggtggccaaggtgttgactggctcgggtgacttcggctacgatgccatgggcgatgagtactgtcggctgatcgagaagggtattattgatcccacaaaggtgctgcggactgccatcacggatgcagctggagtggcctctcttctgagcaccaccgaggtggttatcaccgactcccggaccgatgatcttctgtccaagttggcaggagctggcggcggaatggatgatggactggacatgaacatgggtggcttggaggagctggcagccctaagtggattgggtggcatgggaggaatgggtggaatgggaggaatgggaggaatgggaggaatgggtggtatgggagctatgggaggaatgggtgctggcttcggcggaatgggcggtggtggtggcatgagcgcttcttccagcagtgatggtccctctgccgaggagatgaacgaaatggtcaaggctattcccggcatggagcaagtagaggtgcgggacattgacagtggaatgatgtag

SEQ ID NO: 9091 - protein, 657 aa, Drosophila yakuba
MFRSCVPKAISSSRCFARMYSKDVRFGSGVRALMIRGVDVLADAVAVTMGPKGRSVIVERPWTSPKITKDGFTVARSIALKDQHMNLGAKLVQDVADNTNESAGDGTTTATVLARAIAKEGFNQITMGANPVEIRRGVMLAVDVVKEKLKEMSKAVETREEIQQVATLSANGDTEIGRLIGEATDKVGPKGTITVKEGKRLKDELSIIQGLRFDNGYVSPFFVNSAKGNKVEFANAFVMISLKKITGLSQIVKGLEQSLRQRRPLIIIAEDISGEALNALVLNKLRLGLQVCAVKSPSYGHHRKELIGDISAATGATIFGDDVNYSKMEEAKLEDLGQVGEAVISKDSTMLLQGKPKAGLLEMRIQQIQDELADKQTKPEQRDRLRQRLSALTKGVAVLHIGGGSEVEVNEKKDRVVDALNATRAAIEEGIVPGGGTAFLRCIPHLQELQMESADLKKGVDIICNALRMPCQTIAQNAGVDGPMVVAKVLTGSGDFGYDAMGDEYCRLIEKGIIDPTKVLRTAITDAAGVASLLSTTEVVITDSRTDDLLSKLAGAGGGMDDGLDMNMGGLEELAALSGLGGMGGMGGMGGMGGMGGMGGMGAMGGMGAGFGGMGGGGGMSASSSSDGPSAEEMNEMVKAIPGMEQVEVRDIDSGMM

SEQ ID NO: 9092 - DNA, 1734 bp, Drosophila yakuba
  CDS (1)..(1734)
atgatgcgcatgttcaccagttacaccaacactgtgcagcgcactgccaggatcagccacgtcctgtgggcccgtagctacgccaaggatgtaaagttcgggccggaggtgagaggcatgatgttgcagggagtggacgtgctggcggatgccgtggccgtgaccatgggaccaaaaggacgcaacgtgatcatcgagcagagctggggatcaccgaagatcaccaaggacggcgtgacggtggccaagtcgattgccctgaaggacaagttccagaacatcggcgccaagctggtgcaggatgtggccaacaacacaaacgaggaggcgggcgacggcaccaccacggccaccgttctggcccgcgccattgccaaggagggattcgagaagatctcccggggtgccagtccggtggagatccgacgcggagtaatgctggccatcgagacggtcaaggacaacctccgccggctgtcgcggccagttaacacgcccgaggagatctgccaggtggccaccatctctgcgaacggcgacaagtcggtgggaaacctcatcagcgaggccatcaagaaggtcggacgagacggggttatcacggtcaaggatggcaagacactgtgtgacgaactggaggtgatcgagggcatgaagtttgaccggggctacatttcgccgtacttcatcaacacctccaaaggagccaaggtggagttccaggacgcgctgctcctcttttgcgaaaagaaaatcaagtcggcacccagcatcgtgcctgccctggagttggccaacgcgcagcgcaagcccttggtcattatcgcagaggatttggaggcggaggcacttagcaccctggtggtgaaccgcctgaaggtgggcctccaagtgtgcgcggtgaaggcgcccggttttggagacaatcgcaaggagaatctgacggacatggccgtggccaccggtggcatcgtctttggcgacgaggccaatctggtgcggctggaggacatcaagatgagcgactttgggcgtgtcggcgaggtggtgatcacaaaggacgatacaatgctgctcaagggcaagggccagaaggcggatgtggagaagagagtcgagggtctgcgcgaggccatcaaggagtcgacttcctcctacgaaaaggagaaaatgcaggagcgcctggcgcgcctctcctccggcgtcgccttgctgcgggtgggcggttccagtgacgtggaggtcagcgagaagaaggaccgagtcatcgacgccctgaatgcaacccgtgctgccgtggaggagggcatcgtgcccggcggcggcaccgccctgctgcgttgcatccagaagctgaacgacctgaagggcgccaacgaggaccaaaacatgggcatcgagatcatacggcgtgcactgcgcatgccctgcctcacgattgccaagaacgccggcgtggatggtgcaatggtggtggccaaggtggagatcctcgacggcgactatggctacgatgcgctgaagggcgagtacggcaacatgatcgagcgcggcatcatcgatcccaccaaggtggtgcgcaccgccatctctgacgcagccggagtcgcctctctgctgaccaccgccgaggctgtggtgacggagttgcctttggaggaggccgccgccgctggagcggctgctggactgggagctctcggtggcatgggcatgggcggcatgggcatgtaa

SEQ ID NO: 9093 - protein, 577 aa, Drosophila yakuba
MMRMFTSYTNTVQRTARISHVLWARSYAKDVKFGPEVRGMMLQGVDVLADAVAVTMGPKGRNVIIEQSWGSPKITKDGVTVAKSIALKDKFQNIGAKLVQDVANNTNEEAGDGTTTATVLARAIAKEGFEKISRGASPVEIRRGVMLAIETVKDNLRRLSRPVNTPEEICQVATISANGDKSVGNLISEAIKKVGRDGVITVKDGKTLCDELEVIEGMKFDRGYISPYFINTSKGAKVEFQDALLLFCEKKIKSAPSIVPALELANAQRKPLVIIAEDLEAEALSTLVVNRLKVGLQVCAVKAPGFGDNRKENLTDMAVATGGIVFGDEANLVRLEDIKMSDFGRVGEVVITKDDTMLLKGKGQKADVEKRVEGLREAIKESTSSYEKEKMQERLARLSSGVALLRVGGSSDVEVSEKKDRVIDALNATRAAVEEGIVPGGGTALLRCIQKLNDLKGANEDQNMGIEIIRRALRMPCLTIAKNAGVDGAMVVAKVEILDGDYGYDALKGEYGNMIERGIIDPTKVVRTAISDAAGVASLLTTAEAVVTELPLEEAAAAGAAAGLGALGGMGMGGMGM

SEQ ID NO: 9094 - DNA, 1722 bp, Drosophila yakuba
  CDS (1)..(1722)
atgttccgtttgccagtttcgcttgctcgctcctccatcagccgccagttggccgtgcgcggttatgcgaaggacgtgcgtttcggtcctgaggtgcgcgccttgatgctccagggcgtcgatgtgctggccgatgctgtggcagtgaccatgggccccaagggtcgcaatgtgatcatcgagcagtcgtggggctcgcccaagatcaccaaggacggcgtcactgttgccaagtccattgagctgaaggacaagttccagaacattggtgccaagctggtccaggatgtggccaacaacaccaatgaggaggccggtgatggtaccaccacggccaccgttctggctcgcgccatcgccaaggagggcttcgagaagatctccaagggcgccaatcccgtcgagatccgtcgcggtgtcatggtggccgttgagaccgtcaaggacaacctcaagtccatgtcgcgccccgtgagcactcccgaggagatcgctcaggtggccaccatctcggccaacggcgatcaggctatcggcaaccttatcagcgaggccatgaagaaggtgggacgcgatggcgtcatcaccgtcaaggatggcaagaccctcaacgatgagctggaggtgatcgagggcatgaagttcgatcgcggctatatttcgccctacttcatcaactcctcgaagggcgccaaggtggagttccaggatgccctgctcctgctgtccgagaagaagatttcctccgtgcagagcatcattcccgctctggagctggccaacgcccagcgcaagcccctggtcatcattgccgaggatatcgatggtgaggccctgagcaccctggtggtgaaccgcctcaagatcggtctgcaggtggctgccgtcaaggctcccggattcggtgacaaccgcaagagcacccttaccgacatggccatcgcctccggcggcattgtcttcggcgatgatgctgatctcgtcaagctggaggatgttaaggttagcgatttgggacaggtcggcgaggtggtgatcaccaaggacgacaccctgctgctgaagggcaagggcaagaaggatgatgtgcttcgtcgcgccaatcagatcaaggaacagatcgaggacaccacctccgagtacgagaaggagaagctgcaggagcgtctggcccgcttggcctccggcgttgccctgctgcgcgttggcggctccagcgaggtggaggtcaacgagaagaaggatcgcgttcacgatgccctgaacgccacccgcgctgccgtcgaagagggaatcgttcccggcggtggcaccgctctgctgcgttgcattgagaagctggagggtgtccagaccaccaatgaggatcagaaactcggcgtggagattgtgcgtcgtgccctgcgcatgccatgcttgacgattgccaagaacgccggcgttgatggcgccatggtggtggccaaggtggagacccagaccggtgactacggctacgatgcgctgaagggcgagtacggcaacctgatcgagaagggcatcatcgatcccaccaaggtggtgcgcaccgccatcactgacgcctccggtgtcgcctcgctgctgaccaccgccgaggctgtggttaccgagatccccaaggaggatggtgctcctggcatgcccggcatgggtggtatgggcggcatgggaggcatgggcggcatgggtggcatgatgtaa

SEQ ID NO: 9095 - protein, 573 aa, Drosophila yakuba
MFRLPVSLARSSISRQLAVRGYAKDVRFGPEVRALMLQGVDVLADAVAVTMGPKGRNVIIEQSWGSPKITKDGVTVAKSIELKDKFQNIGAKLVQDVANNTNEEAGDGTTTATVLARAIAKEGFEKISKGANPVEIRRGVMVAVETVKDNLKSMSRPVSTPEEIAQVATISANGDQAIGNLISEAMKKVGRDGVITVKDGKTLNDELEVIEGMKFDRGYISPYFINSSKGAKVEFQDALLLLSEKKISSVQSIIPALELANAQRKPLVIIAEDIDGEALSTLVVNRLKIGLQVAAVKAPGFGDNRKSTLTDMAIASGGIVFGDDADLVKLEDVKVSDLGQVGEVVITKDDTLLLKGKGKKDDVLRRANQIKEQIEDTTSEYEKEKLQERLARLASGVALLRVGGSSEVEVNEKKDRVHDALNATRAAVEEGIVPGGGTALLRCIEKLEGVQTTNEDQKLGVEIVRRALRMPCLTIAKNAGVDGAMVVAKVETQTGDYGYDALKGEYGNLIEKGIIDPTKVVRTAITDASGVASLLTTAEAVVTEIPKEDGAPGMPGMGGMGGMGGMGGMGGMM

SEQ ID NO: 9096 - DNA, 1722 bp, Drosophila simulans
  CDS (1)..(1722)
atgttccgtttgccagtttcgcttgctcgctcctccattagccgccagttggccatgcgcggctatgccaaggatgtgcgtttcggtcccgaggtgcgcgccatgatgctccagggcgtcgatgtgctggccgatgctgtggcagtgaccatgggccccaagggtcgcaatgtgatcattgagcagtcgtggggctcgcccaagatcaccaaggacggtgtcacggtggccaagtccattgagctgaaggacaagttccagaacattggtgccaagctggtccaggatgtggccaacaataccaacgaggaggccggtgatggtaccaccacggccaccgttctggctcgcgccatcgccaaggagggcttcgagaagatctccaagggcgccaatcccgtcgagattcgtcgcggtgtcatgctggccgttgagaccgtcaaggacaacctgaagtccatgtcgcgccccgtgagcacgcccgaggagatcgcccaggtggccaccatctcggccaacggcgatcaggccatcggcaatctcatcagtgaggccatgaagaaggtgggacgcgatggcgtcatcaccgtcaaggatggcaagaccctcaccgatgagctggaggttatcgagggcatgaagttcgatcgcggctacatctcgccgtacttcatcaactcctcgaagggagccaaggtggagttccaagatgccctgctcctgctgtccgagaagaagatctcatcggtgcagagcatcattcccgctctggagcgggccaatgcgcagcgcaagcccctggtcatcattgccgaggatatcgatggtgaggccctgagcaccctggtggtgaaccgcctcaagatcggcctgcaggtggctgccgtcaaggcacccggtttcggcgacaaccgcaagagcaccctcaccgacatggccatcgcctccggcggcattgtctttggcgatgatgctgatctcgtcaagctggaggacgtcaaggttagcgatttgggtcaggtcggcgaggtggtgatcaccaaggacgacaccctgttgctgaagggcaagggccagaaggacgatgtgctccgtcgcgccaatcagatcaaggaccagatcgaggacaccacctccgagtacgagaaggagaagctgcaggagcgtctggcccgcttggcctccggcgttgccctgctccgcgttggcggctccagcgaggtggaggtcaacgagaagaaggatcgcgtccacgatgccctgaacgccacccgtgctgccgtcgaagagggaatcgttcccggaggcggcaccgctctgctgcgttgcattgagaagctcgagggtgtcgagaccaccaacgaggatcagaaactcggcgtggagattgtgcgtcgtgccctgcgcatgccatgcatgacgattgccaagaacgccggcgttgatggcgccatggtggtggccaaggtggagacccagaccggtgactacggctacgatgcgctgaagggcgagtacggcaacctgatcgagaagggcatcatcgatcccaccaaggtggtgcgcaccgccatcacagacgcctccggtgtggcctcgctgttgaccaccgccgaggctgtggtcaccgagatccccaaggaggatggtgctcctggcatgcccggcatgggtggtatgggcggcatgggaggcatgggcggcatgggtggcatgatgtaa

SEQ ID NO: 9097 - protein, 573 aa, Drosophila simulans
MFRLPVSLARSSISRQLAMRGYAKDVRFGPEVRAMMLQGVDVLADAVAVTMGPKGRNVIIEQSWGSPKITKDGVTVAKSIELKDKFQNIGAKLVQDVANNTNEEAGDGTTTATVLARAIAKEGFEKISKGANPVEIRRGVMLAVETVKDNLKSMSRPVSTPEEIAQVATISANGDQAIGNLISEAMKKVGRDGVITVKDGKTLTDELEVIEGMKFDRGYISPYFINSSKGAKVEFQDALLLLSEKKISSVQSIIPALERANAQRKPLVIIAEDIDGEALSTLVVNRLKIGLQVAAVKAPGFGDNRKSTLTDMAIASGGIVFGDDADLVKLEDVKVSDLGQVGEVVITKDDTLLLKGKGQKDDVLRRANQIKDQIEDTTSEYEKEKLQERLARLASGVALLRVGGSSEVEVNEKKDRVHDALNATRAAVEEGIVPGGGTALLRCIEKLEGVETTNEDQKLGVEIVRRALRMPCMTIAKNAGVDGAMVVAKVETQTGDYGYDALKGEYGNLIEKGIIDPTKVVRTAITDASGVASLLTTAEAVVTEIPKEDGAPGMPGMGGMGGMGGMGGMGGMM

SEQ ID NO: 9098 - DNA, 1737 bp, Trichoplax adhaerens
  CDS (1)..(1737)
atgtatcgtctacgtgatatgattcgaccggcattaaatgccgttagccctattgtaagatcgcaattagctagaaattatgccaaagaggtaaagttcggcgtagaagcaagtagccaaatgatcaaaggtgttaatgtcttagctgatgccgtagctgttactatgggtccaaagggtcgcaatgttatattggaacaatcttggggtggaccgaaaattaccaaggacggtgtaactgtagccaaaggaatcgaactgcctgataaggtgaataatattggagcacgtttagttcaagatgttgccaataatacaaatgaagaagctggtgatggtaccactactgctactgttttagctcgtgcaattgcaaccgaaggttttaagaaggtttccatgggtgcaaatccacaggatgttagacgaggtatcatgtcggctgttgaagttgtagtcgaacaactgaaacagctttctaagccagttacaacacctgaagaaattgcccaggtagcaacgatctccgcgaatggagataaagaaataggagaccttatttcttctgcgatgaaagcagtcggaagaacaggtgtgataacagttaaggatggcaaaacaatgaaagatgaattggaagtcatcgagggcatgaagttcgatcgtggttttatctctccgtattttataaatactagcaaaggtcagaaagtagaatatcaggatgctctcttattattatgtgaaaagaaaatatctagcgttcaacaaattgtaccagcattagagattgccaacaccaatcgcaagcctctagttattattgcagaagatattgatggtgaagcattaagtactttagtactcaatagactcaaggttggattacaagtagccgctgttaaagcaccaggttttggagataacagaaagagtactttgcatgatattgctgttgctactggtggaatggtttttggagatgaagccatagacactaagattgaagatattcaacagcaggaccttggcattgttggagaaattgttattactaaggatgatacactcatcttacgaggcagaggtgatccacaagcccttgaagctcgtgtccaacaattacaggaagatatagaaagtaccacttccgattacgaacgtgaaaaactaaacgaacgcctggctaaactttctaacggtgttgctgttttaaaggtcggtggatatagtgaagttgaagtaaatgaaaagaaggatcgcgttaatgatgccttgaatgccactcgtgccgcagttgaagaaggtattgtacctggaggaggtgtagctttgctacgatgtgatgcaagtttggatagcatcaaaactgataatgaagatcaacgaattggtgttgagataatccgtaaagcgttgcgtagcccttgctcaaccattgcatccaacgctggaatggaaggagcaataattgtagaccaaataatgaaatcctcctcagaaattggctacgatgccgcaagtaacaattttgtagacatgatgaaaaatggtatcattgatccgacgaaggttgtccgcaccgctataaccgatgccgctggtgtagcatcattactgtcgaccgctgaatgtgtagtagtagaaatgccaaaggaagaaaaagatatgcctgcaatgcccggcggtggaatgggcggaatgggtggtatgggaggtatgggaggtatgatgtaa

SEQ ID NO: 9099 - protein, 578 aa, Trichoplax adhaerens
MYRLRDMIRPALNAVSPIVRSQLARNYAKEVKFGVEASSQMIKGVNVLADAVAVTMGPKGRNVILEQSWGGPKITKDGVTVAKGIELPDKVNNIGARLVQDVANNTNEEAGDGTTTATVLARAIATEGFKKVSMGANPQDVRRGIMSAVEVVVEQLKQLSKPVTTPEEIAQVATISANGDKEIGDLISSAMKAVGRTGVITVKDGKTMKDELEVIEGMKFDRGFISPYFINTSKGQKVEYQDALLLLCEKKISSVQQIVPALEIANTNRKPLVIIAEDIDGEALSTLVLNRLKVGLQVAAVKAPGFGDNRKSTLHDIAVATGGMVFGDEAIDTKIEDIQQQDLGIVGEIVITKDDTLILRGRGDPQALEARVQQLQEDIESTTSDYEREKLNERLAKLSNGVAVLKVGGYSEVEVNEKKDRVNDALNATRAAVEEGIVPGGGVALLRCDASLDSIKTDNEDQRIGVEIIRKALRSPCSTIASNAGMEGAIIVDQIMKSSSEIGYDAASNNFVDMMKNGIIDPTKVVRTAITDAAGVASLLSTAECVVVEMPKEEKDMPAMPGGGMGGMGGMGGMGGMM

SEQ ID NO: 9100 - DNA, 1722 bp, Ciona intestinalis
  CDS (1)..(1722)
atgcaccgatttgcaaaacttgtgagcaaatctgcagttcctgctggcagaataatatccaggggttatgcaaaagaactaaagtttggctccatggcaagagaagaaatgattgcgggcgtgaatcagttagctgatgcagtcgctgtcactatgggacccaaaggtagaaatgtagtgttggagcaatcttgggggtcacccaaggtcacaaaagatggtgttaccgtcgcaaaaggcatcgaattcaaagacaaattcaaaaacattggcgccaagcttgtacaagatgtagctaatagcacaaatgaagaagcaggcgatggtacaactactgctactgttcttgccagagctattgctagagaaggagcagaaaaaatcagcagaggcacaaacccaatcgaaatgcgccgcggcatccaaaaggccgttgacgttgtcatcgaggagttaaagaagatgtcaaagcaagttacaactcctgaagagattgcgcaagttgctacaatctccgcaaatggggataaagaaattggcgacctaatttctaatgctatggaaagggttgggcgaaatggagttataactgtaaaagatggcaagacacttcacgacgagctggaagttattgaaggaatgaaatttgatcgtggttacatttctccatactttattaactcgtccaaaggccaaaaggttgaatttcaaaacgcttatgttctgctttcggaaaagaagattagttcaatacagtcaattgtcccagcccttgagcttgccaactcccagcgtaaaccactcgtgattatcgctgaggacgttgatggtgaggcattgagcactctggtcatcaacagactgaaagttggtcttcaaattgctgcagtgaaagcaccaggttttggtgacaatagaaaaaacacattgaaagacatggctattgcaactggtggtcttgtgtttggtgaagatgctttggaacttaaacttgaagatgtacaagcccatgaccttggggaggttgaagaaatcacgatcacgaaagacgattgtctccttctacgaggtaaaggtaagcaagaagacgtagaaaagagagtcgcgcaaatccacgaacaaattgatgaaaccagtagcgattatgagagggaaaaactgaatgaaagagttgcaaaacttgcgagtggtgttgctgtgttgaaggtaggtggcagtagtgaggtggaagttaacgagaagaaagatcgagttaatgacgcattgaacgcaacacgagctgcagtagaagaaggcatcgtcccaggtggtggcgtcgctcttctaaggtgtcatgacattatctctgctctacaagggggtacaagagacgaacaagttggggttgacattattctcaaagttttaagaataccttgcgcccaaatagctgacaacgctggcatggagggacaacttgtagctgagaaactttttaaatcaatcgaaggtgactatggctacgacgcacgagaagacaaataccgtaacatgctcgaagctggaattctggacccaacgaaagtcgtaaaacaggctcttattgatgcttctggtgttgcttcgttgcttacaactgctgagtgtgttgttaccgaagaaccaaaggaagaccccccaatgcctgcaggagggggtatgggtggcatgggaggaatgggtggcatgggtggaatgatgtaa

SEQ ID NO: 9101 - protein, 573 aa, Ciona intestinalis
MHRFAKLVSKSAVPAGRIISRGYAKELKFGSMAREEMIAGVNQLADAVAVTMGPKGRNVVLEQSWGSPKVTKDGVTVAKGIEFKDKFKNIGAKLVQDVANSTNEEAGDGTTTATVLARAIAREGAEKISRGTNPIEMRRGIQKAVDVVIEELKKMSKQVTTPEEIAQVATISANGDKEIGDLISNAMERVGRNGVITVKDGKTLHDELEVIEGMKFDRGYISPYFINSSKGQKVEFQNAYVLLSEKKISSIQSIVPALELANSQRKPLVIIAEDVDGEALSTLVINRLKVGLQIAAVKAPGFGDNRKNTLKDMAIATGGLVFGEDALELKLEDVQAHDLGEVEEITITKDDCLLLRGKGKQEDVEKRVAQIHEQIDETSSDYEREKLNERVAKLASGVAVLKVGGSSEVEVNEKKDRVNDALNATRAAVEEGIVPGGGVALLRCHDIISALQGGTRDEQVGVDIILKVLRIPCAQIADNAGMEGQLVAEKLFKSIEGDYGYDAREDKYRNMLEAGILDPTKVVKQALIDASGVASLLTTAECVVTEEPKEDPPMPAGGGMGGMGGMGGMGGMM

SEQ ID NO: 9102 - DNA, 1734 bp, Drosophila pseudoobscura pseudoobscura
  CDS (1)..(1734)
atggccatgcttcgcgcgttccatcgtgggtcaagggtcaaccacatattggccggctatagctatcgtcgctatgccaaggatgtcaagttcggacccgaggtccgcgccatgatgctgcaaggcgtcgatgtcctggccgatgccgtggccgtgaccatgggccccaagggacgcaacgtcatcatcgaacagagctggggctcgccgaagatcaccaaggacggcgtgactgtggccaagtccatctcattgaaggacaagttcatgaacattggcgccaagctggtccaggatgtggccaacaacacaaacgaagaggctggcgatggcaccaccaccgccacggtgctggcccgtgccattgccaaggagggcttcgagaagatctcgcgtggcgccaatcccgtggagatccgtcgcggtgtcatgctggccatcgacaccgtcaaggagaacctcaagaagatgtcgcgtccggtgaactcccccgaggagatctgccaggtggccacaatctcggcgaacggcgaccagtcggtgggcaatctcatcagcgaggccatcaagaaggtgggccgcgacggagtcatcaccgtcaaggatggcaagaccctcaacgacgaactggaggtcatcgagggcatgaagttcgaccgtggctacatatcgccgtacttcatcaattcctccaagggagccaaggtggagttccaggactcccttttgctgttctgcgagaagaaggtcaagaccacgcagagcattctgcccgctttggagctggccaatgctcagcgcaagcctttggtcataatcgcggaagatgtggagggcgaagccctcagcaccatggtcctgaatcgcctcaagtccggccttcaggtctgcgccgtcaaggcccccggattcggggacaatcgcaaggaaacaatagaggacatggccattgccacgggcggcatcgtcttcggcgatgaggcgaatctcgttcgcctcgaggatgtcaagttgagcgatttcggacgtgtcggcgaggtggtcgtcaccaaggacgacaccatgctgctgaagggcttgggccagcgtcccttgatcgatcgccgcattgagaacttacgggaggccatcgcggagaccaagtcctcctacgagaaggagaaattccaggagcgcctggcccgtctctcgtcgggcgtggccctgttgcgtgtcggcggctctagcgatgtggaggttaacgaaaagaaagaccgcgttaacgatgctctgaacgccacccgtgctgctgtcgaggagggcatcgtgcccggaggtggcaccgctctcctacgctgcatcagccgcctgaacgacgtcaagggagccaatgaggaccaaaacatgggaatcgaaatcattcgtcgtgccttgcgtatgccgtgccttacgattgctaagaatgctggcgtcgacggggccatggtggtggccaaagtggagatcctcgacggcgactatggctacgatgcgctgaagggggagtacgccaatatgatcgagcgtggcatcatcgatcccaccaaggtggtgcgcacagccatcacggatgccgctggtgtggcctcgctcttgactaccgcagaggccgtggtcaccgaactgcccatcgaagacgctggagctgccgccatgggtggcatgggtggcatgggagggatgggaggcatgggaggcctcggtggcatgatgtaa

SEQ ID NO: 9103 - protein, 577 aa, Drosophila pseudoobscura pseudoobscura
MAMLRAFHRGSRVNHILAGYSYRRYAKDVKFGPEVRAMMLQGVDVLADAVAVTMGPKGRNVIIEQSWGSPKITKDGVTVAKSISLKDKFMNIGAKLVQDVANNTNEEAGDGTTTATVLARAIAKEGFEKISRGANPVEIRRGVMLAIDTVKENLKKMSRPVNSPEEICQVATISANGDQSVGNLISEAIKKVGRDGVITVKDGKTLNDELEVIEGMKFDRGYISPYFINSSKGAKVEFQDSLLLFCEKKVKTTQSILPALELANAQRKPLVIIAEDVEGEALSTMVLNRLKSGLQVCAVKAPGFGDNRKETIEDMAIATGGIVFGDEANLVRLEDVKLSDFGRVGEVVVTKDDTMLLKGLGQRPLIDRRIENLREAIAETKSSYEKEKFQERLARLSSGVALLRVGGSSDVEVNEKKDRVNDALNATRAAVEEGIVPGGGTALLRCISRLNDVKGANEDQNMGIEIIRRALRMPCLTIAKNAGVDGAMVVAKVEILDGDYGYDALKGEYANMIERGIIDPTKVVRTAITDAAGVASLLTTAEAVVTELPIEDAGAAAMGGMGGMGGMGGMGGLGGMM

SEQ ID NO: 9104 - DNA, 1722 bp, Drosophila pseudoobscura pseudoobscura
  CDS (1)..(1722)
atgttccgcttacctgttgcacttgcacgcacctccgtcagccgccatctggcgatgcggggctatgcgaaggacgtgaagtttggcgccgaggtgcgcgccatgatgcttcagggcgtagatgtgctggccgatgcggtggccgtgacgatgggccccaagggtcgcaacgtcatcatcgagcagtcgtggggatcgcccaagatcaccaaggatggtgtgactgtggccaagtcgatcgaactgaaggacaagttccagaacatcggtgctaagctggtccaagatgtggccaacaacacgaacgaggaggccggcgacggtaccacgactgccaccgttcttgcgcgcgccattgccaaagagggatttgagaagatctccaagggcgccaatcccgtcgagatccgccgcggtgtaatgctggccgtggagaccgtcaaggataacctcaaggacatgtctcgcccagtgaaaacccccgaggagattgcccaggtggccaccatctcggccaacggcgatcaggccattggcaatttgatcagcgaggccatgaagcgagtcggacgcgacggtgtcatcacagttaaggacggcaagaccctcacggatgagctggaggtgattgagggcatgaagttcgaccgtggctacatctcgccctacttcatcaactcttcgaagggcgccaaggtcgagttccaggatgctcttctgctgctttcggagaaaaagatctcctcagtgcagagcattattcccgcactggagttggcgaacacgcagcgcaagcccctggtgatcatcgccgaagacatcgacggcgaggccctgagcactctggtcgtgaaccgcctgaagatcggtcttcaggtggcagccgtcaaggcccccggcttcggcgacaaccgcaagtccaccctgacagacatggccatcgcctcaggcggcattgtctttggcgatgatgctgatctcgtcaagttggaggatgtcaaggtcagtgatctcggacaggtgggcgaggtggtcatcaccaaggacgacacactgctgctgaagggcaagggaaagaaggatgacgtgcaacgtcgcgttgaccaaatcaaggagcaaattggcgacaccacctccgaatatgagaaggagaagcttcaggagcgcctggcccgtctggcctccggcgttgccctgctccgagtcggtggctccagcgaggttgaggtgaacgagaagaaggaccgcgtccacgatgccctgaatgccacacgcgctgctgtcgaagaaggaattgttcccggtggtggcactgccctcctccgctgcatcgagaaactggacaccgtggccgtccagaatgccgatcagagccttggagtggacatcgtgcgccgtgccctccgcatgccctgcatgaccattgccaagaatgccggcgttgatggcgccatggtcgtggcaaaggttgagactcagtctggcgattatggctacgatgcactgaagggcgaatacggcaatctgattgagaagggcatcattgaccccacgaaggtggtgcgcacggccattacggatgcctccggtgttgcatctctgctgaccacagccgaggccgttgtcactgaaatccccaaggaagatgctgccccgggaatgcccggcatgggtggaatgggcggcatgggaggaatgggcggcatgggtggcatgatgtaa

SEQ ID NO: 9105 - protein, 573 aa, Drosophila pseudoobscura pseudoobscura
MFRLPVALARTSVSRHLAMRGYAKDVKFGAEVRAMMLQGVDVLADAVAVTMGPKGRNVIIEQSWGSPKITKDGVTVAKSIELKDKFQNIGAKLVQDVANNTNEEAGDGTTTATVLARAIAKEGFEKISKGANPVEIRRGVMLAVETVKDNLKDMSRPVKTPEEIAQVATISANGDQAIGNLISEAMKRVGRDGVITVKDGKTLTDELEVIEGMKFDRGYISPYFINSSKGAKVEFQDALLLLSEKKISSVQSIIPALELANTQRKPLVIIAEDIDGEALSTLVVNRLKIGLQVAAVKAPGFGDNRKSTLTDMAIASGGIVFGDDADLVKLEDVKVSDLGQVGEVVITKDDTLLLKGKGKKDDVQRRVDQIKEQIGDTTSEYEKEKLQERLARLASGVALLRVGGSSEVEVNEKKDRVHDALNATRAAVEEGIVPGGGTALLRCIEKLDTVAVQNADQSLGVDIVRRALRMPCMTIAKNAGVDGAMVVAKVETQSGDYGYDALKGEYGNLIEKGIIDPTKVVRTAITDASGVASLLTTAEAVVTEIPKEDAAPGMPGMGGMGGMGGMGGMGGMM

SEQ ID NO: 9106 - DNA, 1749 bp, Hydra magnipapillata
  CDS (1)..(1749)
atgtattcacttgctaaacttataagaccggttaatcgcgtggtaaatctttctccgcggttaactacatcattatttagtacttcctcgaatttcagttcccctaaagagatcaagactggttcagaggcaagagcactgttactaaaaggagtcgatcttcttgctgatactgttgctgttacgttaggaccaaaaggtaaaaatgttcttattgagcaatcctttggtggacctaaaattacaaaagatggagttactgttgctaaagcaattgacctaccagacaaatatatgaatatgggagctaagcttgttcaagatgttgcaaataatactaatgaagaggctggtgatggaacaactactgcaacagttcttgcacgtgccattgcaaaaggagggtttgatgctgtatcaaaaggtgctaatcctaatgaagtacgcaaaggtgtgatgttggctgttgaaactgtaactgcaggtcttaaaaatctttctaaaaaggtaacaacatctgaagaaatagcacaagttgctactatatctgcaaacggtgacaaatcagtaggcaaacttatttctgatgctatggacagggttggtaaagatggtgtaataacagttaaagatggaaaaactgtgagcgatgagcttgaagtgattgaaggaatgaaatttgatcgtggctatatctcaccatattttatcaacacagctaaaggtcaaaaagtagaatatcaaaatgcgttagttttattatcccaagcaaaaatatcgaatgttcaggaaatcatacctgcgcttgagcttgctaacagtaacaagcgtccattagtaatagtagctgaagatgtagatggagaagcattgacagctcttgttcttaatcgattaaagattggtttacaagttgttgctgttaaagcacctggttttggtgataatcgcaaaaatacattaaaggatatagctgtttctactggtgctgaggtctttggagatgatcttggtctaaaattagaagaaattcaattaaatgatcttggagaagttggcgaggttatagttacaaaagatgatacactttttatgaaaggaaaaggtgatccgaaagaaatttctcgtcgatcagagcaaattttagatgaaataaaagccactaattctgattatgaaaaagaaaaatttcaggaaagattagctaaactggttggtggtgttgcagttattaagattggtggacacagtgaagttgaagtaaacgaaaaaaaagatcgagtaacagatgctttaaatgcaacacgcgccgctgctgaagaaggaattgttcctggaggaggcactgctctaattcgatgtgcaccattattagaaaaattagttgtatcaaacgctgatcaaaaagctggtgttgatattgttttggctgctctttttaaaccattaactacaataatagcaaatactggaatagaagccgcaatgatagtccaaaaggtcgctagcaacgaaaacaaagaattcggttatgatgcagcgactggtgaatttgttaacttgattcaagctggaattatcgatccaacaaaagtagtacgtattgcattaaatgatgctgccggtgttgcatctcttcttacgactacagaagctgttatagttgaacttcctaaagacgatcctccaatgccacctatgggcggtggaatgggtggcatgggcggtatgggaggaatgggtttctaa

SEQ ID NO: 9107 - protein, 582 aa, Hydra magnipapillata
MYSLAKLIRPVNRVVNLSPRLTTSLFSTSSNFSSPKEIKTGSEARALLLKGVDLLADTVAVTLGPKGKNVLIEQSFGGPKITKDGVTVAKAIDLPDKYMNMGAKLVQDVANNTNEEAGDGTTTATVLARAIAKGGFDAVSKGANPNEVRKGVMLAVETVTAGLKNLSKKVTTSEEIAQVATISANGDKSVGKLISDAMDRVGKDGVITVKDGKTVSDELEVIEGMKFDRGYISPYFINTAKGQKVEYQNALVLLSQAKISNVQEIIPALELANSNKRPLVIVAEDVDGEALTALVLNRLKIGLQVVAVKAPGFGDNRKNTLKDIAVSTGAEVFGDDLGLKLEEIQLNDLGEVGEVIVTKDDTLFMKGKGDPKEISRRSEQILDEIKATNSDYEKEKFQERLAKLVGGVAVIKIGGHSEVEVNEKKDRVTDALNATRAAAEEGIVPGGGTALIRCAPLLEKLVVSNADQKAGVDIVLAALFKPLTTIIANTGIEAAMIVQKVASNENKEFGYDAATGEFVNLIQAGIIDPTKVVRIALNDAAGVASLLTTTEAVIVELPKDDPPMPPMGGGMGGMGGMGGMGF

SEQ ID NO: 9108 - DNA, 1731 bp, Branchiostoma floridae
  CDS (1)..(1731)
atgtaccgactacccggcttggttcgccagctgcgtccggcgtctcggctgctcgcgccagtggccagacgaggatacgccaaggacatcaagttcggagcagacgctcgcgccctcatgctgcagggagtggaccagcttgcagatgctgtagctgtgacgttagggcccaagggtcgtaatgtcatcatagaacagagctggggcagcccaaagatcaccaaggacggcgtgaccgttgccaaggcgatagaactgaaggataaatggcaaaacattggggccaaacttgtacaggatgttgcaaacaacacaaacgaggaggcaggagatggtacaacaacggcaaccgttcttgctcgcacaatcgccaaagaaggcttcgataaaatcagccgcggtggtaaccccattgaagtcaggcaaggagtcatgatggcggttgaagtcgtcgtggatgccttaaagaaaatgtcgcgagcagtcactaccccagaggagatcgcgcaggttgctaccatctccgccaatggtgacaaggtcatcggtgatctgatctccgatgccatgaagaaggtcggccgcaatggcgtcatcacagtcaaggacggaaagacgctatctgatgaacttgaaatcattgagggtctcaagttcgacagaggttacatctctccttacttcatcaacacagctaaaggccagaaggtacagtacgaagatgcgtttgtcctcctgagccaaaagaagatctcgtctgtccagtccatcattcccgcgctcgagatcgccaaccagcagagaaaaccgctcatcatcatcgcagaggacattgacggagaagcactcagcacactagtactcaacaggttaaaggtcggtctgcagatagtagcagtgaaggctccaggttttggagacaacaggaaaaaccagctcgtggacatgggtatcgccacaggagctatggtatttggtgatgaagccatggaggtcaaacttgaagaccttcagccacacgacctcggacaggtcggagaggtcgtagtcaccaaggacgacacgctacttctcaagggcaagggaaacaaggcggacatcgagaaacgggcagcacagatcatggaagagcttgacggaacgacctccgagtacgaaaaggaaaaactgaacgagagactcgccaagctgtcagatggtgttgcagtcttgaagattggaggctccagtgaagttgaagtgaacgagaagaaagaccgtgtgaacgacgcgctgtgtgcaacgagagctgcagtagaggagggcatcgtgcccggtggtggcaccgcgctcctcaggtgtctccctgcgctggacggcatcacctgtgaaaacgaggaccagaagacaggagttgatatagtaagacaggccctgcagatgccgtgcatgacgatagccaagaacgcaggcattgagggcatgctggtcgtggacaaggtcaaggcgatggctgctgacgaaggctacgatgcgctgaagggagagtacgtggacttgataaagtctggaatcatcgaccccacaaaggttgtgaggacagccatagtcgacgcagcgggcgtggcatctttgttgtcaacggcagaatctgtcatcacagaaattccaaaggaggagccggcaatgcctggaggaatgggcggcatggggggaatgggagggatggggggtatgggaggaatgatgtaa

SEQ ID NO: 9109 - protein, 576 aa, Branchiostoma floridae
MYRLPGLVRQLRPASRLLAPVARRGYAKDIKFGADARALMLQGVDQLADAVAVTLGPKGRNVIIEQSWGSPKITKDGVTVAKAIELKDKWQNIGAKLVQDVANNTNEEAGDGTTTATVLARTIAKEGFDKISRGGNPIEVRQGVMMAVEVVVDALKKMSRAVTTPEEIAQVATISANGDKVIGDLISDAMKKVGRNGVITVKDGKTLSDELEIIEGLKFDRGYISPYFINTAKGQKVQYEDAFVLLSQKKISSVQSIIPALEIANQQRKPLIIIAEDIDGEALSTLVLNRLKVGLQIVAVKAPGFGDNRKNQLVDMGIATGAMVFGDEAMEVKLEDLQPHDLGQVGEVVVTKDDTLLLKGKGNKADIEKRAAQIMEELDGTTSEYEKEKLNERLAKLSDGVAVLKIGGSSEVEVNEKKDRVNDALCATRAAVEEGIVPGGGTALLRCLPALDGITCENEDQKTGVDIVRQALQMPCMTIAKNAGIEGMLVVDKVKAMAADEGYDALKGEYVDLIKSGIIDPTKVVRTAIVDAAGVASLLSTAESVITEIPKEEPAMPGGMGGMGGMGGMGGMGGMM

SEQ ID NO: 9110 - DNA, 1809 bp, Vitis vinifera
  CDS (1)..(1809)
atggaacttgtttttgcttctcttcataaacctgccgcccatcatgcagaggatttgttatattcgaagctccaagcccactccgacgacgtcgttttgggaagggcatctttatcttggtcttttgaatttggaattttggagattgtgattttgccaagaaataggagtttgcgggtcagagctggccccaagaggatatcttttgacagagaatgtagggagggcttacaagctgggatagataagcttgctgatgctgtttctcttaccttaggacccaaaggacgtaatgtgattctttctgaggccggaacattaaaagtgatcaatgatggggtgacaattgctcgggctatagagctttcggatgcaattgaaaacgcaggagcaacgcttatgcaagaggttgcaagtaagacaaatgatgtggcaggtgatggtactacgactgctatcattttggctcgggaaatgatcaagtctggtttgttggtggtcgcttttggagctaacccaattggtttgaagaaaggaatggataagactgtgagagaattggtcaaggttttgaagaagaaaagctttcctgtaaaagggagggatgatataagagctgtggcctcaatttctgctggaaatgatgacttcgttgggaatttaattgctgaagctatagataaaattggccctgatggagtaatctccattgaatcatcctcatcgtctgaaacctctgttataattgaagaaggaatgaagatcgacaaaggttatatgtcaccccactttatcacaaaccaggacaaatctattgtggagttcgagaatgctaaagttcttgtaactgatcaaaagatttcaaccatcaaaggaatagttcctttactggaaaagactacccaactgagtgtcccactgctaatcattgctgaggacatctcaagtcaagtacttgaaacactggttgtgaacaaaatgcaaggaataattaatgttgctgtggtcaaatgtccaggatttggagaaggaaagaaagctttattgcaagatatagcccttttgacaggtgctgatttcctctctggagatttgggactgactcttgacagtgcaacgtcagatcagcttggcattgcaagaaaagtaaccataacaagcaattcaacaacctttgttgctgatccttcaactaaacctgaaatacaggcaagaattttgcagataaagaaagatctcgctgaaactgatagttcgtatctttcaaggaagctctctgaaaggattgctaaactctctggtggtgtggccataatcaaggtaggagcacatacagagacggaactcgaagatcggaaactcagaattgaggatgcaaagaatgcaacgtttgctgccatggatgaaggtatagtacctggtggtggggctacctatattcatctggaagaacagatacccatcataaagcactccatggaagatccggacgagcagattggtgctgacattgtggcaaaggcacttgctgcaccagccaaagcaattgcaactaatgcaggagttgatggagctgttgtcatagagaagatccggacttgtgactggagaacagggtatgatgcaatgacgggtagataccaagatcttctcaatgctggagtggttgatccctgtcgggtctcaaggtgtgcccttcaaaatgcagtatctgttgctggcattgttctaacaacccaagctgtattggtggagaaaacaaagccgcccaagtcagcagttcctcgtctccctggaataactccttaa

SEQ ID NO: 9111 - protein, 602 aa, Vitis vinifera
MELVFASLHKPAAHHAEDLLYSKLQAHSDDVVLGRASLSWSFEFGILEIVILPRNRSLRVRAGPKRISFDRECREGLQAGIDKLADAVSLTLGPKGRNVILSEAGTLKVINDGVTIARAIELSDAIENAGATLMQEVASKTNDVAGDGTTTAIILAREMIKSGLLVVAFGANPIGLKKGMDKTVRELVKVLKKKSFPVKGRDDIRAVASISAGNDDFVGNLIAEAIDKIGPDGVISIESSSSSETSVIIEEGMKIDKGYMSPHFITNQDKSIVEFENAKVLVTDQKISTIKGIVPLLEKTTQLSVPLLIIAEDISSQVLETLVVNKMQGIINVAVVKCPGFGEGKKALLQDIALLTGADFLSGDLGLTLDSATSDQLGIARKVTITSNSTTFVADPSTKPEIQARILQIKKDLAETDSSYLSRKLSERIAKLSGGVAIIKVGAHTETELEDRKLRIEDAKNATFAAMDEGIVPGGGATYIHLEEQIPIIKHSMEDPDEQIGADIVAKALAAPAKAIATNAGVDGAVVIEKIRTCDWRTGYDAMTGRYQDLLNAGVVDPCRVSRCALQNAVSVAGIVLTTQAVLVEKTKPPKSAVPRLPGITP

SEQ ID NO: 9112 - DNA, 1758 bp, Vitis vinifera
  CDS (1)..(1758)
atggcttccgccaatgctatctccacagcgtcaattatccgctctcccaaacagagcttcagaaggagggtgaaccaacaacaagggccgaaatttaattacaggccatcaaacaatcggtttgtggttcgtgcctccgctaaggaaattgcatttgaccaaagttcaagggcggcgcttcaggctggcattgataagcttgcagatgccgtggggcttactcttggtcctagaggaaggaatgttgtcctggatgaattcgggagccccaaggtggtgaatgatggggtaacaattgcccgagctattgagctagctgatgctatggaaaacgctggtgcagctctcattagagaggttgcaagtaaaaccaatgactctgctggtgatggcacaacaactgcctctgttcttgcccgagaaataatcaaactgggcctgttgagtgttacctctggtgcaaatccagtctccataaagaagggaattgacaaaacagtacatgagttagtgaaggagctggagaagaaagcccgacctgttgaaggcggtgacgatatcaaagctgttgcttctatatctgcgggaaacgatgagttcattgggtccatgatcgcagatgcaattaataaggttgggcctgatggtgttttgtccattgagtcatcatcctcttttgaaacaactgttgatgtcgaagaaggaatggagattgacagaggatatatctccccacagtttgttacaaaccctgagaaactgattgctgaatttgagaatgcaagagtgttggtcactgatcagaagatcacaacgataaaggacataattcccctgctagagaagaccactcagctgagatctcctctgcttatagttgctgaggatgtcactggagaagctttggctactcttgttgtgaacaagctccggggaatacttaatgttgctgccatcaaagcccctggttttggtgagaggagaaaggctctccttcaagatattgctattatgacaggagctgagtttcaggccaatgatctgggtttgcttattgagaatacctcagttgagcagcttggtttggcaaggaaggtgaccattaccaaggactcaaccaccatcattgctgatgctgcatcaaaggatgagatacaggctaggattgctcagataaaaaaagagttggctgagacagattccgtttatgatacagaaaaactggctgagagaattgccaaattgtcaggtggggttgctgttataaaggtgggggctgcaacagaaacagagcttgaggaccgtaagcttcgtattgaggatgctaagaatgcaacttttgctgccatagaggaagggatagtgcctggtggtggtgctgcattcgttcacctgtcaacttatgtccctgcaattaaggacaagctcgaagatgcagatgaacgtcttggtgctgacattgtgcagaaggcactggtggcaccagcatcattgatagcccacaatgctggagttgaaggagaggtggttgtagagaagataaaggcttgtgaatgggcagtcgggtacaatgcaatgacagacaaatacgaaaacctggtggaggctggagtcattgaccctgccaaggttgccagatgtgctttgcagaacgcagcatcggttgcaggaatggtcctgaccacacaagccattgttgtggaaaaggccaagccaaaggcacctgtggctgctcccccacaaggtcttaccatatga

SEQ ID NO: 9113 - protein, 585 aa, Vitis vinifera
MASANAISTASIIRSPKQSFRRRVNQQQGPKFNYRPSNNRFVVRASAKEIAFDQSSRAALQAGIDKLADAVGLTLGPRGRNVVLDEFGSPKVVNDGVTIARAIELADAMENAGAALIREVASKTNDSAGDGTTTASVLAREIIKLGLLSVTSGANPVSIKKGIDKTVHELVKELEKKARPVEGGDDIKAVASISAGNDEFIGSMIADAINKVGPDGVLSIESSSSFETTVDVEEGMEIDRGYISPQFVTNPEKLIAEFENARVLVTDQKITTIKDIIPLLEKTTQLRSPLLIVAEDVTGEALATLVVNKLRGILNVAAIKAPGFGERRKALLQDIAIMTGAEFQANDLGLLIENTSVEQLGLARKVTITKDSTTIIADAASKDEIQARIAQIKKELAETDSVYDTEKLAERIAKLSGGVAVIKVGAATETELEDRKLRIEDAKNATFAAIEEGIVPGGGAAFVHLSTYVPAIKDKLEDADERLGADIVQKALVAPASLIAHNAGVEGEVVVEKIKACEWAVGYNAMTDKYENLVEAGVIDPAKVARCALQNAASVAGMVLTTQAIVVEKAKPKAPVAAPPQGLTI

SEQ ID NO: 9114 - DNA, 1725 bp, Vitis vinifera
  CDS (1)..(1725)
atgtaccgtgtagctgcaaaattagcttccacgatcagctctgcttcttccaagaaactggtatatagcagggttttatctagtagaagttatggagcaaaggatatccattttgggattggggcacgggcggccatgttgcagggtgttactgagcttgcagaagctgtgaaagttacaatgggaccaaagggtcgcaatgtgattattgagaaaaaccgtggggatcctaaagtcaccaaagatggagtcactgttgccaaaagcatcaagttcaaggaaaaggctaaaaatgttggtgcagatcttgtaaagcaggttgctagtgctactaatactgctgcaggagatggtacaacttgtgcaactgtgctgactcaggcaatatttacagaaggctgcaagtctgtagctgctggtgtaaatgcaatggatttacgcagtggtatcaatatggcagttaatgcagttatatctgatttaaaatgcagagcagtgatgattagcacaccagaagaaattactcaggtggccaccatctctgcaaatggtgaccgtgaaattggagaattgttggctaaagcaatggagaaagttgggaaacaaggagtaattactgttgcagatggaaatactttggacagtgagttagaagtggtggaaggaatgaagctagcgagaggctatatatctccttattttgttactgaccacaagacccagaaatgtgaactagaacatcctttaatcctcatccatgacaaaaaaatttcagacatgaactcacttgtaagaatattggagctggctgtgaagaaaaatagagctcttctaattgtggccgaggatgtagagagtgatgtgctagctatgcttgttctcaacaagcaccaagcaggggttaagggctgtgccatcaaggctccaggttttggggaaaacagaagggccaatttagaagatcttgccattcttactggaggagaggttattactgaagatcgtggcttgaatctcaacaaagtcaaagttgaaatgcttggtactgccaaaaaggtcactgtatctctcgatgacacaattattctacatgggggtggggataagaggctgattgaagaaagatgtgaggagctcaggacagccatggagaacagtagtgccatgtttgacaaggagaaagcacaggagcggctgtcaaagttatctggtggtgttgctgtcttcaaggttggaggggccagtgaggcagaagttggggaaagaaaagatagggtcacagatgctttgaatgccacaagagcagctattgaagagggtattgtacctggtggtggtgttgctctattgtatgccacaaaagttctggaaaacattcagacttcaaatgaagaccaaaaaagaggagtccagataatccagaatggtcttaaggcaccaacattcacaatagtttcaaatgctggtggtgatggtgctctggtgcttggcaaactgctggaacaagacgatcttaatttgggatatgatgcagccaaaggtgtgtatgttgatatggttaaagctggaattatagatcctctcaaagtggtcagaactgccttggtagatgctgccagtgtctcgctgctattaacaacaacggaagcaactgttgtagaccatccagatgagaaaaactccgcgcccagccgaatgccagcaatggatgatatgggctactga

SEQ ID NO: 9115 - protein, 574 aa, Vitis vinifera
MYRVAAKLASTISSASSKKLVYSRVLSSRSYGAKDIHFGIGARAAMLQGVTELAEAVKVTMGPKGRNVIIEKNRGDPKVTKDGVTVAKSIKFKEKAKNVGADLVKQVASATNTAAGDGTTCATVLTQAIFTEGCKSVAAGVNAMDLRSGINMAVNAVISDLKCRAVMISTPEEITQVATISANGDREIGELLAKAMEKVGKQGVITVADGNTLDSELEVVEGMKLARGYISPYFVTDHKTQKCELEHPLILIHDKKISDMNSLVRILELAVKKNRALLIVAEDVESDVLAMLVLNKHQAGVKGCAIKAPGFGENRRANLEDLAILTGGEVITEDRGLNLNKVKVEMLGTAKKVTVSLDDTIILHGGGDKRLIEERCEELRTAMENSSAMFDKEKAQERLSKLSGGVAVFKVGGASEAEVGERKDRVTDALNATRAAIEEGIVPGGGVALLYATKVLENIQTSNEDQKRGVQIIQNGLKAPTFTIVSNAGGDGALVLGKLLEQDDLNLGYDAAKGVYVDMVKAGIIDPLKVVRTALVDAASVSLLLTTTEATVVDHPDEKNSAPSRMPAMDDMGY

SEQ ID NO: 9116 - DNA, 1830 bp, Vitis vinifera
  CDS (1)..(1830)
atggcatcatcttttgccaccatgtcttctattgggtatttcacatcgtccagcagtcatacaatggataagaagtttctgggttcttccagaagattgtcttcatttgcttccatatctgcgaattcttttgaaggcaggaaacagagtatggttttgcagaagagatgttctccaaaggttagggcaatggccaaggagttgtatttcaacaaggatggctctgctattaagaagcttcaaacgggtgttaataagcttgctgatctagtgggggttactcttggtccaaaagggaggaatgttgttctggagagcaagtatgggtccccgaaaattgttaatgatggtgttactgtggcaagagaggtagagttggaggaccctgttgagaacataggtgctaggttggtgagacaagctgcttcaaaaaccaatgatttggctggtgatgggacaactacttctgttgttctggctcaaggcttgattactgaaggtgttaaggtggtagcagctggtgccaaccctgttcaaatcactaggggtattgagaacaccactaaagctctggtggctgagctgaagttgatgtcaaaggaggttgaagacagtgaactagcagatgtggctgcagttagtgcaggaaacaactatgaagtaggatatatgatagctgaagctatgggtcaagttggcagaaagggtgttgtgactctcgaagaaggaaaaagtgctgagaacaacttgtatgttgtggaaggaatgcagtttgatcgtggttatatctctccttacttcgtcacagacagtgagaaaatggctgttgaatatgaaaattgcaagctgcttttggttgacaaaaagatcacaaatgcaagggatctcattaatgttttggaagatgccatcaaagggggatatccaatcttgataattgcggaagatattgagcaggaagctcttgcaactcttgttgtgaataagctcaggggggcattaaagattgctgcactgaaagctcctggatttggagagcgcaaaagccaatatcttgatgatattgctatcctcactggaggaaccgtgattagagaggaggttgggttatcattggacaaagctgaaaaggaggtcttggggcatgctgctaaagtggtgctcaccaaggatacaactacaattgttggtgatggcagtacacaggaagcagtaaataagcgagttgcgcagatcagaaaccttgttgaggcagcagatcaggactatgaaaaagagaagcttaatgaaagaattgcaaaactttcaggtggtgttgctgtcattcaggtcggagcacaaactgaaacagaacttaaagaaaagaaattgagagtggaggatgcccttaatgcaacaaaggcagccgttgaggaaggtattgtggttggtggcgggtgcacattgttgcgtctagcagcaaaagttgatgctatcaaagacactcttgatagtgatgagcaaaaggttggagcagatattgttaagagggcactaagctacccaatgaagttaatcgccaagaatgcaggggtcaacggaagtgttgtgatcgaaaaggtgttgtccagtgacaatccaaaatatggttacaatgctgcaactggaaaatacgaggatttgatggctgctggtataattgatcccacgaaagtggtgagatgttgtttggagcatgcagcttcggttgcaagaaccttcctcacatctgatgctgtggtggttgacatcaaggagcctgaacccattcctgctggaaatccaatggataattcaggttatggatactga

SEQ ID NO: 9117 - protein, 609 aa, Vitis vinifera
MASSFATMSSIGYFTSSSSHTMDKKFLGSSRRLSSFASISANSFEGRKQSMVLQKRCSPKVRAMAKELYFNKDGSAIKKLQTGVNKLADLVGVTLGPKGRNVVLESKYGSPKIVNDGVTVAREVELEDPVENIGARLVRQAASKTNDLAGDGTTTSVVLAQGLITEGVKVVAAGANPVQITRGIENTTKALVAELKLMSKEVEDSELADVAAVSAGNNYEVGYMIAEAMGQVGRKGVVTLEEGKSAENNLYVVEGMQFDRGYISPYFVTDSEKMAVEYENCKLLLVDKKITNARDLINVLEDAIKGGYPILIIAEDIEQEALATLVVNKLRGALKIAALKAPGFGERKSQYLDDIAILTGGTVIREEVGLSLDKAEKEVLGHAAKVVLTKDTTTIVGDGSTQEAVNKRVAQIRNLVEAADQDYEKEKLNERIAKLSGGVAVIQVGAQTETELKEKKLRVEDALNATKAAVEEGIVVGGGCTLLRLAAKVDAIKDTLDSDEQKVGADIVKRALSYPMKLIAKNAGVNGSVVIEKVLSSDNPKYGYNAATGKYEDLMAAGIIDPTKVVRCCLEHAASVARTFLTSDAVVVDIKEPEPIPAGNPMDNSGYGY

SEQ ID NO: 9118 - DNA, 1728 bp, Vitis vinifera
  CDS (1)..(1728)
atgtaccgtttcgccaccagtctcgcttccaaggctcggatcgctaggaacagcacccatcagattggtagtaggctgaactggagcagaaactatgctgctaaagacatcagattcggggttgaggctcgagccttgatgcttaagggcgtggaagagctcgcagatgctgttagagtcaccatgggccccaaggggcgtaacgtggtactagagcaaagttttggtgccccaaaagtgacaaaagatggtgtaactgttgcaaaaagcattgagttcaaggatcgaatcaagaatgttggtgcaagccttgtgaaacaggttgcaaatgccactaatgatgtagcaggagatggtaccacctgtgccacagtccttacccgagcaatatttactgaagggtgcaagtcggttgctgctggaatgaatgcaatggacctaagaaggggtatctcgatggcagtagatgctgtagtgacaaacttgaaaagcagagctaagatgatcagcacatctgaagaaatagcacaggttgggacaatatcagcaaatggtgagagagaaattggtgaattgatcgcaaaggctatggagaaagttggcaaagagggagtaatcacaatttcagatgggaagacattgtataatgaattggaagttgttgaggggatgaagctggatagaggttacatatccccttattttataacaaaccagaaaacccaaaaatgtgaactagaaaatcctcttgttctaatccatgagaagaaaatctcgaatatacatgctgttgtgaaagtgctagagatggcattaaagactcagaggcctttactgattgttgctgaagatgtggaaagcgaagcactggccactcttattctaaataagcttcgtgctggaatcaaggtctgtgccatcaaagcacctgggtttggagagaacaggaaggccgccctgcaggatctggcaactctcacaggaggggagcttataacggaagagcttggtttgaaccttgagaaggcagaactggatatgcttggcacttgcaaaaaggttacaatatctaaggacgatactgttatccttgatggggctggtgacaagaaggccattgaggaacggtgtgagcagattaggtcagccattgaattgagcacttctgattatgacaaggaaaagttgcaagaaaggttggccaagctttctggtggtgttgctgtcttgaagataggaggagctagtgaagctgaagttagtgagaagaaagatagggttacagatgctctaaatgctactaaggcagctgtagaagaaggaattgtaccaggtggtggcgtggcacttctttatgcttccaaagagttggacaaactgccaacatcaaactttgatcagaagattggtgttcagattatccagaatgctctgaaaacacctgtgttcacaattgcttctaatgctggagttgagggggctgttgtggttgggaagctgttggagcaggataaccctgatcttggatatgatgcggccaaaggtgaatatgttgatatggtcaaagctggaattattgatccactgaaagtaattagaacagctttggttgatgctgcaagtgtgtcatcgttgatgacaacaactgaagctgttgtggttgaactgccaaaggatgagaaggaagttcctgcaatgggaggtggcatgggtggcatggactactaa

SEQ ID NO: 9119 - protein, 575 aa, Vitis vinifera
MYRFATSLASKARIARNSTHQIGSRLNWSRNYAAKDIRFGVEARALMLKGVEELADAVRVTMGPKGRNVVLEQSFGAPKVTKDGVTVAKSIEFKDRIKNVGASLVKQVANATNDVAGDGTTCATVLTRAIFTEGCKSVAAGMNAMDLRRGISMAVDAVVTNLKSRAKMISTSEEIAQVGTISANGEREIGELIAKAMEKVGKEGVITISDGKTLYNELEVVEGMKLDRGYISPYFITNQKTQKCELENPLVLIHEKKISNIHAVVKVLEMALKTQRPLLIVAEDVESEALATLILNKLRAGIKVCAIKAPGFGENRKAALQDLATLTGGELITEELGLNLEKAELDMLGTCKKVTISKDDTVILDGAGDKKAIEERCEQIRSAIELSTSDYDKEKLQERLAKLSGGVAVLKIGGASEAEVSEKKDRVTDALNATKAAVEEGIVPGGGVALLYASKELDKLPTSNFDQKIGVQIIQNALKTPVFTIASNAGVEGAVVVGKLLEQDNPDLGYDAAKGEYVDMVKAGIIDPLKVIRTALVDAASVSSLMTTTEAVVVELPKDEKEVPAMGGGMGGMDY

SEQ ID NO: 9120 - DNA, 1827 bp, Vitis vinifera
  CDS (1)..(1827)
atggcatcggctttcactaccatgtcttctgttggctccttggctgctcctggtggtcgtgggatggataagaaacttgcaacttcatcagacagattatcatcttttgcttccatatcttcaagctcatttggtaggagacaaaatgttgttctacgaaggacacgatctcccaggatcaatgctatggcaaaggatttgtatttcaacaaagatggctctgctatcaagaagctgcagactggagtaaataaacttgctgatctagtgggagttactcttggtccaaaaggcaggaatgttgtcctagagagcaagtatggctccccaaaaattgttaatgatggtgtaactgtggccaaagaggttgagttggaggatcctgttgagaatattggtgctaaattagtgagacaagcagctgccaagaccaacgacttggctggggatgggacaacaacatctgttgttcttgcacaagggcttattgctgaaggtgtcaaggtggtagcagctggtgcaaaccctgttctaatcactcgaggcattgagaagaccacaaaatctctagtggctgagcttaagctgatatcaaaagaggttgaagacagtgagctagcagatgttgcagctgttagtgcaggaaacaaccatgaagtgggaaatatgattgccgaagcaatgagtaaagtgggtcgaaagggtgtggtgacccttgaagagggaaaaagtgcagagaaccacctgtatgttgttgaaggaatgcaatttgaccgtggttatatctcaccttactttgtcaccgatagtgagaaaatggcagttgaattcgagaactgcaagttgcttcttgtagacaagaagataacaaatgcaagagatctcattaatgttctggaagacgctattaggggtggatacccaatcttgataattgcagaagatattgagcaggaagctttggcaacactggttgtgaataagcttagagggtcattaaagattgctgcacttaaagcccctggatttggagagcgcaagagccagtacctggatgacattgcaattctgactggaggaactgtaattagagatgaggtggggctcaccctagacaaagctgagaaggaggttttaggccatgctgcaaaggtggtgcttaccaaggatacaaccaccattgttggagatgggagcacccaggaagcagtaaataagcgagttgcacaaattagaaacctcattgaggcagcagagcaagaatatgagaaggaaaaacttaatgaaagaattgcaaaattgtcaggtggtgttgctgtgattcaggttggagcacaaactgagacagagcttaaagaaaagaaactgagagtagaagacgctctcaatgcaacgaaggcagctgttgaggaagggattgttgtaggtggtgggtgcactctcctgagacttgcctcaaaggtggatgccatcaaggacacgcttgataatgatgaggaaaaggttggagctgatattgtcaagagagctttgagttaccctctgaagttaattgccaaaaatgctggtgttaatggaagtgtggtcagtgagaaggtgctctccagtgacaatccaaaatatgggttcaatgctgcaacaggaaaatatgaagatctaatggctgctggaataattgaccctactaaggtggtgaggtgttgcctggagcatgcatcatcagtggccaaaactttcttgatgtcagattgtgtagtggtggaaatcaaagagcctgaaccagtggttgcaggaaatcccatggacaattcaggttatggatactag

SEQ ID NO: 9121 - protein, 608 aa, Vitis vinifera
MASAFTTMSSVGSLAAPGGRGMDKKLATSSDRLSSFASISSSSFGRRQNVVLRRTRSPRINAMAKDLYFNKDGSAIKKLQTGVNKLADLVGVTLGPKGRNVVLESKYGSPKIVNDGVTVAKEVELEDPVENIGAKLVRQAAAKTNDLAGDGTTTSVVLAQGLIAEGVKVVAAGANPVLITRGIEKTTKSLVAELKLISKEVEDSELADVAAVSAGNNHEVGNMIAEAMSKVGRKGVVTLEEGKSAENHLYVVEGMQFDRGYISPYFVTDSEKMAVEFENCKLLLVDKKITNARDLINVLEDAIRGGYPILIIAEDIEQEALATLVVNKLRGSLKIAALKAPGFGERKSQYLDDIAILTGGTVIRDEVGLTLDKAEKEVLGHAAKVVLTKDTTTIVGDGSTQEAVNKRVAQIRNLIEAAEQEYEKEKLNERIAKLSGGVAVIQVGAQTETELKEKKLRVEDALNATKAAVEEGIVVGGGCTLLRLASKVDAIKDTLDNDEEKVGADIVKRALSYPLKLIAKNAGVNGSVVSEKVLSSDNPKYGFNAATGKYEDLMAAGIIDPTKVVRCCLEHASSVAKTFLMSDCVVVEIKEPEPVVAGNPMDNSGYGY

SEQ ID NO: 9122 - DNA, 1824 bp, Populus trichocarpa
  CDS (1)..(1824)
atggcatcaacgtttactgccatgtcctcagctggaaccttggctgctcctaatgcccgtgccctggataagaagtttgcattttcttcaaacaagttgtcatcttttgcttccatttctgcaagtcgatttggtagaccacagaatgtagttctaccaagatcgcgttctctcaaggttaatgcggccaaggagcttcatttcaacaaggacgggtcagcaattaggaaattgcaaactggtgtgaacaagcttgcagatctagttggggttacccttggacctaaaggccggaatgttgttcttgagagcaagtacggttcacctaaaattgtcaatgatggtgtgactgttgctaaagaggttgaattggaggatccagttgagaacattggtgctaagctagtgagacaagctgctgccaagacaaatgacttggctggtgatgggaccacaacatctgttgttcttgcacagggcctaattgcagaaggtgtcaaggttgtggcggctggtgcaaaccctgttttaatcactagaggcattgaaaagaccacaagagctcttgtaaatgaacttaaattgatgtcaaaagaggttgaagacagtgaacttgcagatgtggccgctgttagtgcagggaacaactatgaagttgggaatatgattgcggaagctatgagcaaagttggtaggaagggagtggtgactcttgaagagggaaaaagcgctgataatagtctctatgtcgttgagggaatgcagtttgaccgtggttatatctcaccttacttcgtcactgatagtgaaaaaatggctgttgaatatgataactgcaagttgcttcttgttgacaagaaaataacaaatgctagagatctcattgccattttggaagatgcaattaaaggtggatatccagttgtaatagttgctgaagacattgagcaagaagctttagctactcttgttgtcaataagcttaggggtgctttgaagattgctgccctcaaagctcctggttttggggagcggaagagccagtaccttgatgacatagctattctgactggaggaactgttgttagagaagaggtggggcttgccttggacaaagtaggcagtgaggtcctgggacatgcttctaaagtggttcttaccaaggatacaaccaccattgttgctgatggaagcacccaagaagcagtaaataagagagttgcacagattaaaaatcttattgaggctgctgaacaagactatgaaaaggagaagctcaatgaaagaattgcaaaactgtcaggtggtgttgcagtgatacaggttggagcacaaaccgaaacagagcttaaagaaaagaaactgagagttgaagatgctctaaatgcaaccaaggctgccgttgaggaaggtattgtggttggtggtggatgcaccctgctgagactggcatcaaaggtggatgccatcaaggacagccttgagaatgatgaagaaaaggtcggagcagacattgtaaagagagctctgagctaccccttgaaattaatagccaagaatgctggtgttaatgggagtgtggtcagcgagaaggtgctcgcaagtgacaatcctaagtttggatacaatgctgcaactggaaattatgaagatctgatggctgctggaatcatcgatccaacgaaggtggtcagatgttgcctggagcatgcatcatccgtagcaaagactttcttgatgtcagattgtgtagttgttgagattaaggagcccgaatcagtgcctgctggcaaccccatggacaactcaggatatgggtattaa

SEQ ID NO: 9123 - protein, 607 aa, Populus trichocarpa
MASTFTAMSSAGTLAAPNARALDKKFAFSSNKLSSFASISASRFGRPQNVVLPRSRSLKVNAAKELHFNKDGSAIRKLQTGVNKLADLVGVTLGPKGRNVVLESKYGSPKIVNDGVTVAKEVELEDPVENIGAKLVRQAAAKTNDLAGDGTTTSVVLAQGLIAEGVKVVAAGANPVLITRGIEKTTRALVNELKLMSKEVEDSELADVAAVSAGNNYEVGNMIAEAMSKVGRKGVVTLEEGKSADNSLYVVEGMQFDRGYISPYFVTDSEKMAVEYDNCKLLLVDKKITNARDLIAILEDAIKGGYPVVIVAEDIEQEALATLVVNKLRGALKIAALKAPGFGERKSQYLDDIAILTGGTVVREEVGLALDKVGSEVLGHASKVVLTKDTTTIVADGSTQEAVNKRVAQIKNLIEAAEQDYEKEKLNERIAKLSGGVAVIQVGAQTETELKEKKLRVEDALNATKAAVEEGIVVGGGCTLLRLASKVDAIKDSLENDEEKVGADIVKRALSYPLKLIAKNAGVNGSVVSEKVLASDNPKFGYNAATGNYEDLMAAGIIDPTKVVRCCLEHASSVAKTFLMSDCVVVEIKEPESVPAGNPMDNSGYGY

SEQ ID NO: 9124 - DNA, 1824 bp, Populus trichocarpa
  CDS (1)..(1824)
atggcatcgacttttacggccatgtcctcggttggaaccttggctgctcccaatggccgtgttatggataagaagtttgtattttcttcaaacaagttgtcatctttcgcttccatttctgcaagtcgatttggtaggccacagaatgtagttctaccaagatcacgtcctctcaaggttaatgctgccaaggagctgcacttcaacaaggacggttctgcaattaagaaattgcaaactggtgtgaacaagcttgcagatttagttggggttacccttggacctaaaggccggaatgttgttcttgagagcaaatacggttcgcctaaaattgttaatgatggcgtgactgttgctaaagaggttgaattggaggatccggttgagaatattggtgctaagttagtgagacaagctgctgccaagacaaatgacttggctggtgatgggactacaacatctgttgttcttgcgcaaggccttattgcagaaggtgtcaaggttgtggctgctggtgcaaaccctgttttaatcactagaggcattgagaagacaacaagagctctcgtaaacgaacttaagttgatgtcgaaagaggttgaagacagtgaacttgcagatgtggcagctgttagtgctgggaacaactatgaagttgggaatatgatagctgaagctatgagcaaagtcggtcggaagggagtggtcacccttgaagagggaaagagtgctgataacagcctctatgttgttgagggaatgcagtttgaccgtggttatatctcaccttactttgtcactgatagtgaaaaaatgtcagttgaatatgagaactgcaagttgcttcttgttgacaagaaaataacaaacgcaagagatctaatctccattttggaagatgcaattagagctggatatccagttttgataattgctgaagacattgaacaagaagctttagcaactcttgttgtcaataagcttaggggtgctttgaagattgctgccctcaaagctcctggttttggggaacggaaaagtcagtaccttgatgacattgctattctgactggaggaactgttgtcagagaagaggtggggcttgccttggacaaagtaggcaaagaggtcttgggacatgcttctaaagtggttcttaccaaggacacaaccaccattgttggtgacggaagcacccaagaagcagtaaataagagagttgctcaaattagaaatcttatcgaggctgctgaacaagactatgaaagggagaaactcaatgaaagaattgctaagctgtccggcggtgttgcagtgatacaggttggagcacaaaccgagacagagcttaaagaaaagaaactgagagttgaagatgctcttaatgcaaccaaggcagccgttgaggaaggtattgtggttggtggtggatgcaccctgctgagactggcatcaaaggtggatgctatcaaggacagtctcgagaacgatgaagaaaaggtgggagcagacattgtaaagagagctctgagctaccccctgaagttaattgccaaaaatgctggtgttaatggaagtgtggtcagcgagaaggtgctctcaactgacaatcctaaatttggatacaatgctgcaactggaaattatgaagatctgatggctgctggaatcattgatccaacaaaggtggtcagatgttgcctggagcatgcatcatcggtagcaaagacgttcttgatgtccgactgtgtagttgttgagattaaggagcctgaatcagtgcctgctggcaaccccatggataactcaggatatgggtactag

SEQ ID NO: 9125 - protein, 607 aa, Populus trichocarpa
MASTFTAMSSVGTLAAPNGRVMDKKFVFSSNKLSSFASISASRFGRPQNVVLPRSRPLKVNAAKELHFNKDGSAIKKLQTGVNKLADLVGVTLGPKGRNVVLESKYGSPKIVNDGVTVAKEVELEDPVENIGAKLVRQAAAKTNDLAGDGTTTSVVLAQGLIAEGVKVVAAGANPVLITRGIEKTTRALVNELKLMSKEVEDSELADVAAVSAGNNYEVGNMIAEAMSKVGRKGVVTLEEGKSADNSLYVVEGMQFDRGYISPYFVTDSEKMSVEYENCKLLLVDKKITNARDLISILEDAIRAGYPVLIIAEDIEQEALATLVVNKLRGALKIAALKAPGFGERKSQYLDDIAILTGGTVVREEVGLALDKVGKEVLGHASKVVLTKDTTTIVGDGSTQEAVNKRVAQIRNLIEAAEQDYEREKLNERIAKLSGGVAVIQVGAQTETELKEKKLRVEDALNATKAAVEEGIVVGGGCTLLRLASKVDAIKDSLENDEEKVGADIVKRALSYPLKLIAKNAGVNGSVVSEKVLSTDNPKFGYNAATGNYEDLMAAGIIDPTKVVRCCLEHASSVAKTFLMSDCVVVEIKEPESVPAGNPMDNSGYGY

SEQ ID NO: 9126 - DNA, 1722 bp, Anopheles gambiae str. PEST
  CDS (1)..(1722)
atgttccgtttgccaacagtgttgcgtgttgctgccgcccgacaggtcgctgccagccgtggctacgctaaggatgtgcgctttgggcccgaagtacgtgccctaatgctgcagggtgtcgatgtgctagcagatgccgttgccgtcacgatgggaccaaagggacgtaacgtcatcctggaacaaagctggggctcgcccaaaatcaccaaggacggtgttacggtggcgaagggcatcgagctgaagtgcaagttccagaacattggcgccaagctggtgcaggatgtggcgaacaacacgaacgaggaggccggtgacggtaccacgaccgctaccgtgctggcccgcgccatcgccaaggagggcttcgagaagatctcgaagggtgccaacccggtcgagatccggcgcggtgtgatgctggccgtcgacacggtgaaggaacacctgaagacgctgtcgcgcaaggtgaacacgcccgaggagattgcccaggtggcaacgatttccgcgaacggtgaccgcgcgatcggcgatctgatcagcgaggcaatgaagcgcgtcggcaaggagggcgtgattacggtgaaggacggcaagacgctgaacgacgagctggaggtgatcgagggcatgaagttcgaccggggctacatctcgccgtacttcatcaactcgagcaagggcgccaaggtcgagttccaggacgcgctcgtgctgttctcggagaagaagatctcaacggtacagtcgatcattcccgcgctggagatggcgaaccagcaacgcaagcccctggtcatcattgcggaggacgtcgacggcgaggcgctcagcacgctggtggtgaaccggctgaagattggcctgcaggtggccgcggtaaaggcgcccggcttcggcgacaaccgcaagtcgacgctgtccgatatggccatcagcaccggcggcatcgtgtttggcgatgatgcgaatctggtcaagctggaggatgtgcagctgtccgatctcggccaggtgggcgagatcacgatcaccaaggacgattgtctgctgctgaaggggcgcggcaagcaggaggacgtgaaccgccgggcggaccagattcgggaccagatcgcggaaacgacgtccgagtacgagaaggaaaagctgcaggagcgtctcgcacgcctgtcgtccggggtggccgtgctgaaggtcggtggttcgagcgaggtggaggtgaacgaaaagaaggaccgcgtgaacgatgctctgtgcgcaacccgagccgccgtcgaggaaggcatcgtgcccggtggtggtaccgcgctcatccgctgcgcaccggccctggccaacctgaagggagcaaacgaggaccagaacacgggcatcgagattgtgcgccgtgcgctgcgcatgccgtgcacccagatcgccaagaatgccggcgtcgatgggtcggtggtggtggcgaaggtggaggagctgaagggcgacttcggatacgatgcgctcaacaacgagtatgtgaacatgatcgagaagggcatcatcgatccgaccaaggtcgtccggacggcgctgtccgatgcgtctggcgttgcgtcgctgctcaccacggccgaagcggtcgtgacggagatcccgaaggaggaaccggccggcccgatgggtggtatgggaggaatgggcggtatgggaggcatgggaggcatgggcggtatgatgtaa

SEQ ID NO: 9127 - protein, 573 aa, Anopheles gambiae str. PEST
MFRLPTVLRVAAARQVAASRGYAKDVRFGPEVRALMLQGVDVLADAVAVTMGPKGRNVILEQSWGSPKITKDGVTVAKGIELKCKFQNIGAKLVQDVANNTNEEAGDGTTTATVLARAIAKEGFEKISKGANPVEIRRGVMLAVDTVKEHLKTLSRKVNTPEEIAQVATISANGDRAIGDLISEAMKRVGKEGVITVKDGKTLNDELEVIEGMKFDRGYISPYFINSSKGAKVEFQDALVLFSEKKISTVQSIIPALEMANQQRKPLVIIAEDVDGEALSTLVVNRLKIGLQVAAVKAPGFGDNRKSTLSDMAISTGGIVFGDDANLVKLEDVQLSDLGQVGEITITKDDCLLLKGRGKQEDVNRRADQIRDQIAETTSEYEKEKLQERLARLSSGVAVLKVGGSSEVEVNEKKDRVNDALCATRAAVEEGIVPGGGTALIRCAPALANLKGANEDQNTGIEIVRRALRMPCTQIAKNAGVDGSVVVAKVEELKGDFGYDALNNEYVNMIEKGIIDPTKVVRTALSDASGVASLLTTAEAVVTEIPKEEPAGPMGGMGGMGGMGGMGGMGGMM

SEQ ID NO: 9128 - DNA, 1770 bp, Magnaporthe grisea 70-15
  CDS (1)..(1770)
atgcagcgcgcacttagcagcaggactaggacttcggccctgaggtcctcggccgccgccgcaaagttcaggcccggcgccggtctgtcgcagcagcttcgttttgcccacaaggagcttaaatttggtgttgagggacgcgctgctctcctggctggtgtcgacactctggccaaggccgtctcaacgacgctgggtcccaagggccgcaacgtcctgatcgagtccagctatggctcgcccaagattaccaaggatggtgtgaccgtcgcaaaggccattaccctcaaggacaagttcgagaaccttggtgccaagctcctccaggacgtcgcgtccaagaccaacgaggtcgccggtgacggtaccacctcggccaccgtcctcgctcgcgccatcttctccgagaccgtcaagaacgttgccgctggctgcaaccccatggatctccgccgcggtatccaggctgccgtcgacgccgtcatcgagttcctgcacaagcagaaacgcgacatcaccagcgctgaggaggttgcccaggtcgccaccatctcggccaacggcgacgtgcacgtcggcaagatgattgccaacgccatggagaaggtcggcaaggagggtgtcatcaccgtcaaggagggcaagaccctggttgacgagctcgaggttaccgagggtatgaggttcgaccgcggcttcgtgtcgccgtacttcatcaccgatgccaaggctcagaaggttgagttcgagaagcccctgattctgctgtcagagaagaagatctcggctgtccaggacatcatccccgcccttgagatctcgacccagacccgcaggccgcttgtcatcatcgccgaggacattgagggcgaggctctggctgtctgtattctgaacaagctccgcggccagctccaggtcgctgccgtcaaggcccccggcttcggtgacaaccgcaagtcgatcctcggcgacattgctgttctcaccaacggtaccgtcttcactgatgagcttgacgtcaagctggagaaggctaccattgacatgctcggctccaccggatccatcaccatcaccaaggaggacaccattgtccttaacggcgagggcagcaaggacatgatcacccagaggtgcgagcagatccgtggtgttatggctgacccaaccacctcggagtacgagaaggagaagctccaggagcgtctggccaagctctcgggcggtgttgccgtcatcaaggtcggcggctcttctgaggtcgaggtcggtgagaagaaggaccgcttcgtcgatgcccttaacgccacccgcgccgccgtcgaggagggtatcctgcccggtggtggtaccgctctgctcaaggctgccagccaggccctgggcgacgtcaagtcggccaacttcgaccagcagctcggtgtcagcatcatcaagaacgccatcacccgccctgccaggacgatcgtcgagaacgccggtcttgagggctccgttattgttggcaagctcatggacgagttcggctccgacttccgcaagggctacgatgccgccaagggcgagtacgtcgacatgatcgatgccggtatcgtcgaccccctgaaggtcgtccgcaccggtctccttgacgccagcggtgtcgcctcgcttctgggtaccaccgaggttgccatcgttgaggctcccgaggagaagggtcctgccggcggcatgggtggtatgggaggcatgggtggcatgggcggcatgggtggcatgatgtaa

SEQ ID NO: 9129 - protein, 589 aa, Magnaporthe grisea 70-15
MQRALSSRTRTSALRSSAAAAKFRPGAGLSQQLRFAHKELKFGVEGRAALLAGVDTLAKAVSTTLGPKGRNVLIESSYGSPKITKDGVTVAKAITLKDKFENLGAKLLQDVASKTNEVAGDGTTSATVLARAIFSETVKNVAAGCNPMDLRRGIQAAVDAVIEFLHKQKRDITSAEEVAQVATISANGDVHVGKMIANAMEKVGKEGVITVKEGKTLVDELEVTEGMRFDRGFVSPYFITDAKAQKVEFEKPLILLSEKKISAVQDIIPALEISTQTRRPLVIIAEDIEGEALAVCILNKLRGQLQVAAVKAPGFGDNRKSILGDIAVLTNGTVFTDELDVKLEKATIDMLGSTGSITITKEDTIVLNGEGSKDMITQRCEQIRGVMADPTTSEYEKEKLQERLAKLSGGVAVIKVGGSSEVEVGEKKDRFVDALNATRAAVEEGILPGGGTALLKAASQALGDVKSANFDQQLGVSIIKNAITRPARTIVENAGLEGSVIVGKLMDEFGSDFRKGYDAAKGEYVDMIDAGIVDPLKVVRTGLLDASGVASLLGTTEVAIVEAPEEKGPAGGMGGMGGMGGMGGMGGMM

SEQ ID NO: 9130 - DNA, 1764 bp, Gibberella zeae PH-1
  CDS (1)..(1764)
atgcagcgcgcattgaacacccgggcccgagcctctgctctgtcctcggcagccaccaagtaccgagccggcagcctcagccagcaggtccgatttgctcacaaggagctcaagttcggtgttgagggtcgtgccgctctcctcgctggtgtcgacaccctcgccaaggccgttgctaccacactcggtcccaagggccgaaatgtcctcattgagtccagctttggctctcccaagatcaccaaggatggtgttaccgttgcccgcgctgtgagcctcaaggacaagttcgagaacctcggtgccaagctcctccaggatgttgcttccaagaccaacgaggtcgccggtgacggtaccaccaccgctactgttctcgcccgtgccatcttctccgagactgtcaagaacgttgccgccggctgcaaccccatggacctccgccgcggtatccaggctgctgttgaggccgtcgtccagttcctccagaagaacaagcgagacatcaccaccagcgctgagatcgctcaggtcgctaccatctctgccaacggcgacgtccacattggtcagatgattgccaacgccatggagaaggttggcaaggagggtgtcatcacctgcaaggagggcaagaccgttgccgatgagcttgaggttaccgagggtatgcgattcgaccgtggattcgtctccccctacttcatcaccgacaccaagtcccagaaggtcgagtttgagaaccctctcatcctcctctccgagaagaagatctctgctgtccaagacatcatccccgctcttgaggtctccacccagcagcgccgacctctggtcatcattgctgaggacattgagggtgaggctcttgctgtctgcatcctgaacaagctccgtggccagctccaggtcgctgctgtcaaggcccctggtttcggtgacaaccgcaagtccatcctcggcgatctcgccatccttaccgacggtaccgtcttcactgatgagcttgacatcaagcttgacaaggccacccccgacatgcttggatccactggttccatcaccatcaccaaggaggacaccattgtcctcaacggtggtggcagcaaggacgccattgctcagcgatgtgagcagatccgtggtgtcattgccgaccccactacctccgagtacgagaaggagaagctccaggaacgtcttgccaagctctctggcggtgttgctgtcatcaaggttggtggctcgtccgaggttgaggtcggtgagaagaaggatcgattcgttgatgctctgaacgccacccgcgccgctgttgaggagggtatcctgcccggtggtggcactgccctcatcaaggcctctgcccaggccctcaacgaggtccccactgccaactttgaccagcagcttggtgtcagcatcgtcaagaacgccatcacccgccccgcccgaaccattatcgagaacgccggtcttgagagctccgtcgttgtcggcaagctcaccgacgagcacgccgctgacttcaacaagggtttcgacagcgccaagggcgagtacgttgacatgatcaacgctggtatcctcgaccccttcaaggtcgtccgaactggtctcattgacgccagtggtgtcgcctctcttctcggtaccaccgaggtcgctatcgtcgacgcccctgaggagaagggtgccggtggtcctcctatgggcggcatgggaggcatgggcggcatgggtggtatgggaggtatgatgtaa

SEQ ID NO: 9131 - protein, 587 aa, Gibberella zeae PH-1
MQRALNTRARASALSSAATKYRAGSLSQQVRFAHKELKFGVEGRAALLAGVDTLAKAVATTLGPKGRNVLIESSFGSPKITKDGVTVARAVSLKDKFENLGAKLLQDVASKTNEVAGDGTTTATVLARAIFSETVKNVAAGCNPMDLRRGIQAAVEAVVQFLQKNKRDITTSAEIAQVATISANGDVHIGQMIANAMEKVGKEGVITCKEGKTVADELEVTEGMRFDRGFVSPYFITDTKSQKVEFENPLILLSEKKISAVQDIIPALEVSTQQRRPLVIIAEDIEGEALAVCILNKLRGQLQVAAVKAPGFGDNRKSILGDLAILTDGTVFTDELDIKLDKATPDMLGSTGSITITKEDTIVLNGGGSKDAIAQRCEQIRGVIADPTTSEYEKEKLQERLAKLSGGVAVIKVGGSSEVEVGEKKDRFVDALNATRAAVEEGILPGGGTALIKASAQALNEVPTANFDQQLGVSIVKNAITRPARTIIENAGLESSVVVGKLTDEHAADFNKGFDSAKGEYVDMINAGILDPFKVVRTGLIDASGVASLLGTTEVAIVDAPEEKGAGGPPMGGMGGMGGMGGMGGMM

SEQ ID NO: 9132 - DNA, 1713 bp, Apis mellifera
  CDS (1)..(1713)
atgcacagattaccaaccatattgcgaagtgcagccttgcgccaattacaaactcgttcatatgctaaagatgtacgttttggtgcagaagttagagcacttatgttgcaaggtgttgatattttagcagatgcagttgcagtaacaatgggtccaaaaggacgtaatgttatcttagaacaaagttggggtagtccaaaaattactaaagatggtgttacagttgctaaaggagttgaattaaaagataaatttcagaatattggagcaaaattagtacaagatgtagcaaataatacgaatgaagaggcaggtgatggtacaactacagctacagttttggcaagagccattgctaaagaaggttttgaaaaaataagtaaaggtgccaatcctgtagaaataagaagaggtgttatgttagctgttgataaagttaaagatgaattaaaagccttaagtaagccagtaacaactcctgaagaaattgcacaagtagcaactatttcagctaatggagataaagcaattggtaatcttatttctgatgctatgaaaaaagttggaaaagaaggtgtaattactgtaaaagatggtaaaacgttacatgatgaactggaagttatagaaggaatgaaatttgatagaggctacatatctccttactttataaattctagtaaaggagcaaaagttgaatttcaagatgcacttctgcttttcagcgagaaaaaaatatcatctgtacaatctataattcctgcattagaattagcgaattctcaacgaaaaccacttgttattatagcagaagatattgatggtgaagctttgtcaacacttgtagttaatagattaaaaattggcttacaagtggctgcagtcaaagctcctggttttggagataatagaaaagcaacgcttcaagatatggcaattttgactggaggaattgtatttggtgatgatgcaaatcttgttaaattagagaatgtacaattatgtgatttgggcgaagtaggagaagtcgtaattacgaaagacgatacactttttcttaagggcaaaggaaaaaaaagtgatattgatcatagagcagacgtaattagagatcagattgcaaatacaacatctgactatgaaaaagaaaagttacaagaacgtttggcaaggttagcatcaggagttgcagttctcagagttggtggaagtagtgaagttgaagttaatgaaaaaaaagatcgtgttcatgatgctcttaatgcaaccagagcagccgttgaagaaggaattgttcctggaggcggtactgctcttttaagatgtattccagctcttcgaaatttaaaagcatcaaataatgatcaagaaactggaataaagatagtggcaaatgcattgcgtatgccatgtttgcagattgctcaaaatgcaggcgtggatgctagtttagtggtagcaaaagttagtgatggtaatcttggttacgatgctttaaatgatgaatatgttgacatgatcgaaaaaggtattattgatccaacgaaagtagtgcgtacggcacttactgatgctgcgggcgttgcatcactgctcactactgctgaagcagtggttgctgaattgcctaaagaagaacctcaaatgccaatgggtggtggtggtatgggtggtatgggtggtatgggtggtatgggaggtatgggtatgtaa

SEQ ID NO: 9133 - protein, 570 aa, Apis mellifera
MHRLPTILRSAALRQLQTRSYAKDVRFGAEVRALMLQGVDILADAVAVTMGPKGRNVILEQSWGSPKITKDGVTVAKGVELKDKFQNIGAKLVQDVANNTNEEAGDGTTTATVLARAIAKEGFEKISKGANPVEIRRGVMLAVDKVKDELKALSKPVTTPEEIAQVATISANGDKAIGNLISDAMKKVGKEGVITVKDGKTLHDELEVIEGMKFDRGYISPYFINSSKGAKVEFQDALLLFSEKKISSVQSIIPALELANSQRKPLVIIAEDIDGEALSTLVVNRLKIGLQVAAVKAPGFGDNRKATLQDMAILTGGIVFGDDANLVKLENVQLCDLGEVGEVVITKDDTLFLKGKGKKSDIDHRADVIRDQIANTTSDYEKEKLQERLARLASGVAVLRVGGSSEVEVNEKKDRVHDALNATRAAVEEGIVPGGGTALLRCIPALRNLKASNNDQETGIKIVANALRMPCLQIAQNAGVDASLVVAKVSDGNLGYDALNDEYVDMIEKGIIDPTKVVRTALTDAAGVASLLTTAEAVVAELPKEEPQMPMGGGGMGGMGGMGGMGGMGM

SEQ ID NO: 9134 - DNA, 1707 bp, Candida glabrata CBS 138
  CDS (1)..(1707)
atgttgagagctgttgcacgttcgcaggttagatctttgagaaacgctcgtttgtactccagtttcaaggagttgaagttcggtgtcgaaggcagagctgctctgcttcgtggtgtcgagactttggccgatgctgtctctgccacgctggggcctaagggtagaaatgtgctgatcgagcagccattcggagcaccaaagatcaccaaggatggtgtcaccgtggccagatccattactttggaggacaagttcgagaacatgggtgctaagcttctgcaagaagttgcctccaagactaacgaggccgccggtgacggtaccacctccgccactgtcttgggtagagccatcttcaccgagtccgtcaagaacgtcgctgccggttgcaaccctatggatttgagaaggggttcccaggccgccgtcgagaaggtcatccaattcttgactgaaaacaagaaggagatcaccacttctgaggaaatcgcccaggtggccaccatctcagctaacggtgacgcccacgtcggtaagttgcttgcctccgccatggaaaaggtcggcaaggaaggtgttatcaccatcagagaaggcagaactttggaagacgaactagaagtcaccgaaggtatgagatttgaccgtggtttcatctccccatacttcatcactgacgcaaagtccggcaaggtagaattcgaaaagccattgttgttgttgagcgaaaagaagatctcttccatccaagacatcttgccagctttggaactatctaaccaaagtagaagaccactattgatcatcgccgaagatgtcgacggtgaagccctagctgcttgtatcctaaacaagttgagaggccaagtcaaggtctgtgccgttaaggctccaggtttcggtgacaacagaaagaacattctaggtgatgtcgccatcttgaccggcagtactgtttttactgaagaattggacttgaagccagaacaagccactatggaacacctaggttcctgtgactccattactatcacaaaggaagacactgttatcctaaacggtaacggctccaaggactctatccaagaaagaattgaacagatcaagaactccattgatgtcaccactactaactcttacgagaaggagaagctacaagaaagacttgccaagttatccggtggtgttgctgtcatcagggttggtggtgcttctgaagttgaagtcggtgaaaagaaggaccgttacgatgacgctttgaatgccaccagagctgccgttgaagaaggtatcttaccaggtggtggtactgctttggttaaggcctctagagttttagacgaagtcaagactgagaacttcgaccaaaaattgggagttgacattatcagaaaggccattactagaccagctaagcaaattattgagaacgccggtgaagaaggctccgttattgtcggtaagcttgttgatgaatttggcgaagattttgctaagggttacgactccgctaagggagaattcactgatatgttggctgccggtattattgacccattcaaggtcgttagatctggtctggtcgacgcttccggtgttgcttccttgttggctactaccgaagttgccatcgttgacgctcctgaaccagctccagctgctggtgccccaggtggtggtatgccaggtatgccaggtatgatgtaa

SEQ ID NO: 9135 - protein, 568 aa, Candida glabrata CBS 138
MLRAVARSQVRSLRNARLYSSFKELKFGVEGRAALLRGVETLADAVSATLGPKGRNVLIEQPFGAPKITKDGVTVARSITLEDKFENMGAKLLQEVASKTNEAAGDGTTSATVLGRAIFTESVKNVAAGCNPMDLRRGSQAAVEKVIQFLTENKKEITTSEEIAQVATISANGDAHVGKLLASAMEKVGKEGVITIREGRTLEDELEVTEGMRFDRGFISPYFITDAKSGKVEFEKPLLLLSEKKISSIQDILPALELSNQSRRPLLIIAEDVDGEALAACILNKLRGQVKVCAVKAPGFGDNRKNILGDVAILTGSTVFTEELDLKPEQATMEHLGSCDSITITKEDTVILNGNGSKDSIQERIEQIKNSIDVTTTNSYEKEKLQERLAKLSGGVAVIRVGGASEVEVGEKKDRYDDALNATRAAVEEGILPGGGTALVKASRVLDEVKTENFDQKLGVDIIRKAITRPAKQIIENAGEEGSVIVGKLVDEFGEDFAKGYDSAKGEFTDMLAAGIIDPFKVVRSGLVDASGVASLLATTEVAIVDAPEPAPAAGAPGGGMPGMPGMM

SEQ ID NO: 9136 - DNA, 1725 bp, Kluyveromyces lactis NRRL Y-1140
  CDS (1)..(1725)
atgttgagaagtaccgtaaagccaggcaatttgaccttgaagagaagcactcaattgttgagtcgtcgtctatattcttcgcacaaagaattaaagtttggtgttgaaggtagagctgccttgttaaagggtgttgaaactctagcggaagctgtttctgccactttgggtccaaaaggtagaaacgttttgattgagcaaccatttggcgctccaaagatcaccaaggatggtgttactgttgctagagccattactttggaagataagttcgaaaacatgggtgctaagcttttacaagaagttgcttccaagacaaacgaagctgccggtgacggtaccacttctgccactgtcttaggtaaggccattttcactgaatccgttaagaatgttgcagctggttgtaacccaatggatttgagaagaggtactcaagctgctgtcgaaaaagtaattcaatacttgtcagagaacaagaaagaaatcaccacttctgctgaaatcgctcaagtggcaactatttctgccaacggggatgctcacgttggtaagttgttggcttcagccatggaaaaagttggtaaggaaggtgtcatcactatcagagagggtagaaccttggaagatgaattggaagtcactgaaggtatgagattcgaccgtggtttcatttctccatactttattaccgacgctaaatctggtaaggtggaatttgaaaaacctttgatcttattgagtgaaaagaagatctcctcaatccaggatatcttgccttctttggaattgtcaaaccaaaccagaagaccattgttgatcatcgccgaagatattgatggcgaagctttggctgcttgtattttgaacaagttgagaggtcaagttcaagtttgtgccgttaaagctccaggtttcggtgataacaggaagaacaccttgggcgatattgccatcttgtctggtggtactgtcttcactgaagaattggacctaaagccagaaaacgctaccatccaacatttgggttcttgtgattctgtttctattaccaaggaagataccgttatcttgaatggtaacggtccaaaagaaaacatcgaaaccagaattgaacaaatcaagaactctattgacttgaccactaccaactcttacgaaaaggaaaagttgcaagaacgtttagctaagttgtccggcggtgttgccgtcattagagtcggtggttcttccgaagtcgaagtcggcgaaaagaaggaccgttacgatgacgctttgaacgctacaagagctgctgtcgaagaaggtatcttgccaggtggtggtactgctttgctaaaggcttctagagtcttggacgaagtcgcaacagaaaactttgaccaaaagttgggtgttgacatcatcagaaaggccatttccagaccagctagaaagatcatcgagaacgctggtgaagaaggctccgttatcgtcggtaagattatcgatgaatacggccaagactttaccaagggttacaatgcagccaagggtgaatacaccgacatgttggctgctggtattatcgatccattcaaggttgtcagaagcggtctagtagacgctgctggtgttgcttctctattggctaccactgaagttgctatcgttgatgctccaaagccagctggtgctgctccagctatgccaggtggtatgccaggtatgccaggcatgatgtaa

SEQ ID NO: 9137 - protein, 574 aa, Kluyveromyces lactis NRRL Y-1140
MLRSTVKPGNLTLKRSTQLLSRRLYSSHKELKFGVEGRAALLKGVETLAEAVSATLGPKGRNVLIEQPFGAPKITKDGVTVARAITLEDKFENMGAKLLQEVASKTNEAAGDGTTSATVLGKAIFTESVKNVAAGCNPMDLRRGTQAAVEKVIQYLSENKKEITTSAEIAQVATISANGDAHVGKLLASAMEKVGKEGVITIREGRTLEDELEVTEGMRFDRGFISPYFITDAKSGKVEFEKPLILLSEKKISSIQDILPSLELSNQTRRPLLIIAEDIDGEALAACILNKLRGQVQVCAVKAPGFGDNRKNTLGDIAILSGGTVFTEELDLKPENATIQHLGSCDSVSITKEDTVILNGNGPKENIETRIEQIKNSIDLTTTNSYEKEKLQERLAKLSGGVAVIRVGGSSEVEVGEKKDRYDDALNATRAAVEEGILPGGGTALLKASRVLDEVATENFDQKLGVDIIRKAISRPARKIIENAGEEGSVIVGKIIDEYGQDFTKGYNAAKGEYTDMLAAGIIDPFKVVRSGLVDAAGVASLLATTEVAIVDAPKPAGAAPAMPGGMPGMPGMM

SEQ ID NO: 9138 - DNA, 1719 bp, Debaryomyces hansenii CBS767
  CDS (1)..(1719): transl_table=12
atgttgagatctgttcgtccttctttaaagaaaaccactatttctcttgctcgtaacctttctcataaggaattaaaattcggtgttgaaggtagagcggccttattaaagggtgttaacacattggcggatgctgtatctgttaccttaggaccaaaaggtagaaatgttttgattgaacagcaattcggatccccaaagatcactaaggatggtgttaccgttgctaagtcgatcactttacaagacaaattcgaagatatgggtgccaagttattacaagaagttgcttccaagacaaacgaatcagctggtgatggtacaacatcagctactgttttaggtagatccatcttcaccgaatcggttaagaatgttgctgctggttgtaacccaatggacttgagaagaggttcgcaagcagccgttgaagccgtagttagctttttacaaaacaacaaaaaggaaattaccacatctgaagaaattgctcaagttgccactatctctgctaatggtgacaagcacattggtgatttattggcctctgctatggaaaaggttggtaaggaaggtgtcattaccgtcaaggaaggtaagaccttagaagatgaattggaagtcaccgaaggtatgagattcgaccgtggtttcatttctccttacttcatcaccaacaccaaatctggtaaggttgaatttgaaaaccctttgattttgttatccgaaaagaagatttcttctattcaagatatcttgccttctttggaattatctaaccaacaaagaagacctttattgatcatcgccgaagatattgatggtgaagctttagccgcctgtattttaaataagttgagaggtcaagtacaagtttgtgctgttaaggccccaggtttcggtgataacagaaagaacactttaggtgatattgctatcttatctgggggtactgtcttcactgaagaattagacttgaagcctgaaaatgctaccattgacttgttaggttcttgtggttctatcaccattaccaaggaagacactgttgtcttaaatggtgaaggttcaaaggaaaacattcaagctagatgtgaacaaatcagaactagcgtcgatgacattcaaactactgaatacgaaaaggaaaagttacaagaaagattagctaaattatccggaggtgttgcagtcgttagagttggtggtacttctgaaatcgaagtcagtgaaaagaaggatcgttatgacgatgctttgaatgctactagagctgctgttcaagaaggtattttaccaggtggtggtactgctttaattaaggcatcaagagtcttagacgacattaaggccactgctgccaactttgatcaaaaattaggtgttgatatcattaagtctgctatcactaaaccagccagaagaatcatcgaaaacgctggtgaagaaggtgctgtcattgttggtaagatctacgatgaaccaaacttcaaccacggttatgattcttcaaagggtgagttcaccgacatgattgcagctggtattattgacccattcaaggtcgttaagaacggtttagtcgatgccagtggtgttgcttccttattagctactactgaatgtgctattgtcgaagctccagaaccaaagggctctcctgctcctccagctggcggtatgccaggtatgggtggtatgccaggtatgggcttctaa

SEQ ID NO: 9139 - protein, 572 aa, Debaryomyces hansenii CBS767
MLRSVRPSLKKTTISLARNLSHKELKFGVEGRAALLKGVNTLADAVSVTLGPKGRNVLIEQQFGSPKITKDGVTVAKSITLQDKFEDMGAKLLQEVASKTNESAGDGTTSATVLGRSIFTESVKNVAAGCNPMDLRRGSQAAVEAVVSFLQNNKKEITTSEEIAQVATISANGDKHIGDLLASAMEKVGKEGVITVKEGKTLEDELEVTEGMRFDRGFISPYFITNTKSGKVEFENPLILLSEKKISSIQDILPSLELSNQQRRPLLIIAEDIDGEALAACILNKLRGQVQVCAVKAPGFGDNRKNTLGDIAILSGGTVFTEELDLKPENATIDLLGSCGSITITKEDTVVLNGEGSKENIQARCEQIRTSVDDIQTTEYEKEKLQERLAKLSGGVAVVRVGGTSEIEVSEKKDRYDDALNATRAAVQEGILPGGGTALIKASRVLDDIKATAANFDQKLGVDIIKSAITKPARRIIENAGEEGAVIVGKIYDEPNFNHGYDSSKGEFTDMIAAGIIDPFKVVKNGLVDASGVASLLATTECAIVEAPEPKGSPAPPAGGMPGMGGMPGMGF

SEQ ID NO: 9140 - DNA, 1725 bp, Yarrowia lipolytica CLIB122
  CDS (1)..(1725)
atgcagcgagtcattgcacgatccagccgtctgcgaccccagcagatccgaggctttgctcacaaggagctcaagtttggcgtcgagggccgagccgctctgctcaagggtgtcgacactctggccaaggccgtctccgtcactctgggccccaagggccgaaacgtgctcattgagcagtcgtttggctcccccaagatcactaaggatggtgtcactgttgcccgatccatcactctcgaggacaaatttgagaacatgggcgctcgtcttctgcaggaggttgcctccaagaccaacgagaccgccggagacggaaccacctccgccaccgttctcggccgatccatcttcaccgagtccgtcaagaacgtggctgccggctgcaaccccatggatctgcgacgaggctcccaggccgctgtcgacgccgtcgtcgagttcctccagaagaacaagcgggagatcaccacttctgaggagattgcccaggtcgctaccatctctgctaacggcgacactcacattggccagctgattgccaacgccatggagaaggtcggcaaggagggtgtcatcactgtcaaggagggcaagaccattgaggacgagctcgagatcaccgagggtatgcgattcgaccgaggctacatctccccttactttgtcaccgacgttaagtccggcaaggttgagtttgagaaccctctgattctcatctccgagaagaagatctcttctatccaggacattcttccctctctcgagctgtccaacaagcagcgacgacccttgctgatcctggctgaggacgttgacggcgaggccctggctgcttgtatcctcaacaagctgcgaggccaggtccaggttgcagctgtcaaggcccctggctttggtgacaaccgaaagtctatcctcggcgacatctccatcctcactggtggtaccgtcttcactgaggacctcgatgtcaagcctgagaacgccaccgccgacatgctcggttcttgtggcgccatcaccatcaccaaggaggacaccatcatcctcaacggtgagggctccaaggactctattgcccagcgatgcgagcagatccgagccttcatggctgactccaccacctccgagtacgagaaggagaagctgcaggagcgactggccaagctgtctggcggtgttgccgtcatcaaggtcggaggctcctccgaggttgaggttggcgagaagaaggaccgtttcgtcgacgctctcaacgccacccgagccgccgtcgaggagggtattctccccggaggaggaaccgctctgctcaaggcctctcgaaacctggactccgtgcctaccgctaactttgaccagaagctcggtgttaacattattcgaactgccatcaccaagcctgctcgaaccatcgttgagaacgccggtggcgagggctccgtcgttgtcggcaagctcactgacgagtttggcgaggacttcaacatgggttacaacgccgccaagggcgagtacaccgacatgattgctgccggtatcatcgaccccttcaaggttgtgcgaaccggtctggttgacgcttctggtgtcgcctctctgctcgccaccaccgagtgcgccattgtcgatgctcctgagcctaagggacctgctgctgctcctgctggcggcatgcccggtatgggtggtatgggaggcatgggaggcatgggcttctaa

SEQ ID NO: 9141 - protein, 574 aa, Yarrowia lipolytica CLIB122
MQRVIARSSRLRPQQIRGFAHKELKFGVEGRAALLKGVDTLAKAVSVTLGPKGRNVLIEQSFGSPKITKDGVTVARSITLEDKFENMGARLLQEVASKTNETAGDGTTSATVLGRSIFTESVKNVAAGCNPMDLRRGSQAAVDAVVEFLQKNKREITTSEEIAQVATISANGDTHIGQLIANAMEKVGKEGVITVKEGKTIEDELEITEGMRFDRGYISPYFVTDVKSGKVEFENPLILISEKKISSIQDILPSLELSNKQRRPLLILAEDVDGEALAACILNKLRGQVQVAAVKAPGFGDNRKSILGDISILTGGTVFTEDLDVKPENATADMLGSCGAITITKEDTIILNGEGSKDSIAQRCEQIRAFMADSTTSEYEKEKLQERLAKLSGGVAVIKVGGSSEVEVGEKKDRFVDALNATRAAVEEGILPGGGTALLKASRNLDSVPTANFDQKLGVNIIRTAITKPARTIVENAGGEGSVVVGKLTDEFGEDFNMGYNAAKGEYTDMIAAGIIDPFKVVRTGLVDASGVASLLATTECAIVDAPEPKGPAAAPAGGMPGMGGMGGMGGMGF

SEQ ID NO: 9142 - DNA, 1746 bp, Cryptococcus neoformans var. neoformans JEC21
  CDS (1)..(1746)
atgaaccccctccgctcccgcgctgctctcccccgccccgcaaggctcatccagaacgctgctgtccagaagaggggcttcgcctccaaggacgtcgtcttcggcaacgacgccaggcagggcatgctcaagggtgttgacgtcctcgcaaaggccgtcgctgccaccctcggccccaagggcaggaccgtcatcatcggccagagcttcggtgggcccaagatcaccaaggacggtgtctctgtcgccaaggctatcactctcaaggaccccgttgagaacctcggtgctcgtctcgtccaggatgttgcttccaagaccaacgacactgccggtgacggtaccaccaccgccactgtcctcgcccgagccatctactctgagggtgtgaagaacgtcgctgccggctgcaaccccatggacctccgtcgaggtgcccagaaggctgtcgacaaggtcctcgaggttcttgctgccaacaaaaaggttatcaccacctctgaggagattgcccaggtcgccaccatctccgccaacggcgatacccacgtcggtgccatcattgcccaagccatggagcaggtcggcaaggagggtgtcatcactgttaaggagggccgaaccattgacgacgagattgagattaccgagggtatgcgattcgaccgaggcttcatctccccttacctcatcaccgacaccaagaaccagcgtgtcgagctcgagaagcccttcatcctcctctccgagaagaagatctctgctcttcaggacatccttccttctctcgagattgccgcccagacccgtcgacctttgttgatcatcgccgaagacattgacggtgaggctctcgccgccgtcatcctcaacaagctccgaggtcagctctccgtcgccgccgtcaaggcccccggttttggtgacaaccgaaagtctatcctcggtgacattgccatcctcaccggcggtactgtcttcactgacgagctggatgtcaagcttgagaaggctacccccgacatgtttggtaccactggctccgttaccattactaaggaggacaccatcatcctcaacggcgagggtgacaagagcctcattcagtctcgatgcgagcagatccgagctttgatcaacgactctagcacttccgactacgacaggactaagctccaggagcgattggccaagctcggtggcggtgtcgccgtcatcaaggttggtggctctagcgaggttgaggtcggagagaagaaggacaggtatgacgatgctctcaacgctacccgtgccgccgtcgaggagggtatcgtccccggtggaggtaccgctcttctcaaagcttctaccgctcttgaggacattgccgtcgacaacttcgaccagaagctcggtatctctatgatccgacaggctatccgacgacctgtccgaaccatcgtcgagaacgccggtgaggagggttccgtcgtcgtcggtcgactcctttccgaggagtttgccgctcctgaaaagttcaactggggttacgacgcccagacgtctcagtaccgagacatgatcgctgccggtatcctcgaccccttgaaggtcgtcaggaccgccctcgtcgacgcttccggtgttgctagcttgttgacaactagcgaggcctgtgttgttgacgccgaggagaagactcctccttctggtatgggcatgggtggtatgggcggtatgggcggtatgcccggtatgatgtaa

SEQ ID NO: 9143 - protein, 581 aa, Cryptococcus neoformans var. neoformans JEC21
MNPLRSRAALPRPARLIQNAAVQKRGFASKDVVFGNDARQGMLKGVDVLAKAVAATLGPKGRTVIIGQSFGGPKITKDGVSVAKAITLKDPVENLGARLVQDVASKTNDTAGDGTTTATVLARAIYSEGVKNVAAGCNPMDLRRGAQKAVDKVLEVLAANKKVITTSEEIAQVATISANGDTHVGAIIAQAMEQVGKEGVITVKEGRTIDDEIEITEGMRFDRGFISPYLITDTKNQRVELEKPFILLSEKKISALQDILPSLEIAAQTRRPLLIIAEDIDGEALAAVILNKLRGQLSVAAVKAPGFGDNRKSILGDIAILTGGTVFTDELDVKLEKATPDMFGTTGSVTITKEDTIILNGEGDKSLIQSRCEQIRALINDSSTSDYDRTKLQERLAKLGGGVAVIKVGGSSEVEVGEKKDRYDDALNATRAAVEEGIVPGGGTALLKASTALEDIAVDNFDQKLGISMIRQAIRRPVRTIVENAGEEGSVVVGRLLSEEFAAPEKFNWGYDAQTSQYRDMIAAGILDPLKVVRTALVDASGVASLLTTSEACVVDAEEKTPPSGMGMGGMGGMGGMPGMM

SEQ ID NO: 9144 - DNA, 1767 bp, Aspergillus nidulans FGSC A4
  CDS (1)..(1767)
atgcagcgagctctttcttcccggacttcggtcctctctgccgcttccaagcgcgccgctttcaccaagcctgctggtctgaaccttcagcagcagcgatttgctcacaaggaactcaagttcggcgttgaagctcgcgctcagctccttaagggtgtcgacacccttgcaaaggctgtcacatctactcttggtcccaagggtcgcaatgtcttgatcgaatccccctacggctcccccaagatcaccaaggatggtgttactgttgccaaggccgtccagctccaggataagttcgagaacctcggtgctcgtctcctacaggatgtcgcttccaagaccaacgaactcgctggtgacggtacaaccaccgctaccgttctcgcccgcgctatcttttccgagaccgttaagaacgttgctgctggctgcaaccccatggatctgcgccgcggtatccaggctgctgtcgaagccgctgtcgactacctccagcagaacaagcgtgatattactactggagaggagattgctcaggtcgctaccatctctgctaacggtgacacccacgtcggcaagcttatctccactgccatggagcgcgtcggcaaggagggtgttatcactgtcaaggagggcaagacccttgaggacgagcttgaggttactgagggtatgcgtttcgaccgtggttacacctccccctacttcatcaccgacgccaaggctcagaaggttgagttcgagaagcctctgattctcctttccgagaagaagatctctgctgttcaggacatcatccctgcccttgaggcttccaccactctccgccgccctctggttatcatcgctgaggacattgagggtgaggctcttgccgtctgcatcctgaacaagctccgtggccagctccaggttgctgcagtcaaggcccccggcttcggtgacaaccgcaagagcatcctcggtgacctcggtgtcctcaccaacggtaccgtcttcactgacgagcttgacatcaagcttgagaagctcacccccgacatgctcggctccactggttccatcaccatcaccaaggaggacactatcatcctgaacggtgagggcagcaaggacgccatcgctcagcgttgcgagcagatccgtggcgtcatggccgaccctaccacctccgagtacgagaaggagaagctccaagagcgtctcgccaagctctctggcggtgttgctgtcattaaggtcggtggtgcttccgaagtcgaggtcggtgagaagaaggaccgtgtcgttgatgctctcaacgccacccgtgcggccgtcgaggagggtatccttcccggcggtggtaccgctctcctcaaggccgccgccaatggccttgagaacgtcaagcctgccaacttcgaccagcagctcggtgtcagcattgtcaagagcgccatcacccgccctgcccgcaccattgttgagaacgccggtctcgagggcagcgtcattgtgggcaagctcactgatgagttctccaaggacttcaaccgtggtttcgacagcgccaagggcgaatacgttgacatgatcgctgccggtattgtcgaccctctcaaggttgtccgcaccgccctcgttgatgcttccggtgtctcttccctgctcggtaccaccgaggttgctattgttgaagctcccgaggagaagggccctgctgcccctggcggcatgggtggtatgggtggtatgggcggcatgggtggcggcatgttctaa

SEQ ID NO: 9145 - protein, 588 aa, Aspergillus nidulans FGSC A4
MQRALSSRTSVLSAASKRAAFTKPAGLNLQQQRFAHKELKFGVEARAQLLKGVDTLAKAVTSTLGPKGRNVLIESPYGSPKITKDGVTVAKAVQLQDKFENLGARLLQDVASKTNELAGDGTTTATVLARAIFSETVKNVAAGCNPMDLRRGIQAAVEAAVDYLQQNKRDITTGEEIAQVATISANGDTHVGKLISTAMERVGKEGVITVKEGKTLEDELEVTEGMRFDRGYTSPYFITDAKAQKVEFEKPLILLSEKKISAVQDIIPALEASTTLRRPLVIIAEDIEGEALAVCILNKLRGQLQVAAVKAPGFGDNRKSILGDLGVLTNGTVFTDELDIKLEKLTPDMLGSTGSITITKEDTIILNGEGSKDAIAQRCEQIRGVMADPTTSEYEKEKLQERLAKLSGGVAVIKVGGASEVEVGEKKDRVVDALNATRAAVEEGILPGGGTALLKAAANGLENVKPANFDQQLGVSIVKSAITRPARTIVENAGLEGSVIVGKLTDEFSKDFNRGFDSAKGEYVDMIAAGIVDPLKVVRTALVDASGVSSLLGTTEVAIVEAPEEKGPAAPGGMGGMGGMGGMGGGMF

SEQ ID NO: 9146 - DNA, 1701 bp, Candida albicans SC5314
  CDS (1)..(1701): transl_table=12
atgttgagagttaattctaaatcatcaattaaaacatttgttcgtcatttgtctcataaagaacttaaatttggcgttgaaggtagagctgccttattgaaaggggtcaacactttagctgatgctgtttctgttacattaggtccaaaaggtcgtaatgttttaattgaacaacaatttggtgcccccaaaatcactaaagatggggttaccgttgccaaagccatcactttggaagataaatttgaagatttgggagctaaattattacaagaagttgcttctaaaactaatgaaagtgctggtgacggtactacttctgccactgttttaggtagatctattttcactgaatcagttaaaaatgttgctgctggttgtaacccaatggatttaagaagaggttctcaagctgctgtagaagctgttattgaatttttacaaaaaaacaaaaaggaaattactacttctgaagaaattgctcaagttgccaccatttctgctaatggtgataaacatattggtgatttattagctaatgccatggaaaaagttggtaaagaaggggttatcactgttaaagaaggtaaaactttagaagatgaattagaagtcactgaaggtatgaaatttgatcgtggatttatctctccatatttcattaccaacactaaaactggtaaagttgaatttgaaaacccattgattttgttatcagaaaagaaaatttctagtattcaagatattttaccatctttagaactttccaatcaaactagaagaccattattgatcattgctgaagatgttgatggtgaagccttggctgcttgtattttgaacaaattaagaggtcaagttcaagtttgtgctgttaaagctccaggttttggtgacaatagaaaaaacactttgggtgatattgccattttaagtggtggtactgtattcactgaagaattggatattaaaccagaaaatgccactattgaacaattgggttctgctggtgccgttactattactaaagaagacactgttttattgaacggagaaggatctaaagataatttggaagctagatgtgaacaaattagatcagttattgctgatgttcacactactgaatatgaaaaggaaaaattacaagaaagattagctaaattatctggtggtgttgctgttatcaaagttggtggtgcttcagaagttgaagtgggtgaaaagaaggatcgttatgaagatgctcttaatgccactagagctgctgttgaagaaggtattttaccaggtggtggtactgctttaattaaagccaccaagattttggatgaagttaaagaaaaagccgttaatttcgatcaaaaattgggggttgataccattagagctgccattactaaaccagctaaaagaatcattgaaaatgctggtgaagaaggtgctgttattgttggtaagatttatgatgaaccagaattcaacaaaggttatgattctcaaaaaggtgaattcaccgatatgattgctgctggtattattgatccatttaaagttgtcaagaatggattagttgatgcctctggtgttgcttcattattggccactactgaatgtgccattgttgatgctccacaaccaaaaggttcaccagctgctccaccagctccaggtatgggaggtatgccaggtatgttctag

SEQ ID NO: 9147 - protein, 566 aa, Candida albicans SC5314
MLRVNSKSSIKTFVRHLSHKELKFGVEGRAALLKGVNTLADAVSVTLGPKGRNVLIEQQFGAPKITKDGVTVAKAITLEDKFEDLGAKLLQEVASKTNESAGDGTTSATVLGRSIFTESVKNVAAGCNPMDLRRGSQAAVEAVIEFLQKNKKEITTSEEIAQVATISANGDKHIGDLLANAMEKVGKEGVITVKEGKTLEDELEVTEGMKFDRGFISPYFITNTKTGKVEFENPLILLSEKKISSIQDILPSLELSNQTRRPLLIIAEDVDGEALAACILNKLRGQVQVCAVKAPGFGDNRKNTLGDIAILSGGTVFTEELDIKPENATIEQLGSAGAVTITKEDTVLLNGEGSKDNLEARCEQIRSVIADVHTTEYEKEKLQERLAKLSGGVAVIKVGGASEVEVGEKKDRYEDALNATRAAVEEGILPGGGTALIKATKILDEVKEKAVNFDQKLGVDTIRAAITKPAKRIIENAGEEGAVIVGKIYDEPEFNKGYDSQKGEFTDMIAAGIIDPFKVVKNGLVDASGVASLLATTECAIVDAPQPKGSPAAPPAPGMGGMPGMF

SEQ ID NO: 9148 - DNA, 1764 bp, Aspergillus fumigatus Af293
  CDS (1)..(1764)
atgcagagagctctttcttccaggacgtctgtcctttccgctgcctccaaacgggctgctttcaccaagcccgctggccttaacctgcagcagcagcgtttcgcccacaaggagctcaagttcggtgtcgaagcccgtgctcagctcctcaagggtgttgacactctggccaaggccgtgacttcgactcttggtcctaagggtcgtaacgtccttatcgagtctccctatggctcccctaagatcaccaaggatggtgtctctgttgccaaggccatcactctccaagacaagttcgagaacctcggtgctcgcctcctccaggatgtcgcttctaagaccaacgagattgctggtgacggtaccaccaccgctaccgtccttgcccgtgccatcttctctgagaccgtgaagaatgttgctgctggctgcaaccccatggatctgcgccgcggtatccaggctgctgttgatgctgtcgtcgactacctccagaagaacaagcgtgacatcaccaccggtgaggagatcgctcaggttgctactatctccgctaacggtgacacccacatcggtaagctgatctccaccgccatggagcgtgttggcaaggagggtgtcatcactgtcaaggagggcaagaccattgaggatgagctcgaggtcactgagggtatgcgcttcgaccgtggatacacctccccctacttcatcaccgataccaagtcccagaaggttgagtttgagaagcctctgattctgctgtctgagaagaagatctctgccgttcaggacatcatccccgcccttgaggcctccaccaccctccgccgccccctggttattatcgcagaggacattgagggtgaggctctcgccgtctgcattctgaacaagcttcgtggccagctgcaggtcgctgctgtcaaggctcctggattcggtgacaaccgcaagagcatcctgggcgatcttgccgtccttaccaacggtaccgtcttcactgatgagctcgacatcaaactcgagaagcttacccccgatatgcttggttccaccggcgccatcaccatcaccaaggaggacaccatcatcctgaacggggagggcagcaaggacgccattgcccagcgctgcgagcagattcgcggtgtcatggcggaccccagcacctccgaatacgagaaggagaagctccaggagcgtctagctaagctctctggcggtgttgccgtcatcaaggtcggtggtgcctccgaggttgaggtcggtgagaagaaggaccgtgttgtcgatgctctcaatgctacccgtgctgctgttgaggagggtatcctccccggtggtggtaccgcccttctcaaggccgccgccaacggccttgacaatgtcaagcccgagaacttcgaccagcaactcggtgtgagcatcatcaagaatgccatcacccgccccgctcgcaccattgttgagaacgccggcctcgagggcagcgtcattgtcggcaagctgaccgacgagttcgccaaggacttcaaccgcggtttcgacagctccaagggcgagtacgtcgacatgatctccagcggtatcctcgatcccctcaaggttgttcgcaccgctctgctcgacgccagcggtgtcgcctccctgctcggtaccaccgaggtcgctattgttgaggcccctgaggagaagggccccgctgctcctggcatgggtggtatgggtggtatgggcggcatgggtggcggcatgttctaa

SEQ ID NO: 9149 - protein, 587 aa, Aspergillus fumigatus Af293
MQRALSSRTSVLSAASKRAAFTKPAGLNLQQQRFAHKELKFGVEARAQLLKGVDTLAKAVTSTLGPKGRNVLIESPYGSPKITKDGVSVAKAITLQDKFENLGARLLQDVASKTNEIAGDGTTTATVLARAIFSETVKNVAAGCNPMDLRRGIQAAVDAVVDYLQKNKRDITTGEEIAQVATISANGDTHIGKLISTAMERVGKEGVITVKEGKTIEDELEVTEGMRFDRGYTSPYFITDTKSQKVEFEKPLILLSEKKISAVQDIIPALEASTTLRRPLVIIAEDIEGEALAVCILNKLRGQLQVAAVKAPGFGDNRKSILGDLAVLTNGTVFTDELDIKLEKLTPDMLGSTGAITITKEDTIILNGEGSKDAIAQRCEQIRGVMADPSTSEYEKEKLQERLAKLSGGVAVIKVGGASEVEVGEKKDRVVDALNATRAAVEEGILPGGGTALLKAAANGLDNVKPENFDQQLGVSIIKNAITRPARTIVENAGLEGSVIVGKLTDEFAKDFNRGFDSSKGEYVDMISSGILDPLKVVRTALLDASGVASLLGTTEVAIVEAPEEKGPAAPGMGGMGGMGGMGGGMF

SEQ ID NO: 9150 - DNA, 1749 bp, Ustilago maydis 521
  CDS (1)..(1749)
atgtctctgctccgcaacgccgctactccggctcgcaaggccgcttccaaccagggccgcagcttctccacctcgctcgtcgccaacgcccacaaggaagtcaagttcagcaacgatggccgtgccgctatgctcaacggtgtcaacctcctcgccaatgccgtctcggtcactcttggtcccaagggtcgcaacgtcatcatcgagcagcctttcggtggacccaagatcaccaaggacggtgtcaccgtagccaagtccatcaccctcaaggacaagttcgagaacctcggcgctcgtctcgtccaggacgttgcaaacaagaccaacgagatcgccggtgacggtactaccaccgccactgttctcgcccgtgccatctacgccgagggtgtcaagaacgtcgctgctggctgcaaccccatggacctccgacgtggtgtccaggctggtgtcgacgccgtcatcaagttcctcgagaccaacaagcgtgctgtcaccacttctgccgagatcgcccaggtcgccaccatctcagccaacggcgaccagcatgtcggtcagctcatcgccaccgccatggagaaggttggcaaggagggtgtcatcactgtcaaggagggaaagacgctcgaagacgagatcgagatcaccgagggcatgcgtttcgaccgtggctacatctcgccttacttcatcaccgacgtcaagaccgccaaggtcgaattcgagaagcctctcatcctcctctctgagaagaagatctcggctctccaggacatcctcccttcgctcgaggctgctgctcagctccgccgccccctcctcatcattgctgaggacgttgacggtgaggctcttgccgcctgcattctcaacaagctccgtggccagctccaggttgctgccgtcaaggcccccggcttcggtgacaaccgcaagagcatcctcggtgatctcggcatcctcacaggtgctcaggtcttctcggacgagctcgagaccaagctcgaccgtgccactcccgagatgctcggtaccactggtgccgtcaccatcaccaaggaggacaccatcttcctcaacggtgagggtgataaggaccgtctcgctcagcgatgcgagcagatccgtgccgccatcaacgacactaccacctctgagtacgaccgaaccaagctccaggagcgtctcgccaagctctctggcggtgtagccgtcatcaaggtcggcggttcctccgaagtcgaggtcggcgagaagaaggaccgatacgacgatgctctcaacgctacgcgtgccgccgtcgaggccggtgtacttcctggcggtggtgttgcgctgctcaaggcatcgctcgcgctcaacgacgtcgccactgccaactttgaccagcaactcggtctttccatgctcaaggcagcgctcacccgccctgcgcgaactatcgttgagaacgccggcgaggagggttccgtcgttgtcggccgcctgcttgagaagcctggtgacttcacctacggttacgatgccagtgttggcgagtacaaggacatgatcgctgccggtatcttggaccccttgaaggtggtcaaaactgcgctccaggatgcttccggtgtcgcgtcgttgctcaccacctcggaatgctgcatcgtcgaggctcccgaggagaagggtcccgctggtggtatgggtggcatgggcggaatgggtggtatgggaggcatgggtggcatgggcttctaa

SEQ ID NO: 9151 - protein, 582 aa, Ustilago maydis 521
MSLLRNAATPARKAASNQGRSFSTSLVANAHKEVKFSNDGRAAMLNGVNLLANAVSVTLGPKGRNVIIEQPFGGPKITKDGVTVAKSITLKDKFENLGARLVQDVANKTNEIAGDGTTTATVLARAIYAEGVKNVAAGCNPMDLRRGVQAGVDAVIKFLETNKRAVTTSAEIAQVATISANGDQHVGQLIATAMEKVGKEGVITVKEGKTLEDEIEITEGMRFDRGYISPYFITDVKTAKVEFEKPLILLSEKKISALQDILPSLEAAAQLRRPLLIIAEDVDGEALAACILNKLRGQLQVAAVKAPGFGDNRKSILGDLGILTGAQVFSDELETKLDRATPEMLGTTGAVTITKEDTIFLNGEGDKDRLAQRCEQIRAAINDTTTSEYDRTKLQERLAKLSGGVAVIKVGGSSEVEVGEKKDRYDDALNATRAAVEAGVLPGGGVALLKASLALNDVATANFDQQLGLSMLKAALTRPARTIVENAGEEGSVVVGRLLEKPGDFTYGYDASVGEYKDMIAAGILDPLKVVKTALQDASGVASLLTTSECCIVEAPEEKGPAGGMGGMGGMGGMGGMGGMGF

SEQ ID NO: 9152 - DNA, 1725 bp, Tribolium castaneum
  CDS (1)..(1725)
atgtatcgtttaccgtcgaccatgcgatcagtcgccctcagcaaagccaacagattatcccaaatccagcgttggtacgccaaagacgtccgattcggccccgaagtccgggccctgatgctccaaggcgtcgacgttcttgcagacgctgtggcggtcaccatgggccctaagggccgtaacgtgatcatcgaacagtcgtggggctccccaaagatcaccaaagacggcgtcaccgtcgccaaaggcgtggaactcaaagacaagttccagaacatcggcgcccgcttagtacaggacgttgccaacaacaccaacgaggaggcaggggacggaaccactactgctacagtattggcccgctctattgctaaagagggtttcgaaaatcttggcaagggcgctaatccagtcgaaattcgcaaaggcataatgctagcggttgagaagatcacggaaacgttgaaaactctctcaaagcccgtcaccacacctgaggagatatgccaggtggccacgatttcggctaatggggatcagtcggttggtaatttaattgccgatgccatgaagaaggtgggcaaagaaggcgtgattacggtcaaagatgggaaaactctgcacgatgagcttgaagttattgaagggttcaagtttgaccgcggatacatttccccatactttgtcaatacctcaaaaggtgcaaaagtggaataccaggatgctctaatcctcctcagcgaaaagaaaatctcatcggttcaaagcattgtccccgccttggagctggcaaacatgcaaaagaaacccttaattatcgttgctgaagacatagacggcgaagctttgaccacactagtcgtcaacagactgcgtattggtcttcaagtggcggctgtaaaagccccaggttttggcgacaaccgcaaagccaccctccaagatatggccatcgccactggaggtatcgtttttggagacgaagccaatattgtcaaacttgaagacgtccaactgtccgatctcggccaagttggcgaaattgtcatcactaaggatgatacacttatcttgaaagggaaaggcaaaaaagacgatatctctaaacgcgctgagcaaattaaagatcagattgaaaacaccacttctgaatacgagaaggagaaacttcaggaacgtttggcgagattggcttcaggagtggctttgttgaaagtgggaggcagtagcgaggttgaagttaacgagaaaaaagacagagtgactgatgctttgaatgcgactagagcagctgttgaggaaggaattgttcctggaggtggtactgccttgcttaggtgctccggcagtttggatgggctcaagccgggaaacaatgaccaagctattggaatcgaaattgtgaagagagctttgaaagtaccttgcatgaccatcgccaagaacgctggcgtagatggcgcgactgttgttgccaaaatcgagcaacaacaaggtgactacggttacgatgctcttaacaacgaatatgtcaatatgtttgaaagaggaatcattgatcctacgaaggttgtgcgcacagcccttattgacgcgtctggtgtagcgtcacttttgaccaccgccgaggcagtaatcaccgaaataccaaaggaagaaccgccaattccaagcggtggaatgggtggtatgggaggtatgggtggaatgggcggaatgatgtaa

SEQ ID NO: 9153 - protein, 574 aa, Tribolium castaneum
MYRLPSTMRSVALSKANRLSQIQRWYAKDVRFGPEVRALMLQGVDVLADAVAVTMGPKGRNVIIEQSWGSPKITKDGVTVAKGVELKDKFQNIGARLVQDVANNTNEEAGDGTTTATVLARSIAKEGFENLGKGANPVEIRKGIMLAVEKITETLKTLSKPVTTPEEICQVATISANGDQSVGNLIADAMKKVGKEGVITVKDGKTLHDELEVIEGFKFDRGYISPYFVNTSKGAKVEYQDALILLSEKKISSVQSIVPALELANMQKKPLIIVAEDIDGEALTTLVVNRLRIGLQVAAVKAPGFGDNRKATLQDMAIATGGIVFGDEANIVKLEDVQLSDLGQVGEIVITKDDTLILKGKGKKDDISKRAEQIKDQIENTTSEYEKEKLQERLARLASGVALLKVGGSSEVEVNEKKDRVTDALNATRAAVEEGIVPGGGTALLRCSGSLDGLKPGNNDQAIGIEIVKRALKVPCMTIAKNAGVDGATVVAKIEQQQGDYGYDALNNEYVNMFERGIIDPTKVVRTALIDASGVASLLTTAEAVITEIPKEEPPIPSGGMGGMGGMGGMGGMM

SEQ ID NO: 9154 - DNA, 1635 bp, Prochlorococcus marinus str. MIT 9515
  CDS (1)..(1635): transl_table=11
atggctaaaagaattatttacaacgagcaagctcgtagagcgctcgagagaggcattgatatccttgctgagtctgtggctgtaacgcttgggcctaagggaagaaatgttgtcctagaaaaaaaatttggagctcctcaaattattaatgatggggtaacaattgcaaaggaaatcgaattagaggaccatattgaaaatactggtgttgctctaattagacaagctgcttcaaagacaaatgatgcggctggtgacggtactacaactgctactgttcttgcacatgcaatggtaaaagctggcctacgaaatgtagcagctggagctaatgccattaccttaaaaaaaggtattgataaagctactgaattccttgtagggaagatagaagaaaattcaaaaccaattagtgatagtactgcaatagctcaatgcggaactattgctgccggcaatgatgaagaagttggtgaaatgattgccaatgcaatggacaaggtaggtaaagaaggtgtcatctcacttgaagaaggcaaatcaatgactactgagttagaggtcactgagggaatgcgttttgataaaggttacatttctccctactttgcaacagatactgagcgaatggaggcagtcttagatgagccttacattttactaactgataagaagattgcgttagtgcaagatttagtgccagtcttagagcaaatagccaaaacaggaaagcctcttgtcattattgctgaagatattgaaaaagaagctctagctactctagttgttaatagattaagaggtgtgctgaatgttgctgctgttaaggctcccggatttggcgatagaaggaaagcaatgcttgaagatatggctgttttgactaatggtcagttaataactgaagatgcaggtttgaaattagaaaatgctactttagaaatgttaggcactggtagaagaattaccatcaataaagagactacaactatagtcgctgagggtaatgaaaaggcagtcaattcaagatgtgatcagattaaaaaacaaatggaggaaacagattcttcctacgacaaagaaaaacttcaagaacgtttagctaagctggctggaggagttgcagttattaaagttggagctgctactgaaactgaaatgaaggataaaaaacttcgtttagaagatgctatcaatgctacaaaagctgctgttgaagaagggatagttccaggtggtggaacaactcttgcacatttagctccaattcttaaagaatgggctgatgcaactttatctggcgaggaattaataggagccaatatagttgaggcatcattaactgctcctcttatgagaattgctgagaatgctggttcaaatggagctgtaattgctgaaaatgttaaatccaaaccatttaatgatggatttaatgcagctactggagaatatgtagacatgtcttcagcaggaatagttgatcctgcaaaagtcacacgttctggactacagaatgccgcatcaatagcaggaatggtacttactactgaatgcattgttgcagatatgcctgagaaaaaagaatcagcacctgctggagctccaggaatgggtggagattttgactactag

SEQ ID NO: 9155 - protein, 544 aa, Prochlorococcus marinus str. MIT 9515
MAKRIIYNEQARRALERGIDILAESVAVTLGPKGRNVVLEKKFGAPQIINDGVTIAKEIELEDHIENTGVALIRQAASKTNDAAGDGTTTATVLAHAMVKAGLRNVAAGANAITLKKGIDKATEFLVGKIEENSKPISDSTAIAQCGTIAAGNDEEVGEMIANAMDKVGKEGVISLEEGKSMTTELEVTEGMRFDKGYISPYFATDTERMEAVLDEPYILLTDKKIALVQDLVPVLEQIAKTGKPLVIIAEDIEKEALATLVVNRLRGVLNVAAVKAPGFGDRRKAMLEDMAVLTNGQLITEDAGLKLENATLEMLGTGRRITINKETTTIVAEGNEKAVNSRCDQIKKQMEETDSSYDKEKLQERLAKLAGGVAVIKVGAATETEMKDKKLRLEDAINATKAAVEEGIVPGGGTTLAHLAPILKEWADATLSGEELIGANIVEASLTAPLMRIAENAGSNGAVIAENVKSKPFNDGFNAATGEYVDMSSAGIVDPAKVTRSGLQNAASIAGMVLTTECIVADMPEKKESAPAGAPGMGGDFDY

SEQ ID NO: 9156 - DNA, 1632 bp, Prochlorococcus marinus str. NATL1A
  CDS (1)..(1632): transl_table=11
atggctaagcgcatcatttacaacgagcaagcccgccgagcactcgagcgtggtattgacattttggctgaatcagtcgcagtcactttagggccgaaaggtcgtaatgttgttctcgagaaaaagttcggtgcacctcaaataatcaatgatggtgtaaccattgctaaggagatcgaactcgaagatcacattgaaaacactggagttgctctaattcgtcaagccgcatcaaaaacaaatgatgcagctggagatggcacgaccactgcaactgttcttgctcatgcaatggtcaaagccggtttgaaaaatgttgcagcaggagcaaatgcaatcactttgaaaaaaggaattgataaggcaactgactttttggttgaaaaaataaaagatcattccaagccaattagtgacagtaatgcaattgctcaatgtggcacgattgctgctggtaatgatgaagaagttggcaaaatgattgctgatgctatggataaagttggaaaagaaggtgttatctctttagaagaaggcaagtcaatgaccactgagctagaggttactgaaggaatgcgttttgataaaggatatatttctccttatttcgcaactgatactgagagaatggaagcagtattggacgagccttatatacttcttactgacaagaaaattggtctagttcaagatcttgttcctgtcttagaacaagttgctaaaactggtaaacctcttctaataattgctgaagatatagaaaaagaagctttggcgacattagttgtcaatcgcttaagaggtgttcttaacgttgccgcagttaaggctcctggttttggtgatcgtagaaaggcgatgcttgaagatatggctgttttaactaatggccaactcattactgaggatgcaggcttaaaacttgagaatgcaactcttgatatgcttggaacttcaaggagagtgaccattaataaggacacatcaacaattgttgctgaaggcaatgaagtcgctgtaaatgcaagatgtgaacaaatcaagaagcagatggatgagaccgactcaacctatgacaaagaaaaacttcaggaaagattagctaagctatctggtggcgtagctgtagtgaaagtgggagctgcgactgagactgagatgaaagataagaagcttcgattagaggatgcaattaacgcaactaaagctgcagttgaagaaggcattgttcctggtggtggaactactctcgctcatttagctcctgcattggaagattggtcctccaccaatctttctggtgaggaattaatcggtgcaaatatcgttgaagctgctcttacttctccactaatgcgcatagctgaaaatgctggtgctaatggagcagttgttgcagagaatgttaaatctaagccagttaatgatggctataacgctgcaactggtgaatatgtagatatgctttctgctggaatcgttgatcctgcgaaggtaacaagatcagggttgcaaaatgctgcatcaatagcaggaatggttcttacaactgaatgcatagttgctgatctaccagagaagaaagactcttctccagcaggtggtggaatgggtggtgattttgattattaa

SEQ ID NO: 9157 - protein, 543 aa, Prochlorococcus marinus str. NATL1A
MAKRIIYNEQARRALERGIDILAESVAVTLGPKGRNVVLEKKFGAPQIINDGVTIAKEIELEDHIENTGVALIRQAASKTNDAAGDGTTTATVLAHAMVKAGLKNVAAGANAITLKKGIDKATDFLVEKIKDHSKPISDSNAIAQCGTIAAGNDEEVGKMIADAMDKVGKEGVISLEEGKSMTTELEVTEGMRFDKGYISPYFATDTERMEAVLDEPYILLTDKKIGLVQDLVPVLEQVAKTGKPLLIIAEDIEKEALATLVVNRLRGVLNVAAVKAPGFGDRRKAMLEDMAVLTNGQLITEDAGLKLENATLDMLGTSRRVTINKDTSTIVAEGNEVAVNARCEQIKKQMDETDSTYDKEKLQERLAKLSGGVAVVKVGAATETEMKDKKLRLEDAINATKAAVEEGIVPGGGTTLAHLAPALEDWSSTNLSGEELIGANIVEAALTSPLMRIAENAGANGAVVAENVKSKPVNDGYNAATGEYVDMLSAGIVDPAKVTRSGLQNAASIAGMVLTTECIVADLPEKKDSSPAGGGMGGDFDY

SEQ ID NO: 9158 - DNA, 1629 bp, Desulfotomaculum reducens MI-1
  CDS (1)..(1629): transl_table=11
ttggctaaagaaattattttccgtgaagatgctcgcagagctctggaaagaggcgttaatgccctggccgaagctgttaaggtaacccttggacccaagggacgtaatgtagttattgagaagaagtttggtgctccaaccattaccaacgatggtgtaaccatcgcccgtgaaattgagcttgaagataacttcgaaaatatgggtgcccaattggttaaagaagtggccaccaaaaccaacgatgttgctggtgacggtaccaccactgccactgttttagcccaagctttggtacgtgaaggtctgaaaaacgtagctgctggtgccaaccctatgattatcaaacgtggtattgaaaaggctgtagaaaaggctgttgaagaaattaaagcaatggctaagcctattgagagtaaagaagcgattgctcaggttgctaccgtttctgctaacgacgattctattggtaacctgattgccgaagctatggaaaaagtaggtaaagacggtgtcatcaccgttgaagagtcccaaggtattggcaccaatttagaagtggttgaaggtatgaacttcgaccgtggctacatctccccgtacatgatcactgatactgataagatggaagctgcattgactgatccttacatcttaatcaccgataaaaaggtttcctcggtacaagaacttctgcctgttttggaaaaggttgtacaaacaggtaacaagcctgtactgttgatttgtgaagatctggaaggtgaagcgctggctactctggtactgaacaaacttcgtggtaccttgaatgtagttgccgttaaggctcctggttttggggaccgccgtaaggccatgctggaagatattgctattcttaccggtggtaccgtaattactgaagaagtaggtctgaagctggataaagctgagctagacatgttgggtactgcccgtcagattcgcgttaagaaagaagaaaccatcattgttggtggtgctggagagcaagcccaaattgaaggacgtattgctcaaatcaagaagcaaattgaagaaaccacttctgactttgaccgtgaaaaactgcaagaacgcctggctaaactggctggcggtgtagctgtaattcaagttggtgctgccaccgaagttgaaatgaaagagaaaaagctgcgcattgacgatgctctaaacgctacccgtgcagctgtcgaagaaggtattgttcccggtggtggttccgcctttgtgaacatcattaccaccttagatagcgttcagctggaaggggatgctaaaactggcgttgatatcgttaagcgcgctctggaagagcccctgcgtcaaattgccaacaacgctggactggaaggctctgtggtggtagaaaaggttcgcaccactggcaaaggtttcaatgccatgtctgaagaatatgttgatatgattgctgctggtattatcgaccctgctaaagttacacgttccgctttacaaaacgctgcttccattgcagctatggttctgaccaccgagaccttagtggccgacaagccagaaaaagatgctccgaaccccatggccggcatgggcggtatgggtggcatgggcggcatgatgtaa

SEQ ID NO: 9159 - protein, 542 aa, Desulfotomaculum reducens MI-1
MAKEIIFREDARRALERGVNALAEAVKVTLGPKGRNVVIEKKFGAPTITNDGVTIAREIELEDNFENMGAQLVKEVATKTNDVAGDGTTTATVLAQALVREGLKNVAAGANPMIIKRGIEKAVEKAVEEIKAMAKPIESKEAIAQVATVSANDDSIGNLIAEAMEKVGKDGVITVEESQGIGTNLEVVEGMNFDRGYISPYMITDTDKMEAALTDPYILITDKKVSSVQELLPVLEKVVQTGNKPVLLICEDLEGEALATLVLNKLRGTLNVVAVKAPGFGDRRKAMLEDIAILTGGTVITEEVGLKLDKAELDMLGTARQIRVKKEETIIVGGAGEQAQIEGRIAQIKKQIEETTSDFDREKLQERLAKLAGGVAVIQVGAATEVEMKEKKLRIDDALNATRAAVEEGIVPGGGSAFVNIITTLDSVQLEGDAKTGVDIVKRALEEPLRQIANNAGLEGSVVVEKVRTTGKGFNAMSEEYVDMIAAGIIDPAKVTRSALQNAASIAAMVLTTETLVADKPEKDAPNPMAGMGGMGGMGGMM

SEQ ID NO: 9160 - DNA, 1623 bp, Geobacillus thermodenitrificans NG80-2
  CDS (1)..(1623): transl_table=11
atggcaaaagaaattaagttcagcgaagaagcgcgccgtgcgatgttgcgcggggtggacaaactcgcagacgcagtaaaagtcacattaggtccgaaaggccgcaacgtcgtattggagaaaaaattcggttctccgctcatcacgaacgacggggtaacgattgcgaaagaaatcgagcttgaagacccgtttgaaaacatgggtgcgaaattggtcgctgaagtcgctagcaaaacaaacgacatcgctggggacggaacgacaacggctactgtattagcgcaagcaatgatccgtgaagggttgaaaaacgttgctgctggcgccaatccgatgggcatccgtcgcgggattgaaaaagcagtggctgttgctgtagaagaattaaaagctatctcgaaaccgatcaaaggaaaagagtcgatcgcccaagttgctgcgatctcggctgctgacgaagaagtcggtcaattgatcgctgaagcgatggagcgcgtcggcaacgacggcgtcatcaccctcgaagagtcgaaaggtttcacgacagaactcgacgttgtcgaaggaatgcaattcgaccgcggttacgtttcgccgtacatgattacggatacggaaaaaatggaagctgttcttgaaaatccgtacatcttaattacggataaaaaagtatcgaacattcaagagctgttgccggttcttgaacaagtcgttcaacaaggccgtccgctcttgatcattgctgaggacgtcgaaggtgaagcgctcgcgaccctcgttgttaacaaactgcgcggtacgttcaacgctgttgctgtaaaagcacctggcttcggtgaccgtcgcaaagcgatgctcgaagatatcgcgattttaactggcggcgaagtcatctctgaagagcttggtcgtgaactgaaatcgacaacggttgcatcgcttggccgtgcgtcgaaagttgttgtcacgaaagaaacgacgacaatcgtcgaaggtgctggcgattctgagcgcattaaagcacgcattaaccaaattcgtgcgcaacttgaagaaactacttcggaattcgaccgcgaaaaactgcaagaacgcttggcaaaattggctggcggcgtagcagtgatcaaagttggtgcggcgacagaaactgagttgaaagaacgcaaactgcgcatcgaagacgcgcttaactcgactcgtgctgctgtagaagaaggtatcgttgctggtggcggtacggcattgatgaacgtctacagcaaagtggctgcgattgaagctgaaggcgatgaagcaacgggtgtgaaaatcgttctgcgcgccatcgaagagccggttcgtcaaatcgcgcaaaatgctggtttggaaggctcgatcatcgttgagcgcctgaaaaacgaaaaagcaggcatcggcttcaatgctgcaacaggtgaatgggtagacatgatcgaagagggtatcgttgacccaacgaaagtaactcgttcggcattgcaaaacgctgcgtctgtcgctgctatggtcttgacgacagaagcggtcgttgccgacaagccagaagaaaacaaaggtggcgccaacccgggtatgccggacatgggcggcatgatgtaa

SEQ ID NO: 9161 - protein, 540 aa, Geobacillus thermodenitrificans NG80-2
MAKEIKFSEEARRAMLRGVDKLADAVKVTLGPKGRNVVLEKKFGSPLITNDGVTIAKEIELEDPFENMGAKLVAEVASKTNDIAGDGTTTATVLAQAMIREGLKNVAAGANPMGIRRGIEKAVAVAVEELKAISKPIKGKESIAQVAAISAADEEVGQLIAEAMERVGNDGVITLEESKGFTTELDVVEGMQFDRGYVSPYMITDTEKMEAVLENPYILITDKKVSNIQELLPVLEQVVQQGRPLLIIAEDVEGEALATLVVNKLRGTFNAVAVKAPGFGDRRKAMLEDIAILTGGEVISEELGRELKSTTVASLGRASKVVVTKETTTIVEGAGDSERIKARINQIRAQLEETTSEFDREKLQERLAKLAGGVAVIKVGAATETELKERKLRIEDALNSTRAAVEEGIVAGGGTALMNVYSKVAAIEAEGDEATGVKIVLRAIEEPVRQIAQNAGLEGSIIVERLKNEKAGIGFNAATGEWVDMIEEGIVDPTKVTRSALQNAASVAAMVLTTEAVVADKPEENKGGANPGMPDMGGMM

SEQ ID NO: 9162 - DNA, 1644 bp, Chlorobium phaeovibrioides DSM 265
  CDS (1)..(1644): transl_table=11
atgactgccaaagatattcttttcgacgccgacgccagggcaaaacttaaagttggcgtggacaaactggccaatgccgtgaaagtaaccctcggacctgccggccgcaatgtgcttatcgacaaaaaattcggtgcaccgacctcaaccaaagatggcgttaccgttgccaaagaggttgagcttgaagatgcaatcgagaacatgggtgcacagatggttcgtgaagttgcttccaaaaccagcgatgtagccggtgacggaaccaccactgcaaccgttcttgcacaggcaatctaccgtgagggcctgaagaatgttgccgcaggcgcccgcccgattgatcttaaaagaggcatcgatcgtgccgtcaaagaggttgttgccgagctccgtaccatcagccgcagcatttccggaaagaaggagattgcacaggtaggtaccatttccgccaacaacgatcctgaaatcggcgagcttattgccgaggccatggacaaagtcggcaaagacggcgtcatcaccgttgaagaagcaaagggaatggacaccgagctgaaagttgttgaaggcatgcagttcgaccgcggctacctctccccctacttcgtcaccaattcggagtcaatggaagccgagctcgacgatgcgctgattctcatttacgacaagaagatcagcaacatgaaagagcttcttccgattcttgagaaaggtgcacagtccggccgtccgctgcttatcattgcagaagacatcgagggcgaggcacttgcaacgcttgtggtcaacaagctgcgcggcactctgaaagtatgcgccgtcaaggctcctggcttcggcgaccgccgcaaggccatgcttgatgatattgccattctgaccggcggtaccgtcatttccgaggagaaaggctacaagctggagaacgccacaatcaactaccttggccaggctgcccgcgtctctctcgacaaggacaacaccaccattgttgaaggcaaaggtacccaggaagagatcaaggcccgcatcaacgagattaaaggccagatcgacaagtcgacctccgactacgacaccgagaagctgcaggagcgccttgcaaaactttcaggcggcgttgccgtcctcaatatcggtgcatccaccgaagttgagatgaaagagaagaaggcccgcgttgaagatgcgctgcatgcaacccgcgctgccgtacaggaaggcattgttgttggtggcggtgttgcactcatccgtgccatcaaaggcctggacaatgcaaagcccgacaatgacgaccagaagaccggtattgaaatcatccgccgcgctcttgaagagccgcttcgccagattgttgccaacaccggcaccaccgacggcgctgttgtgcttgagcatgtgaagaacggcgagggtgattatggcttcaacgccagaaccgagcagtacgagaaccttgttgaggccggcgttgtcgacccgaccaaggtgacccgcagcgctcttgagaatgcagcatcagttgcaagcattcttctgaccactgaagcctgcattaccgacatcaaggaaaacactcctgacatgccggcaatgcctccgggcggaatgggtggaatgggcggcatgtactga

SEQ ID NO: 9163 - protein, 547 aa, Chlorobium phaeovibrioides DSM 265
MTAKDILFDADARAKLKVGVDKLANAVKVTLGPAGRNVLIDKKFGAPTSTKDGVTVAKEVELEDAIENMGAQMVREVASKTSDVAGDGTTTATVLAQAIYREGLKNVAAGARPIDLKRGIDRAVKEVVAELRTISRSISGKKEIAQVGTISANNDPEIGELIAEAMDKVGKDGVITVEEAKGMDTELKVVEGMQFDRGYLSPYFVTNSESMEAELDDALILIYDKKISNMKELLPILEKGAQSGRPLLIIAEDIEGEALATLVVNKLRGTLKVCAVKAPGFGDRRKAMLDDIAILTGGTVISEEKGYKLENATINYLGQAARVSLDKDNTTIVEGKGTQEEIKARINEIKGQIDKSTSDYDTEKLQERLAKLSGGVAVLNIGASTEVEMKEKKARVEDALHATRAAVQEGIVVGGGVALIRAIKGLDNAKPDNDDQKTGIEIIRRALEEPLRQIVANTGTTDGAVVLEHVKNGEGDYGFNARTEQYENLVEAGVVDPTKVTRSALENAASVASILLTTEACITDIKENTPDMPAMPPGGMGGMGGMY

SEQ ID NO: 9164 - DNA, 1638 bp, Shewanella putrefaciens CN-32
  CDS (1)..(1638): transl_table=11
atggcagctaaagaagttgtatttggtaatgacgctcgcgtaaaaatgttggctggcgtaaacattctcgcgaacgcagtgaaagtgaccttaggccctaaaggccgtaacgtggtattagacaagagcttcggctcaccactgatcactaaagacggtgtttctgttgccaaagaaatcgaattagaagacaaattcgaaaacatgggcgcgcaaatggtgaaagaagttgcttctaaagccaacgacgccgccggtgacggtactactactgcaactgtactggctcaagccattgtgactgaaggcttaaaagccgttgcagccggtatgaacccaatggacctgaagcgcggaatcgacaaagccgttatcgctgccgttgctgaattaaaagccttatcacaaccttgtgcagattcaaaagcgattgcacaagttgcgactatctctgcaaactctgacgaatctatcggtgaaatcatcgctactgcgatggaaaaagtcggtaaagaaggcgtgatcacagtcgaagaaggccaagcgctggaaaacgaactggacgtagtagaaggtatgcagtttgaccgtggttacctatctccatactttatcaacaagccagaaacaggcagcgttgaattagatcacccattcgtcctgttagtagacaagaaaatctctaacattcgcgaactgttacctatccttgaaggtctggcaaaaacaggtaagccattgcttatcgttgctgaagacgttgaaggcgaagcattagcaactttagttgtgaacaacatgcgcggtatcgtgaaagtggctgccgttaaagccccaggctttggcgatcgtcgtaaggcaatgctgcaagacgtagcaatcctgactggcggtactgttattgctgaagaaatcggcctagagcttgaaaaagcaaccctagaagatttaggtacagctaagcgtgttgtgatcactaaagacaacaccaccatcatcgatggtaatggcgagcaagcgcaaatcgaagcgcgtgtaagccaaatcaagcaacaaatcgaagaatcaacctcagactacgacaaagaaaaactgcaagagcgtatggctaaattagctggcggcgtagcagttatcaaagttggcgcagcgactgaagttgaaatgaaagagaaaaaagcacgcgttgaagatgcgctgcatgccactcgcgctgcggtagaagaaggcgtggttcctggcggtggtgttgctctggttcgcgtagcgtctaagatcgctgaacttgaagtattaaacgaagaccaaaaacacggtgtggttattgcactgcgtgcaatggaagcgccactgcgtcaaatcgccactaacgcgggtgaagaagcgtcagttgttgctaacacagtgaagaacggcagcggtaacttcggttataacgccggtaacgacacttacggtgacatgttagaaatgggtatccttgacccaactaaagtgactcgttgtgcgttgcaattcgcagcatcaattgctggcctgatgatcaccacagaagctatggttgctgagatcccacaaaattctgcgccagatatgggcggaatgggtggtatgggcggaatgggcggcatgatgtga

SEQ ID NO: 9165 - protein, 545 aa, Shewanella putrefaciens CN-32
MAAKEVVFGNDARVKMLAGVNILANAVKVTLGPKGRNVVLDKSFGSPLITKDGVSVAKEIELEDKFENMGAQMVKEVASKANDAAGDGTTTATVLAQAIVTEGLKAVAAGMNPMDLKRGIDKAVIAAVAELKALSQPCADSKAIAQVATISANSDESIGEIIATAMEKVGKEGVITVEEGQALENELDVVEGMQFDRGYLSPYFINKPETGSVELDHPFVLLVDKKISNIRELLPILEGLAKTGKPLLIVAEDVEGEALATLVVNNMRGIVKVAAVKAPGFGDRRKAMLQDVAILTGGTVIAEEIGLELEKATLEDLGTAKRVVITKDNTTIIDGNGEQAQIEARVSQIKQQIEESTSDYDKEKLQERMAKLAGGVAVIKVGAATEVEMKEKKARVEDALHATRAAVEEGVVPGGGVALVRVASKIAELEVLNEDQKHGVVIALRAMEAPLRQIATNAGEEASVVANTVKNGSGNFGYNAGNDTYGDMLEMGILDPTKVTRCALQFAASIAGLMITTEAMVAEIPQNSAPDMGGMGGMGGMGGMM

SEQ ID NO: 9166 - DNA, 1644 bp, Dichelobacter nodosus VCS1703A
  CDS (1)..(1644): transl_table=11
atgtcagcaaaagaagttcgttttggagaagatgcccgcaacaaaatgttgaaaggggtcaatattcttgccgatgcggtgaaagttactttaggacctaaaggtcgcaacgttattttagataaatcttttggcacaccaacagttactaaagacggcgtttctgttgccaaagaaattgaattagccgataaatttgaaaatatgggcgcacaattagttaaagaagttgcttcacaaactaatgacgccgccggtgatggtacaacaaccgccactgttttagcgcaagcaattgttgttgaaggattaaaagccgttgctgccggcatgaatccgatggatttaaaacgcggaattgataaagccgttgccgaagccgttaaaacattacacgctatttctaaaccttgcagcgatagcaaagccatcgcacaagttggcaccatttctgccaattccgatgaaaccgttggtgcaaaaattgccgaagcgatggaaaaagtcggcaaagaaggcgtgattaccgttgaagaaggtcaaggtttggaagactctttggaagtggttgaaggtatgcaatttgaccgcggttatttgtcaccatacttcattaataatcaacaaagtcaacaagttgaattagaaaatccctacattttattgcacgacaaaaaaattgcgaatattcgcgacatgttgccgttattagaaggcgtagcaaaatctggtcaaccattattgatcgttgctgaagacgtagaaggcgaagcattagccactttagtaatcaacagcatgcgcggaatcgtgaaagttgcggcggtgaaagcaccaggatttggcgatcgtcggaaagccatgttagaagatattgcgattttaaccggcggtaccgtcatttctgaagaagtcggtttgactttagaaagcgttacattagatcaattgggtacggcaaaacgcgtgaccgtcggcaaagataacaccacaattatcgacggcagcggcgaaaaatcagccatcgaagcgcgcgtagcattaattcgtcatcaaattgaagaatccagttctgattacgacaaagaaaaattgcaagaacgggtggcaaaattagccggcggtgttgccgttattaaagtgggcgcggcaactgaagtagaaatgaaagaaaagaaagaccgcgtggaagatgctttgcatgcaacccgtgctgcagttgaagaaggtattgttcccggcggcggcgtggctttaattcgcgctatcaactctattgttgatttgaaaggcgataactacgatcaacaagttggtattgatattgcgcgccgtgcgatggaatatcctttgcgtactatcgtttccaacgctggcagtgaagccgcagttgttttagaacgcgtcaaatcaggtaaaggtaacgacggttacgatgccgcaaccggtcaatacgttgatatggttgcagctggtatcatcgatccaaccaaagttacccgcagcgctttgcaaaacgccgcttctgttgctggtttaatgattaccacagaagcaatggtttctgaaattccgcaaaaagaagaaggacaccatcacgatatgggcggcatgggtggaatgggcggcatgggaatgatgtaa

SEQ ID NO: 9167 - protein, 547 aa, Dichelobacter nodosus VCS1703A
MSAKEVRFGEDARNKMLKGVNILADAVKVTLGPKGRNVILDKSFGTPTVTKDGVSVAKEIELADKFENMGAQLVKEVASQTNDAAGDGTTTATVLAQAIVVEGLKAVAAGMNPMDLKRGIDKAVAEAVKTLHAISKPCSDSKAIAQVGTISANSDETVGAKIAEAMEKVGKEGVITVEEGQGLEDSLEVVEGMQFDRGYLSPYFINNQQSQQVELENPYILLHDKKIANIRDMLPLLEGVAKSGQPLLIVAEDVEGEALATLVINSMRGIVKVAAVKAPGFGDRRKAMLEDIAILTGGTVISEEVGLTLESVTLDQLGTAKRVTVGKDNTTIIDGSGEKSAIEARVALIRHQIEESSSDYDKEKLQERVAKLAGGVAVIKVGAATEVEMKEKKDRVEDALHATRAAVEEGIVPGGGVALIRAINSIVDLKGDNYDQQVGIDIARRAMEYPLRTIVSNAGSEAAVVLERVKSGKGNDGYDAATGQYVDMVAAGIIDPTKVTRSALQNAASVAGLMITTEAMVSEIPQKEEGHHHDMGGMGGMGGMGMM

SEQ ID NO: 9168 - DNA, 1635 bp, Pelotomaculum thermopropionicum SI
  CDS (1)..(1635): transl_table=11
ttggcaggtaaagaaataattttccgggaggacgccaggcggtctcttgaaaaaggtgttaatgccctggcggaagccgtaaaaattacccttggccccaaaggccggaacgtagtcctggagaaaaaattcggctcgccgatgattgtgaacgacggtgtgaccattgccagggaaatcgagctttccgatccctttgaaaatatgggagcccaactggtgaaggaggttgccaccaagaccaacgacgtggccggagatggtaccaccacagcctgcgtgctggcccaggccattgtgcgcgagggtctgaagaacgtggccgccggagccaacccgatgatcatcaagcgcggcatcgaaaaagccgtggacaaagcagttgaggctattaagaactcggccaagacgattgagagcaagtcagccattgcccaggttgctaccatctccgcaaacgatgaaatgatcggcaacctgattgccgatgccatggagaaggtgggcaaggacggcgttataaccgttgaagagtccaagggcaccacaaccaacctggaaattgtggaaggtatgaacttcgaccggggttacatctccccgtacatgattaccgatgccgacaagatggaagccactctgaacgacccctacatactgattacggacaagaagatctcggctgtgggggatctgctgccgctgctggagaaagtcgtgcagtccggcaaaccgctcttggtcatagctgaagatgtggaaggcgaggccctggccacgctggtgctcaacaagctgcgcggcaccttccagtgcgtggcggtcaaggcgccaggctttggcgacaggcgtaaggccatgctgcaggacatcgccatcctgaccggcggaacagttattactgaggaagtgggcttaaagctggataaggccactatcgatcagctcggccgggcgaacaaggtccgggtcaagaaagaagagaccatcattgtcggcggtgccggcagcaccgatgagattaccaagcgggttgcccagattaagaagcagatcgaagaaaccacttcagagtttgacaaggaaaagctgcaggagcggctggccaaactggccggcggcgtggcggtaatccaggttggagcggccaccgaaaccgaaatgaaagacaagaagctccgcattgaagacgcccttaacgccacccgtgcggctgttgaagaaggcatcgttccgggcggcggcgtagcctatatcagcgccctgaagggcctggacggcctggatgccggcagcctggacgagaaaaccggtattgacatcgtgcgccgggcgctggaggagccgctgcgccagattgccagcaacgccgggctggaaggctcggtcatagtggagaaggtgaagaatgccgatcccggcatcggcttcaacgccctgaccggcgagtttgtcaacatgatcgacgccggcatagtcgacccggccaaagtgacccgcaccgccctccagaacgccgccagcattgcggccatgatcctgaccaccgaaactctggtggcggagaagcccgaaaaagaaaaggacaccatgggcggcatgggcggcatgggcggcatgggcggcatgatgtaa

SEQ ID NO: 9169 - protein, 544 aa, Pelotomaculum thermopropionicum SI
MAGKEIIFREDARRSLEKGVNALAEAVKITLGPKGRNVVLEKKFGSPMIVNDGVTIAREIELSDPFENMGAQLVKEVATKTNDVAGDGTTTACVLAQAIVREGLKNVAAGANPMIIKRGIEKAVDKAVEAIKNSAKTIESKSAIAQVATISANDEMIGNLIADAMEKVGKDGVITVEESKGTTTNLEIVEGMNFDRGYISPYMITDADKMEATLNDPYILITDKKISAVGDLLPLLEKVVQSGKPLLVIAEDVEGEALATLVLNKLRGTFQCVAVKAPGFGDRRKAMLQDIAILTGGTVITEEVGLKLDKATIDQLGRANKVRVKKEETIIVGGAGSTDEITKRVAQIKKQIEETTSEFDKEKLQERLAKLAGGVAVIQVGAATETEMKDKKLRIEDALNATRAAVEEGIVPGGGVAYISALKGLDGLDAGSLDEKTGIDIVRRALEEPLRQIASNAGLEGSVIVEKVKNADPGIGFNALTGEFVNMIDAGIVDPAKVTRTALQNAASIAAMILTTETLVAEKPEKEKDTMGGMGGMGGMGGMM

SEQ ID NO: 9170 - DNA, 1662 bp, Synechococcus sp. WH 7803
  CDS (1)..(1662): transl_table=11
atggccaaacttctcaagttttcggatgaatctcgcgctgcactggagcgaggcatgaatgctctcgccgatgcggtgcgcgtcacgatcggcccccgtggacgcaacgtggtgttggagaaaagcttcggcgctcccgatatcgtcaacgacggcgacacgatcgccaaggagattgacctcgaggatccctttgaaaacatcggcgccaaactgattcagcaggtggcgtcgaagacgaaggacaaagccggtgatggcaccacgaccgcaaccgtgctggctcaggccatggtcgaggaaggtctgcgcaacaccgcagccggtgccagcccgatcgaactccgtcgcggcatggagaaagcggtcgccttgatcgtgaaagggctcggcgagcgcagccagtcggtgagcggagatgccatccgtcaggtggccaccgtcagtgccggtggtgacgacgaagtcggtcgcatggtggctgaagccatggacaaggtcaccgtggatggcgtgatcaccgttgaggaatcaaaatctctggccactgagctggaagtgacggaaggaatggccttcgatcggggctacagctctccctacttcgtcaccgatggtgatcgccagatctgtgagtttgaaaatgccctgctgttgctcaccgatcgcaagatcagtgctgtagccgacctcgtcccggttctcgagacggttcaaaagacaggctctcccctggtgattctggccgaggaagtcgacggggaggccctggcaacgctggtggtgaacaaaaaccgcggcgtgcttcaggtggccgctgtgcgcgcaccgtccttcggcgagcgacgcaaagcagccctcgcggacattgccatcctcaccggtggaaccgtgatcagcgaagaccgagcgatgacgctcgacaaggtgacgctggaggatctcggacgcgcccgccgcatcaccatcagcaaggaagaaaccaccatcgtcgccagcgaagacagccgtgatgctgtggctgagcgtgtggcctccatccgcagggaactggagaacagcgattccgagtacgaccgcgagaagctcaatgagcggatcgccaaactcgccggcggcgtggccgtgatcaaggttggcgctcccacggaaaccgaactgaagaaccgcaaactgcgcattgaagatgctctcaacgccaccagagctgccgtcgaggaaggcatcgtggccggcggtggcagcacattgattcaactggctggatccttggacggtctggccaaccaactgcacggcgatcagcgcaccggagtggagattgtgcatcgcgcgctgagtgcacctctgcgccagatcgcgatcaatgcaggggccaacggcgatgtggtggttgagcaggtgcagcgcagcggccagggcttcaacgcactcacgggtggctatgaaaaccttctggaagcgggcatcctcgatgccgccaaggtcgtgagactgggtctgcaggatgcagtctccatcgcgtcactgctgattaccactgaagtggtggtcgccgacaagcctgaacctcccgcagcccctgcgcccggcggcgatcccatgggcggcatgggtggaatgggcggaatgggcggaatgggcatgcccggcatgatgtga

SEQ ID NO: 9171 - protein, 553 aa, Synechococcus sp. WH 7803
MAKLLKFSDESRAALERGMNALADAVRVTIGPRGRNVVLEKSFGAPDIVNDGDTIAKEIDLEDPFENIGAKLIQQVASKTKDKAGDGTTTATVLAQAMVEEGLRNTAAGASPIELRRGMEKAVALIVKGLGERSQSVSGDAIRQVATVSAGGDDEVGRMVAEAMDKVTVDGVITVEESKSLATELEVTEGMAFDRGYSSPYFVTDGDRQICEFENALLLLTDRKISAVADLVPVLETVQKTGSPLVILAEEVDGEALATLVVNKNRGVLQVAAVRAPSFGERRKAALADIAILTGGTVISEDRAMTLDKVTLEDLGRARRITISKEETTIVASEDSRDAVAERVASIRRELENSDSEYDREKLNERIAKLAGGVAVIKVGAPTETELKNRKLRIEDALNATRAAVEEGIVAGGGSTLIQLAGSLDGLANQLHGDQRTGVEIVHRALSAPLRQIAINAGANGDVVVEQVQRSGQGFNALTGGYENLLEAGILDAAKVVRLGLQDAVSIASLLITTEVVVADKPEPPAAPAPGGDPMGGMGGMGGMGGMGMPGMM

SEQ ID NO: 9172 - DNA, 1635 bp, Synechococcus sp. WH 7803
  CDS (1)..(1635): transl_table=11
atggctaagcgcatcatttacaacgagaacgcccgccgcgctcttgagaaaggcatcgacatccttgcggaatccgttgccgtcaccctcggccccaagggtcgcaacgtggtgctggaaaagaagttcggcgccccgcagatcatcaatgacggtgtcaccatcgccaaagagatcgagctcgaggatcacattgagaacacgggtgttgccctgattcgtcaggctgcttccaaaaccaacgatgccgccggtgacggcaccacgaccgccactgttctggcccacgccatggtgaaggcgggtctgcgcaacgtggctgctggcgccaatgccatcaccctcaagaagggcatcgacaaggcttctgatttccttgttgctgaaatcaaggacaaggccaacccgatcagcgacagcaacgccatcgctcaggtgggaaccatctccgccggcaacgacgaggaagtgggtcggatgatcgccgacgccatggacaaggtcggcaaggaaggcgtgatctccctggaagagggcaagtcgatgaccaccgaactggaggtcaccgaaggcatgcgtttcgacaagggctacatctccccttacttcgccaccgacaccgagcggatggaagcggtgctggatgagccctacatcctgctcaccgacaagaaaatcggcctggtgcaggatctcgttcctgtgctggagcagattgcccgcaccggcaagcctctgctgatcattgctgaggacatcgagaaagaagctctggcaaccctggtggtgaaccgtctgcgcggtgtgctgaacgtggcggccgtgaaggcccctggcttcggcgatcgccgtaaggccatgctcgaagacatggctgtgctgaccaacggtcagctgatcactgaggacgccggcctcaagctcgaaaacgccaagatcgaaatgctgggcactgcccgccgcgtgacgatcaacaaggacaccaccacgatcgttgccgagggcaatgaggtggctgtgcaggcgcgctgcgagcagatcaagaagcagatggacgaaaccgagtccacctatgacaaagagaaactgcaggagcgtctggccaagctggccggcggtgtcgctgtggtgaaggtgggtgcagccaccgaaaccgagatgaaggacaagaagcttcgtctcgaggacgccatcaatgccaccaaggctgcggttgaggagggcatcgtccccggtggcggcaccaccctggctcatctggcccccgcccttgagcagtgggctgcctccacgctcagcggtgaggaactgatcggtgccaacatcgtggccgcggctctgaccgctcctctgatgcgcatcgcagagaacgccggagtcaacggtgctgttgtggccgagaacgtgaaggccaagtccttcaacgagggctacaacgctgccaatggcgactatgtcgacatgctcgctgccggcatcgtcgatcccgccaaggtgacccgttccggtctgcagaacgcggcatccattgccggcatggtgctcaccaccgagtgcatcgtggcggatcttcctgagaagaaggaagcagcaccggccggtggcggcatgggaggcggcgacttcgactactga

SEQ ID NO: 9173 - protein, 544 aa, Synechococcus sp. WH 7803
MAKRIIYNENARRALEKGIDILAESVAVTLGPKGRNVVLEKKFGAPQIINDGVTIAKEIELEDHIENTGVALIRQAASKTNDAAGDGTTTATVLAHAMVKAGLRNVAAGANAITLKKGIDKASDFLVAEIKDKANPISDSNAIAQVGTISAGNDEEVGRMIADAMDKVGKEGVISLEEGKSMTTELEVTEGMRFDKGYISPYFATDTERMEAVLDEPYILLTDKKIGLVQDLVPVLEQIARTGKPLLIIAEDIEKEALATLVVNRLRGVLNVAAVKAPGFGDRRKAMLEDMAVLTNGQLITEDAGLKLENAKIEMLGTARRVTINKDTTTIVAEGNEVAVQARCEQIKKQMDETESTYDKEKLQERLAKLAGGVAVVKVGAATETEMKDKKLRLEDAINATKAAVEEGIVPGGGTTLAHLAPALEQWAASTLSGEELIGANIVAAALTAPLMRIAENAGVNGAVVAENVKAKSFNEGYNAANGDYVDMLAAGIVDPAKVTRSGLQNAASIAGMVLTTECIVADLPEKKEAAPAGGGMGGGDFDY

SEQ ID NO: 9174 - DNA, 1650 bp, Acidiphilium cryptum JF-5
  CDS (1)..(1650): transl_table=11
atggctgctaaagacgtccgcttctcggccgacgcccgcgaacgcctcatccgcggtgtcgacctgctcgccaacgcggtgaaggtcaccctcggccccaagggccgcaacgtcgtcatcgagaagagcttcggttcgccccgcatcaccaaggacggcgtgacggtcgcgaaggaaatcgaactcgccgacaagttcgagaacatgggcgcgcagatggtgcgcgaagtggcctcgaagaccaacgacctcgccggtgacggcaccaccaccgcgaccgtcctcgcccaggcgatcgtccgcgagggtgcgaaggcggttgccgccggcatgaacccgatggatctgaagcgcggcatcgacaaggcggtcaacgccatcgtcgacgagctgaagaagcgcaccaagaagatcacgaccccgagcgaaaccgcccaggtcggcaccatctccgccaacggcgaggccgagatcggcaagatgatctccgaggcgatgcagaaggtcggcaacgagggcgtcatcacggtcgaggaagccaagggcatccagaccgagctcgacgtcgtcgagggcatgcagttcgaccgcggctacgtctcgccctacttcatcaccaacccggagaagatggtcgcggatctcgacaatccgtacatcctgatccacgagaagaagctctccggcctgcagccgatgctgccgctgctcgaaagcatcgtccagtccggcaagccgctgctgatcatcgccgaggacgtcgagggcgaggcgctggccaccctggtcgtcaacaagctgcgtggcggcctcaagatcgccgccgtcaaggcgcccggcttcggtgaccgccgcaaggccatgctggaagacatcgcgatcctcaccggcggccaggtcatcagcgaagatctcggcatcaagctcgagaccgtgacgctgaacatgctcggccgcgcgaagaaggtgctgatcgagaaggaaaacaccacgatcgtcgaaggtgccggcaagaaggccgacatcaccggccgctgcaaccagatccgcgcgcagatcgaggagaccacctcggactacgaccgcgagaagctgcaggagcgcctggcgaagctggccggcggcgttgccgtcatccgcgtcggcggcgcctcggagaccgaggtgaaggagcgcaaggaccgcgtggacgacgcgctgcacgcgacccgcgccgccgtcgaggaaggcatcgtcccgggtggcggcgtggccctcgcccgcgcctcgctcgcgatcaacaagctcaaggccgataacgacgaccagcgcttcggcatcgacatcatccgcaaggcggtgctcgcgccgatgcgccagatcgccgagaacgccggcgaagacggcgccgtgatctccggcaaggtgctcgacaacgacgactacagcttcggcttcgatgcccagtccggcgagttcaaggacatggtcaaggccggcatcatcgacccgaccaaggtcgtccgcaccgcgctgcaggacgccgcctcggtcgccggtctgctcatcacgaccgaagcgatggtcgccgagcgtccggaaaagaaggcccccgccggtggcgacgccggaatgggcggcatgggcggcatgggcggcatggatttctga

SEQ ID NO: 9175 - protein, 549 aa, Acidiphilium cryptum JF-5
MAAKDVRFSADARERLIRGVDLLANAVKVTLGPKGRNVVIEKSFGSPRITKDGVTVAKEIELADKFENMGAQMVREVASKTNDLAGDGTTTATVLAQAIVREGAKAVAAGMNPMDLKRGIDKAVNAIVDELKKRTKKITTPSETAQVGTISANGEAEIGKMISEAMQKVGNEGVITVEEAKGIQTELDVVEGMQFDRGYVSPYFITNPEKMVADLDNPYILIHEKKLSGLQPMLPLLESIVQSGKPLLIIAEDVEGEALATLVVNKLRGGLKIAAVKAPGFGDRRKAMLEDIAILTGGQVISEDLGIKLETVTLNMLGRAKKVLIEKENTTIVEGAGKKADITGRCNQIRAQIEETTSDYDREKLQERLAKLAGGVAVIRVGGASETEVKERKDRVDDALHATRAAVEEGIVPGGGVALARASLAINKLKADNDDQRFGIDIIRKAVLAPMRQIAENAGEDGAVISGKVLDNDDYSFGFDAQSGEFKDMVKAGIIDPTKVVRTALQDAASVAGLLITTEAMVAERPEKKAPAGGDAGMGGMGGMGGMDF

SEQ ID NO: 9176 - DNA, 1617 bp, Thermotoga petrophila RKU-1
  CDS (1)..(1617): transl_table=11
atgccgaagattctgaagttcaatgaagaagcgagaagggcactcgaaagaggtgtggacaaggttgctaacgcggtaaaggtgactctcggaccgaagggaaggaacgttgttatcgaaaaatcgtggggttctccaacaataaccaacgacggtgtttccatagccaaggagattgagctcgaggacaaattcgaaaacctcggggctcagctcgtgaaagaagttgcttccaaaacaaacgacgttgccggtgatggtacaacaactgctacggttctcgcacaggctatgatcaaagaaggtctcaagaacgttgcagcgggcgccaatccaattctcctcaagaggggtatagacaaagccgttgagaaagccgttgaagagatcaagaaggtctccaagaaactttccggtagggaggacattgcccacgttgccgctatatctgcgaacagcgccgaaataggagagctcatcgcagaagctatggacaaggtaggagaagacggggtcatcactgtggaagattccaaaacactcgaaacctacgttgaattcaccgaaggtatgcagtttgacagaggttacatctcaccatacttcgtcacggatgccgagaagatggaggtcgttctgaaggaacccttcatactcatcactgacaggaaactcagcgctgtgaaacctctcattccgatccttgaaaaggtcgctcagaccggaagaccacttctcgttatagcggaagacgttgaaggagaagttctgacaacacttgttctcaacaaactcaagggtactctccagtcctgtgccgtgaaggctcctggattcggtgaaagaagaaaagccatgcttcaggacatagcaattctcaccggaggtcaggtggcaagtgaagagctcggaatcaatctcgaagatctcacccttgaagatctcggaagagccgatcttgtgagggtcaagaaagatgaaaccatcataattggaggaaaaggtgatccagaggctatcaagaagagaatcgctcaaatcaaagcccagatagaggaaaccacatctgagtacgaaaaagaaactctccaggaaaggatggcaaaactcgcaggaggagtagccgtcataaaggttggagcggccaccgaaacagagctcaaggaaaagaaacacagaattgaagacgcactgagcgctacaagagcagccgttgaagaaggtatcgttcccggtggaggagtaacactcctgagagcaagaaaggccgttgaaaaggtcatagaagagctcgaaggcgacgagaagataggagcacagatcgtttacaaggcactctcagcccccattaagcagattgctgaaaacgcaggatacgacggagcggtgatcatagagaagatactctcgaatgacgatccagcctatggattcgacgcactcaggggagaatactgcaacatgtttgaaagaggaatcattgacccagcaaaggttacaaggagcgccctgcagaacgccgcgtccatcgctggaatgctcctgacaacggaagtgctcatcgttgaaaaacccgaggagaaaaaagaaacaccgagtattcctgaagaattctaa

SEQ ID NO: 9177 - protein, 538 aa, Thermotoga petrophila RKU-1
MPKILKFNEEARRALERGVDKVANAVKVTLGPKGRNVVIEKSWGSPTITNDGVSIAKEIELEDKFENLGAQLVKEVASKTNDVAGDGTTTATVLAQAMIKEGLKNVAAGANPILLKRGIDKAVEKAVEEIKKVSKKLSGREDIAHVAAISANSAEIGELIAEAMDKVGEDGVITVEDSKTLETYVEFTEGMQFDRGYISPYFVTDAEKMEVVLKEPFILITDRKLSAVKPLIPILEKVAQTGRPLLVIAEDVEGEVLTTLVLNKLKGTLQSCAVKAPGFGERRKAMLQDIAILTGGQVASEELGINLEDLTLEDLGRADLVRVKKDETIIIGGKGDPEAIKKRIAQIKAQIEETTSEYEKETLQERMAKLAGGVAVIKVGAATETELKEKKHRIEDALSATRAAVEEGIVPGGGVTLLRARKAVEKVIEELEGDEKIGAQIVYKALSAPIKQIAENAGYDGAVIIEKILSNDDPAYGFDALRGEYCNMFERGIIDPAKVTRSALQNAASIAGMLLTTEVLIVEKPEEKKETPSIPEEF

SEQ ID NO: 9178 - DNA, 1650 bp, Sphingomonas wittichii RW1
  CDS (1)..(1650): transl_table=11
atggcagcgaaagacgtcaagttttcgcgcgacgcccgtgagcgcatcctgcgcggcgtcgacatcctcgccgacgcggtgaaggtcacgctgggcccgaagggccgcaacgtcgtcatcgacaagtcgttcggcgccccgcgcatcaccaaggacggcgtcaccgtcgccaaggaaatcgagctgaaggacaagttcgagaacatcggcgcgcagctcgtccgcgaagtcgcctcgaagaccaacgacctggccggcgacggcaccaccaccgccaccgtgctcgcccaggcgatcgtccgcgagggcctgaagtcggtcgcggccggcatgaacccgatggacctgaagcgcggcatcgacctcgccgtcaccaaggtcgtcgagaacctcaaggcccgctcgaagccggtcgccggctcgaacgaagtcgcccaggtcggcatcatctcggccaatggcgacaaggaagtcggcgagaagatcgcggaagcgatggacaaggtcggcaaggaaggcgtgatcaccgtcgaggaggccaagggcctcgagttcgagctcgacgtcgtcgagggcatgcagttcgaccgcggctacctctcgccctacttcatcaccaacccggagaagatgcaggtcgagctgaccgacccgtacatcctcatccatgagaagaagctgtcgaacctgcagtcgatcctgccgatcctcgaggcggtcgtgcagtcgggccgtccgctgttgatcatcgccgaggacatcgagggcgaggcgctggccaccctggtcgtcaacaagctgcgcggcggcctgaaggtcgcggccgtcaaggcgccgggcttcggcgatcgccgcaaggcgatgctcgaggacatcgcgatcctgaccaacggcgagctgatctccgaggatctcggcatcaagctcgagaacgtcaccatcggcatgctcggcaccgccaagcgcgtcacgatcgacaaggacaacaccaccatcgtcgatggcgccggtgcggccgatgcgatcaagggccgcgtcgaggcgatccgcaagcagatcgagatcaccacgtccgactatgaccgcgagaagctccaggagcgcctggccaagctcgccggcggcgtcgccgtcatcaaggtcggcggtgcgaccgaggtcgaagtgaaggagcgcaaggaccgcgtcgacgacgcgctgcacgcgacccgcgcggccgtcgaggaaggcatcgtccccggtggcggcaccgccctcctctatgcgaccaaggcgctcgacggcctcaagggcgcgaacgacgaccagacccgcggcatcgacatcatccgtcgcgccatctcggctccggtcaagcagatcgcccagaacgccggccaggacggcgcggtcgtcgccggcaacctgctgcgcgagaatgacgagaccaagggcttcaacgccgcgaccgacgtctatgagaacctcgtcgccgccggcgtgatcgacccgaccaaggtcgtccgcaccgcgctgcaggacgcggcctcggtcgccggcctgctcatcaccaccgaggcgacgatcgccgagctgcccgaggacaaggccccggccatgcccggcggcggcatgggtggcatgggcggcatgggcggcatggacttctaa

SEQ ID NO: 9179 - protein, 549 aa, Sphingomonas wittichii RW1
MAAKDVKFSRDARERILRGVDILADAVKVTLGPKGRNVVIDKSFGAPRITKDGVTVAKEIELKDKFENIGAQLVREVASKTNDLAGDGTTTATVLAQAIVREGLKSVAAGMNPMDLKRGIDLAVTKVVENLKARSKPVAGSNEVAQVGIISANGDKEVGEKIAEAMDKVGKEGVITVEEAKGLEFELDVVEGMQFDRGYLSPYFITNPEKMQVELTDPYILIHEKKLSNLQSILPILEAVVQSGRPLLIIAEDIEGEALATLVVNKLRGGLKVAAVKAPGFGDRRKAMLEDIAILTNGELISEDLGIKLENVTIGMLGTAKRVTIDKDNTTIVDGAGAADAIKGRVEAIRKQIEITTSDYDREKLQERLAKLAGGVAVIKVGGATEVEVKERKDRVDDALHATRAAVEEGIVPGGGTALLYATKALDGLKGANDDQTRGIDIIRRAISAPVKQIAQNAGQDGAVVAGNLLRENDETKGFNAATDVYENLVAAGVIDPTKVVRTALQDAASVAGLLITTEATIAELPEDKAPAMPGGGMGGMGGMGGMDF

SEQ ID NO: 9180 - DNA, 1647 bp, Haemophilus influenzae PittGG
  CDS (1)..(1647): transl_table=11
atggcagcaaaagacgtaaaatttggtaatgacgcacgcgtaaaaatgcttaaaggcgtgaatgtattagccgatgcagtaaaagtaacccttggccctaaaggtcgtaatgtaattttagacaaatcatttggcgcaccaactatcactaaagacggtgtatctgttgctcgtgaaatcgaattagaagataaattcgaaaatatgggcgcacaaatggtaaaagaagtggcatctaaagcaaatgatgctgcaggtgacggtacaactactgcaactgtacttgcgcaagctatcgtaaatgaaggcttgaaagcagtagctgcaggtatgaatccaatggatttaaaacgtggtattgataaagcagtaagtgcggttgtttctgaacttaaaaatttatctaaaccttgtgaaacctctaaagaaattgaacaagtagggactatttctgcaaactctgacagcattgtgggtcaattaatctcacaagcaatggaaaaagtgggcaaggaaggggtaattactgttgaagatggtacgggtcttgaagatgaattagatgtggttgaaggtatgcaattcgaccgtggttacctttctccatatttcatcaacaaaccagaaactgcaactgttgaattagataatccatatcttcttcttgtagataaaaaaatctctaacattcgtgaattacttcccgtgttagaaggcgttgcgaaagcaggtaaaccgttattaatcatcgctgaagatgtggaaggcgaagcgcttgcaaccttagtagtaaacacgatgcgcggtatcgtgaaagttgcagccgtgaaagcaccaggttttggtgatcgtcgtaaagcgatgttacaagatattgcaattttaacagcgggtactgtgatttctgaagaaattggtatggagcttgaaaaagcaacattggaagatttaggtcaagcaaaacgtgttgttatcaataaagataacacaaccattattgatggtatcggcgatgaagcacaaatcaaaggtcgtgtggctcaaattcgtcagcaaatcgaagaatcaacttctgactacgacaaagaaaaactccaagaacgcgtggctaaattagcaggcggtgtagcagtaatcaaagtgggcgcagcaactgaagttgaaatgaaagagaaaaaagatcgtgtagatgatgcactacatgcaactcgtgcagcggttgaagaaggtatcgttgctggtggtggcgttgcattagttcgtgcagcagcgaaagttgcagcaagcctaaaaggtgacaatgaagaacaaaatgtgggtatcaaacttgcattacgtgcgatggaagcacctttacgtcaaatcgtcactaacgcaggtgaagaagcttcagttgtggcaagtgcggttaaaaatggcgaaggaaactttggttataatgcaggaacagaacagtacggcgatatgatcgaaatgggtatcttagatccaactaaagtcactcgttctgcattgcaattcgcagcttctgtagcaggcttaatgattaccactgaatgtatggtaactgatcttccaaaagatgataaagccgatttaggtgctgctggaatgggcggtatgggtggaatgggcggaatgatgtaa

SEQ ID NO: 9181 - protein, 548 aa, Haemophilus influenzae PittGG
MAAKDVKFGNDARVKMLKGVNVLADAVKVTLGPKGRNVILDKSFGAPTITKDGVSVAREIELEDKFENMGAQMVKEVASKANDAAGDGTTTATVLAQAIVNEGLKAVAAGMNPMDLKRGIDKAVSAVVSELKNLSKPCETSKEIEQVGTISANSDSIVGQLISQAMEKVGKEGVITVEDGTGLEDELDVVEGMQFDRGYLSPYFINKPETATVELDNPYLLLVDKKISNIRELLPVLEGVAKAGKPLLIIAEDVEGEALATLVVNTMRGIVKVAAVKAPGFGDRRKAMLQDIAILTAGTVISEEIGMELEKATLEDLGQAKRVVINKDNTTIIDGIGDEAQIKGRVAQIRQQIEESTSDYDKEKLQERVAKLAGGVAVIKVGAATEVEMKEKKDRVDDALHATRAAVEEGIVAGGGVALVRAAAKVAASLKGDNEEQNVGIKLALRAMEAPLRQIVTNAGEEASVVASAVKNGEGNFGYNAGTEQYGDMIEMGILDPTKVTRSALQFAASVAGLMITTECMVTDLPKDDKADLGAAGMGGMGGMGGMM

SEQ ID NO: 9182 - DNA, 1629 bp, Flavobacterium psychrophilum JIP02/86
  CDS (1)..(1629): transl_table=11
atggcaaaaaatataaaatttgatatagaagcacgtgacggattaaaacgtggcgtagacgcattagcaaacgcagtaaaagtaacacttggaccaaaaggacgtaatgtgattattggaaaatcatttggcggaccaacagtcaccaaagacggagttacagtggccaaagaaatagaattacaagaccctctagaaaacatgggagctcaaatggtaaaagaagtagcatcgaaaaccaatgatttggctggagatggaactacaacggcaaccgttttagcacaagctatcgtaaaagaaggcttaaaaaatgtagcagctggagctaacccaatggatttaaaacgaggaatagacaaagctgtcgaagcaattgttgccgacttgacaaaacaagctaaagttgtgggaagcgattcagaaaaaataaaacaaattgcgtctatctctgcaaacaatgatgaagtaattggcgaattaatagcaaacgctttcgcaaaagtaggaaaagaaggagttatcactgttgaagaagccaaaggaacagatacttatgtagatgttgtagaaggaatgcaattcgatcgaggatacctttcgccatattttgtaaccaatcctgaaaaaatggatgcagaattagaaaacccttacatccttctgtatgataaaaaagtttcttctctaaaagaattattacccgttcttgaaccagtagcacaatcaggaaaaccattattaatcattgccgaagatgtagacggagaagcattatctacattagtagtaaacaaactacgtggagccttaaaaattgctgctgtaaaagcaccaggttttggcgacagaagaaaagcaatgctagaagatattgccatcttaacaggaggaactgttatctctgaagaaagaggatttactttagaaaacacaactatcgaaatgttaggaactgcaaaaagagtaactatcgataaagacaacactacaattgtaagtggcgccggagaagctgatatgattaaaaatcgtgtaaaccaaataaaaggtcaaatggaagcttctacctctgattatgacaaagaaaaactacaagaacgcttggctaaattagctggaggtgttgctgttctctatgttggcgcagcttcagaagtagaaatgaaagaaaagaaagaccgtgtagacgatgcattacacgcaactcgcgcagctgtcgaagaaggaatagttgcaggtggtggcgtagcgttactaagagctaaaaacgtcttaaaagacattaaagcagacaatgccgatgaagccacaggaattcaaatcgtatctcgtgcagtagaagctcccctaagaaccattgtagaaaacgcaggtctagaaggctctgtagtagttgcaaaagttgccgaaggttctggtgattttggttacaatgctaaaactgatgaatatgtagatatgctaaaagctggaattatagaccctaaaaaagtaacccgtgtagccttagaaaacgctgcttcagttgcaggaatgatccttactaccgaatgcgctttagtagaaataaaagaagaaaatgctggtggcggacaaatgggtggcggtatgccaggcatgatgtaa

SEQ ID NO: 9183 - protein, 542 aa, Flavobacterium psychrophilum JIP02/86
MAKNIKFDIEARDGLKRGVDALANAVKVTLGPKGRNVIIGKSFGGPTVTKDGVTVAKEIELQDPLENMGAQMVKEVASKTNDLAGDGTTTATVLAQAIVKEGLKNVAAGANPMDLKRGIDKAVEAIVADLTKQAKVVGSDSEKIKQIASISANNDEVIGELIANAFAKVGKEGVITVEEAKGTDTYVDVVEGMQFDRGYLSPYFVTNPEKMDAELENPYILLYDKKVSSLKELLPVLEPVAQSGKPLLIIAEDVDGEALSTLVVNKLRGALKIAAVKAPGFGDRRKAMLEDIAILTGGTVISEERGFTLENTTIEMLGTAKRVTIDKDNTTIVSGAGEADMIKNRVNQIKGQMEASTSDYDKEKLQERLAKLAGGVAVLYVGAASEVEMKEKKDRVDDALHATRAAVEEGIVAGGGVALLRAKNVLKDIKADNADEATGIQIVSRAVEAPLRTIVENAGLEGSVVVAKVAEGSGDFGYNAKTDEYVDMLKAGIIDPKKVTRVALENAASVAGMILTTECALVEIKEENAGGGQMGGGMPGMM

SEQ ID NO: 9184 - DNA, 1620 bp, Thermosipho melanesiensis BI429
  CDS (1)..(1620): transl_table=11
atggctaagatgttaagatttagtgaagaagcaagaagagctcttgaaagaggtgtagatgcagttgcagatgcagttaagattacgttaggaccaaaaggtagaaacgtagttattgaaaaatcctggggaagccctacgattacaaatgatggtgtttcaattgcaaaggaaatagaacttgaagataaattcgaaaatcttggtgcacaacttgtaaaagaagttgcaagtaaaacaaacgacgtagcaggtgatggtacgacaacagctacagttcttgctcaagcaatgattaaggaaggtattaaaaacgttacagcaggtgcaaatccaattcttgtaaaaagaggaattgataaggcagtagcagctgcagttgagaaaatcaaagatatttcaaaaaaattatcaaattctgatgatattgctcacgtagcatccattagtgcaaacagtgaggaaattggaaaattaattgctgaagcaatggaaaaagttggagaagatggagttattaccgtagaagatagtaaatcaattgatacgtttgttgaatttacagaaggtatgcaatttgacagaggatatatttctccatatttcgtaacggaccctgaaaaaatggaagttgtatacaatgaacctttcattcttattacagatagaaaactttcaaatataaaaccattaataccaatccttgaaaaagttgcgcagacgggaaaaccattggtaataattgcagaggatgttgaaggtgaagcattaacaacacttgtacttaataaactaaaaggcacacttaatacggtagcagtaaaagctcctggttttggagataggagaaaagcaatgcttcaagatatagcaatccttactggtggaattgtggcaagtgaagaagttggaattaatcttgaagatttgacattgaatgatcttggaagagcagatgttgtaagagtaaagaaagacgaaacaatcattgtaggaggtcacggagatcaagaagagattaagaagagaattgctcaaattaaggcacaaattgaacaaacaacatctgaatatgaaaaagaaacattacaagaaagaatggcaaagcttgcaggtggtgtagcagtaattaaagttggagcagcaacagaaacagaattaaaagaaaagaaacacagaattgaagatgcgttatctgcaacaagggcagcagttgaagaaggtattgttccaggtggaggaattacactacttcgtgcaagaaaaccggttgaaaaaattgttgaagaattagatggtgatgaaaagattggtgcaaagattgtttacgaagcattgagtgctcctattaatcaaattgcaaagaatgcaggttacgatggtgcaattattatccacaaagttcttgagcaagatgatccagcgtacggttttgatgcgttaaaaggagaatactgcgatatgtttgaacgtggaattattgatcccgcaaaagttacaagaagtgcacttcaaaacgcagcatcaattgcaggtatgctccttacaacagaagtacttgtagttgaaaaaccagaaccaaaaaacaataacccaatgccagaaatgccagaatattaa

SEQ ID NO: 9185 - protein, 539 aa, Thermosipho melanesiensis BI429
MAKMLRFSEEARRALERGVDAVADAVKITLGPKGRNVVIEKSWGSPTITNDGVSIAKEIELEDKFENLGAQLVKEVASKTNDVAGDGTTTATVLAQAMIKEGIKNVTAGANPILVKRGIDKAVAAAVEKIKDISKKLSNSDDIAHVASISANSEEIGKLIAEAMEKVGEDGVITVEDSKSIDTFVEFTEGMQFDRGYISPYFVTDPEKMEVVYNEPFILITDRKLSNIKPLIPILEKVAQTGKPLVIIAEDVEGEALTTLVLNKLKGTLNTVAVKAPGFGDRRKAMLQDIAILTGGIVASEEVGINLEDLTLNDLGRADVVRVKKDETIIVGGHGDQEEIKKRIAQIKAQIEQTTSEYEKETLQERMAKLAGGVAVIKVGAATETELKEKKHRIEDALSATRAAVEEGIVPGGGITLLRARKPVEKIVEELDGDEKIGAKIVYEALSAPINQIAKNAGYDGAIIIHKVLEQDDPAYGFDALKGEYCDMFERGIIDPAKVTRSALQNAASIAGMLLTTEVLVVEKPEPKNNNPMPEMPEY

SEQ ID NO: 9186 - DNA, 1644 bp, Alkaliphilus metalliredigens QYMF
  CDS (1)..(1644): transl_table=11
atggcaaaagaaattagatttggagaaaaagcacgtcgttctttagaggcaggtgttaataaactagcagatacagtgaaagtaacattaggaccaaagggaagaaatgttgttattgataagaaatttggttctccactaatcacaaatgatggtgtgaccattgcaagggaaattgagttggaagatgcctatgaaaacatgggggcacaactggttaaggaagttgccactaaaaccaatgatgttgctggagacggaacaacaacagccacactattagcccaagcaattattcgtgaaggcttaaagaacgttgcagcaggtgcgaaccctatgattattaaaaagggaatccacaaggctgtagacgctgctgtagcagaattaaaggcagtttctaagtccattgaaagcaaggaagccatcgcacaggtgggtgctatttcagcagctgatgaggaaattggacagttaattgcagatgcaatggataaagtaggaaaagatggtgtcattacagtagaagaatctaaatctatgggaacgacacttgatgttgtagaaggaatgcaatttgacagaggatacttatctccatacatggtaacggatactgaaaagatggaagctgtattcaatgatgcctatatactagtaacagataaaaagatttccaatatccaagaaatcttaccaattcttgagcaaattgtacaacagggtaaaaagcttgtgattattgctgaagatatcgaaggagaagcattagcaacattagtggtcaataaattaagaggtacatttgaatgtgttgctgttaaggcacctggatttggggatagacgaaagtctatgttagatgacattgcagttttaactggggcaacagtgatttctgaagaattaggctatgacttaaaaacagctacagttgatatgctaggaactgctagaactgttaaagtagacaaagaaaacacaacaattgttgaaggtgcaggaaatcaacaactaatcaaagatcgtgtatctcaaattaaaaagcaaattgaagaaacaacttctgattttgacaaagagaagcttcaagaaagactagcaaaactttctggtggcgtagctgttatccaagtaggggctgctacagaaacagaattaaaggaaagaaagctaagaattgaagatgctttaaatgcaacaagagccgcagtagaagaaggcattgtagcaggtggtggtactgccctagttaatgtgataccagcagtagaggcattactagaaggatcacagggagatgaaaagacaggtattcaaatcattagaagagcattagaagagccattgagacaaatcgctgaaaatgctggattagaaggttctgtcattgttaataaagtgatgagttcagataaaggaattggatatgacgtattaaacaataagtatgtgaatatgattgaagcgggtattgttgacccaaccaaggtgacaagatcagctttacaaaatgcagcttctatctcagccatgctattgacaacagaaagtgccgttgttgatattgcatcagaagagccaggaatgccaggcggcatgggtggtatgggaggcatgggtggcggcatgccaatgatgtaa

SEQ ID NO: 9187 - protein, 547 aa, Alkaliphilus metalliredigens QYMF
MAKEIRFGEKARRSLEAGVNKLADTVKVTLGPKGRNVVIDKKFGSPLITNDGVTIAREIELEDAYENMGAQLVKEVATKTNDVAGDGTTTATLLAQAIIREGLKNVAAGANPMIIKKGIHKAVDAAVAELKAVSKSIESKEAIAQVGAISAADEEIGQLIADAMDKVGKDGVITVEESKSMGTTLDVVEGMQFDRGYLSPYMVTDTEKMEAVFNDAYILVTDKKISNIQEILPILEQIVQQGKKLVIIAEDIEGEALATLVVNKLRGTFECVAVKAPGFGDRRKSMLDDIAVLTGATVISEELGYDLKTATVDMLGTARTVKVDKENTTIVEGAGNQQLIKDRVSQIKKQIEETTSDFDKEKLQERLAKLSGGVAVIQVGAATETELKERKLRIEDALNATRAAVEEGIVAGGGTALVNVIPAVEALLEGSQGDEKTGIQIIRRALEEPLRQIAENAGLEGSVIVNKVMSSDKGIGYDVLNNKYVNMIEAGIVDPTKVTRSALQNAASISAMLLTTESAVVDIASEEPGMPGGMGGMGGMGGGMPMM

SEQ ID NO: 9188 - DNA, 1638 bp, Sinorhizobium medicae WSM419
  CDS (1)..(1638): transl_table=11
atggcagctaaagaagtcaagttcggccgtagcgcgcgcgaaaagatgctgcgcggcgtcgacattctcgccgacgcggtcaaggtgacgctcggcccgaagggccgtaacgtcgtcatcgacaaatcgttcggcgcaccgcgcatcaccaaggacggcgtttccgtcgccaaggagatcgaactcgaagacaagttcgagaacatgggcgcccagatggtccgcgaagttgcttcgaagaccaacgacatcgccggcgacggcacgacgaccgcaaccgttctcgctcaggcaatcgttcgcgaaggcgcgaaggccgttgccgccggcatgaacccgatggaccttaagcgcggtatcgacctcgccgtcgctgaagtcgtcaaggacctgctcgccaaggccaagaagatcaacacctcggacgaagtcgcccaggtcggcacgatctcggcaaacggcgaaaagcagatcggtctcgacatcgccgaagcgatgcagaaggttggcaacgaaggcgtcatcacggttgaagaagccaagaccgccgagaccgaactcgaagtcgtcgaaggcatgcagttcgaccgcggttatctgtcgccctacttcgtcaccaacccggaaaagatggtcgccgacctcgaagacgcttacattctcctgcacgagaagaagctctccaaccttcaggcgatgctcccggttctcgaagccgtcgtccagaccggcaagccgctcctcatcattgctgaagacgtcgaaggcgaagctcttgcaacgctcgtcgtcaacaagctgcgtggcggcctgaagattgctgccgtcaaggctccgggcttcggcgaccgtcgcaaggccatgctcgaagacatcgccatcctgacgggcggcaccgtgatctcggaagacctcggcatcaagctcgaaagcgtcacgctcgacatgctcggccgtgcgaagaaggtttcgatcaccaaggaaaatacgacgatcgtcgacggtgccggccagaagtccgacatcgaaggccgcgtcgcccagatcaaggcccagatcgaagaaaccacttccgactacgaccgtgagaagctgcaggagcgccttgccaagctcgctggcggcgttgccgtcatccgcgtcggcggtgcgacggaagtcgaagtgaaggaaaagaaggaccgcatcgacgacgctctcaacgcgacgcgcgctgcagttcaggaaggcatcgtaccgggcggcggcgttgctctgctgcgttcctccgtcaagatcaccgtcaagggtgaaaacgacgaccaggatgccggcgtcaacatcgttcgccgcgctctgcagtctccggcccgccagatcgtcgaaaacgctggcgacgaagcatccatcgttgtcggcaagatcctcgagaaggacaccgacgacttcggttacaacgcacagaccggcgaatatggtgacatgatcgccatgggcatcatcgacccggtcaaggtcgttcgcaccgcgcttcaggacgcagcctcggttgcttcgctgctcatcaccaccgaagccatgatcgccgagctgccgaagaaggacgctccggcaatgcctggcggcatgggcggcatgggcggcatggacatgatgtga

SEQ ID NO: 9189 - protein, 545 aa, Sinorhizobium medicae WSM419
MAAKEVKFGRSAREKMLRGVDILADAVKVTLGPKGRNVVIDKSFGAPRITKDGVSVAKEIELEDKFENMGAQMVREVASKTNDIAGDGTTTATVLAQAIVREGAKAVAAGMNPMDLKRGIDLAVAEVVKDLLAKAKKINTSDEVAQVGTISANGEKQIGLDIAEAMQKVGNEGVITVEEAKTAETELEVVEGMQFDRGYLSPYFVTNPEKMVADLEDAYILLHEKKLSNLQAMLPVLEAVVQTGKPLLIIAEDVEGEALATLVVNKLRGGLKIAAVKAPGFGDRRKAMLEDIAILTGGTVISEDLGIKLESVTLDMLGRAKKVSITKENTTIVDGAGQKSDIEGRVAQIKAQIEETTSDYDREKLQERLAKLAGGVAVIRVGGATEVEVKEKKDRIDDALNATRAAVQEGIVPGGGVALLRSSVKITVKGENDDQDAGVNIVRRALQSPARQIVENAGDEASIVVGKILEKDTDDFGYNAQTGEYGDMIAMGIIDPVKVVRTALQDAASVASLLITTEAMIAELPKKDAPAMPGGMGGMGGMDMM

SEQ ID NO: 9190 - DNA, 1644 bp, Nitratiruptor sp. SB155-2
  CDS (1)..(1644): transl_table=11
atggcagcaaaagagattcattttagcgatattgcaagaggagaactttttgaaggcgttaaaaaactggcagacgccgtaaaagttactatgggtccaagaggacgaaacgtactcattcaaaaatcttttggaagtccaagcattacaaaagacggtgtaagtgttgcaaaagagatcgagcttccaaatactgttgaaaacatgggtgcacaacttgttaaagaggttgcaagcaaaactgctgatgaagcaggtgatggtacaacaactgcaacagttcttgcatacaacatttttaaagaaggtcttcgaaacatcacagcaggtgcaaaccctatcgaagtaaaacgaggtatggacaaagctgccgaagcaatcgttgctgagcttaaaaagatcgcaaaagaagtgaaagataaaaaagagatcgcgcaagttgcaacaatttctgcaaacaacgatccaaaaatcggtgagcttatagcagaagcgatggaaaaagttggaaaagatggtgttatcactgttgaagaaggaaaatctcttcaagatgaacttgaagttgttgagggtatgcagtttgacagaggatacctcagcccatactttgtaactgacactgaaaagatggaagcagtacttgaaaatgcatatatcctgctttacgacaaaaaaatcagcaacatgaaagacttgcttccagtccttgaaaaagttgtacaaacaggcaacaaaccgcttctcattatcgctgaagatatcgaaggtgaagcacttgcgacacttgttgtaaacaaactacgaggaacactcaacgtttgtgctgttaaagcgccaggatttggtgacagaagaaaagcgatgcttcaagatattgcgatcttgactggcgggcaagtgatcagtgaagaagttggtagaacgcttgaaagcgcaacactagaagatcttggacaagctgacagaatcgtagtagacaaagaaaacactacaatcgttggcggaaaaggcgacaaagcagcagttgaagcgagaatcaaagagattaaagcgcaaatcgagcaaacaacaagcgaatatgacaaagaaaaactgcaagaacgacttgccaaacttgctggtggtgtagcagttatcaaagtcggtgctgcaactgaaactgagatgaaagagaaaaaagaccgagtcgatgacgcattggcagctactaaagcagctgttgaagaaggtatcgtcatcggtggtggtactgcactcgttcgagcagcgaacaaagtaaatcttgatctatgcggcgatgagaaaatcggtgctgaaatcattcttagagctatcaaagcccctctcaaacaaatcgctgaaaacgctggatttgatccaggtgtagtagcgaacaatgttgaaaacgctgaaaatgaaaacactgggttcaatgcagcaaccggtgaatatgtagatatgtttgaagctggtatcgttgacccggcaaaagttgaaagagttgcattgcaaaatgcagtctcagttgctagcttgcttcttacaacagaagcgactgtaagtgaaatcaaagaggacaaacctgcagctcctgctcctgatatgggcggaatgggtggaatgggcggaatgggattctaa

SEQ ID NO: 9191 - protein, 547 aa, Nitratiruptor sp. SB155-2
MAAKEIHFSDIARGELFEGVKKLADAVKVTMGPRGRNVLIQKSFGSPSITKDGVSVAKEIELPNTVENMGAQLVKEVASKTADEAGDGTTTATVLAYNIFKEGLRNITAGANPIEVKRGMDKAAEAIVAELKKIAKEVKDKKEIAQVATISANNDPKIGELIAEAMEKVGKDGVITVEEGKSLQDELEVVEGMQFDRGYLSPYFVTDTEKMEAVLENAYILLYDKKISNMKDLLPVLEKVVQTGNKPLLIIAEDIEGEALATLVVNKLRGTLNVCAVKAPGFGDRRKAMLQDIAILTGGQVISEEVGRTLESATLEDLGQADRIVVDKENTTIVGGKGDKAAVEARIKEIKAQIEQTTSEYDKEKLQERLAKLAGGVAVIKVGAATETEMKEKKDRVDDALAATKAAVEEGIVIGGGTALVRAANKVNLDLCGDEKIGAEIILRAIKAPLKQIAENAGFDPGVVANNVENAENENTGFNAATGEYVDMFEAGIVDPAKVERVALQNAVSVASLLLTTEATVSEIKEDKPAAPAPDMGGMGGMGGMGF

SEQ ID NO: 9192 - DNA, 1629 bp, Sulfurovum sp. NBC37-1
  CDS (1)..(1629): transl_table=11
atggcaaaagagatatttttttcagacaaagcaagaaacggactgtttgaaggtgttacgaaactggcagatgcagtaaaagtaactatgggaccaagagggcggaatgtactcattcaaaaaagttttggcgcaccgcacatcacaaaagacggtgtgagcgtggccagagagatcgaacttgaggatacactcgagaacatgggtgcgcagctggtcaaagaggtagcgagcaacaccgcagatgaagcgggtgacggtaccactaccgcaacggtactggcgcactccatcttcaaagaaggcctcaggaacatcacagccggcgcgaacccgattgaagtgaagagaggtatggacaaagcaagtgcagcgatcatagaagagctcaagaagatctccaaagaggtcaaagacaaaaaagaaatcgcacaggtagcgaccatttccgcgaactctgacgaaactatcggtaatctcatcgcagaggcgatggacagagtgggcaaagacggtgttatcaccgttgaagaggcaaaggggatcaatgatgaccttgaagtggtggaaggtatgcagtttgacagaggatatctctccccttacttcgtgaccaatacggagaagatgacctgcgagatggagaatccactgatcctgatcacagattccaagatcacttctctcaaagatcttattcctgtgcttgagcagatacagcagagtggaagacctctgctcatcatctccgatgatcttgagggtgaagctctggcgacactggtactcaacagactcaagggcgtactcaacatcgcagcggtcaaagcacctggcttcggtgacagaaagaaagagatgctcaaagacatcgctatcctcacaggtgcaaatgtcatcacagaagagcttgggctcagtctagacaaagcgacactggacgacctcggtcaggcaggaagagtggtcatcgacaaggacaatacagttatcgtagatggtaaaggcgacagtgctgctgttgacgcaagagtagctgagatcaaaatacaggtcgagaacactacaagtgaatacgacaaagaaaaactccaggagagactggcaaaactatcaggcggtgtagcagtcatcaaggtcggtgcggcgacagagaccgaaatgaaagagaagaaagacagagtggatgatgcactctctgcaaccaaagcagctgtggacgaaggtatcgttatcggtggtggtgctgcacttgccaaagcaagcaaagcagtgaagcttgaccttgaacatgatgaagctgtaggtgcggagatcatcctaagagctgtctatgctccgatgaagcagatcgcacagaatgcagggttcgatgcaggtgtcgtcgcagacaagatcgcaaacaacagtgaggcgaaccttggatttaacgcagcaacaggagaatatgtgaatatgcttgaagcagggatcattgatccgttgaaagtagcgcgtgtggcacttcagaatgccacttccgtagcaagtctcctgctcacaacggaagcgactgtttcagacattaaagaagcaccgactccagcaccgacaatgcctgacatgggcggtatgcctggtatgatgtaa

SEQ ID NO: 9193 - protein, 542 aa, Sulfurovum sp. NBC37-1
MAKEIFFSDKARNGLFEGVTKLADAVKVTMGPRGRNVLIQKSFGAPHITKDGVSVAREIELEDTLENMGAQLVKEVASNTADEAGDGTTTATVLAHSIFKEGLRNITAGANPIEVKRGMDKASAAIIEELKKISKEVKDKKEIAQVATISANSDETIGNLIAEAMDRVGKDGVITVEEAKGINDDLEVVEGMQFDRGYLSPYFVTNTEKMTCEMENPLILITDSKITSLKDLIPVLEQIQQSGRPLLIISDDLEGEALATLVLNRLKGVLNIAAVKAPGFGDRKKEMLKDIAILTGANVITEELGLSLDKATLDDLGQAGRVVIDKDNTVIVDGKGDSAAVDARVAEIKIQVENTTSEYDKEKLQERLAKLSGGVAVIKVGAATETEMKEKKDRVDDALSATKAAVDEGIVIGGGAALAKASKAVKLDLEHDEAVGAEIILRAVYAPMKQIAQNAGFDAGVVADKIANNSEANLGFNAATGEYVNMLEAGIIDPLKVARVALQNATSVASLLLTTEATVSDIKEAPTPAPTMPDMGGMPGMM

SEQ ID NO: 9194 - DNA, 1641 bp, Ochrobactrum anthropi ATCC 49188
  CDS (1)..(1641): transl_table=11
atggctgcaaaagacgtaaaattcggtcgctctgcgcgcgaaaagatgctgcgcggcgtcgatatcctcgctgacgctgtaaaggtaacgctcggcccgaagggtcgtaacgttgtcatcgacaagtccttcggtgctccgcgcatcaccaaggacggcgtatcggtcgccaaggaaatcgaactggaagacaagttcgaaaacatgggcgcacagatgctgcgcgaagtggcttcgaagaccaacgacactgccggtgacggcacgacgaccgctaccgttctcggtcaggcaatcgttcaggaaggcgcaaaggctgttgccgccggcatgaacccgatggacctgaagcgcggtatcgacctcgcagtaaccgaagttgttgctgaacttctcggcaaggccaagaagatcaacacgtcggaagaagttgctcaggttggcaccatctccgctaacggtgaagccgaaatcggcaagatgatcgctgatgcgatgcagaaggtcggcaatgaaggcgtgatcacggttgaagaagccaagaccgctgaaaccgaactcgaagtcgtcgaaggcatgcagttcgaccgcggttacctgtcgccttacttcgtcaccaaccctgaaaagatggttgctgacctcgaagacgcctacatccttctgcacgaaaagaagctctcgaacctccaggctcttctgccggttctggaagctgtcgttcagacctccaagccgctcgtcatcatcgctgaagacgtcgaaggcgaagctcttgcaacgctcgtcgtcaacaagctgcgcggcggcctgaagatcgctgctgtcaaggctcctggcttcggcgatcgccgcaaagccatgctcgaagacatcgcgatcctcaccggcggtcaggttatctccgaagacctcggcatcaagctcgaaaccgttacgctcgacatgctcggccgtgcaaagaaggtttcgatctcgaaggaaaacaccacgatcgttgacggtgcaggccagaaggctgaaatcgacgctcgcgttagccagatcaagcagcagatcgaagaaacttcttcggactacgaccgtgaaaagcttcaggaacgtcttgccaagcttgctggtggcgttgccgtgatccgcgtcggcggtgcaacggaagttgaagtgaaggaaaagaaggaccgcgttgacgacgccctgaacgcaacccgcgctgcggttgaagaaggcatcgttgctggtggcggcaccgccctcctccgcgcttcggccaagatctccgccaagggcatcaacgccgaccaggaagccggtatcaacatcgttcgtcgcgctctgcaggctccagctcgtcagatcacgaccaatgccggtgaagaagcttcggttatcgttggcaagatccttgagaatgcctctgaaacatacggctacaacactgccaatggcgaattcggcgacctgatcaaggctggcgttgtcgatccggttaaggttgtccgtaccgccctgcagaatgctgcatcggttgccggcctcctgatcacgacggaagccatgatcgctgaactgccgaagaaggatgcagctccggctggcatgcctggcggtatgggcggcatgggcggcatggacttctaa

SEQ ID NO: 9195 - protein, 546 aa, Ochrobactrum anthropi ATCC 49188
MAAKDVKFGRSAREKMLRGVDILADAVKVTLGPKGRNVVIDKSFGAPRITKDGVSVAKEIELEDKFENMGAQMLREVASKTNDTAGDGTTTATVLGQAIVQEGAKAVAAGMNPMDLKRGIDLAVTEVVAELLGKAKKINTSEEVAQVGTISANGEAEIGKMIADAMQKVGNEGVITVEEAKTAETELEVVEGMQFDRGYLSPYFVTNPEKMVADLEDAYILLHEKKLSNLQALLPVLEAVVQTSKPLVIIAEDVEGEALATLVVNKLRGGLKIAAVKAPGFGDRRKAMLEDIAILTGGQVISEDLGIKLETVTLDMLGRAKKVSISKENTTIVDGAGQKAEIDARVSQIKQQIEETSSDYDREKLQERLAKLAGGVAVIRVGGATEVEVKEKKDRVDDALNATRAAVEEGIVAGGGTALLRASAKISAKGINADQEAGINIVRRALQAPARQITTNAGEEASVIVGKILENASETYGYNTANGEFGDLIKAGVVDPVKVVRTALQNAASVAGLLITTEAMIAELPKKDAAPAGMPGGMGGMGGMDF

SEQ ID NO: 9196 - DNA, 1644 bp, Anaeromyxobacter sp. Fw109-5
  CDS (1)..(1644): transl_table=11
atggcttccaaggaaatcatcttcgatcagaaggcgcgcgacgcgatcctcaagggcgtcaacaccctcgccgacgcggtgaaggtgacgctcgggccgaagggccggaacgtcgtcatcgagaagagcttcggctccccgaccatcacgaaggacggcgtgacggtcgcgaaggagatcgagctcgagaacaagttcgagaacatgggcgcgcagatggtgaaggaggtcgcctccaagacctccgacgtcgccggcgacggcaccaccaccgccaccgtgctcgcgcaggccctctaccgcgagggctcgaagctggtcgcggcgggccacaacccgatggagatcaagcgcggcatcgacaaggccgtcgagatcatcgtcggcgagctgaagaagctctcgaagccgacgaaggaccagaaggagatcgcccaggtcggcatcatctccgcgaacggcgacgagaccatcggcaacatcatcgccgaggcgatggagaaggtgggcaaggagggcgtcatcaccgtcgaggaggccaagggcctcgagacgacgctcgaggtggtcgagggcatgcagttcgaccgcggctacctgtcgccgtacttcgtgacggacgcggagcggatggtcgcgaacctcgaggacgcgtacatcctcatccacgagaagaagatctcgaacatgaaggatctgctcccgctgctcgagcagatcgcgcgctcgggcaagccgctcctcatcgtggctgaggaggtcgagggcgaggcgctcgcgacgctcgtcgtgaacaagctgcgcggcacgctgcacgtcgccgcggtgaaggcgcccggcttcggcgatcgccgcaaggcgatgctcgaggacatcgcgatcctcaccggcggccgcatgatcgccgaggagctcggcctcaagctcgagcaggtgagcctgaaggacctcggccgcgccaagcgcatcagcatcgacaaggacaacaccacgatcgtcgacggcgccggccagaaggccgacatcgaggcgcgcgtgaagacgatccgcgcgcagatcgaggagaccacctccgactacgaccgcgagaagctccaggagcggctcgcgaagctcgtgggcggcgtcgcggtcatcaacgtcggcgcggcgaccgagacggagatgaaggagaagaaggcccgcgtcgaggacgcgctccacgcgacccgcgcggccgtcgaggagggcatcgtccccggcggcggcgtcgcttacctgcgcgccgtgaaggcgctcgagggcgtgaaggtgagcgagggcgagaagttcggcctcgacatcgtccgccgcgcgctcgaggagccgctccgtcagatcgccggcaacggcggctacgaggcgtccatcgtggtgaacaaggtgaaggagtcgaaggacaccaacttcggcttcaacgccgccacgggtgactacgaggacctcgtgaagtcgggcgtcatcgacccgaccaaggtctcgcgctcggcgctccagaacgcgtcgtcggtcgcgtccctcatgctcaccaccatggccctcgtcgccgagaagccgaaggaggagtccgcggctcccgccggcggcgggatgggcggcatgggcggcatgggcgggatgatgtag

SEQ ID NO: 9197 - protein, 547 aa, Anaeromyxobacter sp. Fw109-5
MASKEIIFDQKARDAILKGVNTLADAVKVTLGPKGRNVVIEKSFGSPTITKDGVTVAKEIELENKFENMGAQMVKEVASKTSDVAGDGTTTATVLAQALYREGSKLVAAGHNPMEIKRGIDKAVEIIVGELKKLSKPTKDQKEIAQVGIISANGDETIGNIIAEAMEKVGKEGVITVEEAKGLETTLEVVEGMQFDRGYLSPYFVTDAERMVANLEDAYILIHEKKISNMKDLLPLLEQIARSGKPLLIVAEEVEGEALATLVVNKLRGTLHVAAVKAPGFGDRRKAMLEDIAILTGGRMIAEELGLKLEQVSLKDLGRAKRISIDKDNTTIVDGAGQKADIEARVKTIRAQIEETTSDYDREKLQERLAKLVGGVAVINVGAATETEMKEKKARVEDALHATRAAVEEGIVPGGGVAYLRAVKALEGVKVSEGEKFGLDIVRRALEEPLRQIAGNGGYEASIVVNKVKESKDTNFGFNAATGDYEDLVKSGVIDPTKVSRSALQNASSVASLMLTTMALVAEKPKEESAAPAGGGMGGMGGMGGMM

SEQ ID NO: 9198 - DNA, 1632 bp, Campylobacter hominis ATCC BAA-381
  CDS (1)..(1632): transl_table=11
atggcaaaagatattattttttcagatgacgctagaaatagactttatgatggcgtaaaaaaattaaacgatacagtaaaagttacaatgggaccaagaggtcgtaatgttttaattcaaaaaagttttggcgctccggcaattacaaaagacggcgtgagtgtggcaaaagaagttgaattaaaagatacaatagaaaatatgggcgcagctcttgttaaagaagtagcaaacaaaacaaacgatcaagcaggtgacggaactactacagctacagttttagcgcatgctatttttaaagaaggtcttagaaatataacagcaggtgcaaatccaattgaagtaaaacgtggaatggataaaatttgcgctgatgttgttgctgaacttaagaaaatttcaaaacctgtaaaagataaaaaagagatagcgcaagtcgcaactatttcagcaaattcagacgaaagcatcggtaaattaatcgcagatgctatggaaaaagtaggtaaagatggtgtaatcactgtcgaagaggcaaaatcaatcaacgatgaattgaatgtagttgaaggaatgcaatttgatagaggttatttaagcccatatttcatcactgatgcggaaaaaatgcaagttgaattaaatagtccgcttgttttgctatttgataagaaaatcacaaatcttaaagatttacttcctgtgttggagcaagttcaaaaaacaggcaaaccgcttttaattattgctgaagatattgaaggcgaggcgcttgcgacattggttgtaaataaacttcgcggcgttttaaatatttcagctgttaaagctccaggatttggcgatagaagaaaagcaatgcttgaagatattgcgattttgacaggtggaacagttataagcgaagagcttggtagaactcttgagagtgcaagtattgcagatcttggaaaagcggaaagaatattaatcgataaagataatactacaatcgtaaatggcgccggtaaaaaagacgatataaaagcaagagtagatcaaataaaagctcaaattgcagttacatcaagtgattatgatagagaaaaacttcaagaaagacttgcaaaattaagcggtggtgtagcggttataaaagttggcgctgcgactgaaactgaaatgaaagagaaaaaagatcgtgtagatgatgcgctttcagctacaaaagcagctgtagaagaaggaattgtaatcggtggcggagcagctttaattaaagccggaaatgcagtaaaagaaaatctgaaaggcgatgaaaaaatcggcgctgatattgtaaaaagagcactttttgcaccgcttcgccaaattgcggaaaatgcgggatttgacgcaggcgtaatagcaaatgcagtaagcataaataaagaaaaagcttatggatttgatgctgcatgcggcgagtttgtaaatatgtttgaagcaggaataatcgatcctgtaaaagttgaacgtgttgcgcttcaaaatgccgtaagcgtggcaagcttacttttaacaacagaagcaacagtaagcgaaatcaaagaagataaacctgcaatgccgcaaatgcctgatatgggtggcggtatgggcggaatgatgtaa

SEQ ID NO: 9199 - protein, 543 aa, Campylobacter hominis ATCC BAA-381
MAKDIIFSDDARNRLYDGVKKLNDTVKVTMGPRGRNVLIQKSFGAPAITKDGVSVAKEVELKDTIENMGAALVKEVANKTNDQAGDGTTTATVLAHAIFKEGLRNITAGANPIEVKRGMDKICADVVAELKKISKPVKDKKEIAQVATISANSDESIGKLIADAMEKVGKDGVITVEEAKSINDELNVVEGMQFDRGYLSPYFITDAEKMQVELNSPLVLLFDKKITNLKDLLPVLEQVQKTGKPLLIIAEDIEGEALATLVVNKLRGVLNISAVKAPGFGDRRKAMLEDIAILTGGTVISEELGRTLESASIADLGKAERILIDKDNTTIVNGAGKKDDIKARVDQIKAQIAVTSSDYDREKLQERLAKLSGGVAVIKVGAATETEMKEKKDRVDDALSATKAAVEEGIVIGGGAALIKAGNAVKENLKGDEKIGADIVKRALFAPLRQIAENAGFDAGVIANAVSINKEKAYGFDAACGEFVNMFEAGIIDPVKVERVALQNAVSVASLLLTTEATVSEIKEDKPAMPQMPDMGGGMGGMM

SEQ ID NO: 9200 - DNA, 1635 bp, Campylobacter curvus 525.92
  CDS (1)..(1635): transl_table=11
atggcaaaagaaattttttattcagacgatgctagaaaccgcctatacgagggcgtaaggaagctaaacgatgcagtcaaagtaactatggggccaagaggcagaaacgtcctaatccaaaaaagctttggcgctcctagtataacaaaagacggcgttagcgtggcaaaagaggtcgagctaaaagatactatcgagaacatgggtgcaagcctggtccgcgaagtagcaagcaagactaacgatcaagcgggtgacggcactacgactgcgaccgttttggctcatgcgatatttaaagaggggcttagaaacgttaccgcaggtgcaaatccgatcgaagtaaaacgcggcatggataaagaggtcgcggcgttgatagacgagctaaaaaatatcgctaagaaggtctcaggctcaaaagagatcgcgcagatcgctactatctcggcaaattctgacgagagcataggtaagctgatagctgatgcgatggagaaagtcggtaaagacggcgtaatcaccgtagaagaggctaaatctatcgaggatgaactaaacgttgtcgagggcatgcagtttgaccgcggatatttaagtccatatttcatcacaaatgccgagaaaatgcaggtcgagctaagcaatccatttatcttgctctttgataagaagatcacaaatttaaaggacctgctccctgtgctagagcaaattcaaaagaccggcaaaccgcttttgatagtcgctgaggatatcgagggcgaggctcttgctactttggtggtaaataaacttcgcggcgtgctaaacatctctgccgttaaagctcctggttttggcgaccgcagaaaagctatgctggaagatatagctatattaacaggtggtgaagtcatcagcgaagagctaggtagaacgctagagagcgctactttagaagatctcggtcaagcatcaagcgtggtgatcgataaggacaacacgactatcgtaaacggcgctggtgaaaaatcggcgatcgatgcaaggatcaatcaaataaaagcgcaaatcgccgaaactacgagtgattatgacaaagaaaagcttcaagagcgtttagcaaaactaagcggtggcgtagctgtcataaaagtaggtgctgcgacagagacagaaatgaaagagaaaaaagaccgcgtagatgacgctctaagtgcgactcgtgcagcggtagaagaaggtatagtcgttggcggcggttcggcgctgatccttgcctcaaaacgcgtaaaactagatctaagcggtgacgaagcgataggtgccgagatcgttagaagggcgttacgcgctccgcttcgccaaatcgctgaaaacgcgggatttgacgctggtgtggtaacaaatgccgtagaggtaagcagcgatgtgaattacggatttaacgcagttagcggcgaatatgtaaatatgtttgaagccggtatcatcgatccggtaaaagtcgagcgtgtagcacttcaaaatgccgtatctgtggcaagtttactattaacgacagaggctaccatcagcgaactaaaagaagacaagccaatgcctgcaatgcctgatatgggcggaatgggtggcatgggtggaatgatgtaa

SEQ ID NO: 9201 - protein, 544 aa, Campylobacter curvus 525.92
MAKEIFYSDDARNRLYEGVRKLNDAVKVTMGPRGRNVLIQKSFGAPSITKDGVSVAKEVELKDTIENMGASLVREVASKTNDQAGDGTTTATVLAHAIFKEGLRNVTAGANPIEVKRGMDKEVAALIDELKNIAKKVSGSKEIAQIATISANSDESIGKLIADAMEKVGKDGVITVEEAKSIEDELNVVEGMQFDRGYLSPYFITNAEKMQVELSNPFILLFDKKITNLKDLLPVLEQIQKTGKPLLIVAEDIEGEALATLVVNKLRGVLNISAVKAPGFGDRRKAMLEDIAILTGGEVISEELGRTLESATLEDLGQASSVVIDKDNTTIVNGAGEKSAIDARINQIKAQIAETTSDYDKEKLQERLAKLSGGVAVIKVGAATETEMKEKKDRVDDALSATRAAVEEGIVVGGGSALILASKRVKLDLSGDEAIGAEIVRRALRAPLRQIAENAGFDAGVVTNAVEVSSDVNYGFNAVSGEYVNMFEAGIIDPVKVERVALQNAVSVASLLLTTEATISELKEDKPMPAMPDMGGMGGMGGMM

SEQ ID NO: 9202 - DNA, 1653 bp, Parvibaculum lavamentivorans DS-1
  CDS (1)..(1653): transl_table=11
atggctaaggaagtcaaattcggccgcacagcccgcgagaagatgcttcgcggcgtcgacattctcgccgatgcggtaaaggtgacgctcggtccgaagggccgcaatgtggtcatcgaaaagtcgttcggttcgccgcgcaccacgaaagacggcgtgacggtcgccaaggaaatcgagcttgaagacaagttcgagaacatgggcgcccagatggtcaaggaagtcgcttccaagaccaacgacaccgccggcgacggcaccacgacggcgacggttctgacgcaggcgatcgttcgcgaaggcgcgaagtcggttgccgccggcatgaacccgatggacctgaagcgcggcatcgagattgccgtccgcaccgccgtcgaagacatcacgaagcgttcgaagaaggtgaagtcgaacgacgaagtcgcccaggtcggcacgatctcggccaatggcgaaagcgaaatcggcgccatgatcgcccaggcgatgagccgggtcggcaatgaaggcgtcatcacggtcgaggaagccaagtccctcgacaccgaactcgatgtcgtcgaaggcatgcagttcgaccgtggctatctctcgccctacttcatcaccaatgccgacaagatggtggtcgagctcgacgagccgctcatccttctccacgagaagaagctgaccagcctgcagccgatgctgccggtgctcgaagccgttgtgcagtcgggccgtccgctgctcatcatcgcggaagacatcgaaggcgaggcgcttgccacgctcgtggtcaacaagctgcgcggcggcctcaaggtcgctgccgtgaaggcgccgggcttcggcgatcgccgcaaggcgatgctcgaagatctcgccgttctctcgggcggccaggtcatctccgaagacctcggcatcaagcttgagtccgtgacgctcgacatgctcggcaaggccaagcgcgtttcgatcacgaaggacgacaccacgatcgtcgacggcgccggcaagaagaaggacatcgaagctcgcgttgcccagatcaagcggcagatcgaggacacgacgtccgactacgacaaggaaaagctgcaggaacgtctggcgaagctcgccggtggcgttgcggtgatcaaggtcggcggtgcgaccgaagccgaagtgaaggaacgcaaggaccgtgtcgacgacgcgctcaatgcgacccgcgccgcggttgaagaaggcatcgtccccggtggcggcacggcccttctcatggcgagcaaggccgtcggcaagctcgtcgaggacaatcgcgacatccaggcgggtatcaacatcatccgcagggccctcgaagcgccgatccgtcagatcgtcgagaatgccggcgtcgaaggttcgatcgtcgtgcagaaggtcctcgagtcgaagcaggccaatttcggcttcgacgcgcagaaggaagagtattgcgacctcgtcgccgccggcatcatcgacccgaccaaggtcgtgcgcacggcgcttcaggacgcagcctcgatcgccggcctcctcatcacgacggaagccatgatcgccgacgctccgaagaaggacaacggcgccgctgccggcatgcctggcggcatgggcggaatgggtggcatgggcggcatggacttctaa

SEQ ID NO: 9203 - protein, 550 aa, Parvibaculum lavamentivorans DS-1
MAKEVKFGRTAREKMLRGVDILADAVKVTLGPKGRNVVIEKSFGSPRTTKDGVTVAKEIELEDKFENMGAQMVKEVASKTNDTAGDGTTTATVLTQAIVREGAKSVAAGMNPMDLKRGIEIAVRTAVEDITKRSKKVKSNDEVAQVGTISANGESEIGAMIAQAMSRVGNEGVITVEEAKSLDTELDVVEGMQFDRGYLSPYFITNADKMVVELDEPLILLHEKKLTSLQPMLPVLEAVVQSGRPLLIIAEDIEGEALATLVVNKLRGGLKVAAVKAPGFGDRRKAMLEDLAVLSGGQVISEDLGIKLESVTLDMLGKAKRVSITKDDTTIVDGAGKKKDIEARVAQIKRQIEDTTSDYDKEKLQERLAKLAGGVAVIKVGGATEAEVKERKDRVDDALNATRAAVEEGIVPGGGTALLMASKAVGKLVEDNRDIQAGINIIRRALEAPIRQIVENAGVEGSIVVQKVLESKQANFGFDAQKEEYCDLVAAGIIDPTKVVRTALQDAASIAGLLITTEAMIADAPKKDNGAAAGMPGGMGGMGGMGGMDF

SEQ ID NO: 9204 - DNA, 1632 bp, Xanthobacter autotrophicus Py2
  CDS (1)..(1632): transl_table=11
atggctgccaaggacgtaaaattctccgttgatgcgcgcgacaaggttctgcgcggcgtcgacatcctcgcgaatgccgtgaaggtcaccctcggtcccaagggccgcaacgtggtgatcgagaagagcttcggcgccccccgcatcaccaaggacggtgtgtcggtggccaaggaaatcgagcttgaggacaagttcgagaacctcggtgcccagctggtgcgcgaagtcgcctccaagaccaatgatctggccggcgatggcaccaccaccgctaccgtgctggcccaggccatcgtccgcgagggcgccaaggcggttgccgccggcatgaaccccatggacctgaagcgcggcatcgacctcgccgtggacgccatcgtcaaggatctggcctccaactcgcgcaaggtgacctccaacgacgagatcgcccaggtcggcaccatctccgccaacggcgacgccgaggtcggtaagtttctcgccgaggccatgaagaaggtcggcaacgagggtgtcatcaccgtcgaggaagccaagaccgccgagaccgagctcgacgtggtcgagggcatgcagttcgaccgcggctacctctcgccctacttcgtgaccaacgccgacaagatgcgcgttgagttcgaggagccctacatcctcatcaacgagaagaagctctccggcctccaggaactgctgcccgtgctcgaggcggtggtgcagtcggcccgtccgctgctgatcatcgccgaggacgtggaaggcgaggcgctggccaccctcgtggtgaacaagctgcgcggcggcctgaaggtcgcggccgtgaaggcccccggcttcggcgatcgccgcaaggccatgctgcaggacatcgcgatcctgaccggcggcaccgtgatctccgacgatctcggcatcaagctcgacagcgtgaacctctccatgctcggccgcgccaagaaggtggtgatcgagaaggagaataccaccatcgtcgacggctccggcgagaaggccgagatcgaggcccgcatcgcccagatccgcgcccagatcgagaccaccacctccgactacgaccgtgagaaggcgcaggagcgtcttgccaagctcgccggcggcgtcgccgtggtgcgcgtgggcggctccacggaagtggaagtcaaggagaagaaggatcgcgtggacgacgccctgcacgccacccgcgctgcggtggaagaaggcatcgtccccggcggcggcgtggccctgctgcgctccatcaaggcgctcgaaggcctgaaggtcgacaatgccgaccagaagaccggcatcgagatcgtccgccgcgccatccaggctccggctcgccagatcgtcctcaacgcgggcgacgacggctccgtggtggtgggcaagatcctggagtcctcggactacagcttcggctacaacgcccagaccggtgaatatgtggacatggtgaaggccggcatcatcgaccccaccaaggtcgtgcgtaccgccctgcaggatgcggcctccgtgtccggcctgcttatcaccaccgaggcgctcatcgccgagctgccgaagaagaacgcccccgcggccccggccatgccgggcggcggcatggacttctga

SEQ ID NO: 9205 - protein, 543 aa, Xanthobacter autotrophicus Py2
MAAKDVKFSVDARDKVLRGVDILANAVKVTLGPKGRNVVIEKSFGAPRITKDGVSVAKEIELEDKFENLGAQLVREVASKTNDLAGDGTTTATVLAQAIVREGAKAVAAGMNPMDLKRGIDLAVDAIVKDLASNSRKVTSNDEIAQVGTISANGDAEVGKFLAEAMKKVGNEGVITVEEAKTAETELDVVEGMQFDRGYLSPYFVTNADKMRVEFEEPYILINEKKLSGLQELLPVLEAVVQSARPLLIIAEDVEGEALATLVVNKLRGGLKVAAVKAPGFGDRRKAMLQDIAILTGGTVISDDLGIKLDSVNLSMLGRAKKVVIEKENTTIVDGSGEKAEIEARIAQIRAQIETTTSDYDREKAQERLAKLAGGVAVVRVGGSTEVEVKEKKDRVDDALHATRAAVEEGIVPGGGVALLRSIKALEGLKVDNADQKTGIEIVRRAIQAPARQIVLNAGDDGSVVVGKILESSDYSFGYNAQTGEYVDMVKAGIIDPTKVVRTALQDAASVSGLLITTEALIAELPKKNAPAAPAMPGGGMDF

SEQ ID NO: 9206 - DNA, 1644 bp, Cronobacter sakazakii ATCC BAA-894
  CDS (1)..(1644): transl_table=11
atggcagctaaagacgtaaaattcggtaacgacgctcgtgtgaaaatgctccgcggcgtaaacgtactggcagacgcagtgaaagtcaccctgggcccgaaaggccgcaacgtggtgctggataaatctttcggtgcgccgaccatcaccaaagacggcgtgtccgtagcacgtgaaatcgaactggaagacaagttcgaaaacatgggcgcgcagatggtgaaagaagtggcctccaaagcgaacgacgcggcaggcgacggtaccaccactgcaaccgtactggcgcaggctatcatcaccgaaggcctgaaagctgttgcggcaggcatgaacccgatggatctgaaacgcggtatcgataaagcggttgttgccgctgttgaagagctgaaagcgctctccgtaccgtgctctgactctaaagctatcgctcaggtcggcaccatctccgctaactccgatgaaaccgtaggtaaactgattgccgaagcgatggagaaagtgggtaaagaaggcgttatcaccgttgaagaaggcaccggtctgcaggacgagctggatgtggttgaaggtatgcagttcgaccgcggctacctgtctccgtacttcatcaacaagccggaaactggcgctgttgagctggaaagcccgttcatcctgctggctgacaaaaaaatctccaacatccgcgaaatgctgccggttctcgaagccgtggctaaagcaggcaaaccgctgctgatcatcgctgaagatgttgaaggcgaagcactggcgaccctggtcgtgaacaccatgcgcggcatcgtgaaagtggctgcggtgaaagcaccgggcttcggcgaccgtcgtaaagctatgctgcaggatatcgcaatcctgactggcggtaccgttatctctgaagagatcggtatggagctggaaaaagcgaccctggaagatctgggtcaggcgaaacgcgttgttatcaacaaagacaccaccaccatcatcgatggcgtgggcgacgaatccgcaatccagggccgtgttggtcagatccgtcagcagatcgaagaagcgacctctgactacgaccgtgaaaaactgcaggagcgcgtagctaaactggctggcggcgttgcggttatcaaggttggcgctgcgaccgaagtggaaatgaaagagaagaaagcccgcgttgaagacgccctgcacgcaacccgtgctgcggtggaagaaggcgtggttgctggtggcggtgtagcgctggtgcgtgttgctgcgaaactgaccgaactgactggccagaacgaagaccagaacgtgggtatcaaagttgcgctgcgcgcaatggaagctccgctgcgtcagatcgtgtccaacgccggtgaagagccgtctgttgtcgcgaacaacgtgaaagctggcgacggtaactacggttacaacgcggcgaccgaagaatacggcaacatgatcgacatgggtatcctggatccgaccaaagtgacccgttctgcactgcagtacgcgtcttctgtggctggcctgatgatcaccaccgagtgcatggttaccgatctgccgaaagaagataaagccgacttaggcgctgcaggtatgggcggcatgggcggcatgggcggtatgatgtaa

SEQ ID NO: 9207 - protein, 547 aa, Cronobacter sakazakii ATCC BAA-894
MAAKDVKFGNDARVKMLRGVNVLADAVKVTLGPKGRNVVLDKSFGAPTITKDGVSVAREIELEDKFENMGAQMVKEVASKANDAAGDGTTTATVLAQAIITEGLKAVAAGMNPMDLKRGIDKAVVAAVEELKALSVPCSDSKAIAQVGTISANSDETVGKLIAEAMEKVGKEGVITVEEGTGLQDELDVVEGMQFDRGYLSPYFINKPETGAVELESPFILLADKKISNIREMLPVLEAVAKAGKPLLIIAEDVEGEALATLVVNTMRGIVKVAAVKAPGFGDRRKAMLQDIAILTGGTVISEEIGMELEKATLEDLGQAKRVVINKDTTTIIDGVGDESAIQGRVGQIRQQIEEATSDYDREKLQERVAKLAGGVAVIKVGAATEVEMKEKKARVEDALHATRAAVEEGVVAGGGVALVRVAAKLTELTGQNEDQNVGIKVALRAMEAPLRQIVSNAGEEPSVVANNVKAGDGNYGYNAATEEYGNMIDMGILDPTKVTRSALQYASSVAGLMITTECMVTDLPKEDKADLGAAGMGGMGGMGGMM

SEQ ID NO: 9208 - DNA, 1647 bp, Vibrio harveyi ATCC BAA-1116
  CDS (1)..(1647): transl_table=11
atggctgctaaagacgttaaatttggtaatgacgcacgagttaaaatgctagaaggcgtaaacgttctagctgacgcagtaaaagtaacactgggtcctaaaggtcgtaacgtagttctagacaaatcttttggtgcaccaacgatcactaaagatggtgtatcagtagcgcgtgaaattgaactggaagacaaattccagaacatgggcgcacaaatggttaaagaagttgcgtctaaagcaaacgacgcagcgggtgacggtacaacaacagcaaccgtactagcgcaagcaatcgtaaacgaaggtctaaaagcagttgcagcgggtatgaacccaatggaccttaagcgcggtatcgacaaagcagttatcgcagcggttgagcaactaaaagagctatctgttgagtgtaacgacactaaagcaatcgcacaggttggtactatctctgcgaactctgactcaagcgtaggtaacatcattgctgaagcaatggaaaaagttggccgcgacggtgttatcactgttgaagaaggtcaagcactacaagatgagctagacgtagtagaaggtatgcagttcgaccgcggttacctatctccttacttcatcaacaaccaagaagctggcagcgttgagctagaaaacccattcatccttctgatcgataagaaagtatcgaacatccgtgaacttcttccagcactagaagcagtagcaaaagcatctcgcccactactgatcatcgcagaagacgtagaaggtgaagcactagcaacactagttgtgaacaacatgcgtggcatcgttaaagtagcagcagtgaaagcgcctggtttcggtgaccgtcgtaaagcaatgctacaagacatcgctatcctaacgggcggtatcgtgatttctgaagaagtgggtctagagctagaaaaagtagcactagaagacctaggtcaagcgaagcgcgttgcaatcacaaaagaaaacacaaccatcatcgatggcatgggtgaagaagcaatgatccaaggtcgtgttgctcaaatccgtcagcaaatcgaagatgcaacttcagactacgacaaagagaaactacaagagcgcgttgctaagctagcaggcggtgttgcagtaatcaaagttggtgcagcaactgaagttgaaatgaaagagaagaaagaccgcgtagaagacgcactacacgcgactcgcgcagcggttgaagaaggcgtagttgctggtggtggtgttgcactaatccgcgctgcatctaagattgttgacctagaaggcgacaacgaagagcaaaacgttggtatccgcgttgcactacgtgcaatggaagcgccaatccgtcaaatcacgaagaacgcaggtgacgaagagtcagtagtagcgaacaacgtgaaagcgggtgaaggttcttacggctacaacgcagcgacaggcgaatacggcgacatgctagagatgggtatcctagatccaactaaagtaactcgtagcgcactacaattcgcagcatcagtagcaggtctaatgatcacaactgaagcgatggttactgacctaccacaaaaagacggcgcaggtatgcctgacatgggtggtatgggcggtatgggtggtatgggcggcatgatgtaa

SEQ ID NO: 9209 - protein, 548 aa, Vibrio harveyi ATCC BAA-1116
MAAKDVKFGNDARVKMLEGVNVLADAVKVTLGPKGRNVVLDKSFGAPTITKDGVSVAREIELEDKFQNMGAQMVKEVASKANDAAGDGTTTATVLAQAIVNEGLKAVAAGMNPMDLKRGIDKAVIAAVEQLKELSVECNDTKAIAQVGTISANSDSSVGNIIAEAMEKVGRDGVITVEEGQALQDELDVVEGMQFDRGYLSPYFINNQEAGSVELENPFILLIDKKVSNIRELLPALEAVAKASRPLLIIAEDVEGEALATLVVNNMRGIVKVAAVKAPGFGDRRKAMLQDIAILTGGIVISEEVGLELEKVALEDLGQAKRVAITKENTTIIDGMGEEAMIQGRVAQIRQQIEDATSDYDKEKLQERVAKLAGGVAVIKVGAATEVEMKEKKDRVEDALHATRAAVEEGVVAGGGVALIRAASKIVDLEGDNEEQNVGIRVALRAMEAPIRQITKNAGDEESVVANNVKAGEGSYGYNAATGEYGDMLEMGILDPTKVTRSALQFAASVAGLMITTEAMVTDLPQKDGAGMPDMGGMGGMGGMGGMM

SEQ ID NO: 9210 - DNA, 1647 bp, Citrobacter koseri ATCC BAA-895
  CDS (1)..(1647): transl_table=11
atggcagctaaagacgtaaaattcggtaacgacgctcgtgtgaaaatgctgcgcggcgtaaacgtactggcagacgcagtgaaagtgaccctcggtccgaaaggccgtaacgtggttctggataaatctttcggtgcgccgaccatcactaaagatggtgtttccgtagcgcgtgaaatcgagctggaagacaagttcgaaaacatgggcgcgcagatggtgaaagaagttgcctctaaagcgaacgacgcggcaggcgacggcaccaccaccgcgaccgtactggctcagtccatcatcactgaaggtctgaaagccgttgctgcgggcatgaacccgatggatctgaaacgtggtatcgacaaagcggttgctgctgcggttgaagaactgaaaaccctgtccgtaccgtgctctgattctaaagccattgctcaggttggtactatctccgctaactccgacgaaaccgtaggtaaactgatcgctgaagcgatggacaaagtcggtaaagaaggcgtgatcaccgttgaagacggtaccggtttgcaggatgagctggacgtggttgaaggtatgcagttcgaccgtggctacctgtctccttacttcatcaacaagccggaaactggcgcagtagaactggaaagcccgttcatcctgctggctgataagaaaatctctaacatccgcgaaatgctgccggttctggaagccgttgcgaaagcaggcaaaccgctgctgatcatcgctgaagatgtggaaggcgaagcgctggctacgctggtggttaacaccatgcgcggcatcgtgaaagtggcggcggttaaagcgccgggcttcggtgatcgtcgtaaagcgatgctgcaagatatcgcaaccctgaccggtggtactgttatctctgaagagatcggtatggagctggaaaaatctaccctggaagacctgggtcaggcaaaacgcgttgtgatcaacaaagacaccaccaccatcattgatggcgtgggtgaagagtctgcgatccagggccgtgtcactcagatccgtcagcagatcgaagaagccacttccgattacgaccgtgaaaaactgcaagagcgcgtagcgaaactggcaggcggtgttgcggttatcaaagttggcgctgcgaccgaagttgaaatgaaagagaaaaaagcacgcgttgaagatgccctgcacgcgacccgtgctgcggttgaagaaggcgtagttgccggtggtggcgttgcgctgattcgcgtcgcgtctaaaattgcggaactcaaaggccagaacgaagaccagaacgtgggtatcaaagttgcgctgcgcgcaatggaatccccgctgcgtcagatcgtgctgaactgcggcgaagaaccgtctgttgtggctaacaccgttaaaagcggcgacggcaactacggttacaacgcagcaaccgaagaatacggcaacatgatcgatatgggtatcctggacccgaccaaagtaacccgttctgctttgcagtacgcggcatccgtggctggtctgatgatcactaccgagtgcatggtaactgacctgccgaaaggcgatgctcctgacttaggcgcagccggtggcatgggcggtatgggtggaatgggcggcatgatgtaa

SEQ ID NO: 9211 - protein, 548 aa, Citrobacter koseri ATCC BAA-895
MAAKDVKFGNDARVKMLRGVNVLADAVKVTLGPKGRNVVLDKSFGAPTITKDGVSVAREIELEDKFENMGAQMVKEVASKANDAAGDGTTTATVLAQSIITEGLKAVAAGMNPMDLKRGIDKAVAAAVEELKTLSVPCSDSKAIAQVGTISANSDETVGKLIAEAMDKVGKEGVITVEDGTGLQDELDVVEGMQFDRGYLSPYFINKPETGAVELESPFILLADKKISNIREMLPVLEAVAKAGKPLLIIAEDVEGEALATLVVNTMRGIVKVAAVKAPGFGDRRKAMLQDIATLTGGTVISEEIGMELEKSTLEDLGQAKRVVINKDTTTIIDGVGEESAIQGRVTQIRQQIEEATSDYDREKLQERVAKLAGGVAVIKVGAATEVEMKEKKARVEDALHATRAAVEEGVVAGGGVALIRVASKIAELKGQNEDQNVGIKVALRAMESPLRQIVLNCGEEPSVVANTVKSGDGNYGYNAATEEYGNMIDMGILDPTKVTRSALQYAASVAGLMITTECMVTDLPKGDAPDLGAAGGMGGMGGMGGMM

SEQ ID NO: 9212 - DNA, 1635 bp, Campylobacter concisus 13826
  CDS (1)..(1635): transl_table=11
atggcaaaagaaattttttactctgatgatgcaagaaatcgcctatacgagggcgtaaaaaaactaaatgacgctgtaaaagtgacaatgggaccaagaggcagaaatgtccttatccaaaagagctttggcgctccaaacatcacaaaagacggcgttagcgtggctaaagaggttgagctaaaagatactatcgaaaacatgggtgcaagcctagttagagaagtagcaagcaaaacaaacgaccaagcaggcgacggcactacaacagcgactgtgctagctcacgcgatatttaaagagggtcttagaaatgtaactgctggcgcaaatcctatcgaagtaaaacgtggcatggataaagaagtagcagctcttatagatgcactaaaaaacatctctaaaaaagtttctggctcaaaagagatcgctcagatcgctactatctctgcaaactcagatgagagcatcggcaaacttatcgctgatgcgatggaaaaagttggcaaagatggcgtcataacagtagaagaggcaaagtctatccaagacgagctaagcgttgttgagggtatgcagtttgaccgcggatatctaagcccatacttcatcacaaaccctgaaaagatgcaagttgagctaagcaatccatttatattgctatttgacaagaagatcacaaatttaaaagacctgcttccagtgcttgagcaagtacaaaagagtggcaaaccacttctaatcattgctgaagatatcgaaggcgaggcacttgcaacgcttgttgtaaataaacttcgtggcgtgctaaacatctcagctgttaaagctcctggctttggcgacagaagaaaagctatgcttgaagatatcgctatcttaacaggtggtgaagttatcagcgaagagctaggcagaacacttgagagcgctactataaacgatcttggacaagcttcaagcgtagttatcgacaaagataacactactatcgtaaatggtgcaggcgagaagtcagcgatcgacgctagaataactcagataaaagcgcaaatcgccgagacaacaagcgactatgacaaagaaaaacttcaagagcgccttgcaaaactaagcggtggcgtggcagttatcaaagtaggtgctgcgactgagactgagatgaaagagaaaaaagaccgtgtagatgacgctctaagcgctactcgtgcagctgttgaagagggcatcgtagtaggtggcggttcagctcttatccttgcttcaaagagcgtaaatttaaatttacaaggtgacgaggcaatcggtgctgagatcgttagaagagcgcttcgtgctccacttcgccaaatcgctgagaacgctggctttgatgctggcgtagtagcaaacgcagttgagacaagcaaagatgcaaattttggctttaacgctgcaactggcgaatatgtaaatatgtttgaagctggcatcatcgacccagttaaagttgagagagttgcgcttcaaaatgctgttagtgtggctagtttgctactaacaactgaagcaactatcagcgagataaaagaagaaaaagcaatgcctgcaatgcctgatatgggcggaatgggtggcatgggcggcatgatgtag

SEQ ID NO: 9213 - protein, 544 aa, Campylobacter concisus 13826
MAKEIFYSDDARNRLYEGVKKLNDAVKVTMGPRGRNVLIQKSFGAPNITKDGVSVAKEVELKDTIENMGASLVREVASKTNDQAGDGTTTATVLAHAIFKEGLRNVTAGANPIEVKRGMDKEVAALIDALKNISKKVSGSKEIAQIATISANSDESIGKLIADAMEKVGKDGVITVEEAKSIQDELSVVEGMQFDRGYLSPYFITNPEKMQVELSNPFILLFDKKITNLKDLLPVLEQVQKSGKPLLIIAEDIEGEALATLVVNKLRGVLNISAVKAPGFGDRRKAMLEDIAILTGGEVISEELGRTLESATINDLGQASSVVIDKDNTTIVNGAGEKSAIDARITQIKAQIAETTSDYDKEKLQERLAKLSGGVAVIKVGAATETEMKEKKDRVDDALSATRAAVEEGIVVGGGSALILASKSVNLNLQGDEAIGAEIVRRALRAPLRQIAENAGFDAGVVANAVETSKDANFGFNAATGEYVNMFEAGIIDPVKVERVALQNAVSVASLLLTTEATISEIKEEKAMPAMPDMGGMGGMGGMM

SEQ ID NO: 9214 - DNA, 1647 bp, Serratia proteamaculans 568
  CDS (1)..(1647): transl_table=11
atggcagctaaagacgtaaaattcggcaatgacgctcgcgtgaaaatgctccgcggtgtgaatgttctcgctgatgcagtaaaagtgaccctgggcccgaaaggccgtaacgtagtgctggataaatccttcggcgctcctaccatcactaaagatggcgtatctgttgctcgtgagatcgaactggaagacaagttcgaaaacatgggtgcgcagatggtgaaagaagttgcctctaaagcgaacgacgctgcgggcgacggtaccaccactgcaaccgtactggctcaatccatcatcaccgaaggcctcaaagcagtggctgccggcatgaacccgatggatctgaagcgcggtatcgacaaagcggttatcgccgctgttgaagaactgaaaaaactgtccgtaccttgctccgactccaaagccattgctcaggtaggtaccatctctgcaaactccgacgaaaccgtgggtaaactgattgcagaagcgatggaaaaagtgggcaaagaaggcgttatcaccgttgaagaaggcaccggcctgcaagacgagctggacgttgttgaagggatgcagttcgaccgcggttacctgtctccgtacttcatcaacaagccagaaaccggttctatcgagctggaaagcccgttcatcctgctggctgacaaaaaaatctccaacatccgtgaaatgctgccagtactggaagccgtggcgaaagccggcaaaccactgctgatcattgctgaagatgttgaaggcgaagcgctggctaccctggtggttaacaccatgcgcggcatcgtgaaagtggctgcggttaaagcacctggcttcggcgaccgtcgtaaagccatgctgcaggacatcgctaccctgactggcggtaccgttatctctgaagagatcggcctggagctggaaaaaactaccctggaagatctgggtacggccaaacgcatcgttatcaacaaagacaccactatcatcatcgatggcaatggtgaagaacctgcgattcagggccgtgtgtcccagatccgtcagcagatcgaagaagcaacttctgattacgaccgtgaaaaactgcaagagcgcgtagcaaaactggctggcggcgttgcggtaatcaaagtcggtgctgctaccgaagttgaaatgaaagagaagaaagctcgcgttgaagatgctctgcacgcaacccgtgctgcagtagaagaaggcgtggttgctggtggtggtgttgcactgattcgtgcagcgtccaaactgagcgaactgcgtggcgtgaacgaagatcagaacgtgggtatcaaagttgcgctgcgcgcaatggaatcaccactgcgtcagatcgttctgaactgcggcgaagagccatctgttgttgccaacaccgtgaaagcgggcgaaggtaactacggttacaacgcagcaactgaagaatacggcgacatgatcgcgatgggtatcctggatccaaccaaagtaacccgttctgctctgcagtacgcggcttctgtggctggcctgatgatcaccaccgagtgcatggtaaccgacctgccaaaaggcgacgcacctgatttaggtggcgctggcggcatgggtggcatgggcggcatgggcggcatgatgtaa

SEQ ID NO: 9215 - protein, 548 aa, Serratia proteamaculans 568
MAAKDVKFGNDARVKMLRGVNVLADAVKVTLGPKGRNVVLDKSFGAPTITKDGVSVAREIELEDKFENMGAQMVKEVASKANDAAGDGTTTATVLAQSIITEGLKAVAAGMNPMDLKRGIDKAVIAAVEELKKLSVPCSDSKAIAQVGTISANSDETVGKLIAEAMEKVGKEGVITVEEGTGLQDELDVVEGMQFDRGYLSPYFINKPETGSIELESPFILLADKKISNIREMLPVLEAVAKAGKPLLIIAEDVEGEALATLVVNTMRGIVKVAAVKAPGFGDRRKAMLQDIATLTGGTVISEEIGLELEKTTLEDLGTAKRIVINKDTTIIIDGNGEEPAIQGRVSQIRQQIEEATSDYDREKLQERVAKLAGGVAVIKVGAATEVEMKEKKARVEDALHATRAAVEEGVVAGGGVALIRAASKLSELRGVNEDQNVGIKVALRAMESPLRQIVLNCGEEPSVVANTVKAGEGNYGYNAATEEYGDMIAMGILDPTKVTRSALQYAASVAGLMITTECMVTDLPKGDAPDLGGAGGMGGMGGMGGMM

SEQ ID NO: 9216 - DNA, 1635 bp, Arcobacter butzleri RM4018
  CDS (1)..(1635): transl_table=11
atggcaaaagagattttatttagtgataatgcaagaaatagattatattcaggtgttgaaaaattagctgatgcagttaaagttacaatgggaccaagaggaagaaatgttttattacaaaaatcatttggtgctcctacaattacaaaagatggtgtaagtgttgctagagaaattgaattaaaagatactttagaaaatatgggagctcaacttgtaaaagaagtagcttcaaaaacaaatgacgaagcaggagatggaacaacaactgcaactgttttagcacattctattttcaaagaagggcttagaaatgtaacagcaggtgcaaatccaatatctttaaaaagaggaatggataaagcttgcgaagctattttagctgaacttaaaaaatcttcaaaagttgtagcaaataaaacagagattgaacaagttgctacaatctcagcaaattcagatagtgctattggaaaaatgatagctgaagctatggataaagttggaaaagatggtgttatcactgttgaagaagcaaaaggtatttctgatgagttagatgttgttgaaggtatgcaatttgatagaggatatttatctccatattttgtaacaaatcctgaaaaaatgattgcagagtttaataacccattcattttattatatgacaaaaaaatctcttcattaaaagagatgttaccaattttagaatcagtaaatcaatcaggaagacctttagtaattattgcagaagatgtagatggtgaagcattagcaacactggtagtaaatagattaagaggttcattacatattgctgctgttaaagctcctggatttggagatagaagaaaagctatgttagaagatattgcagttttaactggtggaactgtaatttcagaagagatgggaatgaaacttgaaacagctgaatttagttgtttaggaactgcttcaaaaatcgtaattgacaaagacaatacaacaatcgttgatggaaatggtgataatgaaagagttgttgcaagagtaaatcaaattaaagcagaaatatcaaatacaacaagtgattatgatagagaaaaattacaagaaagattagcaaaactttctggtggagttgcagttattaaagttggagctgcaacagagactgaaatgaaagagaaaaaagacagagttgatgatgctttaagtgcaacaagagctgctgttgaagaaggtattgtaattggtggaggagctgctttaattaaagcttctaaaaaagtaaatcttgatttaactggtgatgaaagaattggagcagatattgttttaagagctatttcagcaccattaaaacaaattgcaattaatgctggatttgatgcaggagttgttgcaaatgaagttgaaaaatcatcaaatgaaaatttaggatttaatgcagcaacaggtgaatatgtagatatgtttgaagctggaattgttgatcctgcaaaagttgaaagagttgctatgcaaaatgctgtttcagtagcttcacttttacttacaactgaagcaactgtaagtgatataaaagaagataaaccagcaatgccttctatgccagacatgggtggaatgggaatgccaggaatgatgtaa

SEQ ID NO: 9217 - protein, 544 aa, Arcobacter butzleri RM4018
MAKEILFSDNARNRLYSGVEKLADAVKVTMGPRGRNVLLQKSFGAPTITKDGVSVAREIELKDTLENMGAQLVKEVASKTNDEAGDGTTTATVLAHSIFKEGLRNVTAGANPISLKRGMDKACEAILAELKKSSKVVANKTEIEQVATISANSDSAIGKMIAEAMDKVGKDGVITVEEAKGISDELDVVEGMQFDRGYLSPYFVTNPEKMIAEFNNPFILLYDKKISSLKEMLPILESVNQSGRPLVIIAEDVDGEALATLVVNRLRGSLHIAAVKAPGFGDRRKAMLEDIAVLTGGTVISEEMGMKLETAEFSCLGTASKIVIDKDNTTIVDGNGDNERVVARVNQIKAEISNTTSDYDREKLQERLAKLSGGVAVIKVGAATETEMKEKKDRVDDALSATRAAVEEGIVIGGGAALIKASKKVNLDLTGDERIGADIVLRAISAPLKQIAINAGFDAGVVANEVEKSSNENLGFNAATGEYVDMFEAGIVDPAKVERVAMQNAVSVASLLLTTEATVSDIKEDKPAMPSMPDMGGMGMPGMM

SEQ ID NO: 9218 - DNA, 1677 bp, Acaryochloris marina MBIC11017
  CDS (1)..(1677): transl_table=11
atggccaaacatgtagtatttgatgaagaatcgcgtcgcgctcttgagcgtggtgtgaattctctggcagatgccgtacgaattacattgggacctaaaggtcgcaatgtggttctggaaaagaaattcggagcaccccaaattattaatgatggggtgaccattgcgaaggaagttgagctggaagatccgttggagaatgcgggtgcacagctgatgcgtgaagtcgcttccaaaaccaatgatgtcgcgggtgatggtaccactaccgctacagttctggcccaagctttgattcgcgaaggtttgaagaatgtggctgctggtgctaaccccgtggcccttcgcaaagggattgataagacgattgatgccttagtgaaagagatcgaagccaagtcgaagcccgttgccggagatgcgatcgcacaagtggcaaccatctctgccgggaacgataccgaagtcggtcaaatgattgcccaagccatggataaggtgggcaaagatggcgtcattaccgtagaagaatccaagtccctcgccaccgaaatggaaattgtggaagggatgcaaatcgatcggggttatatctctccttactttgtgactgatgcagaacgcatggttgctgagatcgaaaatgcccgcttgctgatcgttaacaagaaaatcagttctcttcaagatctcgtcggtatcctggagcaagttgcccgtgctggacagcctctcctaattattgctgaagatctagaaggagaagccctagccacgttggtggtgaacaagctgcggggtgtccttaatgttgtggctatcaaggctcctggttttggtgagcgccgccaagccatgcttcaagacattgccgtcctcaccggtggacaggtcatttctgaagatgtgggtttaaccctcgacaaagttgatttagagatgttggggacggctcgtaaggtcaccatcagcaaagacaacaccacgattgtgtcggaagcagccaatgcaggtgatgtcggcaagcgagtagagcagctccgtcgccagttggatgaaaccgattctgagtacgacaaagaaaagctgcaagagcggattgctaagctggcagggggcgttgctgtcatcaaagtaggtgctgcaaccgaaaccgagcttaaggatcgtaaattgcgcatcgaagatgcgctcaatgcaacgaaagcagccgtagctgaagggatcgttcctggcggtggcaccaccctgattcatctcaccaaaaccattgagagtgttaaagctcaattgaaagatgaagaaaaagtcggtgcagatctcgtgggtattgcgttagaagcgcctctcactcaaattgcagacaatgctggtaaagaaggcgctgtcgttgtagagaaagtccgtgatgcggacttcagctatggctataacgccatgactgacacctacgaagatatgattgctgccggagtcgttgatcctgcaaaggtggttcgttcgggcctccaaaatgcggggtcgattgctggcatggtgctcaccactgaagccttagtagtggataagcctgaacctgcaggtgctgctgcgcccgatatgggcggcatgggcggcatgggtggcatgggcggcatgggcggcatgggtggcatgggcggcatgggcatgatgtaa

SEQ ID NO: 9219 - protein, 558 aa, Acaryochloris marina MBIC11017
MAKHVVFDEESRRALERGVNSLADAVRITLGPKGRNVVLEKKFGAPQIINDGVTIAKEVELEDPLENAGAQLMREVASKTNDVAGDGTTTATVLAQALIREGLKNVAAGANPVALRKGIDKTIDALVKEIEAKSKPVAGDAIAQVATISAGNDTEVGQMIAQAMDKVGKDGVITVEESKSLATEMEIVEGMQIDRGYISPYFVTDAERMVAEIENARLLIVNKKISSLQDLVGILEQVARAGQPLLIIAEDLEGEALATLVVNKLRGVLNVVAIKAPGFGERRQAMLQDIAVLTGGQVISEDVGLTLDKVDLEMLGTARKVTISKDNTTIVSEAANAGDVGKRVEQLRRQLDETDSEYDKEKLQERIAKLAGGVAVIKVGAATETELKDRKLRIEDALNATKAAVAEGIVPGGGTTLIHLTKTIESVKAQLKDEEKVGADLVGIALEAPLTQIADNAGKEGAVVVEKVRDADFSYGYNAMTDTYEDMIAAGVVDPAKVVRSGLQNAGSIAGMVLTTEALVVDKPEPAGAAAPDMGGMGGMGGMGGMGGMGGMGGMGMM

SEQ ID NO: 9220 - DNA, 1644 bp, Azorhizobium caulinodans ORS 571
  CDS (1)..(1644): transl_table=11
atggctgccaaagaagtcaagttcgccggcgaagcccgcgagaagatgctgcgcggcgtggacatcctcgccaacgcggtgaaggtcaccctcggccccaagggccgcaacgtggtgatcgagaagtccttcggcgccccgcgcatcaccaaggacggcgtgtccgtcgccaaggaaatcgagctcgaggacaagttcgagaacctcggcgcccagctggtgcgcgaagtcgcctccaagaccaatgacctcgccggcgacggcaccaccaccgccacggtgctggcccaggccatcgtcaaggaaggcgccaaggcggttgccgccggcatgaacccgatggacctgaagcgcggcatcgacctcgccaccgccgctgcggtgaaggacatccaggcccgcgccaagaaggtctcctcctccgccgaggtggcccaggtcggcaccatttccgccaatggcgacagctccatcggcgagatgatcgccggcgcgatgcagaaggtcggcaacgagggtgtcatcaccgtcgaggaagccaagaccgccgagaccgagctcgaagtggtcgagggcatgcagttcgaccgcggctatctctctccctatttcatcacgaatgcggagaagatgatcgccgacctcgaagatcccttcctgctgatcttcgagaagaagctctccggcctccagccgatcctcccggtccttgaggccgtggtgcagtccggcaagccgctcgtcatcgtggccgaggacgtcgagggcgaggctctggccaccctcgtggtcaacaagctgcgcggcggcctcaaggtcgcggccgtgaaggctcccggcttcggtgaccgtcgcaaggccatgctcgaggatatcgccatcctcaccggcggtcaggtgatctccgaagatctcggcatcaagctcgagaacgtgacgctggcccagctcggccgcgccaagaaggtcatcctcgagaaggaaaagaccacgatcgtcgacggcgtcggcgagaaggcggagatcgaggcccgcgtggcgcagatcaaggcgcagatcgaggagacctcctcggactacgaccgtgagaagctccaggagcgtctggccaagctcgcgggcggcgttgcggtcatccgcgtcggcggctccacggaagtggaagtcaaggagaagaaggaccgcgtggacgacgcgctgaacgccacccgcgctgcggtggaagaaggcatcgtccctggtggcggcgtggccctgctgcgcgccaagaaggccgtggaagccctctcctccgagaaccccgacatcgccgccggcatcaagatcgtgctgcgcgcccttgaggccccgatccgccagatcgccgagaactccggcgtggaaggctccatcgtggtgggcaaggtgctcgaaagcgaaggcaatttcggcttcaacgcccagaccgagcagtatgtggacctcgtcgccgaaggcgtcgtcgacccggccaaggtcgtgcgcaccgccctccaggacgcctcttccgtggccagcctgctggtgaccaccgaggcgctcatcgccgagctgccgaagaaggacgccggcatgcccgcgatgccgggcggcggcatgggcggcatgggcggcatggacttctga

SEQ ID NO: 9221 - protein, 547 aa, Azorhizobium caulinodans ORS 571
MAAKEVKFAGEAREKMLRGVDILANAVKVTLGPKGRNVVIEKSFGAPRITKDGVSVAKEIELEDKFENLGAQLVREVASKTNDLAGDGTTTATVLAQAIVKEGAKAVAAGMNPMDLKRGIDLATAAAVKDIQARAKKVSSSAEVAQVGTISANGDSSIGEMIAGAMQKVGNEGVITVEEAKTAETELEVVEGMQFDRGYLSPYFITNAEKMIADLEDPFLLIFEKKLSGLQPILPVLEAVVQSGKPLVIVAEDVEGEALATLVVNKLRGGLKVAAVKAPGFGDRRKAMLEDIAILTGGQVISEDLGIKLENVTLAQLGRAKKVILEKEKTTIVDGVGEKAEIEARVAQIKAQIEETSSDYDREKLQERLAKLAGGVAVIRVGGSTEVEVKEKKDRVDDALNATRAAVEEGIVPGGGVALLRAKKAVEALSSENPDIAAGIKIVLRALEAPIRQIAENSGVEGSIVVGKVLESEGNFGFNAQTEQYVDLVAEGVVDPAKVVRTALQDASSVASLLVTTEALIAELPKKDAGMPAMPGGGMGGMGGMDF

SEQ ID NO: 9222 - DNA, 1629 bp, Azorhizobium caulinodans ORS 571
  CDS (1)..(1629): transl_table=11
atggctgccaaggacgtaaaattcgccggtgatgcccgcgagaagatgctgcgcggcgtggacatcctcgccaatgcggtaaaggtcaccctcggccccaagggccgcaacgtcgtgatcgagaagagcttcggcgccccgcgcatcaccaaggacggcgtttccgtcgccaaggagatcgagctcgaggacaagttcgagaacctcggcgcccagctggtgcgcgaagtcgcctccaagaccaacgacctcgccggtgacggcaccaccaccgccacggtgctggcccaggccatcgtcaaggaaggttccaaggcggttgccgccggcatgaacccgatggacctgaagcgcggcatcgacctcgcggtcgacgccatcgtcaaggacctcgccgccaaggccaagaaggtgacctcgaacgccgagatcgcccaggtcggcaccatctccgccaatggcgacgccgatgtcggcaagttcctcgccgaggccatgcagaaggtcggcaacgagggtgtcatcaccgtcgaggaagccaagaccgccgagaccgagctcgaagtggtcgagggcatgcagttcgaccgcggctacctctcgccctacttcgtgaccaacgccgagaagatgcgcgttgagttcgaggatccctacatcctcatccacgagaagaagctctccaacctgcaggaactcctcccggtcctcgaggccgtggtgcagtccggcaagccgctggtgatcgtggccgaggacgtcgagggcgaggctctggctaccctcgtggtcaacaagctgcgcggcggtctcaaggttgcggccgtgaaggctccgggcttcggcgaccgccgcaaggccatgctgcaggacatcgcgatcctgaccggcggccaggcgatctcggaagacctcggcatcaagctcgagaacgtgaacctctccatgctcggccgcgccaagaaggtggtgatcgagaaggagaacaccacgatcgtcgacggcaatggcgagaaggccgacatcgaggcccgcgtcgcccagatcaaggcgcagatcgaggagaccacctcggactacgaccgtgagaagctccaggagcgtctggccaagctcgcgggcggcgtcgcggtgatccgcgtcggcggtgcgaccgaggtcgaggtgaaggagaagaaggaccgcgttgacgacgccctgcacgccacccgcgctgcggtggaagaaggcattgtccccggcggtggcgttgccctgctccgcgccatcaaggtgctggaaggcctgaaggtcgagaacaccgatcagaagaccggcatcgacatcgtgcgtcgcgccatccaggctccggcccgccagatcgtcgccaacgctggcgatgacggctcggtcgtggtcggcaagatcctcgagaacgagacctacaccttcggctacaacgcccagacgggcgagtatgtggacatggtggcttcgggcatcatcgacccggccaaggtcgtgcgcacggctctccaggacgcggcctccatctcggctctgatcatcaccaccgaggccctcgtggtcgagctgccgaagaaggctgctgcggctccggccatgccgggcggtggcatggacttctga

SEQ ID NO: 9223 - protein, 542 aa, Azorhizobium caulinodans ORS 571
MAAKDVKFAGDAREKMLRGVDILANAVKVTLGPKGRNVVIEKSFGAPRITKDGVSVAKEIELEDKFENLGAQLVREVASKTNDLAGDGTTTATVLAQAIVKEGSKAVAAGMNPMDLKRGIDLAVDAIVKDLAAKAKKVTSNAEIAQVGTISANGDADVGKFLAEAMQKVGNEGVITVEEAKTAETELEVVEGMQFDRGYLSPYFVTNAEKMRVEFEDPYILIHEKKLSNLQELLPVLEAVVQSGKPLVIVAEDVEGEALATLVVNKLRGGLKVAAVKAPGFGDRRKAMLQDIAILTGGQAISEDLGIKLENVNLSMLGRAKKVVIEKENTTIVDGNGEKADIEARVAQIKAQIEETTSDYDREKLQERLAKLAGGVAVIRVGGATEVEVKEKKDRVDDALHATRAAVEEGIVPGGGVALLRAIKVLEGLKVENTDQKTGIDIVRRAIQAPARQIVANAGDDGSVVVGKILENETYTFGYNAQTGEYVDMVASGIIDPAKVVRTALQDAASISALIITTEALVVELPKKAAAAPAMPGGGMDF

SEQ ID NO: 9224 - DNA, 1653 bp, Desulfococcus oleovorans Hxd3
  CDS (1)..(1653): transl_table=11
atggctggaaaagagattaaatattcaacaaaggcacgtgaagccatgcttgcgggtgtcaggaccctggccgacgcagttgcggtaacactgggcccccggggccggaatgtggtgattgaaaagtcatggggatcccccacggtcaccaaggacggcgttaccgtggcaaaagagatcgaactggaagacaagttcgagaacatgggcgcccagatggtaaaagaggtcgccagcaaaaccagcgacaccgccggtgacggcaccaccaccgccaccgtgctggcccgggccatttacgaggaaggccagaagctggtggccgccggcaacaaccccatggccatcaagcgcggtatcgacaaggcctgtgaagtggcggtcaaggagcttgccggcatgagcaagcccaccaagaaccagcgcgaaatcgcccaggtcggcaccatctccgccaacagcgacgagaccatcggcaatatcattgccgaggccatggaaaaggtcggcaaggaaggtgtcatcaccgtggaagaggccaagtccatggacaccaccctggacgtggtggaaggtatgcagttcgaccgcggttatctttccccctattttgttaccgatgctgaaaagatggtggtctccctggagaacgcctatatcctgatcaacgagaagaagctgtccaacatgaaggagctgttgcccattctggagcagaccgccaaggcgggccggcccctgctgatcattgccgaagatattgagggcgaagccctggccaccctggtggtcaacaagctgcgcggcaccctgaacgtggccgcggtcaaggccccgggtttcggcgacagaagaaaggccatgctcgaggatatcgctactctcaccggcggccaggtggtttccgaggatgtgggcatcaatctggaaggcatcaccctgggcgacctgggacatgccaagcgcatcaccatagacaaggataacaccaccatcgtggacggtgccggcaaaaaggccgacatcgagggccgcgtcaagcagattcgcgcccagatcgaagacaccacttccgattacgaccgggagaagcttcaggagcggctggccaagctggtgggcggtgtggccgtcattaacgtgggcgccgccaccgagactgaaatgaaggaaaagaaagcccgggtggaagacgcgctcaacgctacccgcgcggccgtggaagagggcgttctgcccggcggcggcgtggccctggtgcggtgtctggacgcactttccaagatcaagatcaagtccgaggagaagctgggcgtcaaggtggtgatgcgggccattgaagaacccctgcgccggatcgccaacaacgccggcgtggaaggctccgtggtgatcgaaaaggtcaagaacgaaaccggcagcttcggttacaacgcagccaccggcgactatggcgatctgattgccgccggtgtcattgatcccaccaaggtggtgcggttcgccctgcagaacgcgtgcagcgttgcctccgtgatgctgaccaccgaggccatgatcgccgagaaaccctccaaggaagagccggcggccatgccgggcggcggcatgggtggcatgggcggtatgggtggcatgggcggcatgatgtaa

SEQ ID NO: 9225 - protein, 550 aa, Desulfococcus oleovorans Hxd3
MAGKEIKYSTKAREAMLAGVRTLADAVAVTLGPRGRNVVIEKSWGSPTVTKDGVTVAKEIELEDKFENMGAQMVKEVASKTSDTAGDGTTTATVLARAIYEEGQKLVAAGNNPMAIKRGIDKACEVAVKELAGMSKPTKNQREIAQVGTISANSDETIGNIIAEAMEKVGKEGVITVEEAKSMDTTLDVVEGMQFDRGYLSPYFVTDAEKMVVSLENAYILINEKKLSNMKELLPILEQTAKAGRPLLIIAEDIEGEALATLVVNKLRGTLNVAAVKAPGFGDRRKAMLEDIATLTGGQVVSEDVGINLEGITLGDLGHAKRITIDKDNTTIVDGAGKKADIEGRVKQIRAQIEDTTSDYDREKLQERLAKLVGGVAVINVGAATETEMKEKKARVEDALNATRAAVEEGVLPGGGVALVRCLDALSKIKIKSEEKLGVKVVMRAIEEPLRRIANNAGVEGSVVIEKVKNETGSFGYNAATGDYGDLIAAGVIDPTKVVRFALQNACSVASVMLTTEAMIAEKPSKEEPAAMPGGGMGGMGGMGGMGGMM

SEQ ID NO: 9226 - DNA, 1644 bp, Dinoroseobacter shibae DFL 12
  CDS (1)..(1644): transl_table=11
atggctgctaaagacgtcaaattcgacatcgacgcccgcaaccgcatgctcaagggtgtcaacatcctcgcagacgcggtgaaggtgaccctgggccccaagggccgcaacgtggttctggacaagagcttcggcgcgccgcgcatcaccaaggacggtgtctccgtcgccaaggaaatcgaactggaagacaagttcgagaacatgggcgcgcagatggtcaaggaagtcgcctcgcgcaccaatgacgaggccggcgacggcaccacaaccgcgaccgtgctggcgcaagccatcgtcaaggaaggcatgaagtcggttgccgcgggcatgaacccgatggacctcaagcgcgggatcgacctggcgacctccaaggttgtcgaggcgatcaaatccgccgcccgtcccgtgaacgacagcgccgaagtggcgcaggtcggcaccatctccgccaacggcgagagcgagatcggccagcagatcgcggatgcgatgcaaaaggttggcaacgagggtgtcatcaccgtcgaggagaacaagggcctggagaccgagaccgacgtggtcgagggcatgcagttcgaccgtggctatctgagcccctatttcgtgaccaaccccgacaagatgaccaccgagttggaagacgcgatcatcctgctgcacgagaagaagctctcgtcgctgcagccgatggtgccgctgcttgagtcggtgatccagtccggcaagccgctgctgatcatcgcggaagacgtggaaggcgaagcgctcgccaccctcgtggtcaacaagctgcgcggcggtctgaagatcgcggccgtcaaggcaccgggcttcggcgatcgtcgcaaggccatgctgcaggacatcgcgatcctgaccggtggccaggtgatctcggaagacctcggcatgaagctcgagtccgtgaccatcgacatgctgggttccgccaagcgcgtgtcgatcaccaaggacgagaccaccatcgtcgacggcgccggtgccaaggccgagatcgaagcccgcgtggcccagatccgcaaccagatcgaggagaccacctcggattacgaccgtgagaagctgcaggagcgtgtggccaagctcgccggtggtgtggctgtcatccgcgtcggcggcatgaccgaggtcgaagtgaaagagcgcaaggaccgtgtggacgatgcgctaaacgcgacccgcgcggctgtgcaggaaggcatcgtcgtcggcggcggtgtggccctgatccaggcggccaagcatctcgacggtctggaaggcgcgaacaacgaccagaacatcggcatcaacatcgtgcgcaaggcgctggaagctccgctgcgccagatcgccgagaacgcaggtgtcgacgggtccgtcgtggccggcaagatccgcgaaagcagtgacctggccttcgggttcaacgcgcagaccgaagaatatggcgacatgttcaagttcggtgtgatcgacccggccaaggtggtgcgcaccgcgctgcaggatgcggcctccatcgccggtctgctgatcaccaccgaagcaatggtggccgacaagcccgccaaggaaggtgccggcgccggtggcggcatgcccgacatgggcggcatgggcggcatgatgtaa

SEQ ID NO: 9227 - protein, 547 aa, Dinoroseobacter shibae DFL 12
MAAKDVKFDIDARNRMLKGVNILADAVKVTLGPKGRNVVLDKSFGAPRITKDGVSVAKEIELEDKFENMGAQMVKEVASRTNDEAGDGTTTATVLAQAIVKEGMKSVAAGMNPMDLKRGIDLATSKVVEAIKSAARPVNDSAEVAQVGTISANGESEIGQQIADAMQKVGNEGVITVEENKGLETETDVVEGMQFDRGYLSPYFVTNPDKMTTELEDAIILLHEKKLSSLQPMVPLLESVIQSGKPLLIIAEDVEGEALATLVVNKLRGGLKIAAVKAPGFGDRRKAMLQDIAILTGGQVISEDLGMKLESVTIDMLGSAKRVSITKDETTIVDGAGAKAEIEARVAQIRNQIEETTSDYDREKLQERVAKLAGGVAVIRVGGMTEVEVKERKDRVDDALNATRAAVQEGIVVGGGVALIQAAKHLDGLEGANNDQNIGINIVRKALEAPLRQIAENAGVDGSVVAGKIRESSDLAFGFNAQTEEYGDMFKFGVIDPAKVVRTALQDAASIAGLLITTEAMVADKPAKEGAGAGGGMPDMGGMGGMM

SEQ ID NO: 9228 - DNA, 1644 bp, Gluconacetobacter diazotrophicus PAl 5
  CDS (1)..(1644): transl_table=11
atggcagccaaggacgtaaagttcggtggtgacgcacgccagcgcatgctgcggggcgtggacattctggccgacgcggtgaaggtgaccctgggcccgaagggccggaacgtcgtgctcgacaagagcttcggcgcgccgcgcatcaccaaggacggcgtttccgtcgccaaggaaatcgaactggccgacaagttcgagaacatgggcgcccagatggtgcgcgaagtggcgtcgaagaccaacgacgtcgccggtgacggcaccacgaccgcgaccgttctggcccaggccatcgtccgcgagggtgccaaggccgttgcggccggcatgaacccgatggacctgaagcgcggcatcgacaaggccgtcatcgcggtcgtcgaggagttgaagaagaacaccaagaagatcacgaccccggccgaaacggcgcaggtcggcacgatctcggccaacggcgagcatgagatcggcgagatgatctcgcaggccatgcagaaggtcggcagcgaaggcgtcatcacggtggaagaggccaagggcctgcacaccgaactggacgtcgtcgagggcatgcagttcgatcgcggctatatctccccgtatttcatcacgaacgcggagaagatggttgccgacctggacaacccctacatcctgatccacgaaaagaagctgtcgtcgctgcagccgatgctgccgctgctggagagcgtcgtgcagtccggccgtccgctgctgatcatcgccgaggacgtcgatggcgaggcgctggcgaccctggtcgtcaacaagctgcgtggtggcctgaagatcgccgccgtcaaggcgccgggcttcggtgatcgtcgcaaggcgatgctggaagacatcgcgatcctgaccggtggacaggtcatcagcgaagatctgggcatcaagctggagaccgtgaccctggcgatgctgggccgtgcgaagaaggtccgcatcgagaaggaaaacaccacgatcgtcgagggcgccggcgcgtccgacgacatcaagggccgttgcggccagatccgcgcgcagatcgaggagaccacctcggactacgatcgcgagaagctgcaggagcgtctggcgaagctggcgggcggcgtcgccgtcatccgcgtcggcggctcgaccgaggtcgaggtgaaggagcgcaaggaccgcgtcgacgacgcgctgcatgcgacccgcgccgcggtcgaggaaggcatcgtccccggcggcggcacggcgctggcgcgtgcgtccaccgccctgggcaacctgcatttccacaatgacgaccagcgcgtcggcgcggaaatcatccgcaaggccctgcaggctccgctgcgccagatcgcccacaacgcgggcgaagacggtgcggtcatcgccggcaaggtgctggaaagcaacgactacaactacggcttcgacgcccagatcggcgattacaaggatctggtggctgccggtatcatcgacccgaccaaggtcgtgcggaccgcgctgcaggacgcgtcgtcggttgccggcctgctgatcaccaccgaggcgatggtggccgagaagccggaaaagaaggccccggccatgcccgccggtggcggcatgggcggcatgggcgacatggatttctaa

SEQ ID NO: 9229 - protein, 547 aa, Gluconacetobacter diazotrophicus PAl 5
MAAKDVKFGGDARQRMLRGVDILADAVKVTLGPKGRNVVLDKSFGAPRITKDGVSVAKEIELADKFENMGAQMVREVASKTNDVAGDGTTTATVLAQAIVREGAKAVAAGMNPMDLKRGIDKAVIAVVEELKKNTKKITTPAETAQVGTISANGEHEIGEMISQAMQKVGSEGVITVEEAKGLHTELDVVEGMQFDRGYISPYFITNAEKMVADLDNPYILIHEKKLSSLQPMLPLLESVVQSGRPLLIIAEDVDGEALATLVVNKLRGGLKIAAVKAPGFGDRRKAMLEDIAILTGGQVISEDLGIKLETVTLAMLGRAKKVRIEKENTTIVEGAGASDDIKGRCGQIRAQIEETTSDYDREKLQERLAKLAGGVAVIRVGGSTEVEVKERKDRVDDALHATRAAVEEGIVPGGGTALARASTALGNLHFHNDDQRVGAEIIRKALQAPLRQIAHNAGEDGAVIAGKVLESNDYNYGFDAQIGDYKDLVAAGIIDPTKVVRTALQDASSVAGLLITTEAMVAEKPEKKAPAMPAGGGMGGMGDMDF

SEQ ID NO: 9230 - DNA, 1674 bp, Microcystis aeruginosa NIES-843
  CDS (1)..(1674): transl_table=11
atgtccaaaatcattgcctttaaagatgaatcccgtcgcgccctagaaagaggtgtcaacgccttggccgatgcggtaaaaatcaccctcggtccgaaaggacgcaatgtcttgttagaaaagaaatacggcgccccccagatcgttaatgacggcatcaccgtggccaaagaaatcgaattgtccgatcccctcgaaaacaccggggcgagattaattcaggaagtagcggcaaaaaccaaagatttagcgggagatggcaccactaccgccaccatcatcgcccaggctttaattaaagaaggtctgaaaaacgttaccgccggggccaatcccgtcgccttaagacgcggactggacaaaaccatcgcctatctggtggaagaaatcgctgccgtcgctaaaccgatcgctggagatgcgatcgctcaagtggccaccgtttcttccggcaacgatgaagaagtgggacaaatgatcgccaccgccatggaaaaagtcaccaccgatggcgtaatcaccgtggaagaatcgaaatccctaaccacggaattagaagtagtggaagggatgcagatcgatcgcggttatatctctccctatttcatcaccgatcaggaaagacagatcgtcgagtacgacaaccccctgatcctgattaccgataaaaaaatcagtgcgatcgctgaattagtccccgtcctcgaagccgttgctcgtcaaggtcgtcccctattaattatcgccgaagatgtggacggcgaagccttagccactctagtggtcaacaaggcccggggggtcttaaatgtcgtcgccatcaaggcccccagtttcggggaacgtcgcaaggcggttttacaagatattgccatcctcaccggtggtcgtctgatttccgaagaagtgggcttgagtcttgacacggttagcctcgatctgctagggcaagcggcaaaaatcaccctagaaaaagacaatacaattattgtcgcctccggggacagccgcaataaggccgatgtgcagaaacgtctcgcccaactgaaaaaacagttagaagaaaccgattccgaattcgataaggaaaaattacaggaacgcatcgctaaattagccggcggtgtggccgtcattaaggtcggggcagccacagaaaccgaactcaaggatcgcaaactccgcatcgaagatgccctcaatgccaccaaagccgccgtggaagaaggtatcgtcccgggcggtggtacaaccttgattcatctggcttctaaggtgaaggctttcaaagcttctctcactaacgatgaggaaaaagtcgccgccgatatcgtcgctaaagccctagaagcccccctgcgtcagttagccaacaacgccggtgtggaaggggatgtgatcgtggaaggtgtgcgcgaaaccgcttttagcgtcggttacaatgtcctcaccggcaagtacgaagacttaatcgccgccggaattatcgatccggctaaagtggtacggtcagccgttcaaaacgccgcttctatcgccggtatggtcctaactacggaagccctcgtggtcgaaaaacccgttaaagaagccgcagcccccgatatgggcggcatgggtggcatgggcggcatgggtggcatgggcggcatgggcggcatgggtatgatgtaa

SEQ ID NO: 9231 - protein, 557 aa, Microcystis aeruginosa NIES-843
MSKIIAFKDESRRALERGVNALADAVKITLGPKGRNVLLEKKYGAPQIVNDGITVAKEIELSDPLENTGARLIQEVAAKTKDLAGDGTTTATIIAQALIKEGLKNVTAGANPVALRRGLDKTIAYLVEEIAAVAKPIAGDAIAQVATVSSGNDEEVGQMIATAMEKVTTDGVITVEESKSLTTELEVVEGMQIDRGYISPYFITDQERQIVEYDNPLILITDKKISAIAELVPVLEAVARQGRPLLIIAEDVDGEALATLVVNKARGVLNVVAIKAPSFGERRKAVLQDIAILTGGRLISEEVGLSLDTVSLDLLGQAAKITLEKDNTIIVASGDSRNKADVQKRLAQLKKQLEETDSEFDKEKLQERIAKLAGGVAVIKVGAATETELKDRKLRIEDALNATKAAVEEGIVPGGGTTLIHLASKVKAFKASLTNDEEKVAADIVAKALEAPLRQLANNAGVEGDVIVEGVRETAFSVGYNVLTGKYEDLIAAGIIDPAKVVRSAVQNAASIAGMVLTTEALVVEKPVKEAAAPDMGGMGGMGGMGGMGGMGGMGMM

SEQ ID NO: 9232 - DNA, 1626 bp, Microcystis aeruginosa NIES-843
  CDS (1)..(1626): transl_table=11
atggctaaatctattatctacaacgaagatgcccgtcgcgccttagaaaaaggcatggatctgctggccgaagcggtggccgtcacccttggtcccaaaggtcgtaacgtcgtcctcgaaaagaaatttggcgcaccccaaatcgtcaatgatggcatcaccatcgctaaagaaatcgaactggaagaccatatcgagaacaccggtgtggctttaattcgccaagccgcctcaaaaaccaacgatgtagcgggtgatggtactactaccgccaccgttctcgctcacgctatcgttaaagaaggtttacgcaacgtcgccgccggtgctaacccgatttctctgaaaaaaggtatcgataaagctgccgatttcctcgtcagtcaaatcgccaaacacgcgaaacccgtagaagattccaaagcgatcgcacaagtgggtgctatctctgccggtaacgatgatgaagtcggtcaaatgatcgcctcggccatggataaagtcggcaaagaaggcgtaatttccctagaagaagggaaatcgatgaccaccgaactagaaatcaccgaagggatgcgttttgacaaaggttatatctctccctactttgtcaccgacaccgaacgcatggaatgcgtttttgaggatcccgctattctgattaccgacaaaaaaatcggtttagtacaggatttggttcccattctcgaacaagttgcccgtcaaggcaaacccctagtaattatcgccgaagacatcgaaaaagaagctttggcaaccctagtggttaaccgtctgcgcggtgttcttaacgtcactgcggtgaaagctcctggatttggcgatcgcagaaaagcgatgttagaagatatcgccgttttaaccggtggtcaagtaatcagcgaagatgcgggtttaaaactggaaaccaccaaaattgacagcttaggtacggcccgtcgtatcaccatgaacaaagataccaccaccatcgtcgccgaaggaaacgacgtggcagtgaaaacccgttgtgagcaaattcgccgtcaaatcgaggaaaccgattcttcctacgataaagaaaaactgcaagaacgtctggctaaattagccgggggtgtggcagtgattaaagtcggtgccgctacggaaacggaaatgaaagaccgcaaattgcgcctagaagacgcaattaacgccactaaagcagccgtagaagaaggtatcgtccccgggggtggtactactttagctcacctcgctccccaattggaaacttgggctaaagaaaccctccagcatgaagaattaaccggtgctttaatcgtttctcgtgcgatttctgcccccttaaaacggatcgctgaaaatgccggccaaaacggtgcagttattgccgaacgggtgaaagagaagccctttaatgtcggttataatgccgctaccggtgagttctccgatatgtttgaggcgggtatcgttgaccccgctaaagtgactcgttctgccctacaaaatgccgcttcgatcgccggtatggttttaactaccgagtgtattgttgtggataaaccggaaaaagaaaaatccgctcctcctgccggcggtggtgacttcgactattaa

SEQ ID NO: 9233 - protein, 541 aa, Microcystis aeruginosa NIES-843
MAKSIIYNEDARRALEKGMDLLAEAVAVTLGPKGRNVVLEKKFGAPQIVNDGITIAKEIELEDHIENTGVALIRQAASKTNDVAGDGTTTATVLAHAIVKEGLRNVAAGANPISLKKGIDKAADFLVSQIAKHAKPVEDSKAIAQVGAISAGNDDEVGQMIASAMDKVGKEGVISLEEGKSMTTELEITEGMRFDKGYISPYFVTDTERMECVFEDPAILITDKKIGLVQDLVPILEQVARQGKPLVIIAEDIEKEALATLVVNRLRGVLNVTAVKAPGFGDRRKAMLEDIAVLTGGQVISEDAGLKLETTKIDSLGTARRITMNKDTTTIVAEGNDVAVKTRCEQIRRQIEETDSSYDKEKLQERLAKLAGGVAVIKVGAATETEMKDRKLRLEDAINATKAAVEEGIVPGGGTTLAHLAPQLETWAKETLQHEELTGALIVSRAISAPLKRIAENAGQNGAVIAERVKEKPFNVGYNAATGEFSDMFEAGIVDPAKVTRSALQNAASIAGMVLTTECIVVDKPEKEKSAPPAGGGDFDY

SEQ ID NO: 9234 - DNA, 1626 bp, Thermoanaerobacter sp. X514
  CDS (1)..(1626): transl_table=11
atggcaaaacaaatcaaatatggagaggaagcaagaagagcattagaaagaggagttaatgcagttgcggatactgtaaaagttacattagggccaaggggtcgtaatgtagtattggacaaaaaatatggttcacctacggttacaaatgacggtgttactattgcaagagagattgaattagaggatccatttgaaaatcaaggcgcacaacttttgaaggaagtagctacaaaaactaatgatgtcgcaggtgatggtacaacgactgcaacgcttttagctcaagcaatggttcgtgagggactcaaaaacctcgcagcaggagctaacccaatgcttttaagaagaggtattgcgaaggctgtagatgctgcagttgaggggttaaagaggatatctaaacctattgataataaagaatcaattgcccatgttgcttctatctctgctgctgatgaagaaataggtaatctcattgcagaagcaatggacaaagtaggtaaagatggagttataacggttgaagaatcaaagactttaggtacaacccttgaggttgttgaaggaatgcaatttgacagaggatatatttctccatacatggtaactgatgctgaaaaaatggaagcagtattagaggagcctgttatactcataacagataagaaactttcaaatatccaagacttgttgccactcttggagcaagtagtgcaacacggtaagaaacttcttatcatagctgatgatgtagaaggagaagcattggcaacattagttgttaacaaattaagaggtacatttacgtgtgtagcagtaaaagctcctggctttggtgacagaagaaaagaaatgttacaagatatagcaatactgacaggtggtcaagtaatttcagaagagttaggttatgacttaaaagatgtgagattagatatgcttggccgcgcaagacaagtaaaagttacaaaagagaataccacaattgtaggcggagcaggcgatgctgcagaaattaagaagagagtaaatcaaattaaggctcaaattgaggaaactacctctgattatgatagagaaaaattacaagaaagactggcaaaattggccggtggcgtagctgtcattcaagctggtgctgcaactgagacagagcttaaagaaaagaaacacagaattgaagacgcattggcggctacaaaagcagcagtggaggaaggtatagtacctggtggcggtattgcacttctcaatgtaatagaagatgtgcaaaaagtagttgattccttagatggcgacttcaagacaggtgcgaagatagttttaagagcattagaagaacccgtaagacaaattgcagcaaatgctggtgttgacggttctgtaatagtagaaaaaataaaagctgctaaagatccaaacttcggatatgatgcttacaaggaagaatttacagacatgttcaaagcaggtatcgtagacccaacaaaggttacaaggacagctttgcaaaatgctgcatcaattgcttcaatgatacttacgacagaagcagtagtggtagatgtaccagagaagaatacagcaatgcctaatccaggagcaggaatggatatgatgtga

SEQ ID NO: 9235 - protein, 541 aa, Thermoanaerobacter sp. X514
MAKQIKYGEEARRALERGVNAVADTVKVTLGPRGRNVVLDKKYGSPTVTNDGVTIAREIELEDPFENQGAQLLKEVATKTNDVAGDGTTTATLLAQAMVREGLKNLAAGANPMLLRRGIAKAVDAAVEGLKRISKPIDNKESIAHVASISAADEEIGNLIAEAMDKVGKDGVITVEESKTLGTTLEVVEGMQFDRGYISPYMVTDAEKMEAVLEEPVILITDKKLSNIQDLLPLLEQVVQHGKKLLIIADDVEGEALATLVVNKLRGTFTCVAVKAPGFGDRRKEMLQDIAILTGGQVISEELGYDLKDVRLDMLGRARQVKVTKENTTIVGGAGDAAEIKKRVNQIKAQIEETTSDYDREKLQERLAKLAGGVAVIQAGAATETELKEKKHRIEDALAATKAAVEEGIVPGGGIALLNVIEDVQKVVDSLDGDFKTGAKIVLRALEEPVRQIAANAGVDGSVIVEKIKAAKDPNFGYDAYKEEFTDMFKAGIVDPTKVTRTALQNAASIASMILTTEAVVVDVPEKNTAMPNPGAGMDMM

SEQ ID NO: 9236 - DNA, 1644 bp, Pseudomonas putida GB-1
  CDS (1)..(1644): transl_table=11
atggctgctaaagacgtaaaattcggcgattccgctcgtaagaaaatgctggttggtgtcaacgttctggctgacgcggtaaaagcgaccctgggcccgaaaggccgtaacgtggtactggccaagagcttcggcgcgccaaccatcaccaaggacggcgtttccgtcgccaaagaaatcgagctgaaagacgcgttcgaaaacatgggcgcccagctggtcaaggaagtggcttccaaggccaacgacgctgccggtgacggcaccaccaccgctaccgttctggctcaggccatcgtcaacgaaggcctgaaagccgtcgctgccggcatgaacccgatggacctcaagcgcggtatcgacaaggctaccgctgcagtcgttgccgagctgaagaacctgtccaagccatgcgccgactccaaggccatcgcccaggtaggcaccatctccgccaactctgacgactccatcggcaacatcattgccgaagccatggaaaaagtcggtaaagaaggcgtgatcaccgttgaagaaggctcgggcctggaaaacgaactgtccgtcgtagaaggcatgcagttcgaccgtggctacctgtcgccatacttcgtcaacaagccagacaccatggttgccgagctggaaggcccgctgctgctgctggtcgacaagaaaatctccaacatccgtgagctgctgccagttctggaagccgttgccaaggccggccgcccactgctgatcgttgccgaagatgtcgaaggcgaagcgctggctaccctggtagtcaacaacatgcgcggcatcgtcaaggttgcagcggtcaaggcgccaggcttcggcgaccgccgcaaggccatgctgcaggacatcgccgtcctgactggcggccaggtcatctccgaagaaatcggtctgtccctggaaaccgctaccctggagcacctgggtaacgccaagcgcgtcatcctgtccaaggaaaacaccaccatcatcgacggcgctggcgccgacaccgagatcgaagcacgcgtcaagcagatccgcgcccagatcgaagaaacttcttcggactacgaccgtgagaagctgcaagagcgtctggccaagctggctggcggtgttgccgtgatcaaggtcggtgccggcaccgaagttgaaatgaaagagaagaaagcccgcgttgaagacgccctgcacgctacccgtgcagccgttgaagaaggcgtggtgcctggcggtggtgttgccctggttcgtgccctggccgcgatcgttgacctgaaaggcgaaaacgaagaccagaacgtcggtatcgccctgctgcgccgtgctgttgaagccccgctgcgccagatcactgccaacgccggcgacgagccaagcgttgtcgctgacaaggtcaagcaaggttcgggtaacttcggttacaacgctgctaccggtgaatacggcgacatgatcgagatgggtatcctggacccagccaaggtcacccgttcggccctgcaagctgctgcttcgattggcggtctgatgatcaccaccgaagccatgattgctgacgctccgagcgaagccccagctggcggcggcatgccagacatgggcggcatgggtggcatgggcggcatgatgtaa

SEQ ID NO: 9237 - protein, 547 aa, Pseudomonas putida GB-1
MAAKDVKFGDSARKKMLVGVNVLADAVKATLGPKGRNVVLAKSFGAPTITKDGVSVAKEIELKDAFENMGAQLVKEVASKANDAAGDGTTTATVLAQAIVNEGLKAVAAGMNPMDLKRGIDKATAAVVAELKNLSKPCADSKAIAQVGTISANSDDSIGNIIAEAMEKVGKEGVITVEEGSGLENELSVVEGMQFDRGYLSPYFVNKPDTMVAELEGPLLLLVDKKISNIRELLPVLEAVAKAGRPLLIVAEDVEGEALATLVVNNMRGIVKVAAVKAPGFGDRRKAMLQDIAVLTGGQVISEEIGLSLETATLEHLGNAKRVILSKENTTIIDGAGADTEIEARVKQIRAQIEETSSDYDREKLQERLAKLAGGVAVIKVGAGTEVEMKEKKARVEDALHATRAAVEEGVVPGGGVALVRALAAIVDLKGENEDQNVGIALLRRAVEAPLRQITANAGDEPSVVADKVKQGSGNFGYNAATGEYGDMIEMGILDPAKVTRSALQAAASIGGLMITTEAMIADAPSEAPAGGGMPDMGGMGGMGGMM

SEQ ID NO: 9238 - DNA, 1647 bp, Caulobacter sp. K31
  CDS (1)..(1647): transl_table=11
atggccgctaaagacgtttatttctcctcggacgcgcgcgacaagatgctgcgcggcgtcaacatcctcgccaacgcggtgaaggtgaccctcggccccaagggccgcaacgtcgtgatcgaaaagtccttcggcgccccgcgctcgaccaaggacggcgtctcggtcgccaaggaaatcgaactggctgaccgtttcgagaacctcggcgcgcagatgatccgcgaagtcgccagcaagaccaacgacaaggccggcgacggcaccaccaccgccaccgtcctggcccaagccatcgtgcaagaaggcctcaagtcggtcgccgccggcatgaacccgatggacctgaagcgcggcatcgacaaggccgtccacgtcgtcgtcgactccatcaaggcgtcgtcgaagaaggtcaccaccaacaacgagatcgcccaggtcggcaccatctcggccaacggtgacaaggacgtcggcgagatgatcgccaaggccatggacaaggtcggcaacgaaggcgtcatcaccgtcgaggaagccaagaccgccgagaccgaactcgacgtcgtcgaaggcatgcagttcgaccgcggctacctgtcgccgtacttcatcaccaacgccgacaagatggaagttcagctcgaagagccgctcatcctgctgttcgaaaagaagctctcctcgctgcagccgctgctgccggtgctggaagccgtcgtccagtcgggccgtccgctggtgatcatcgccgaggacgtcgagggcgaagccctggccaccctggtggtcaacaagctgcgcggcggtctccgcgtcgccgccgtcaaggctccgggcttcggcgatcgccgcaaggccatgctggaagacatcgccatcctgaccggcgcccaagtgatcagcgaagacctcggcatcaagctcgagaacgtttcgctcgacatgctgggcaaggccaagaaggtctcgatcaccaaggacgacaccaccatcgtggacggcgtcggtgagaagaccgcgatcgaagcccgcatcggccagatcaagaagcagatcgaagacaccacctcggactacgacaaggaaaagctgcaagagcgtctggccaagctggccggcggcgtcgcggtcatccgcgtcggcggctcgaccgaagtcgaagtgaaggaaaagaaggaccgcgtcgacgacgccctcaacgcgacccgcgcggccgtggaagaaggcatcgtcccgggcggcggcgtggctctgctgaaggcctccaaggccctggcgaccctggtcggcgacaatgacgaccagaccgccggcatcgcgatcgtccgtcgcgccctgcaggctccgatccgtcagatcgccgagaacgccggcgtcgaaggctcgatcgtggtcggcaagatcctggaaaacgacagcccgaccttcggcttcaacgcccagaccgagcagtatgtcgacctgatcgccgacggcgtcatcgaccccgccaaggtggtccgcaccgccttgcaggacgccgcctcggtggccggcctgctgatcaccacggaagcggccatcgtcgaagcccccaagaagggcggcggcgctggcggccctcccggcggcggcatgggcggcatgggcgacatggacttctaa

SEQ ID NO: 9239 - protein, 548 aa, Caulobacter sp. K31
MAAKDVYFSSDARDKMLRGVNILANAVKVTLGPKGRNVVIEKSFGAPRSTKDGVSVAKEIELADRFENLGAQMIREVASKTNDKAGDGTTTATVLAQAIVQEGLKSVAAGMNPMDLKRGIDKAVHVVVDSIKASSKKVTTNNEIAQVGTISANGDKDVGEMIAKAMDKVGNEGVITVEEAKTAETELDVVEGMQFDRGYLSPYFITNADKMEVQLEEPLILLFEKKLSSLQPLLPVLEAVVQSGRPLVIIAEDVEGEALATLVVNKLRGGLRVAAVKAPGFGDRRKAMLEDIAILTGAQVISEDLGIKLENVSLDMLGKAKKVSITKDDTTIVDGVGEKTAIEARIGQIKKQIEDTTSDYDKEKLQERLAKLAGGVAVIRVGGSTEVEVKEKKDRVDDALNATRAAVEEGIVPGGGVALLKASKALATLVGDNDDQTAGIAIVRRALQAPIRQIAENAGVEGSIVVGKILENDSPTFGFNAQTEQYVDLIADGVIDPAKVVRTALQDAASVAGLLITTEAAIVEAPKKGGGAGGPPGGGMGGMGDMDF

SEQ ID NO: 9240 - DNA, 1635 bp, Lysinibacillus sphaericus C3-41
  CDS (1)..(1635): transl_table=11
atggcaaaagatattaaattctcagaagacgctcgttcattaatgttacaaggtgtagataaattagcgaatgcagtaaaaataacattaggtccaaaaggacgtaatgtagtgttagaaaaaaaattcggttcaccacttattacaaatgatggtgtgacaattgcaaaagaaatcgagctggaaaatccatacgaaaacatgggagcaaaattagtagctgaggttgcttctaagacaaacgaaatcgctggtgatggtacaactactgcaacagttcttgcacaagcaattattcgtgagggcttgaaaaacgtgacagctggtgcaaaccctgtaggtatccgtaaagggattgataaagctgttgctgcggcattaactgaattacacacgatttcgcgtcctgtaagcaataaggatgaaatcgcacaagttgctgctatttcggcagctgatgatgaagttggacagcttattgctgaagcgatggaacgtgtaggtaatgatggtgttattacaattgaagaatctaaaggcttcacaacagagcttgatgtagtagaaggtatgcagtttgaccgtggctatgcatcacactatatggtaacagatacagataaaatggaagcagttctggataacccatatatcttaattactgataaaaaaattacaaacatccaagaagtattaccattattagaacaagtggtacaacaaggtcgtccacttttaattattgctgaagacgttgaaggagaagcgcttgcaacacttgtcgtgaacaagcttcgtggtacattcaacgctgtagcagtaaaagcaccaggttttggtgatcgtcgtaaagcaatgcttgaagatatcgctatcttaactggtggtcaagtgattacagaggaattaggtttagacctaaaatcagctgatatttcttcgctaggtcgtgctgcaaaagtagttgtgacaaaagacaatactacaattgttgaaggtgtaggcggtgcagatgcaatcgaagcacgtattggccaaatccgagcacaacttgctgaaacaacttcagaattcgataaagaaaaactacaagaacgccttgcgaaattagcgggtggtgtagcagttatcaaagtaggggctgcaacagaaacagagcttaaagagcgtaaacttcgtattgaagatgctttaaactcaacacgtgcagctgttgaagaaggtatcgtatcaggtggtggtactgcacttcttaacgtgtatgcagcagtggaaaaagtgtctgaatctgaagaaggcgatgtagcaacaggagtgaaaattgttcttcgtgctttagaagagccagttcgtcaaatcgctaacaacgctggtcttgaaggctctatcatcgtggatcgcctgaaacgtgaagaaattggcattggtttcaatgcagcaacaggcgaatgggtaaacatgatggaagcaggtgtagtagacccagcaaaagtaactcgttcagcattacaaaatgctgcgtcagtagctgctctattcttaacaacagaagcagtagttgcagatattcctgaaccagctggcgcaggtatgccagatatgagtggtatgggcggcatgccaggaatgatgtaa

SEQ ID NO: 9241 - protein, 544 aa, Lysinibacillus sphaericus C3-41
MAKDIKFSEDARSLMLQGVDKLANAVKITLGPKGRNVVLEKKFGSPLITNDGVTIAKEIELENPYENMGAKLVAEVASKTNEIAGDGTTTATVLAQAIIREGLKNVTAGANPVGIRKGIDKAVAAALTELHTISRPVSNKDEIAQVAAISAADDEVGQLIAEAMERVGNDGVITIEESKGFTTELDVVEGMQFDRGYASHYMVTDTDKMEAVLDNPYILITDKKITNIQEVLPLLEQVVQQGRPLLIIAEDVEGEALATLVVNKLRGTFNAVAVKAPGFGDRRKAMLEDIAILTGGQVITEELGLDLKSADISSLGRAAKVVVTKDNTTIVEGVGGADAIEARIGQIRAQLAETTSEFDKEKLQERLAKLAGGVAVIKVGAATETELKERKLRIEDALNSTRAAVEEGIVSGGGTALLNVYAAVEKVSESEEGDVATGVKIVLRALEEPVRQIANNAGLEGSIIVDRLKREEIGIGFNAATGEWVNMMEAGVVDPAKVTRSALQNAASVAALFLTTEAVVADIPEPAGAGMPDMSGMGGMPGMM

SEQ ID NO: 9242 - DNA, 1620 bp, Clavibacter michiganensis subsp. sepedonicus
  CDS (1)..(1620): transl_table=11
atggctaaaatcatcgcttttgacgaagaagcccgccgcggcctcgagcgcggcctgaacatcctggccgacgcggtccgcgtgaccctcggcccgcgtggccgcaacgtcgtcctggagaagaagtggggcgcccccaccatcacgaacgacggcgtgtcgattgccaaagagatcgagctcgacgacccgttcgagaagatcggcgcggagctcgtcaaggaggtcgccaagaagaccgacgacgtcgccggtgacggcacgaccaccgcgaccgtcctcgcgcaggccctggtccgcgagggcctccgcaacgtcgccgcgggcgccgaccccatcagcctcaagcgcggcatcgagaaggccgtcgcggccgtcacggaggagctcaaggccgccgcgaaggagatcgagacgaaggaggagatcgccgccaccgcgtccatctccgccggcgactccaccatcggcgccatcatcgccgaggcgatcgacaaggtcggcaaggagggcgtggtcaccgtcgaggagtccaacaccttcggcaccgagctcgagctcaccgagggcatgcgcttcgacaagggctacctgtcgcagtacttcgtcaccgacccggagcgccaggaggccgtgttcgaggacgcgtacatcctgatcgtcaactcgaagatctcgaacattaaggatctgctgccgatcgtcgacaaggtcatccagtcgggcaagcagctcctcatcatcgccgaggacgtcgacggcgaggccctggccacgctcgtcgtcaacaagatccgcggcatcttcaagtcggtcgccgtcaaggcccccggcttcggcgaccgtcgcaaggcgcagctgcaggacatcgccatcctcaccggtggccaggtcatcgccgaggaggtcggcctcaagctcgagaacgtcaccctcgacctgctcggcacggcccgcaaggtcgtcatcaccaaggacgagaccacgatcgtcgagggtggcggcgacgccaccgagatcgcggcccgcgtgcagcagatccgcaacgagatcggcaacacggacagcgactacgaccgcgagaagctccaggagcgcctcgcgaagctggccggcggcgtggccgtcatcaaggccggcgccgcgaccgaggtggagctcaaggagcgcaagcaccgcatcgaggacgccgtccgcaacgcgaaggccgccgtcgaggagggcatcgtcgccggtggtggcgtcgccctcatccaggccggcaagctcgcgttcgagaagctgcagctcgagggcgacgaggcgacgggcgcgaacatcgtccgcgtcgcggtcgacgctccgctcaagcagatcgccctcaacgcgggcctcgagccgggcgtcgtggccgagcgcgtccgcaacctcccctcgggtcacggcctcaacgccgccacgggtgagtacgtcgacatgctcgccgcggggatcaacgacccggtgaaggtcacgcgctcggctctgctgaacgccgcctccatcgcgggtctgttcctcacgaccgaggccgtcgtcgccgacaagcccgagaagaacccggccccggccggcgaccccacgggtggcatggacttctag

SEQ ID NO: 9243 - protein, 539 aa, Clavibacter michiganensis subsp. sepedonicus
MAKIIAFDEEARRGLERGLNILADAVRVTLGPRGRNVVLEKKWGAPTITNDGVSIAKEIELDDPFEKIGAELVKEVAKKTDDVAGDGTTTATVLAQALVREGLRNVAAGADPISLKRGIEKAVAAVTEELKAAAKEIETKEEIAATASISAGDSTIGAIIAEAIDKVGKEGVVTVEESNTFGTELELTEGMRFDKGYLSQYFVTDPERQEAVFEDAYILIVNSKISNIKDLLPIVDKVIQSGKQLLIIAEDVDGEALATLVVNKIRGIFKSVAVKAPGFGDRRKAQLQDIAILTGGQVIAEEVGLKLENVTLDLLGTARKVVITKDETTIVEGGGDATEIAARVQQIRNEIGNTDSDYDREKLQERLAKLAGGVAVIKAGAATEVELKERKHRIEDAVRNAKAAVEEGIVAGGGVALIQAGKLAFEKLQLEGDEATGANIVRVAVDAPLKQIALNAGLEPGVVAERVRNLPSGHGLNAATGEYVDMLAAGINDPVKVTRSALLNAASIAGLFLTTEAVVADKPEKNPAPAGDPTGGMDF

SEQ ID NO: 9244 - DNA, 1668 bp, Synechococcus sp. PCC 7002
  CDS (1)..(1668): transl_table=11
atggctaagattgtctctttcaaggatgactctagacgctccctcgaagcagggattaatgcccttgccgatgcggtaaaaatcaccctcggccccaagggtcggaatgtactcctcgaaaagcagtatggtgcgccccaaattgtgaatgatgggatcaccgttgcaaaggatattgaacttagtgatccgctccaaaatacgggggcgcggttaatccgggaagtggcagcgaaaaccaatgacagtgctggggatggcacgaccactgctaccgttatggcccaagcgttgatccgcgaaggtttgaaaaatgtgacggctggggcaaatcccgtggccctgcgccggggtattgatgcggcagtgaagttcctcgtgaaggaagttgccgcgatcgccaagcccgttgaaggagaggcgatcgcccaggtggccgctgtgtctgctgggaatgacgaagaagtaggccggatgatctccgaagccatggccaaagtcaccaaagatggcgtgatcaccgttgaagagtccaagtccctcgccaccgaactggatgtagtcgaaggaatgcaactggatcgcggttatatctccccctatttcgtcaccgaccaggaacggcaaatcgttgaatttgaaaatccctacatcctgatcaccgacaagaaaatttcggcgatcgccgacctcgtgcccgccctcgaacaggtagcccgttctggtcgtcctttgctgattgttgccgaagacattgaaggggaagccctggcgaccctcgttgtgaacaaagcccgtggtgtcctcaatgccgccgcgatcaaggctcccagttttggcgatcgccgtaagcaaatgctccaggacatcgctgtcctcaccggcggtcgggtcatttccgaagaagtgggcctcagcctcgaagccattgaccttgatatgctcggtaacgccgaaaaaatcaccatcagtaaggaagaaactaccatcgtttccggcggcggtagcaaagctgacattgacgcccgcgttagccaaatccgtaagcaactggctgaaaccgactccgaatatgacatggagaaactccaggagcggatcgccaagcttgctggtggtgtcgctgtgatcaaagttggtgcagccaccgaaactgaactcaaagaccgcaagctccgcatcgaagatgccctcaatgccaccaaagccgctgtcgatgaaggcattgttcctggtggtggcacgaccctaattcacctcgctgaaaaggtcgctgaagtaaaggcaagcctcagtagcgacgaagagaagctcggtgtcgatatcgtttcccgcgccctagaagcgcccctccgccaattggctgataacgcgggtgccgaaggttctgtggttgtagaacgggttcgtaccagtgacttcaacgttggctacaacgcggccactggcgaatatgtcgatatgattgccgctggcatcattgacccggcgaaggttgtccgttctgttctgcaaaatgcagcctccatcgctggaatggtgatcacaaccgaagccctcgtcgttgagaagcccgaacccgaagcgcccgcccctgacatgggtggtggtatgcccggtatgggtggcatgggcggcatgggaatgcctggcatgggaatgatgtaa

SEQ ID NO: 9245 - protein, 555 aa, Synechococcus sp. PCC 7002
MAKIVSFKDDSRRSLEAGINALADAVKITLGPKGRNVLLEKQYGAPQIVNDGITVAKDIELSDPLQNTGARLIREVAAKTNDSAGDGTTTATVMAQALIREGLKNVTAGANPVALRRGIDAAVKFLVKEVAAIAKPVEGEAIAQVAAVSAGNDEEVGRMISEAMAKVTKDGVITVEESKSLATELDVVEGMQLDRGYISPYFVTDQERQIVEFENPYILITDKKISAIADLVPALEQVARSGRPLLIVAEDIEGEALATLVVNKARGVLNAAAIKAPSFGDRRKQMLQDIAVLTGGRVISEEVGLSLEAIDLDMLGNAEKITISKEETTIVSGGGSKADIDARVSQIRKQLAETDSEYDMEKLQERIAKLAGGVAVIKVGAATETELKDRKLRIEDALNATKAAVDEGIVPGGGTTLIHLAEKVAEVKASLSSDEEKLGVDIVSRALEAPLRQLADNAGAEGSVVVERVRTSDFNVGYNAATGEYVDMIAAGIIDPAKVVRSVLQNAASIAGMVITTEALVVEKPEPEAPAPDMGGGMPGMGGMGGMGMPGMGMM

SEQ ID NO: 9246 - DNA, 1626 bp, Synechococcus sp. PCC 7002
  CDS (1)..(1626): transl_table=11
atggctaaatctattatttacaacgaagatgctcgccgcgccctcgaaaaagggatcgacctcctcgctgaagctgttgcggtaaccctcggccccaaaggtcggaacgttgtgctcgaaaagaaatttggcgcaccccagatcgtgaatgacggtgtgaccattgccaaggaaatcgagctcgaagaccacatcgaaaacaccggtgtttctttgattcgccaagcggcttctaaaaccaatgatgtggccggtgatggaaccaccacagcaacggttctcgcccatgccatggtcaaggaaggtctccgcaacgtcgcggctggtgcgaaccccatcgccctcaagcgtggtattgataaagcgactgaattcctcgttggccgcatcaaagatcaagctcgtccggtagaagattcgacggcgattgcccaagtcggtgccatctctgcgggtaacgacaaggaagttggtgacatgatcgccaaagccatggacaaagtcggtaaagaaggtgtgatctccctcgaagaagggaaatccatggaaaccgaactcgaaatcaccgaagggatgcgtttcgacaagggttacacttccccctacttcgtcaccgacaccgagcgcatggaagcggttcttgaagatcctttcatcctcatcactgacaagaaaatcaccctggttcaagaccttgtaccgattctcgaacaggttgctcgccaaggtaagcccctcgtaattatcgctgaagatatcgagaaagaagcccttgctaccctcgtggtcaaccgtctccggggtgtcctcaacgttgctgcggttaaagcgcctggttttggcgatcgccgcaagcagatgctcgaagatattgctgtactcaccggtggccaactgatcaccgaagatgcgggtctcaagctcgacaacaccagcgttgatatgctcggtaaagcacgccgcatcaccatcaccaaggacaacaccaccattgtggccgatggtaacgagcaggcagttaagacccgttgtgagcagatccgccgtcaaatcgaagaatctgactcttcttatgacaaagaaaaactccaagagcgtctcgcgaaactctccggtggtgtcgctgtgatcaaagtcggtgcagcaaccgaaactgagatgaaagaccgtaagcttcgtctcgaagatgcgatcaacgcgaccaaagcagccgttgaagaagggattgttcccggtggtggtacaaccctggcgcacctcgctcccgaattagaaacttgggcgaatgataacctcactgcggagcaactcactggtgctttgatcgtggcccgtgccttgactgcccccctgaagcgcattgctgaaaacgctggccaaaacggtgcggtaatcgctgagcgtgtgaaggaaaaagacttcaatactggttttaacgcagcaactaacgaattcgtggatatgctcgctgctggtatcgttgaccccgctaaggtaacccgttctgcaacccagaatgcggcttctatcgctggcatggttctcaccactgagtgcatcgttgttgacaagcctgaaaaagataaagctggtgcggctcccggtgccggtgacttcgactactaa

SEQ ID NO: 9247 - protein, 541 aa, Synechococcus sp. PCC 7002
MAKSIIYNEDARRALEKGIDLLAEAVAVTLGPKGRNVVLEKKFGAPQIVNDGVTIAKEIELEDHIENTGVSLIRQAASKTNDVAGDGTTTATVLAHAMVKEGLRNVAAGANPIALKRGIDKATEFLVGRIKDQARPVEDSTAIAQVGAISAGNDKEVGDMIAKAMDKVGKEGVISLEEGKSMETELEITEGMRFDKGYTSPYFVTDTERMEAVLEDPFILITDKKITLVQDLVPILEQVARQGKPLVIIAEDIEKEALATLVVNRLRGVLNVAAVKAPGFGDRRKQMLEDIAVLTGGQLITEDAGLKLDNTSVDMLGKARRITITKDNTTIVADGNEQAVKTRCEQIRRQIEESDSSYDKEKLQERLAKLSGGVAVIKVGAATETEMKDRKLRLEDAINATKAAVEEGIVPGGGTTLAHLAPELETWANDNLTAEQLTGALIVARALTAPLKRIAENAGQNGAVIAERVKEKDFNTGFNAATNEFVDMLAAGIVDPAKVTRSATQNAASIAGMVLTTECIVVDKPEKDKAGAAPGAGDFDY

SEQ ID NO: 9248 - DNA, 1644 bp, Candidatus Cloacamonas acidaminovorans
  CDS (1)..(1644): transl_table=11
atggaggaaaacaagatggcaaaacaaatgcagtatgcacatgaagcccgcacaagtttaaaaagcggtgtggataaactggctgatgccgtaaaagttacccttggtcctaagggtagatatgttgttttggacaggaaatttggctctcccacaatcactaacgacggtgtgaccatagccaaagaaattgaattggaaaatgaatacgaaaatatgggtgctcaactctgcaaagaagttgcagaaaaaacccatgacacagctggtgatggaactacaacagctacaattttagcccaggcaattattgaagaaggtctgaaacatgtaactgccggcgttaatccgatgtatctgaaacgcggtttggaaaaggcaactaaagttgtagtggataaaatcagagaattcagcaaggaaatcaagagcagtgaagaaattgcacaaattgctgctatttcagctaataacgatcctgaaattggagctctgattgcggaagctatggatagtgttggtagagaaggcattatcaatattgaagaggcaaaatccattgataccggtatggaaaaagtggaaggaatgcagtttgatcgcggttatatctctccctattttgtgactaatgcagaaaagatgattgccgaactggaggattcctttatcctgttatacgacaagaaaataaccgctctcaaggaactgcttcccattctgcaggaagtttctcaaaatggacgtcccctgcttattattgcagaagatattgaaggtgaggcacttgccacattagtagtgaataaactgcgtggtgtcctaaatgtggttgctgttaaagcacccggtttcggtgatcgcagaaaagctatgctggaagatattgccgttttaactggtgcaactttaatttctgaagaaatgggaagaaaacttgatagcgctacaatgagcgatctgggacgcgctaaaaagattattgtggaaaaagaaaataccactatccgcgaaggagctggcaatcctgaagagattgaaggtagaattaaacaaataagagctcaaattgaagagacaacttccgattacgataaagaaaaattgcaagaacgccttgccaaactttccagcggagttgccgtcctcagaatcggtgctgctaccgagacagaaatgaaggaaaagaaagctcgcgtagatgatgctctccatgctacccgggctgctgttgaagaaggtattgttcccggtggtggaattactttaattcaagccgctaaagccctaaaacaattaaaaggcctttcctacgaagaaaaaatggctgtggatattttgtctaaagcactggaaaaaccagcttatcaaattgccgctaacgcaggagaagaaggcgctgtagttgttgaaaaactgaagagctttcgcgatatccatatgggattcaatgctatcaatggacaatttgaagacctcttcaaagccggaattattgaccccgctaaggttgttcgctcagctatccaaaacgctgcttccattgccggtttgatgttaactacggaatgcattattaccgatattaaagaacctgagccagctgtccctatgcccaatcctaatatggctgatatgtattaa

SEQ ID NO: 9249 - protein, 547 aa, Candidatus Cloacamonas acidaminovorans
MEENKMAKQMQYAHEARTSLKSGVDKLADAVKVTLGPKGRYVVLDRKFGSPTITNDGVTIAKEIELENEYENMGAQLCKEVAEKTHDTAGDGTTTATILAQAIIEEGLKHVTAGVNPMYLKRGLEKATKVVVDKIREFSKEIKSSEEIAQIAAISANNDPEIGALIAEAMDSVGREGIINIEEAKSIDTGMEKVEGMQFDRGYISPYFVTNAEKMIAELEDSFILLYDKKITALKELLPILQEVSQNGRPLLIIAEDIEGEALATLVVNKLRGVLNVVAVKAPGFGDRRKAMLEDIAVLTGATLISEEMGRKLDSATMSDLGRAKKIIVEKENTTIREGAGNPEEIEGRIKQIRAQIEETTSDYDKEKLQERLAKLSSGVAVLRIGAATETEMKEKKARVDDALHATRAAVEEGIVPGGGITLIQAAKALKQLKGLSYEEKMAVDILSKALEKPAYQIAANAGEEGAVVVEKLKSFRDIHMGFNAINGQFEDLFKAGIIDPAKVVRSAIQNAASIAGLMLTTECIITDIKEPEPAVPMPNPNMADMY

SEQ ID NO: 9250 - DNA, 1623 bp, Cyanothece sp. ATCC 51142
  CDS (1)..(1623): transl_table=11
atggctaaatctattgtctataacgaagatgcacgtcgcgcattagaaagaggaatggacatcctcgctgagtctgtggctgttaccctaggtcccaaaggccgtaacgttgtcctagaaaagaaatttggtgccccgcaaatcatcaacgacgggatcaccattgctaaagaaattgaattagaagatcatatcgaaaatactggagtttccttgattcgtcaagcagcttctaaaactaacgatgtggctggagacggaaccaccaccgctaccgtgttagcccacgccatcgttaaagagggtttacgcaacgtcgctgctggtgctaaccccatcgccctgaaaaaaggtatcgataaagcgactgagttcctagttgaaaaaatcgcagcccatgctaaacccatcgaagactccaaagccattgcccaagtcggagctatctctgccggaaatgacgaagaagtgggtaaaatgattgctgaagccatggacaaagtgggcaaagaaggggtcatttccttagaagaaggaaaatccatgttcaccgaactggaaattaccgaagggatgcgctttgataaaggctatatctccccttattttgtcaccgacaccgaacgcatggaagcagtatttgaagaaccctgcatcctcatcaccgacaaaaaaattaacctcgttcaagatttagttcctgttttagaacaagttgcccgtcaaggtaaatctttagtgatcatcgctgaagatatcgaaaaagaagccttagcaaccttggttgttaaccgtttgcggggtgttttaaacgtggctgccgtgaaagcccctggatttggcgatcgccgtaagcaaatgctcgaagatattgcgaccttaaccggtggtactgttgtcagcgaagatgccggccttaagttagaaaataccaaaattgaaatgttaggatctgcccgtcgcatgatcctcaccaaagataacaccaccatcgttgcagaaggcaacgaagaagccgttaaatcccgttgtgacctcatccgtcgtcaaattgaagattctgactcttcttatgacaaagagaagttacaagagcgtttagctaagttatctggtggggtagcggttatcaaagtgggtgctgctactgaaaccgaaatgaaggatcgtaaacttcgtttagaagatgccatcaacgccacaaaagcagccgtagaagaagggatcgttcctggtggtggcacaacccttgctcacctcactcctagtctagaagagtgggctacaggcaatctggttaacgaagagttaaccggtgcattaatcgttgcccgtgccttaactgcccccttaaagcgcattgctgaaaacgcaggtcaaaacggtgcagttgtcgccgaacgggttaaagagaaagactttaacactggctacgatgctgcgactggtgagtttaccgatatgttagctgccggtatcgttgaccctgcaaaagtaacccgttctggtttacaaaatgctgcctccatcgcagggatgatcttaaccactgaatgtattgtggttgataagcctgagaaagaaaaagcccctgctggtggcggtggagactttgactactaa

SEQ ID NO: 9251 - protein, 540 aa, Cyanothece sp. ATCC 51142
MAKSIVYNEDARRALERGMDILAESVAVTLGPKGRNVVLEKKFGAPQIINDGITIAKEIELEDHIENTGVSLIRQAASKTNDVAGDGTTTATVLAHAIVKEGLRNVAAGANPIALKKGIDKATEFLVEKIAAHAKPIEDSKAIAQVGAISAGNDEEVGKMIAEAMDKVGKEGVISLEEGKSMFTELEITEGMRFDKGYISPYFVTDTERMEAVFEEPCILITDKKINLVQDLVPVLEQVARQGKSLVIIAEDIEKEALATLVVNRLRGVLNVAAVKAPGFGDRRKQMLEDIATLTGGTVVSEDAGLKLENTKIEMLGSARRMILTKDNTTIVAEGNEEAVKSRCDLIRRQIEDSDSSYDKEKLQERLAKLSGGVAVIKVGAATETEMKDRKLRLEDAINATKAAVEEGIVPGGGTTLAHLTPSLEEWATGNLVNEELTGALIVARALTAPLKRIAENAGQNGAVVAERVKEKDFNTGYDAATGEFTDMLAAGIVDPAKVTRSGLQNAASIAGMILTTECIVVDKPEKEKAPAGGGGDFDY

SEQ ID NO: 9252 - DNA, 1680 bp, Cyanothece sp. ATCC 51142
  CDS (1)..(1680): transl_table=11
atggcaaaaattgtatcatttagtgacgactctaggcgcgcattagagcaaggcgtaaacgccttggctgacgcggttagaattaccctcggtcccaaaggccgtaacgtattgttagagaagaaatttggtgcgccccaaattgtgaacgacgggatcaccgttgctaaagaaattgaattagaagaccccttagaaaatacaggggcaagattaatccaagaaattgcctcaaaaaccaaagaagtggccggagacggtactaccaccgccacggttattggtcaagctttgattaaagaagggcttaaaaatgtcattgcaggggctaaccctgtggctttacgtcgtggtatcgaaaaaaccatggcttttctagttaaagagatcgaaaatgtagctaaacccgtcgaaggggacgctattgcccaagtcgccagcgtgtctgctggtaatgatcaagaagtgggtaaaatgatcgctttggccatggataaagtgactaaagatggtgtcattaccgtagaagaatcaaaatctctgagtaccgagttagatgtggtcgaagggatgcagatcgatcgcggttatatttctccctatttcatcaccgatcaagaacggcaacaagtagaatttgacgatgccttaatcttaatcaccgataaaaagattagtgcgatcgctgatcttgtgcctatcttagaaaatgttgcccgcgctggcaaacccctcttaatcatcgccgaagacgtagaaggggaagcgttagccactttagtggttaataaggctagaggggtattaaacgtggctgctatcaaagcccctgcattcggagaaagacgcaaagcggttttacaagatatcgccattttaacgggtggtagtgtcatttccgaagaagtgggcttaagcttagatgcagtagacctagatatgttaggtcaagccaccaaaatcaatattgtcaaagataacaccaccatcgtcgctaccaccgacgatagaaccaaagctgcagtccaaaaacgcatcgaacagttgcggaaacaagcagccgaaaccgactctgactatgacagcgaaaagttacaagaacgcatcgctaaattagctggtggggtagcggttattaaagtgggggctgccaccgaaacggaattaaaggatcgtaaactccgtatcgaagatgccctgaacgccacaaaagcagccgtagatgaaggcattgttcctgggggtggtaccactttaattcacttagcgtctaaagtggctgactataaaaaccaactagccaacgctgaagaaaaagtggcagccgacctggtagcgagatcattggaagcccccttacgtcagttagcgaataacgctggcttagagggttcggtcattgttgaacgagtcagagaaacggactttaacgttggtttcaatgccatgactggcgagtttgaagacatgatcgcagccggtattattgaccctgctaaggtggttcgttctgccttacaaaacgctgcttctattgccggtatggtcttaaccacagaagccctagtggttgaaaaacccgaacctgaagcccctgctatgcctgatatgggcggtatgggcggtatgggcggtatgggtggtatgggcggtatgggcggtatgggtatgggcttctaa

SEQ ID NO: 9253 - protein, 559 aa, Cyanothece sp. ATCC 51142
MAKIVSFSDDSRRALEQGVNALADAVRITLGPKGRNVLLEKKFGAPQIVNDGITVAKEIELEDPLENTGARLIQEIASKTKEVAGDGTTTATVIGQALIKEGLKNVIAGANPVALRRGIEKTMAFLVKEIENVAKPVEGDAIAQVASVSAGNDQEVGKMIALAMDKVTKDGVITVEESKSLSTELDVVEGMQIDRGYISPYFITDQERQQVEFDDALILITDKKISAIADLVPILENVARAGKPLLIIAEDVEGEALATLVVNKARGVLNVAAIKAPAFGERRKAVLQDIAILTGGSVISEEVGLSLDAVDLDMLGQATKINIVKDNTTIVATTDDRTKAAVQKRIEQLRKQAAETDSDYDSEKLQERIAKLAGGVAVIKVGAATETELKDRKLRIEDALNATKAAVDEGIVPGGGTTLIHLASKVADYKNQLANAEEKVAADLVARSLEAPLRQLANNAGLEGSVIVERVRETDFNVGFNAMTGEFEDMIAAGIIDPAKVVRSALQNAASIAGMVLTTEALVVEKPEPEAPAMPDMGGMGGMGGMGGMGGMGGMGMGF

SEQ ID NO: 9254 - DNA, 1623 bp, Burkholderia ambifaria MC40-6
  CDS (1)..(1623): transl_table=11
atgagtgcaaaagacgtcaaattccatgacagcgcccgcgcccgcatcgtcaagggcgtgaacgtgctcgccgatgcggtgaaagtgacgctcgggccgaaaggccgcaacgtggtgatcgagcgcagcttcggcgcccccaccatcacgaaggacggcgtgtcggtcgcgaaggaaatcgagctgaaggatcgcttcgaaaacatgggcgcgcagatcgtcaagcaggtcgcatcgaagacggccgatgtggccggcgacggcacgaccacggccaccgtgctcgcgcagtcgatcgtgcaggaaggcatgaagcacgtcgccgccggcatgaatccgatggacctcaagcgcggcatcgacaaggccgtggccgccgtgctcgacgagctgcgcaaactgtcgaagccgatttccacgaaccgcgagatcgcgcaggtgggttcgatctcggcgaacgccgatgaggcgatcggcaagatcatcgccgacgcgatggagaaggtcggcaaggaaggcgtcatcacggtcgaggacggcaagtcgctcgagaacgagctggatgtggtcgaagggatgcagttcgatcgcggctatgtcagcccgtacttcatcaacgatccggaaaagcaggccgcgtatctggacgacgcgctgatcctgttgcacgacaaaaagatttcgaacatccgggatctgctgccggttctcgaggccacctcgaaggcaggcaagccgctgctgatcgtcgcggaagatatcgacggcgaagcgctggccacgctcgtggtcaacgcgatgcggggcatcctgaaggtcgcggccgtcaaggcgcccggtttcggcgaccggcgcaaggccatgctggaggacatcgcgatcctcaccggcgcgaccgtcatctcggaagaaaccggaaagcaactgcagaaggcgtcgctcgaggatctcggcagcgcgaaacgcgtcgaggtccgcaaggaagacacgatcatcatcgacggcgcgggcgaccaggagcgcatcgaggcgcgcgtgaagtcgatccgtacgcagatcgaggaaaccacgagcgactacgatcgcgagaagctgcaggaacgcgtggcgaagctcgccggcggtgtggccgtcatcaaggtaggcgctgccaccgaagtcgagatgaaggagaaaaaggaccgcgtcgacgatgcgctgcacgccacgcgcgcggcggtcgaggaaggtatcgtgccgggcggtggcgtggcgctcctgcgcgcgcgttcgacggcgacgagcctgaaaggcgccaacagcgatcaggacgccggtatccagatcgtgctgcgcgcgctcgaggcaccgctgcgcgtgatcgcgtcgaatgccggggacgagccttccgtcgtcatcgcgaaggtgctcgaaggcaagggcaacttcggctacaacgcggccaccggcgagtatggcgatctggtcgaggccggcgtcgtcgatccgaccaaggtcacgcgtacggcactgcagaacgccgcatcgattgccgggctgattctgacgaccgatgcaacagttgccgacgcgccgaaggacgaaaagcctgcgcaggcacccgcgccggagctcgagtactga

SEQ ID NO: 9255 - protein, 540 aa, Burkholderia ambifaria MC40-6
MSAKDVKFHDSARARIVKGVNVLADAVKVTLGPKGRNVVIERSFGAPTITKDGVSVAKEIELKDRFENMGAQIVKQVASKTADVAGDGTTTATVLAQSIVQEGMKHVAAGMNPMDLKRGIDKAVAAVLDELRKLSKPISTNREIAQVGSISANADEAIGKIIADAMEKVGKEGVITVEDGKSLENELDVVEGMQFDRGYVSPYFINDPEKQAAYLDDALILLHDKKISNIRDLLPVLEATSKAGKPLLIVAEDIDGEALATLVVNAMRGILKVAAVKAPGFGDRRKAMLEDIAILTGATVISEETGKQLQKASLEDLGSAKRVEVRKEDTIIIDGAGDQERIEARVKSIRTQIEETTSDYDREKLQERVAKLAGGVAVIKVGAATEVEMKEKKDRVDDALHATRAAVEEGIVPGGGVALLRARSTATSLKGANSDQDAGIQIVLRALEAPLRVIASNAGDEPSVVIAKVLEGKGNFGYNAATGEYGDLVEAGVVDPTKVTRTALQNAASIAGLILTTDATVADAPKDEKPAQAPAPELEY

SEQ ID NO: 9256 - DNA, 1635 bp, Opitutus terrae PB90-1
  CDS (1)..(1635): transl_table=11
atggctgctaaacaactcctgttcgacgagtctgctcgtcagaaaatccttcgcggcgtcgagctgctctcgcgcgcggtgaaggtcaccctcggccccaagggccgcaacgtcgtcatcgacaagaaatttggttcaccgaccgtcaccaaggacggcgtgaccgtcgccaaggaggtcgagctgcccgatccctacgagaacatgggcgcgcagatggtgaaggaagtcgcttccaagacgagcaacgccgccggtgacggcaccaccaccgccaccgtgctcgcggaggccatctacaaggaaggcctgaagaacgtcacggccggctcgaacccggtttacctgaagcgcggcatcgacaaggctgtcgaggccgccgtcaccgagctcgcgcgcgtttccaagaaggtcaacgaccgcgaggaaatccgccaggtcgcgaccgtgtcggccaactgggacgagacgatcggcaacatcattgccgacgcgatggacaaggtgggcaaggacggcacgatcaccgtcgaggaagcgaagtcgatcgagacgacgctcgacgtggtcgagggcatgcagttcgacaagggctacctgtcgccgtatttcgccaccaacgcggaagcgcaggaagcgatcctcgaggacgcgtacgttttgatccacgagaagaagatcagctcgctgcaggacctcctgccgctgctgcagaccgtggccaagagcggcaagccgctgctcgtcatcgctgaggaagtcgaaggcgaagcgctcgccgccctcgtggtgaacaagatccgtggcacgctgaacgtgtgtgcggtgaaggctcctggcttcggcgatcgccgcaaggcgatgctcgaggacatcgcggtcctcaccggcggccgctgcatcaccgaggatctcggcatcaagctcgagaacgtccaggtcagcgacctcggtcgcgccaagcgcatcaccgtcgacaaggagaacaccacgatcgtcgagggtgcgggcaagagctccgacatccagggccgcgtgaagcagatccgtcgtcagatcgacgagaccacgtccgactacgatcgcgagaagctccaggaacgcctggcgaagctcgccggtggcgtggccgtgatcaatgtcggcgccgcgaccgagaccgagatgaaggaaaagaaggctcgcgtcgaagacgcgctgcacgccacgcgtgcggccgtcgaggaaggcatcgtcgcaggcggtggcgtggcgctcctgcgctgcgtcaaggtcatcgacgcgctgcagctcgagggcgacgagaagatcggttcgcaaatcgtccgtcgtgcggttgagcacccgatccggatgctctgccagaacgccggcgtcgaaggcgcggttgtcgtgggcgagattctctcgaacaagggcaactacggctacaacgttgcgaccgacaagtacgaggatctggtcaaggccggtgtcgtcgacccgacgaaggtcacgcgcaccgcgctgcagaacgccgcgtccgtcgccggcctgttgctcacgaccgagtgcatgatcactgagattccggagaaagaaaaggctccggcgggtggtcctggcgccggcggcatgggcggaatggattactaa

SEQ ID NO: 9257 - protein, 544 aa, Opitutus terrae PB90-1
MAAKQLLFDESARQKILRGVELLSRAVKVTLGPKGRNVVIDKKFGSPTVTKDGVTVAKEVELPDPYENMGAQMVKEVASKTSNAAGDGTTTATVLAEAIYKEGLKNVTAGSNPVYLKRGIDKAVEAAVTELARVSKKVNDREEIRQVATVSANWDETIGNIIADAMDKVGKDGTITVEEAKSIETTLDVVEGMQFDKGYLSPYFATNAEAQEAILEDAYVLIHEKKISSLQDLLPLLQTVAKSGKPLLVIAEEVEGEALAALVVNKIRGTLNVCAVKAPGFGDRRKAMLEDIAVLTGGRCITEDLGIKLENVQVSDLGRAKRITVDKENTTIVEGAGKSSDIQGRVKQIRRQIDETTSDYDREKLQERLAKLAGGVAVINVGAATETEMKEKKARVEDALHATRAAVEEGIVAGGGVALLRCVKVIDALQLEGDEKIGSQIVRRAVEHPIRMLCQNAGVEGAVVVGEILSNKGNYGYNVATDKYEDLVKAGVVDPTKVTRTALQNAASVAGLLLTTECMITEIPEKEKAPAGGPGAGGMGGMDY

SEQ ID NO: 9258 - DNA, 1635 bp, Nostoc punctiforme PCC 73102
  CDS (1)..(1635): transl_table=11
atggcaaagcgcattatctacaacgaaaacgcccgtcgcgccttagaacgaggcattgacatcttggctgaggctgtagctgttacccttggccccaaaggtcgtaacgtagtcctagaaaagaaatttggcgcaccgcaaattgttaatgacggtgtaacgatcgctaaagaaatcgaattagaagaccacattgaaaacactggtgtagctttgattcgtcaggctgcttctaaaaccaacgatgctgctggcgatggcaccacaactgctaccgttttagctcatgcgatcgtcaaagaaggcttgcggaacgttgcagctggtgctaacgcaatttccctgaagcgtggtattgataaagctactgcctttttggtagacaaaatcaaagaacacgcccgtccagtggaagattccaaagccattgcccaagttggtgcaatctcggctggtaatgacgaagaagtcggtcagatgattgcccaagcaatggacaaggtgggtaaggaaggcgtaatttccctagaagaagggaaatctatgttcaccgagttggaaatcactgaagggatgcgctttgacaaaggctacatctctccttatttcgctactgaccctgagcggatggaagcagtttttgatgagcctttcatactgctgaccgataagaaaatcgctttggtacaagacctcgtaccagtgttagagcaagtagctcgtgctggtcgtcctttggtaattatcgccgaagatatcgaaaaagaagctttagcaaccttggtagtaaaccgtttacgcggtgtactcaacgtggctgctgttaaggctcctggttttggcgatcgccgcaaagcactactagaagacatcgctgttttaactggtggtcaactaattaccgaagatgctggtttgaagctagataacaccaagctggatagcctgggtaaagctcgccggatcaccatcaccaaggacagcaccacaattgttgccgaaggtaacgaagctgctgttaaagctcgtgtcgaacagattcgtcgtcaaatcgatgaaaccgaatcttcttacgacaaagagaaattacaagagcgtcttgctaaactctctggtggtgtcgctgtcgtgaaagttggtgcagcgactgaaaccgaaatgaaagacaagaaactgcgcctagaagacgctatcaacgccaccaaagctgctgtggaagaaggtatcgttcctggcggtggtacaactctggctcaccttgctcctgaattggaagtttgggcaaagagcaatcttaaagatgaagagttgattggtgctttgattgttgttcgcgccttacctgcacctctgaagcggattgctgaaaacgctggtcagaatggtgctgtgatcgctgaacgcgtcaaagagaaagaattcaacgttggctacaatgctgcaacgaacgaatttgtcgatttgttagctgctggtattgttgaccctgctaaagtgactcgttctgctctgcaaaacgctgcatccatcgctggtatggtgttgacaaccgaatgtattatcgttgacaagcctgaaccaaaagacggcgctcctgctggcgctggtgctggtggtggcgacttcgattactaa

SEQ ID NO: 9259 - protein, 544 aa, Nostoc punctiforme PCC 73102
MAKRIIYNENARRALERGIDILAEAVAVTLGPKGRNVVLEKKFGAPQIVNDGVTIAKEIELEDHIENTGVALIRQAASKTNDAAGDGTTTATVLAHAIVKEGLRNVAAGANAISLKRGIDKATAFLVDKIKEHARPVEDSKAIAQVGAISAGNDEEVGQMIAQAMDKVGKEGVISLEEGKSMFTELEITEGMRFDKGYISPYFATDPERMEAVFDEPFILLTDKKIALVQDLVPVLEQVARAGRPLVIIAEDIEKEALATLVVNRLRGVLNVAAVKAPGFGDRRKALLEDIAVLTGGQLITEDAGLKLDNTKLDSLGKARRITITKDSTTIVAEGNEAAVKARVEQIRRQIDETESSYDKEKLQERLAKLSGGVAVVKVGAATETEMKDKKLRLEDAINATKAAVEEGIVPGGGTTLAHLAPELEVWAKSNLKDEELIGALIVVRALPAPLKRIAENAGQNGAVIAERVKEKEFNVGYNAATNEFVDLLAAGIVDPAKVTRSALQNAASIAGMVLTTECIIVDKPEPKDGAPAGAGAGGGDFDY

SEQ ID NO: 9260 - DNA, 1683 bp, Nostoc punctiforme PCC 73102
  CDS (1)..(1683): transl_table=11
atggcgaaaattattgcatttgacgaggaatcgcggcgagctctagaaaggggtgttaacgcccttgctgatgccgtaaaaatcaccttggggccgaaaggtcgtaatgtccttttagagaaaaaatttggcgcacctcaaattgtcaacgatggtatcactgttgccaaggaaattgaattagaagatcctttggaaaatactggtgcaagactcatccaggaagtggcctcaaaaactaaagatgttgctggggatggtacaaccaccgccacagttttagcacaagccttgattcgggaaggtttgaagaacgtcgcggcgggtagtaacccagttagcttgagacgcgggatcgacaaaactattgaggcattggtactggaaattgccaagatagccaagccagtagaaggaagtgcgatcgctcaagttgccactgtttctgctggtaacgatgaagaagttggtcaaatgttagctcaagcaatggaaaaagtcaccaaagatggtgtaattaccgttgaagaatctaaatccctgacaactgaactagaagtagttgaagggatgcagattgacaggggttacatttcaccctactttgtcaccaacaacgagcggcaaatcgtggaatttgaaaacgcccggatcttggtgacagataaaaaaatcagcagcatccaagatttagtgccgattttggaaaaagtcgcccgttctggtcagcccttgctgattattgctgaggatgtcgaaggtgatgccttggcaactttggtagtgaacaaagcgcggggtgtacttgctgtagctgcaatcaaagcgcctggatttggcgatcgccgcaaagctttgttagaagatattgctattctcaccgatggacagttgatttctgaagaaatcggcttgagcctagataccgctgctctagaagcactgggaactgctcgcaaaatcaccattgacaaagaaagcaccaccattgtagctggcagtgtcaccaagccagaagtgcaaaagcggattggtcaaattcgcaggcagttggaagaaaccgattctgaatacgatcaagaaaaactgcaagaacgcatcgccaagctcgctggtggtgtggcagtgattaaagtgggtgcggcaaccgaaaccgaactcaaagaccgtaaactgcggattgaagacgcgctgaacgctactaaagccgctgtggaagaaggtattgttcctggtggtggaacaactctaattcacttagctaaggcagtagaagcgattaaaaagaccttacaaaatgacgaagaaagaattggggctgatattgtcgaacgagcgctagaagcgcccttgcgccaaatagcagacaacgctggtgcagaaggttctgtgatcgtttctaaagtccgagacagcgagttcaacattggctacaacgccgctactggcgaatttgaagacttgatcgctgctggtattatcgaccctgccaaagtcgtgcgttcagctttgcaaaatgctggttccattgctggtttggtcttaaccactgaagcgatcgttgttgaaaagccagagaagaaatctgctgctgctgcccctgacatgggcggcatgggtggtatgggcggcatgggcggcatgggtggtatgggcggcatgggcggcatgggcatgttctaa

SEQ ID NO: 9261 - protein, 560 aa, Nostoc punctiforme PCC 73102
MAKIIAFDEESRRALERGVNALADAVKITLGPKGRNVLLEKKFGAPQIVNDGITVAKEIELEDPLENTGARLIQEVASKTKDVAGDGTTTATVLAQALIREGLKNVAAGSNPVSLRRGIDKTIEALVLEIAKIAKPVEGSAIAQVATVSAGNDEEVGQMLAQAMEKVTKDGVITVEESKSLTTELEVVEGMQIDRGYISPYFVTNNERQIVEFENARILVTDKKISSIQDLVPILEKVARSGQPLLIIAEDVEGDALATLVVNKARGVLAVAAIKAPGFGDRRKALLEDIAILTDGQLISEEIGLSLDTAALEALGTARKITIDKESTTIVAGSVTKPEVQKRIGQIRRQLEETDSEYDQEKLQERIAKLAGGVAVIKVGAATETELKDRKLRIEDALNATKAAVEEGIVPGGGTTLIHLAKAVEAIKKTLQNDEERIGADIVERALEAPLRQIADNAGAEGSVIVSKVRDSEFNIGYNAATGEFEDLIAAGIIDPAKVVRSALQNAGSIAGLVLTTEAIVVEKPEKKSAAAAPDMGGMGGMGGMGGMGGMGGMGGMGMF

SEQ ID NO: 9262 - DNA, 1635 bp, Sulfurihydrogenibium sp. YO3AOP1
  CDS (1)..(1635): transl_table=11
atggcggcaaaaaaattagtttatggtgacgaagcaagagctaaattaaaagcaggtgtcgataaacttgcaaacgcagttaaagtaacacttggaccaagaggtagagaagtaattttagaaaaaaaatggggttctccagtagttactaaagacggtgtatctgttgcaaaagaaatagagcttacagacccatacgaaaacatggcagctcagcttgtaaaagaagttgcatctaagacagcagacgttgctggtgatggaacaacaacagccacagtattaactcaggcaatctatgaagaaggattaaaagcaattgcttctggtgctaatccaatttatgtaaaaagaggaattgatgaagcagttaaaataattgttgaagaactcaaaaaaatatctaaaccagttactggaagaaaagagattgaacaagttgctacaatctctgcaaacaacgacccagaaattggtaaaatcattgcggatgcaatggagaaagtaggaaaagatggcgtaatcactgttgaagaatctaaatctgcagaaactgtattagaagtaacagaaggtatgcaatttgatagaggatacttatctccatactttgtaacaaatgcagaaaaaatggaagctgttttagaaaatccatacatcttaatctatgaaaagaaagtaggcaacataagggaacttttaccagtattagaaaaagttgttcaaacaaacaaaccacttttaataattgctgaagatgttgaaggagaagctcttgctacattagtagtaaaccatatcaaaggagtattaagagtatgtgcagttaaagctccaggatttggcgaaagaagaaaagcaatgcttcaagacattgctatcttaacaggcggtactgcaatcacagaagaccttggaattaagcttgaatctgttgatttagatatgcttggtaaagctgataaagttgttgtagataaagataacactacaattatcggcggaaaaggaaatccagaagatatcaaagcaagaatagagcaaatcaaaaaacaaattgaaacaacaacttctgaatatgacaaagaaaaattacaagaaagacttgctaaacttgccggcggtgtagctatcattaaagttggtgctgcaacagaagcagaactaaaagagaaaaaagacagagttgatgacgcagtacatgctacaaaagctgcagtagaagaaggtattgttccaggtggtggtattgcaatatttagagcatcaagagcactttgcaacataaaagaagaaaacacagacaaagcttggggtatcaagattgttaaaaatgcttgcaaagttccattaaaacaaattgcttataacgcaggatttgaaggttctgtgataattgaaaaaatcaaagatgttgacaatgtaaactacggatttgatgcagctactggtgagtatgtagacatggtagaagctggtatcattgacccaactaaggttgtaagaacagctctccaaaatgctgcatctattgcaggaacaatgcttacagctgaatgcttagtagcagaaattaaggaaaaagaagaaaaactcccaggcgcaggcggtggaatgggagacatggacttctaa

SEQ ID NO: 9263 - protein, 544 aa, Sulfurihydrogenibium sp. YO3AOP1
MAAKKLVYGDEARAKLKAGVDKLANAVKVTLGPRGREVILEKKWGSPVVTKDGVSVAKEIELTDPYENMAAQLVKEVASKTADVAGDGTTTATVLTQAIYEEGLKAIASGANPIYVKRGIDEAVKIIVEELKKISKPVTGRKEIEQVATISANNDPEIGKIIADAMEKVGKDGVITVEESKSAETVLEVTEGMQFDRGYLSPYFVTNAEKMEAVLENPYILIYEKKVGNIRELLPVLEKVVQTNKPLLIIAEDVEGEALATLVVNHIKGVLRVCAVKAPGFGERRKAMLQDIAILTGGTAITEDLGIKLESVDLDMLGKADKVVVDKDNTTIIGGKGNPEDIKARIEQIKKQIETTTSEYDKEKLQERLAKLAGGVAIIKVGAATEAELKEKKDRVDDAVHATKAAVEEGIVPGGGIAIFRASRALCNIKEENTDKAWGIKIVKNACKVPLKQIAYNAGFEGSVIIEKIKDVDNVNYGFDAATGEYVDMVEAGIIDPTKVVRTALQNAASIAGTMLTAECLVAEIKEKEEKLPGAGGGMGDMDF

SEQ ID NO: 9264 - DNA, 1644 bp, Actinobacillus pleuropneumoniae serovar 7 str. AP76
  CDS (1)..(1644): transl_table=11
atggcagcaaaagacgttaaattcggtaatgacgcacgtgtaaaaatgttaaaaggcgtgaatgttttagcagatgcggtaaaagtaactttaggtcctaaaggccgtaacgttgtgttagataaagcatacggtgcgccgacaatcactaaagacggcgtgtcggttgcacgtgaaatcgaattagaagataaattcgagaatatgggcgcacaaatggtaaaagaagtggcgtcaaaagcgaacgatgcggccggtgacggtacgacaaccgcaactgttcttgctcaagcaatcgtaaacgaaggcttaaaagcagtagcggcaggtatgaatccgatggatttaaaacgcggtatcgataaagcggttgttgctgtagtggaagaattaaaagcgatttctaagccgtgcgaaacttcaaaagaaattgagcaagtaggtacgatttcagcaaactctgatgaaaccgtaggtaaactaattgcgcaagcaatggaaaaagtcggtaaagaaggcgttatcactgttgaagacggtacaggtttagatgatgcgttagatgtggtagaaggtatgcaatttgaccgtggttacctttctccatacttcatcaacaaaccggaagccggtacggttgaattagaaaatccatacattattttagtcgataaaaaaatcagcaacattcgtgaaatcttaccggtattagaagcggtagcgaaagcgggtaaaccgttattaatcgtagcggaagatatcgaaggcgaagcgttagcaacattagtggtaaatactatgcgcggtatcgtgaaagtggctgcggtaaaagcaccgggctttggcgatcgtcgtaaagcaatgttacaagatattgcaattttaaccgcaggtactgtgatttcggaagaaatcggtatggaacttgagaaagcgactctcgaagaattaggtcaagcaaaacgtgttgtgatcacaaaagataacacaaccattattgacggtatcggtgacgaagcgcaaatcaaagcacgagtagcgcaaattcgccaacaaattgaagattcgacatcagattacgataaagaaaaacttcaagagcgtgttgcaaaattagccggtggtgttgcggtaatcaaagtaggtgcggcaaccgaagtggcgatgaaagagaaaaaagaccgtgtggatgatgcgttacacgcaactcgtgcggcagttgaagaaggtattgtaccgggaggcggtgttgcgttagtgcgtgcggcttctaaagtagctacaactttaacaggcgataatgaagagcaaaatgtcggtatcaaacttgcgcttcgtgcgatggaagcaccgcttcgccaaatcgtgactaacgcaggcgaagaagcgtccgttgtggctcgtaatgtgaaagacggtaacggtaactacggttataatgccggtacggaacaatacggtgatatgcttgagatgggtatcttagatccgacaaaagtaactcgttcggcattacaattcgcagcatcaattgcaggtttaatgatcacgacagaatgtatgatcacagatttaccgaaagaggaaaaattagatccggctgcagcaatgggcggcatgggtggtatgggcggaatgatgtaa

SEQ ID NO: 9265 - protein, 547 aa, Actinobacillus pleuropneumoniae serovar 7 str. AP76
MAAKDVKFGNDARVKMLKGVNVLADAVKVTLGPKGRNVVLDKAYGAPTITKDGVSVAREIELEDKFENMGAQMVKEVASKANDAAGDGTTTATVLAQAIVNEGLKAVAAGMNPMDLKRGIDKAVVAVVEELKAISKPCETSKEIEQVGTISANSDETVGKLIAQAMEKVGKEGVITVEDGTGLDDALDVVEGMQFDRGYLSPYFINKPEAGTVELENPYIILVDKKISNIREILPVLEAVAKAGKPLLIVAEDIEGEALATLVVNTMRGIVKVAAVKAPGFGDRRKAMLQDIAILTAGTVISEEIGMELEKATLEELGQAKRVVITKDNTTIIDGIGDEAQIKARVAQIRQQIEDSTSDYDKEKLQERVAKLAGGVAVIKVGAATEVAMKEKKDRVDDALHATRAAVEEGIVPGGGVALVRAASKVATTLTGDNEEQNVGIKLALRAMEAPLRQIVTNAGEEASVVARNVKDGNGNYGYNAGTEQYGDMLEMGILDPTKVTRSALQFAASIAGLMITTECMITDLPKEEKLDPAAAMGGMGGMGGMM

SEQ ID NO: 9266 - DNA, 1653 bp, Chloroherpeton thalassium ATCC 35110
  CDS (1)..(1653): transl_table=11
atggctgcaaaagaaattcattttgatgccgaaggtcgcaacgcgttgaagcgtggtgttgacaaactcgccgatgctgtaaaagtaacgctcggccctgctggtcgcaatgtcattatcgataaaaaattcggtgctccaactgtgaccaaagacggtgttacggttgcaaaagaagtcgagctcgaagatccagttgaaaacatgggtgcgcaaatggttcgcgaagtggcttccaaaaccagcgatgtggctggcgacggtacaaccaccgcaactgttttggctcaagctatttatcgtgaaggtttgaaaaacgtcacagctggtgcaaatccaatggatttgaagcgcggaatcgacaaagccgttactggtgtgattattgagctcaaaaaaattagccgtccaattgctgataaaaaagagatcgctcaagttggttgcatttccgcaaacaacgattccgaaatcggcgacttgatcgcagaagcgatggaaaaagttggtaaagatggcgtaatcaccgttgaagaagcaaaaggtacagaaacagaattgaaagtggttgaaggtatgcagttcgatcggggctacctttctccttactttgtaaccaatgctgactcaatggaagctgttcttgatgagccatacattctcatttacgacaagaaaatcagtaacatgaaagagttgttgccgattcttgaaaaaaccgctcaatcaggccgtccgcttctcattattgcagaggaaattgaaggtgaagcgcttgctacacttgttgtaaacaaacttcgtggcacattgaaagtttgtgctgtaaaagctcctggttttggcgatcgtcgcaaagcgatgcttgaagatatcgctattctcaccggcggtacagtcatctccgaagaaaaaggttacaaacttgaaaatgcaaccattggctaccttggccaagctggcagcgtaaccatcgataaagacaactcaacaatcgttgaaggtaaaggaacggaagacgacattaaagctcgcatcaacgaaattaaaaatcaggttgaaaaagccacttccgactacgacaaagaaaagctccaagagcgtttggctaaactttctggtggtgtagctgttttgaacatcggtgcaacaaccgaagttgaaatgaaagaaaagaaagctcgcgttgaagatgcacttcatgctacacgcgcagctgttcaagaaggtatcgttgcaggtggcggcgttgcattgattcgtgccgttacaggtctcgagaacgttcaagttgaaaatgaagatcaaaagactggtcttgaaatcatccgtcgtgcgctcgaagaaccacttcgtcagattgtggcaaacacaggcacggttgatggttctgttgttgtcatgaaagtaaaagaaggcaaagacgactttggcttcaacgcacgcactgaaacttttgaaaacatgattgctgctggtgtgatcgacccaaccatggtaactcgtaccgcacttgaaaatgcagcatccgttgctggcttgcttttgactacggaagccgttatttctgagaagccagaagatgaaaaaatgcctccaatgcctcctggtggcggcatgggcggaatgggtggcatgggcggaatgtattaa

SEQ ID NO: 9267 - protein, 550 aa, Chloroherpeton thalassium ATCC 35110
MAAKEIHFDAEGRNALKRGVDKLADAVKVTLGPAGRNVIIDKKFGAPTVTKDGVTVAKEVELEDPVENMGAQMVREVASKTSDVAGDGTTTATVLAQAIYREGLKNVTAGANPMDLKRGIDKAVTGVIIELKKISRPIADKKEIAQVGCISANNDSEIGDLIAEAMEKVGKDGVITVEEAKGTETELKVVEGMQFDRGYLSPYFVTNADSMEAVLDEPYILIYDKKISNMKELLPILEKTAQSGRPLLIIAEEIEGEALATLVVNKLRGTLKVCAVKAPGFGDRRKAMLEDIAILTGGTVISEEKGYKLENATIGYLGQAGSVTIDKDNSTIVEGKGTEDDIKARINEIKNQVEKATSDYDKEKLQERLAKLSGGVAVLNIGATTEVEMKEKKARVEDALHATRAAVQEGIVAGGGVALIRAVTGLENVQVENEDQKTGLEIIRRALEEPLRQIVANTGTVDGSVVVMKVKEGKDDFGFNARTETFENMIAAGVIDPTMVTRTALENAASVAGLLLTTEAVISEKPEDEKMPPMPPGGGMGGMGGMGGMY

SEQ ID NO: 9268 - DNA, 1644 bp, Cupriavidus taiwanensis
  CDS (1)..(1644): transl_table=11
atggcagcaaaagacgtagtgttcggcgacgccgcccgtgccaagatggtcgaaggcgtgaacatcctcgccaacgccgttaaagtgaccctgggcccgaagggccgcaacgtggtgctggagcgcagcttcggcgggccgaccgtgaccaaggacggcgtgtccgtggctaaggaaatcgagctgaaggacaagctgcagaacatgggcgcccagatggtcaaggaagtggcttccaagaccagcgacaacgccggtgacggtaccaccaccgcaaccgtgctggcccagtcgatcgtgcgcgaaggcatgaagttcgtcgccgccggcatgaacccgatggacctgaagcgcggcatcgacaaggctgtcggcgctgccgtggaagagctgaagaagatcagcaagcccaccaccaccagcaaggaaatcgcccaggtcggcgcgatctcggccaacagcgacgcctcgatcggcgagcgcatcgccgaagccatggacaaggtcggcaaggaaggcgtgatcaccgtcgaagacggcaagtcgctggccgacgagctggaagtcgtggaaggcatgcagttcgaccgcggctacctgtcgccgtacttcatcaacaacccggaaaagcaggttgtcgcgctggacaacccgttcgtgctgctgttcgacaagaagatcagcaacatccgcgacctgctgccggtgctggagcaagtggccaaggccggccgcccgctgctgatcatcgctgaagacgtcgagggcgaagccctggcgaccctggtggtcaacaacatccgtggcatcctgaagaccgccgccgtcaaggctccgggcttcggcgaccgccgcaaggccatgctggaagacatcgccatcctgaccggcggcaccgtcatcgccgaagaagtcggcctgacgctggaaaaggccaccctgaacgacctgggccaggccaagcgcatcgaaatcggcaaggaaaacaccatcatcatcgatggcgccggcgacgctgctggcatcgaaggccgcgtgaagcagatccgcgcccagatcgaagaagcgacctcggactacgaccgtgagaagctgcaagagcgcgtggccaagctggccggcggtgttgccgtgatcaaggttggcgctgccaccgaagtcgaaatgaaggaaaagaaggcccgcgtggaagacgccctgcacgccacccgcgctgcggtggaagaaggcatcgtccccggcggtggtgtggccctgctgcgcgcccgcgccgcgatctcggctctgcaaggcgacaacgccgaccagaacgccggtatcaagatcgtgctgcgcgcgatggaagagccgctgcgccagatcgtgctgaacgccggtgaagaagcttcggtggtcgttgccaaggtcatcgaaggcaagggcaactacggctacaacgccgcttcgggcgagtacggcgacctggtggaaatgggcgtgctggacccgaccaaggtcacccgcaccgcactgcagaacgccgcttcggtggcttcgctgatgctgaccaccgactgcgccgtggccgaaacgccgaaggaagagtcggctccggcaatgccgggcggcatgggcggcatgggcggtatggaaggcatgatgtaa

SEQ ID NO: 9269 - protein, 547 aa, Cupriavidus taiwanensis
MAAKDVVFGDAARAKMVEGVNILANAVKVTLGPKGRNVVLERSFGGPTVTKDGVSVAKEIELKDKLQNMGAQMVKEVASKTSDNAGDGTTTATVLAQSIVREGMKFVAAGMNPMDLKRGIDKAVGAAVEELKKISKPTTTSKEIAQVGAISANSDASIGERIAEAMDKVGKEGVITVEDGKSLADELEVVEGMQFDRGYLSPYFINNPEKQVVALDNPFVLLFDKKISNIRDLLPVLEQVAKAGRPLLIIAEDVEGEALATLVVNNIRGILKTAAVKAPGFGDRRKAMLEDIAILTGGTVIAEEVGLTLEKATLNDLGQAKRIEIGKENTIIIDGAGDAAGIEGRVKQIRAQIEEATSDYDREKLQERVAKLAGGVAVIKVGAATEVEMKEKKARVEDALHATRAAVEEGIVPGGGVALLRARAAISALQGDNADQNAGIKIVLRAMEEPLRQIVLNAGEEASVVVAKVIEGKGNYGYNAASGEYGDLVEMGVLDPTKVTRTALQNAASVASLMLTTDCAVAETPKEESAPAMPGGMGGMGGMEGMM

SEQ ID NO: 9270 - DNA, 1641 bp, Alteromonas macleodii 'Deep ecotype'
  CDS (1)..(1641): transl_table=11
atggcagctaaagaagtacgttttggtgatgacgctcgcagcaaaatgctaaaaggcgtaaacacactagctaatgcagttaaagtaacactaggtccaaaaggccgtaacgttgttctagacaagtctttcggtgcaccaactatcactaaagatggtgtgtctgtagcgaaagaaatcgagcttgaagacaagttcgaaaacatgggcgcgcagatggtaaaagaagtcgcgtctaaagcgaacgacgaagcgggtgacggtacaactactgcaaccgttctagcgcaagctatcgtaactgaaggccttaagagcgttgcggcgggtatgaacccaatggaccttaagcgcggtatcgacaaagcggttatcgcggctgttgaagagcttaaagccctttctactgactgtgcagacagcaagtctatcgcacaggtaggtactatctctgcaaactctgacgcagaagttggcgacatcattgctcaagcaatggaaaaagtgggtaaagaaggtgttatcaccgtagaagaaggtcaagcacttcaaaacgaactagacgttgttgaaggtatgcagttcgaccgcggttacctatcgccatacttcatcaacaaccaagaaaacggcaccgttgaactagacaacccgttcatcctattggttgacaagaaaatttctaacatccgcgaactactgcctacccttgaaggcgtagcgaaagcgggtaagccgctaatgatcatcgctgaagatgttgaaggcgaagcgcttgctacactagtagttaacaacatgcgtggtattgttaaagttgcagcggttaaagctcctggttttggtgaccgtcgtaaagcaatgcttcaagacatcgctattctaactggcggtactgtaatctctgaagagattggtcttgagcttgaaaaagttcaactagaagaccttggtactgctaagcgcgtagttatcaacaaagacaacaccactgttgttgacggtaacggcgaccaagaagcaattgaaggccgttgtgcacaaatcaaaggtcaaattgaagagtcttcgtctgactacgacaaagagaagcttcaagaacgtcttgctaagctttcaggcggtgttgcagtaattaaagttggtgcagcgactgaagttgaaatgaaagagaagaaagaccgcgtagaagatgcactacatgcaactcgcgcagcggttgaagaaggtgtggtacctggtggtggtgttgcactagtacgcgcagcggcgaagctttctgagctaactggcgacaacgaagaccaaacagtaggtgttaagcttgcgctacgtgcaatggaagcgcctctacgtcaaatctctatcaattcaggtgcagaagcatcagtagtggttaacgaagtgaagaacggcgacggtaactacggttacaacgctggtaacgacacttacggcgacatgctagagatgggtattcttgacccaactaaagtaacgcgctctgcactacagttcgcatcatcaattgcttcactaatgatcactactgaagcaatggtagctgaactacctaaagacgaagctgcgccagcaatgcctgatatgggcggcatgggcggaatgggcggcatgatgtaa

SEQ ID NO: 9271 - protein, 546 aa, Alteromonas macleodii 'Deep ecotype'
MAAKEVRFGDDARSKMLKGVNTLANAVKVTLGPKGRNVVLDKSFGAPTITKDGVSVAKEIELEDKFENMGAQMVKEVASKANDEAGDGTTTATVLAQAIVTEGLKSVAAGMNPMDLKRGIDKAVIAAVEELKALSTDCADSKSIAQVGTISANSDAEVGDIIAQAMEKVGKEGVITVEEGQALQNELDVVEGMQFDRGYLSPYFINNQENGTVELDNPFILLVDKKISNIRELLPTLEGVAKAGKPLMIIAEDVEGEALATLVVNNMRGIVKVAAVKAPGFGDRRKAMLQDIAILTGGTVISEEIGLELEKVQLEDLGTAKRVVINKDNTTVVDGNGDQEAIEGRCAQIKGQIEESSSDYDKEKLQERLAKLSGGVAVIKVGAATEVEMKEKKDRVEDALHATRAAVEEGVVPGGGVALVRAAAKLSELTGDNEDQTVGVKLALRAMEAPLRQISINSGAEASVVVNEVKNGDGNYGYNAGNDTYGDMLEMGILDPTKVTRSALQFASSIASLMITTEAMVAELPKDEAAPAMPDMGGMGGMGGMM

SEQ ID NO: 9272 - DNA, 1644 bp, Phenylobacterium zucineum HLK1
  CDS (1)..(1644): transl_table=11
atggctgccaaagacgtctatttctcctccgacgcgcgcgaccgcatgctgcgcggcgtcaacaccctcgccaacgcggtgaaggtgaccctcggccccaagggccgcaacgtcgtcatcgagaagtcgttcggcgccccgcgctcgaccaaggacggcgtgtcggtcgccaaggaaatcgagctgtcggacaagttcgagaacctgggcgcccagctcatccgtgaagtggcctcgaagaccaacgacaaggccggcgacggcaccacgaccgccacggtcctggcccaggccatcgtcgtggaaggcctgaagtcggtcgcggccggcatgaacccgatggacctgaagcgcggcgtcgacaaggccgtggccaaggtcatcgaggagatcaaggcgacctccaagaaggtctcggccaacagcgagatcgcccaggtcggcaccatctcggccaacggcgacgtggaagtgggcgagatgatcgcccgcgccatggaaaaggtcggcaacgaaggcgtcatcacggtcgaagaggccaagaccgccgagaccgagctcgacgtcgtcgaggggatgcagttcgaccgcggctacctgtcgccgtacttcatcaccaacgccgagaagatggaggccgacctcgaagagccgctgatcctgctcttcgaaaagaagctctcctcgctgcagcccctgctgccggtgctggaagccgtggtccagtcgggccgcccgctcctgatcatcgctgaagacgtcgagggcgaagcgctggcgaccctcgtggtcaacaagctgcgcggcggcctgcgcgtcgcggccgtcaaggctccaggcttcggcgaccgccgcaaggccatgctggaagacatcgcgatcctgaccggcggccagctgatcagcgaagacctcggcatcaagctcgagaacgtcagcctcgacatgctgggccgggccaagaaggtcacgatcaccaaggaagacaccacgatcgtggacggctcgggcgacaagagcggcatcgaaggccgcatcgcccagatcaagaagcagatcgaggacaccacctccgactacgacaaggagaagctccaggagcgtctcgccaagctcgcgggcggcgtcgcggtgatccgcgtcggcggcgcgaccgaagtcgaggtgaaggagaagaaggaccgcgtcgacgacgccctgaacgccacccgcgctgcggtggaagaaggcatcgtccccggcggcggcgtcgccctgctgaaggcctcgaaggtgctcgacggcttcaagggcgacaacgacgaccaggaagccggcatcgccatcgtgcgccgcgccctgcaggctccgatccgtcagatctcggagaacgcgggcgtcgagggctcgatcgtggtgggcaaggtgctcgagaacgcctcgccgaccttcggcttcaacgcccagacggaagagtacgtcgacctcgtgcaggccggcgtgatcgacccggcgaaggtggtccgcaccgccctgcaggacgccgcctcggtggccggcctgctgatcaccacggaagcggccatcgtcgaggcccccaagaagggcggcgccggcggcgctccgggcggcatgcccggcggcatgggcgacatggacttctaa

SEQ ID NO: 9273 - protein, 547 aa, Phenylobacterium zucineum HLK1
MAAKDVYFSSDARDRMLRGVNTLANAVKVTLGPKGRNVVIEKSFGAPRSTKDGVSVAKEIELSDKFENLGAQLIREVASKTNDKAGDGTTTATVLAQAIVVEGLKSVAAGMNPMDLKRGVDKAVAKVIEEIKATSKKVSANSEIAQVGTISANGDVEVGEMIARAMEKVGNEGVITVEEAKTAETELDVVEGMQFDRGYLSPYFITNAEKMEADLEEPLILLFEKKLSSLQPLLPVLEAVVQSGRPLLIIAEDVEGEALATLVVNKLRGGLRVAAVKAPGFGDRRKAMLEDIAILTGGQLISEDLGIKLENVSLDMLGRAKKVTITKEDTTIVDGSGDKSGIEGRIAQIKKQIEDTTSDYDKEKLQERLAKLAGGVAVIRVGGATEVEVKEKKDRVDDALNATRAAVEEGIVPGGGVALLKASKVLDGFKGDNDDQEAGIAIVRRALQAPIRQISENAGVEGSIVVGKVLENASPTFGFNAQTEEYVDLVQAGVIDPAKVVRTALQDAASVAGLLITTEAAIVEAPKKGGAGGAPGGMPGGMGDMDF

SEQ ID NO: 9274 - DNA, 1644 bp, Anaeromyxobacter sp. K
  CDS (1)..(1644): transl_table=11
atggcagccaaggaaatcgtcttcgaccagaaggcccgcgacgcgatcctcaagggcgtgaacacgctcgccgacgcggtgaaggtgaccctcgggccgaagggccggaacgtggtcatcgagaagagcttcggctccccgaccatcaccaaggacggcgtgacggtcgcgaaggagatcgagctcgagaacaagttcgagaacatgggcgcgcagatggtgaaggaggtcgcctccaagacctccgacgtggccggtgacggcaccaccaccgcgaccgtgctcgcccaggccatctaccgcgagggctcgaagctcgtcgcggccggccacaacccgatggacgtgaagcgcggcatcgacaaggccgtggaggccatcgtgggcgagctgaagaagctctcgaagcccacgaaggaccacaaggagatcgcccaggtcggcatcatctcggccaacggcgacaccaccatcggcaacatcatcgccgaggcgatggagaaggtcggcaaggagggcgtcatcaccgtcgaggaggccaagggcctcgagacgacgctcgacgtggtcgagggcatgcagttcgaccgcggctacctctcgccgtacttcgtgaccgacgcggagcgcatggaggcggtcctcgaggacgcctacatcctcatcaacgagaagaagatctcgaacatgaaggacctgctcccgctgctggagcagatcgcgcgctcgggcaagccgctcgtcatcgtggccgaggaggtcgagggcgaggcgctggcgacgctggtcgtcaacaagctgcgcggcacgctgcacgtgtgcgccgtgaaggcccccggcttcggcgaccgccgcaaggccatgctggaggacatcgcgatcctcaccggcggccgcatgatcgccgaggagctcggcctcaagctcgagcaggtcacgctgaaggacctcggccgcgccaagcgcgtcacggtggacaaggacaacaccaccatcgtcgacggcgccggcaagaaggaggacatcgaggcccgggtgaagaccatccgcgcgcagatcgaggagaccacctccgactacgaccgcgagaagctccaggagcgcctcgcgaagctggtgggcggcgtggcggtcatcaacgtcggcgcggccaccgagaccgagatgaaggagaagaaggcccgcgtcgaggacgcgctgcacgcgacccgcgcggccgtcgaggagggcatcgtccccggcggcggcgtggcgtacctgcgctgcgtgaaggcgctcgacggcgtgaaggtgaacgagggcgagaaggtcggcctcgacatcgtccgccgcgccatcgaggagccgctccgccagatctccggcaacggcggctacgagggctcgatcgtggtgaacaaggtgaaggaggcgaaggaggccgcgttcggcttcaacgccgccacgggcgagtacgaggacctggtgaaggcgggcgtcatcgacccgaccaaggtctcgcgctccgcgctgcagaacgcggcgtcggtcgcctcgctcatgctcacgaccatggcgatggtcgccgagcggccgaaggaggaggctgcggcccccgtcggcggcggcatgggcggcatgggcgggatgggcggcatgatgtag

SEQ ID NO: 9275 - protein, 547 aa, Anaeromyxobacter sp. K
MAAKEIVFDQKARDAILKGVNTLADAVKVTLGPKGRNVVIEKSFGSPTITKDGVTVAKEIELENKFENMGAQMVKEVASKTSDVAGDGTTTATVLAQAIYREGSKLVAAGHNPMDVKRGIDKAVEAIVGELKKLSKPTKDHKEIAQVGIISANGDTTIGNIIAEAMEKVGKEGVITVEEAKGLETTLDVVEGMQFDRGYLSPYFVTDAERMEAVLEDAYILINEKKISNMKDLLPLLEQIARSGKPLVIVAEEVEGEALATLVVNKLRGTLHVCAVKAPGFGDRRKAMLEDIAILTGGRMIAEELGLKLEQVTLKDLGRAKRVTVDKDNTTIVDGAGKKEDIEARVKTIRAQIEETTSDYDREKLQERLAKLVGGVAVINVGAATETEMKEKKARVEDALHATRAAVEEGIVPGGGVAYLRCVKALDGVKVNEGEKVGLDIVRRAIEEPLRQISGNGGYEGSIVVNKVKEAKEAAFGFNAATGEYEDLVKAGVIDPTKVSRSALQNAASVASLMLTTMAMVAERPKEEAAAPVGGGMGGMGGMGGMM

SEQ ID NO: 9276 - DNA, 1647 bp, Klebsiella pneumoniae 342
  CDS (1)..(1647): transl_table=11
atggcagcaaaagacgtaaaattcggtaacgacgctcgtgtaaaaatgctgcgcggcgtaaacgtactggcagatgcagttaaagtgaccctgggcccgaaaggccgcaacgtggttctggacaaatccttcggcgcgccgaccatcactaaagatggcgtttccgttgctcgtgaaatcgaactggaagacaagttcgaaaacatgggtgcgcagatggtgaaagaagttgcctctaaagcgaacgacgcggcaggcgacggtaccaccaccgcaaccgtgctggctcaggctatcgtgaacgaaggcctgaaagctgttgcagcaggcatgaacccgatggatctgaaacgtggtatcgacaaagctgtcattgccgccgttgaagaactgaaagcgctgtccgtaccgtgctctgactctaaagctatcgctcaggttggtaccatctccgctaactccgacgaaaccgtcggtaaactgatcgcggaagcgatggataaagtcggtaaagaaggcgtgatcaccgttgaagacggtaccggtctggaagacgaactggacgtagttgaaggtatgcagttcgaccgcggctacctgtctccgtacttcatcaacaagccggacaccggtgccgttgagctggaaagcccgttcatcctgctggctgacaaaaaaatctccaacatccgcgaaatgctgccggttctggaagccgtagcgaaagcgggcaaaccgctggttatcatcgctgaagacgttgaaggcgaagcgctggcgaccctggtggttaacaccatgcgcggcatcgttaaagtggctgcggtgaaagcaccgggcttcggcgaccgtcgtaaagccatgctgcaggatatcgctaccctgactggcggtaccgttatctctgaagagatcggtatggagctggaaaaagcgactctggaagatctgggccaggcgaaacgcgtggttatcaacaaagacaccaccaccatcatcgatggcgttggcgaagagtctgcaatccagggccgtgtagctcagatccgtaagcagatcgaagaagcgacctccgattacgaccgtgaaaaactgcaggaacgtgtcgctaaactggctggcggcgtggcagtaatcaaagtcggtgcggctaccgaagttgaaatgaaagagaaaaaagcacgcgtcgacgacgccctgcacgcaacccgtgctgcggttgaagaaggcgtggtggctggcggcggcgtagcgctggttcgcgttgcggcgaaactcgctggcctgaccggtcagaacgaagatcagaacgtcggtatcaaagttgcgctgcgcgcaatggaagcgccgctgcgtcagatcgtgtccaacgccggtgaagagccgtctgttgttgctaacaacgtgaaagctggcgacggtaactacggttacaacgcagcaactgaagaatacggcaacatgatcgacttcggtatcctggacccaaccaaagtgacccgttctgctctgcagtacgcggcatccgtggctggtctgatgatcaccaccgagtgcatggtgaccgacctgccgaaaggcgacgcgcctgatttaggtgctgctggcggtatgggcggcatgggcggtatgggcggcatgatgtaa

SEQ ID NO: 9277 - protein, 548 aa, Klebsiella pneumoniae 342
MAAKDVKFGNDARVKMLRGVNVLADAVKVTLGPKGRNVVLDKSFGAPTITKDGVSVAREIELEDKFENMGAQMVKEVASKANDAAGDGTTTATVLAQAIVNEGLKAVAAGMNPMDLKRGIDKAVIAAVEELKALSVPCSDSKAIAQVGTISANSDETVGKLIAEAMDKVGKEGVITVEDGTGLEDELDVVEGMQFDRGYLSPYFINKPDTGAVELESPFILLADKKISNIREMLPVLEAVAKAGKPLVIIAEDVEGEALATLVVNTMRGIVKVAAVKAPGFGDRRKAMLQDIATLTGGTVISEEIGMELEKATLEDLGQAKRVVINKDTTTIIDGVGEESAIQGRVAQIRKQIEEATSDYDREKLQERVAKLAGGVAVIKVGAATEVEMKEKKARVDDALHATRAAVEEGVVAGGGVALVRVAAKLAGLTGQNEDQNVGIKVALRAMEAPLRQIVSNAGEEPSVVANNVKAGDGNYGYNAATEEYGNMIDFGILDPTKVTRSALQYAASVAGLMITTECMVTDLPKGDAPDLGAAGGMGGMGGMGGMM

SEQ ID NO: 9278 - DNA, 1623 bp, Thermodesulfovibrio yellowstonii DSM 11347
  CDS (1)..(1623): transl_table=11
atggcagcaaagcagttaatatttggtgatgcagcaagacagtctattcttaaaggtgttacactccttactgatgctgtaaaagcaacattgggaccaagaggaagaaatgtagtaattgagagaaaattcggttctcccaatgtaacaaaagacggtgtcacagttgcaaaagagatagaccttaaagagccctttgaaaacatgggagctcagcttgttcgtgaagttgcttcaaaaacatctgatgttgctggtgacggaacaacaacagcaacagtattagcctatgctatttacaaagaaggtcttaaatatgtttcagctggtgccaattcaatggacctcaaaagaggaattgacaaagcagttgaagcagttgttgaggaacttaaaaaaatctcaaagcctgttgtagataaaaaagaaattgctcaggttggaactatctctgcaaacaatgatgtttccataggtgagttgattgctgaagcaatggacaaggttgggaaagacggtgttataactgttgaagaagcaaagggaatggctacaacccttgatatagtagaaggaatgcaatttgacagaggatatatttcaccttatttcattactgatccagaaagacttgagtgtattcttgaagatgcttttgttttaatccatgataaaaaaatatcaactatgaaggacttactcccaattcttgagcagattgcaagaatgggtagaccgcttctcattattgcagaagatgttgaaggtgaagcacttgcaacattggttgtaaacaaactcagaggagtacttcaggtttgtgctgtaaaagcaccaggatttggagaaagaagaaaagcaatgcttgaagacatagctattctgactggtggaacagttatttctgaggacataggcctcaaacttgagaatgtcaaagttgaagacctcggcaaagcaaagaaaataattattgacaaagataacacaacaattgttgaaggggctggtgatccacaaaagattcaggcaagaatcaagcagataaaggttcagatagatgaaactacttcagattatgaccgcgaaaaacttcaggaaagacttgcaaaacttgcaggcggagttgcaagaataaatgttggtgcagccactgaagcggaaatgaaagaaaagaaagcaagagtagaagatgcattaaacgcgacaagagctgctgttgaagaaggaattgttcctggtggtggagtagcgcttctgagatgtcaaaaagcattagaaaaaataaaatttgaaaatcatgaccaacaacttggagctgagatagttaaaaaagctcttgaggaaccaataaagcagattatagcaaatgcaggagttgaagctaccctgattgttgagaaagtcaaagagaataagaatatcaattatggatatgatgcttatgcagaaaagtttgttgatatgatggaggctggaattatagacccaacaaaagttacaagaacagctctccagaatgctgcttctgtggcaggcttaatgcttacaacagaggttcttgtagctgaaattcctgaagaggaaaagaaacctccaatgccatcacctgatatgtattaa

SEQ ID NO: 9279 - protein, 540 aa, Thermodesulfovibrio yellowstonii DSM 11347
MAAKQLIFGDAARQSILKGVTLLTDAVKATLGPRGRNVVIERKFGSPNVTKDGVTVAKEIDLKEPFENMGAQLVREVASKTSDVAGDGTTTATVLAYAIYKEGLKYVSAGANSMDLKRGIDKAVEAVVEELKKISKPVVDKKEIAQVGTISANNDVSIGELIAEAMDKVGKDGVITVEEAKGMATTLDIVEGMQFDRGYISPYFITDPERLECILEDAFVLIHDKKISTMKDLLPILEQIARMGRPLLIIAEDVEGEALATLVVNKLRGVLQVCAVKAPGFGERRKAMLEDIAILTGGTVISEDIGLKLENVKVEDLGKAKKIIIDKDNTTIVEGAGDPQKIQARIKQIKVQIDETTSDYDREKLQERLAKLAGGVARINVGAATEAEMKEKKARVEDALNATRAAVEEGIVPGGGVALLRCQKALEKIKFENHDQQLGAEIVKKALEEPIKQIIANAGVEATLIVEKVKENKNINYGYDAYAEKFVDMMEAGIIDPTKVTRTALQNAASVAGLMLTTEVLVAEIPEEEKKPPMPSPDMY

SEQ ID NO: 9280 - DNA, 1638 bp, Aliivibrio salmonicida LFI1238
  CDS (1)..(1638): transl_table=11
atggctgctaaagacgttaaatttggtaatgacgcacgaatcaaaatgctagaaggtgtaaatgttctggctgatgcggttaaagtaactttgggtcctaagggtcgtaacgttgttttagataaatcatttggcgcaccaacgatcactaaagatggtgtttctgttgcacgtgaaatcgaacttgaagataagttccaaaacatgggcgcacaaatggttaaagaagtggcttcgcaagcgaatgacgcggcgggcgacggaacaacaacggcaaccgttcttgctcaagctatcattgctgaaggcctaaaagccgttgctgcgggtatgaacccaatggatcttaaacgtggtatcgacaaagcagttattgctgctgttgaagcacttaaagatctatctgttccatgtgctgatacaaaagcgatcgcgcaagtaggtactatctctgcaaactctgattatactgttggtaatcttattgctgaagcaatggaaaaagtaggtcgtgacggtgttatcactgttgaagaaggccaatctcttcaagacgaattagacgttgttgaaggtatgcagtttgatcgcggttacctatctccatatttcgtaaacaaccaagaagccggttctgttgatctagacagcccattcatcttgcttgttgataaaaaagtatcaaacatccgtgaattgcttccaactctagaagcagtagcgaaagcatctcgtcctcttcttatcatcgctgaagatattgaaggcgaagcgcttgctactctagttgtgaacaacatgcgtggtatcgttaaagttgcagcggttaaagcacctggttttggtgaccgtcgtaaagcaatgttacaagatatcgcggcattaactgcgggctctgtaatttcagaagagatcggtttagaacttgaaaaagtagttcttgaagatcttggtcaagcgaagcgtgtaactattacaaaagaaacaacaactatcatcgatggtgctggtgatgagactattatctctggccgtgtttctcaaattcgtcaacaaatcgaagatgcaacctctgactacgataaagaaaaacttcaagagcgtgtagctaaattggctggcggtgttgcagtgatcaaagtgggtgcggcgactgaagttgagatgaaagagaagaaagaccgtgttgaagatgcacttcacgcgactcgcgcagccgttgaagaaggtgttgttgctggtggtggtgttgcacttatccgtgctgcgtctaaagttgttaaccttgaaggtgacaatgaagagcaaactgtgggtattcgtttagcacttcgtgctatggaagcaccacttcgtcaaatcgttaaaaacgcaggtgaagaagattcagttgttgctaacaacgttcgcgctggtgaagataactacggttacaacgcagctactggcgtttacggcgacatgatcgaaatgggtattcttgacccaactaaagtaacgcgttctgcacttcagttcgcagcatcggttgcgggtcttatgatcacaacagaagcgatgatcactgataagccacaagattcaagttcttctatgccagatatgggcggcatgggcggcatgggcggcatgatgtaa

SEQ ID NO: 9281 - protein, 545 aa, Aliivibrio salmonicida LFI1238
MAAKDVKFGNDARIKMLEGVNVLADAVKVTLGPKGRNVVLDKSFGAPTITKDGVSVAREIELEDKFQNMGAQMVKEVASQANDAAGDGTTTATVLAQAIIAEGLKAVAAGMNPMDLKRGIDKAVIAAVEALKDLSVPCADTKAIAQVGTISANSDYTVGNLIAEAMEKVGRDGVITVEEGQSLQDELDVVEGMQFDRGYLSPYFVNNQEAGSVDLDSPFILLVDKKVSNIRELLPTLEAVAKASRPLLIIAEDIEGEALATLVVNNMRGIVKVAAVKAPGFGDRRKAMLQDIAALTAGSVISEEIGLELEKVVLEDLGQAKRVTITKETTTIIDGAGDETIISGRVSQIRQQIEDATSDYDKEKLQERVAKLAGGVAVIKVGAATEVEMKEKKDRVEDALHATRAAVEEGVVAGGGVALIRAASKVVNLEGDNEEQTVGIRLALRAMEAPLRQIVKNAGEEDSVVANNVRAGEDNYGYNAATGVYGDMIEMGILDPTKVTRSALQFAASVAGLMITTEAMITDKPQDSSSSMPDMGGMGGMGGMM

SEQ ID NO: 9282 - DNA, 1629 bp, Candidatus Azobacteroides pseudotrichonymphae genomovar. CFP2
  CDS (1)..(1629): transl_table=11
atggcaaaagatatcaaatttaacctcgatgctcgtgacttgcttaaaaagggggttgatgagttggcagatgcagtgaaagtgactttaggtcctaagggacgaaatgtaattatcgacaaaaaatttggtgctcctcaaatcacaaaagatggagtgactgtggcaaaggaaatagaactttcagaccattttcagaatatgggtgctcaattagtaaaagaagttgcttccaagactaatgataatgcgggtgatggtacaaccacagctactgttttggcacagtctatcattaatgtaggaatgaagaatgtggctgctggtgcaaatccaatggatttgaagcgtggtattgataaagctgttgctaaagtagtagaatcgttaaaaaagcaatcacgggctgttggggatgattttggtaaaatcgaaaatgtagctaaaatatctgctaatggagatgagactattggttctttgattgctgaagctatgaaaaaagtaaaaaaggaaggcgttattactatagaagaatctaaaggtattgagacttatgtggacgtggtggaaggtatgcagtttgatcgtggttatatttcatcttattttgtaactaacacggataaaatggaagctgatttggagaatccttatattcttattcatgataagaagatctctgtattgaaagatattcttccaattttggagaagaccattcaaacaggccgtccaatgttgattatagcagaagatattgagtcggaagctttggctactttagttgttaatcgtttgcgtggttctttgaaagtttgcgcagtgaaagctccgggcttcggtgatcgtcgaaaggaaatgttagaggatattgcagttttgactggtggagtggtaatctctgaagaaaagggcttaaaactggaaggcgtgactatcgatatgctaggcactgctgaaaaagttactataagtaaagataatacggtaattgtaaatggagcgggtgaaaagagtgccatttctgctcgtgtaagccaaataaaaacacaaatagaaaagacgacttctgattatgacagtgaaaaattgcaagagcgtttggctaagttggcaggtggggttgctgtgctttatgtaggtgctccttcggaagtagagatgaaagaaaagaaagatcgtgtagatgatgcgttgagtgcaacccgtgcggctatagaagaaggaactgtaccaggtggtggagttgcttatgtacgtgctatttctattttggaaggatttaaaggtataaatgaagatgaaactacggggatagagattgtaaagcgtgctattgaagaacctcttcgccaaattgttgagaatgcggggaaggaaggggctgttattgctcaaagggttaaagaagaaaaagatgattttgggtataatgcacgtaccggtatatatgaagatttatatgttgcaggtgtaattgacccaacaaaagtagcccgagtagctttggaaaacgctgcttctatcgctgggatgcttttaactactgaatgcgtaattactgaagtaaaagaggaaaatcctgctcctgcaatgcccccaatgggaggtggaggaatgatgtaa

SEQ ID NO: 9283 - protein, 542 aa, Candidatus Azobacteroides pseudotrichonymphae genomovar. CFP2
MAKDIKFNLDARDLLKKGVDELADAVKVTLGPKGRNVIIDKKFGAPQITKDGVTVAKEIELSDHFQNMGAQLVKEVASKTNDNAGDGTTTATVLAQSIINVGMKNVAAGANPMDLKRGIDKAVAKVVESLKKQSRAVGDDFGKIENVAKISANGDETIGSLIAEAMKKVKKEGVITIEESKGIETYVDVVEGMQFDRGYISSYFVTNTDKMEADLENPYILIHDKKISVLKDILPILEKTIQTGRPMLIIAEDIESEALATLVVNRLRGSLKVCAVKAPGFGDRRKEMLEDIAVLTGGVVISEEKGLKLEGVTIDMLGTAEKVTISKDNTVIVNGAGEKSAISARVSQIKTQIEKTTSDYDSEKLQERLAKLAGGVAVLYVGAPSEVEMKEKKDRVDDALSATRAAIEEGTVPGGGVAYVRAISILEGFKGINEDETTGIEIVKRAIEEPLRQIVENAGKEGAVIAQRVKEEKDDFGYNARTGIYEDLYVAGVIDPTKVARVALENAASIAGMLLTTECVITEVKEENPAPAMPPMGGGGMM

SEQ ID NO: 9284 - DNA, 1617 bp, Anoxybacillus flavithermus WK1
  CDS (1)..(1617): transl_table=11
atggcaaaagaaattaaattcagcgaagaagctcgtcgtgcgatgttacgcggtgtagataaattagctgatgcagtaaaagtaacattaggtccaaaaggtcgcaacgttgtattagagaaaaagttcggttctccactaatcacaaatgacggtgtaacgattgcgaaggagattgaattagaagatccgtttgaaaatatgggtgcgaagcttgttgcggaagtagcaagcaaaacaaacgatgttgctggtgacggtacaacaacagcaactgtattggcacaagcgatgattcgtgaaggattgaaaaacgtaacagctggtgcgaacccaatgggtattcgcaaaggtattgaaaaagctgttgcagttgctgtagaagaattaaaagcgatctctaaaccaatcgaaggtaaagattctatcgctcaagttgcagctatttctgcagctgacgaagaagttggtcaacttatcgcagaagcgatggaacgcgttggtaaagatggcgtcattacattagaagagtctaaaggtttcacaacagaattagatgttgtggaaggtatgcaatttgaccgtggttatgtgtctccatacatgatcacagactctgacaaaatggaagctgtattagaaaatccatacatcttaattacagataaaaaagtttcaagcattcaagaacttcttcctgtattagagcaagttgttcaacaaggtaagccattgttaatcattgctgaagatgtagaaggcgaagcgcttgcaacattagttgtaaacaaacttcgtggtacattcacagctgttgcagttaaagcgcctggcttcggtgatcgtcgcaaagcgatgcttcaagatatcgcgatcttaacaggtggcgaagttatcacagaagagttaggtcgcgaattgaaatcaacaacaattgcttcacttggtcgtgcagcgaaagttgttgtaacaaaagaacatacaacaatcgttgatggcgctggtcgtgccgaagacattcaagcacgtatcaaccaaattcgtgcacaattagaagaaacaacttctgaatttgaccgtgaaaaattacaagagcgcttagcgaaattagctggtggcgttgcggtaatcaaagttggtgctgcaacagaaacagaattaaaagagcgtaaattacgcattgaagacgcattaaacgcaacacgtgcggcagttgaagaaggtatcgttgccggcggtggtacagcgttaatgaacgtatacagcaaagttgcagccattgaagctgaaggcgacgaagcaactggtgtgaaaatcgttcttcgtgcgattgaagagccagttcgtcaaatcgcgcaaaacgctggtttagaaggctctgtcatcgtagaacgcttaaaaacagaaaaacctggcatcggcttcaacgcagcaactggcgagtgggttgacatgatcgaagcaggtatcgttgacccaacaaaagtaactcgctctgcacttcaaaacgcagcatctgttgcagctatgttcttaacaactgaggcagtcgttgctgacaaaccagaagaaaacaaaaacacaccaggcatgccagacatgggcggcatgatgtaa

SEQ ID NO: 9285 - protein, 538 aa, Anoxybacillus flavithermus WK1
MAKEIKFSEEARRAMLRGVDKLADAVKVTLGPKGRNVVLEKKFGSPLITNDGVTIAKEIELEDPFENMGAKLVAEVASKTNDVAGDGTTTATVLAQAMIREGLKNVTAGANPMGIRKGIEKAVAVAVEELKAISKPIEGKDSIAQVAAISAADEEVGQLIAEAMERVGKDGVITLEESKGFTTELDVVEGMQFDRGYVSPYMITDSDKMEAVLENPYILITDKKVSSIQELLPVLEQVVQQGKPLLIIAEDVEGEALATLVVNKLRGTFTAVAVKAPGFGDRRKAMLQDIAILTGGEVITEELGRELKSTTIASLGRAAKVVVTKEHTTIVDGAGRAEDIQARINQIRAQLEETTSEFDREKLQERLAKLAGGVAVIKVGAATETELKERKLRIEDALNATRAAVEEGIVAGGGTALMNVYSKVAAIEAEGDEATGVKIVLRAIEEPVRQIAQNAGLEGSVIVERLKTEKPGIGFNAATGEWVDMIEAGIVDPTKVTRSALQNAASVAAMFLTTEAVVADKPEENKNTPGMPDMGGMM

SEQ ID NO: 9286 - DNA, 1617 bp, Dictyoglomus turgidum DSM 6724
  CDS (1)..(1617): transl_table=11
atggcagccaaattagtaagccttgatatgcaagcaagaaccgcactaatcaaaggtctcgacactgttgctgatactgtaaagattaccttagggccaaagggaagaaatgtagttcttgagaagaaattcggtgctccagttataactaacgacggtgtaaccattgcaaaagaaattgatcttgaagaccccttcgaaaatatgggtgctcaattagtaaaagaggttgcctccaaaactaacgatgtagcaggagatggaactactactgctacagttcttgctcaagcattagtacatgaaggaatgaaacatgtagttgctggtgcaaacccaatgtatgtaaaaagaggaatagaaaaagctgttgaaaaagtagtggaagaactaaagaagatcgcaaaaccagtagagaccaagcaagatattgctcatgtagcagcaatttctgcaaataacgatgaagaaattggaaatcttattgccgaagcaatggataaagtaggaaaagatggagttataactgtagaagaatctcaaggaataacaactacgttggagcttgttgagggaatgcaatttgatagaggatatctctcggcatacatgattacagatccagaaagaatggaagcagtattagaagaaccatacatccttatcactgataagaagatcagtgcagtaagtgaaatactaccaattcttgagagagttgtacaaactggtaaaccattggtaataatagcagaagatgttgaaggagaagctcttgccacattagtagtcaataaactacgtggagtattacaatcccttgctgtaaaagctcctggctttggtgatcgtagaaaggccatgcttcaggatatagccatattaactggtggccaatttatttctgaagagactggaatcaaacttgagaatgtaaccttagacatgctcggaagagcagaaaaagtaagagctaataaagataagaccaccattattggaggaaaagggaacaagaaagacatcgaagctagaatcgctcaaattaagaagcaattagaagagaccgattctgaatttgacagagagaaattacaagaaagacttgcaaaacttgctggtggagttgctgtaataaaagttggagcagctaccgaagtagagcttaaagagaagaagcataggatcgaagatgccttatctgcgaccaaggctgctgtagaagaaggtatcgtacctggaggtggcgtagcccttataagaacaataaaagctcttgatgacattaaagtagacaacgaggatgagagaataggagtagaaattgtaagaagatccttagatgtaccattaaagttaatagcaaacaatgctggtaaagaaggatccattatcgcagaaaaggttaaagaaatggatggcccaatgggatatgatgctgcaagagacagatttgtaaacatgtttgatgctggaattgtagatccatgtaaagtaacaagatctgcattacaaaatgctgcaagtatagctgcattagtactcaccactgaagggcttgtagctgaaaaaccagaaaaagaaaaacaaacacctcctccaccacccgagtactaa

SEQ ID NO: 9287 - protein, 538 aa, Dictyoglomus turgidum DSM 6724
MAAKLVSLDMQARTALIKGLDTVADTVKITLGPKGRNVVLEKKFGAPVITNDGVTIAKEIDLEDPFENMGAQLVKEVASKTNDVAGDGTTTATVLAQALVHEGMKHVVAGANPMYVKRGIEKAVEKVVEELKKIAKPVETKQDIAHVAAISANNDEEIGNLIAEAMDKVGKDGVITVEESQGITTTLELVEGMQFDRGYLSAYMITDPERMEAVLEEPYILITDKKISAVSEILPILERVVQTGKPLVIIAEDVEGEALATLVVNKLRGVLQSLAVKAPGFGDRRKAMLQDIAILTGGQFISEETGIKLENVTLDMLGRAEKVRANKDKTTIIGGKGNKKDIEARIAQIKKQLEETDSEFDREKLQERLAKLAGGVAVIKVGAATEVELKEKKHRIEDALSATKAAVEEGIVPGGGVALIRTIKALDDIKVDNEDERIGVEIVRRSLDVPLKLIANNAGKEGSIIAEKVKEMDGPMGYDAARDRFVNMFDAGIVDPCKVTRSALQNAASIAALVLTTEGLVAEKPEKEKQTPPPPPEY

SEQ ID NO: 9288 - DNA, 1671 bp, Cyanothece sp. PCC 7424
  CDS (1)..(1671): transl_table=11
atggccaaaatcgtttctttcaaagatgaatctagaagagccttagaaaggggaattaacgcccttgctgatgcggttaagattaccctaggcccaagagggcgcaatgttctactagaaaagaaattcggcgcaccccaaattgttaatgatgggatcaccgttgccaaagaaattgacttagaagatcccctagaaaataccggggcaaaactgatccaagaagtagcatctaaaaccaaagatgtagccggagatggcacaactactgctaccgttatcgctcaagccctgattaaagaagggttaagaaacgttaccgccggggctaaccccgtggccttacgtcgtggattagaaaaaattactaatttcttggttcaagaaattgaaagcgttgctaaacctgtcgaaatgggagaagcgatcgcccaagtggctaccgtatccgccggtaatgatgaagaagtcggtcagatgatcgctttagcgatggaaaaagtgaccaaagatggagtcattactgttgaggagtctaagtctctgtctacagaattagatgtcgttgaagggatgcaactcgatcgcggttatatctctccttactttattacggatcaggaacgccaaatcaccgacttcgataatccttatattctgatcaccgataagaaaattagcgcgatcgctgatttagttcctgtgctggaaaccgtagcccgtcaaggccgggcgctgttaattgtggcggaggatgtagaaggagaagcccttgctaccctagtcgtaaataaggcacgaggagtcttaaatgttgcggcaattaaagccccgagttttggggaacgacgcaaagccgccttacaagatatcgctatcctcaccggtgggcgtgttatttctgaagaaattggcctcagtttagaaaccgttacccccgatatgttaggtcaagcggttaaagtgaccgttgataaagaaaataccaccatcgtcgcgggaggagatcataaggcggatgtccaaaaacgcattgtccaactccgcaaagaattagaagcgactgactcggaatatgacaccgaaaaactccaagaacgcattgctaaattagcgggaggagtcgcggtgattaaagttggggcggctacggaaactgaactgaaagacaaaaaactccgcattgaagatgctcttaatgctactaaagcggcggtagctgagggaattgttcccggtggaggcactacgttaattcatctggcggctaaggttgtagactttaaaaataccttaagcaatgatgaggaaaaagtcgctgctgacatcatggctaaagctttagaagcccctttacgtcaattagcagataatgcaggattagaagggtctgttattgtggaaggagtacgcaataccgactttaacgtgggatacaatgcgttaaccggtgagtttgaggacttgatcaaggcgggtatcattgacccggctaaagtcgtccgttctgcgctgcaaaatgcctcttctattgcagggatggtactcaccaccgaagccttagttgttgagaagcccgaaaagcaagctcccgcacctgatatgggcggcatgggcggcatgggcggcatgggtggcatgggcggcatgggcggcatgggcatgatgtaa

SEQ ID NO: 9289 - protein, 556 aa, Cyanothece sp. PCC 7424
MAKIVSFKDESRRALERGINALADAVKITLGPRGRNVLLEKKFGAPQIVNDGITVAKEIDLEDPLENTGAKLIQEVASKTKDVAGDGTTTATVIAQALIKEGLRNVTAGANPVALRRGLEKITNFLVQEIESVAKPVEMGEAIAQVATVSAGNDEEVGQMIALAMEKVTKDGVITVEESKSLSTELDVVEGMQLDRGYISPYFITDQERQITDFDNPYILITDKKISAIADLVPVLETVARQGRALLIVAEDVEGEALATLVVNKARGVLNVAAIKAPSFGERRKAALQDIAILTGGRVISEEIGLSLETVTPDMLGQAVKVTVDKENTTIVAGGDHKADVQKRIVQLRKELEATDSEYDTEKLQERIAKLAGGVAVIKVGAATETELKDKKLRIEDALNATKAAVAEGIVPGGGTTLIHLAAKVVDFKNTLSNDEEKVAADIMAKALEAPLRQLADNAGLEGSVIVEGVRNTDFNVGYNALTGEFEDLIKAGIIDPAKVVRSALQNASSIAGMVLTTEALVVEKPEKQAPAPDMGGMGGMGGMGGMGGMGGMGMM

SEQ ID NO: 9290 - DNA, 1647 bp, Escherichia fergusonii ATCC 35469
  CDS (1)..(1647): transl_table=11
atggcagctaaagacgtaaaattcggtaacgacgctcgtgtgaaaatgctgcgcggcgtaaacgtactggcagatgcagtgaaagttaccctcggtccgaaaggccgtaacgtagttctggataaatctttcggtgcaccgactatcaccaaagatggtgtttccgttgctcgtgaaatcgaactggaagacaagttcgaaaacatgggtgcgcagatggtgaaagaagttgcctctaaagcgaacgacactgcaggcgacggtaccaccaccgcaaccgtactggctcaggctatcatcactgaaggtctgaaagctgttgctgcgggcatgaacccgatggacctgaaacgtggtatcgacaaagccgttaccgctgcagttgaagaactgaaagcgctgtccgtaccgtgctccgactctaaagcgattgctcaggttggtactatctccgctaactccgacgaaaccgtaggtaaactgatcgctgaagcgatggacaaagtcggtaaagaaggcgttatcaccgttgaagacggtactggtctgcaggacgaactggacgtggttgaaggtatgcagttcgaccgtggttacctgtctccttacttcatcaacaagccggaaactggcgcagtagaactggaaagcccgttcatcctgctggctgacaagaaaatctccaacatccgcgaaatgctgccggttctggaagccgttgcaaaagcaggcaaaccgctgctgatcatcgctgaagatgttgaaggcgaagcgctggcaactctggttgttaacaccatgcgtggcatcgtgaaagtcgctgcggttaaagcaccgggcttcggcgatcgtcgtaaagctatgctgcaggatatcgcaaccctgaccggcggtaccgtaatctctgaagagatcggtatggagctggaaaaagcgaccctggaagacctgggtcaggctaaacgtgttgtaatcaacaaagacaccaccaccatcatcgatggcgtgggtgaagaagctgcaatccagggccgtgttgctcagatccgtcagcagattgaagaagcaacttctgactacgaccgtgaaaaactgcaggagcgcgtagcgaaactggcaggcggtgttgcagttatcaaagttggtgctgctaccgaagttgaaatgaaagagaaaaaagcacgcgttgaagacgccctgcacgcgacccgtgctgcggtagaagaaggcgtggttgctggtggtggtgttgcgctgatccgcgtagcgtctaaactggctgacctgcgtggtcagaacgaagagcagaacgtgggtatcaaagttgcactgcgtgcaatggaagctccgctgcgtcagatcgtactgaactgcggtgaagaaccgtctgttgttgctaacactgttaaagctggcgacggcaactacggttacaacgcagcaaccgaagaatacggcaacatgatcgacatgggtatcctggatccaaccaaggtaacccgttctgctctgcagtacgcggcttctgtggctggcctgatgatcaccaccgagtgcatggttaccgacctgccgaaaaacgatgcagctgacttaggcgctgctggcggtatgggcggcatgggtggcatgggcggcatgatgtaa

SEQ ID NO: 9291 - protein, 548 aa, Escherichia fergusonii ATCC 35469
MAAKDVKFGNDARVKMLRGVNVLADAVKVTLGPKGRNVVLDKSFGAPTITKDGVSVAREIELEDKFENMGAQMVKEVASKANDTAGDGTTTATVLAQAIITEGLKAVAAGMNPMDLKRGIDKAVTAAVEELKALSVPCSDSKAIAQVGTISANSDETVGKLIAEAMDKVGKEGVITVEDGTGLQDELDVVEGMQFDRGYLSPYFINKPETGAVELESPFILLADKKISNIREMLPVLEAVAKAGKPLLIIAEDVEGEALATLVVNTMRGIVKVAAVKAPGFGDRRKAMLQDIATLTGGTVISEEIGMELEKATLEDLGQAKRVVINKDTTTIIDGVGEEAAIQGRVAQIRQQIEEATSDYDREKLQERVAKLAGGVAVIKVGAATEVEMKEKKARVEDALHATRAAVEEGVVAGGGVALIRVASKLADLRGQNEEQNVGIKVALRAMEAPLRQIVLNCGEEPSVVANTVKAGDGNYGYNAATEEYGNMIDMGILDPTKVTRSALQYAASVAGLMITTECMVTDLPKNDAADLGAAGGMGGMGGMGGMM

SEQ ID NO: 9292 - DNA, 1647 bp, Desulfatibacillum alkenivorans AK-01
  CDS (1)..(1647): transl_table=11
atggcaaaagaaattaaatatgatatgaaagccagggagcttatgctcgctggagtcaatgctcttgctgacgccgtagccgtcacccacggccccaagggccgcaatgtggttattgacaaagcctggggcgctcccacggtgaccaaagacggcgtgaccgtggccaaggaaatcgaactggaaaacaagttcgagaacatgggcgctcagatggttaaggaagtggcttccaagaccagcgacaccgccggcgacggaaccaccaccgccaccgtgcttgctcgcgccatttacgaagaaggcatgaagctggtcgtggcgggcaacaaccccatggccatcaaacgcggcattgacaaggcttgcgaagcggccgtcaaatccctgatgaatctttccaagcccaccaaggaacagcgcgaaatcgcccaggtcggcaccatctccgccaacaccgacgagaccatcggcaacatcatcgccgaggccatgaacaaggtcggcaaagaaggcgtcatcacggtggaagaagccaaatccatggacaccaccctggacgtcgtggaaggcatgcagttcgaccgcggttacatttccccttactttgtgaccgattccgaaaaaatggtgtgctccctggaagatccttacatcctgatccacgagaaaaaaatctccaacatgaaggacctgctgcccctgctggaacaaaccgcaaaaatgggcaagcccctcctgatcgttgctgaagacgtggaaggcgaagcactggccactttggtcgtcaacaggctccgcggcaccctgcagattgcagccgttaaggctcccggcttcggcgaccgccgcaaggccatgctcgaagacatcgccatcctcaccggcggcaccgtggtttctgaagacatgggcatcaagctggaaaacatgtccctggccgacctcggcaaatgcaaacgcgtaagcattgacaaagacaacaccaccatcgttgacggcgcaggcgcccgcagcgccctggaaggccgcgtcaaacagatccgcgctcagatcgacgacaccacctccgattacgaccgcgagaagctgcaggaacgtctggccaagctgatcggcggcgtggccgtcattaacgtcggcgcagccaccgaagtggaaatgaaagaaaagaaagcccgcgtggaagacgccctgaacgccacccgcgcagcggttgaagaaggcatcgttcccggcggcggcgtggctctggttcgcgccattgacgccgtggccaaagcgaaaatcaccggcgagcagaaaattggcgcccgcgtggttatgcgcgctctggaagctcctcttcgcatgatcgccaacaacgccggcatggaaggctccgtggttctggacaaggtcaagaacaccgaaggctcctttggttacaatgccgacaccgacacctacgaagacctgattgaagccggcgtcatcgaccccaccaaggtggtccgcctagctctgcagaacgcctgcagcatcgccggcctcatgctcaccaccgaagccatgatcgccgacaagccggacgaaaatgccggcggcatgcccgcaatgcccggcggcggaatgggcggcatgggcggaatgggcggaatgatgtaa

SEQ ID NO: 9293 - protein, 548 aa, Desulfatibacillum alkenivorans AK-01
MAKEIKYDMKARELMLAGVNALADAVAVTHGPKGRNVVIDKAWGAPTVTKDGVTVAKEIELENKFENMGAQMVKEVASKTSDTAGDGTTTATVLARAIYEEGMKLVVAGNNPMAIKRGIDKACEAAVKSLMNLSKPTKEQREIAQVGTISANTDETIGNIIAEAMNKVGKEGVITVEEAKSMDTTLDVVEGMQFDRGYISPYFVTDSEKMVCSLEDPYILIHEKKISNMKDLLPLLEQTAKMGKPLLIVAEDVEGEALATLVVNRLRGTLQIAAVKAPGFGDRRKAMLEDIAILTGGTVVSEDMGIKLENMSLADLGKCKRVSIDKDNTTIVDGAGARSALEGRVKQIRAQIDDTTSDYDREKLQERLAKLIGGVAVINVGAATEVEMKEKKARVEDALNATRAAVEEGIVPGGGVALVRAIDAVAKAKITGEQKIGARVVMRALEAPLRMIANNAGMEGSVVLDKVKNTEGSFGYNADTDTYEDLIEAGVIDPTKVVRLALQNACSIAGLMLTTEAMIADKPDENAGGMPAMPGGGMGGMGGMGGMM

SEQ ID NO: 9294 - DNA, 1635 bp, Bacillus cereus G9842
  CDS (1)..(1635): transl_table=11
atggcaaaagatattaaatttagtgaagaagcacgtcgttcgatgcttcgcggtgtcgacactcttgcaaacgcagtaaaagtaacgcttggaccaaaaggtcgtaacgttgtacttgagaaaaaattcggttcaccacttattacaaatgatggtgtaacaatcgcaaaagaaatcgaattagaagatgcattcgaaaacatgggtgcgaaattagtagcagaagttgctagcaaaacaaatgatgtagctggtgacggaacaacaactgcaactgtattagcgcaagctatgattcgtgaaggtcttaaaaacgtaacagctggtgctaacccaatgggtcttcgtaaaggtatcgaaaaagctgttactgctgcaattgaagaattaaaaacgatttctaaaccaatcgaaggcaaatcttctatcgcgcaagtagctgctatttctgcagctgacgaagaagtaggtcaattaatcgctgaagcaatggagcgcgttggtaacgatggcgttattactttagaagagtctaaaggattcacaacagaattagacgtagtagaaggtatgcaatttgatcgtggatatgcatctccttacatgattactgattctgacaaaatggaagcagttcttgataacccatacatcttaattactgacaaaaagatttctaacatccaagaaatcttaccagtattagagcaagtggtacaacaaggtaaaccacttcttatcattgctgaagatgtagaaggcgaagctttagctacattagtagtgaacaaacttcgtggtacattcaacgtagtagctgttaaagctcctggatttggtgaccgtcgtaaagcaatgctagaagatatcgcaatcttaactggtggcgaagtaatcactgaagaattaggtcgtgacttaaaatctgctacagttgaatctttaggacgcgctggtaaagttgttgttacaaaagaaaacacaactgtagttgaaggtattggaaatacagagcaaatcgcagctcgtatcggtcaaatccgtgcgcaattagaagaaacaacttctgaattcgatcgtgaaaaattacaagagcgtcttgctaaactagcaggtggcgtagcggtaattaaagtaggtgcagcaactgaaactgagttaaaagagcgcaaacttcgcattgaagatgcacttaactcaactcgtgcagcagtagaagaaggtatcgttgcaggtggtggtacttcacttatgaacgtatacacgaaagtagcttctatcgtagctgaaggcgacgaagcaacaggtatcaacatcgtacttcgcgcactagaagagccagttcgtcaaatcgcaatcaacgctggtctagaaggatctgtagttgtagagcgtctaaaaggcgaaaaagtaggcgttggtttcaatgcagctactggcgaatgggttaacatgcttgagtctggtatcgtagatccagctaaagtaactcgttctgcacttcaaaacgcagcatctgttgcagctatgttcttaacaactgaagctgtagtagctgacaagccagaaccaaatgcaccagcaatgcctgacatgggcggcatgggcatgggcggtatgggcggaatgatgtaa

SEQ ID NO: 9295 - protein, 544 aa, Bacillus cereus G9842
MAKDIKFSEEARRSMLRGVDTLANAVKVTLGPKGRNVVLEKKFGSPLITNDGVTIAKEIELEDAFENMGAKLVAEVASKTNDVAGDGTTTATVLAQAMIREGLKNVTAGANPMGLRKGIEKAVTAAIEELKTISKPIEGKSSIAQVAAISAADEEVGQLIAEAMERVGNDGVITLEESKGFTTELDVVEGMQFDRGYASPYMITDSDKMEAVLDNPYILITDKKISNIQEILPVLEQVVQQGKPLLIIAEDVEGEALATLVVNKLRGTFNVVAVKAPGFGDRRKAMLEDIAILTGGEVITEELGRDLKSATVESLGRAGKVVVTKENTTVVEGIGNTEQIAARIGQIRAQLEETTSEFDREKLQERLAKLAGGVAVIKVGAATETELKERKLRIEDALNSTRAAVEEGIVAGGGTSLMNVYTKVASIVAEGDEATGINIVLRALEEPVRQIAINAGLEGSVVVERLKGEKVGVGFNAATGEWVNMLESGIVDPAKVTRSALQNAASVAAMFLTTEAVVADKPEPNAPAMPDMGGMGMGGMGGMM

SEQ ID NO: 9296 - DNA, 1662 bp, Cyanothece sp. PCC 7425
  CDS (1)..(1662): transl_table=11
atggcaaagaaagtcgtctttcatgaagaatctcggcgggctttagagcggggggtgaatgccctggctgatgccgtacggattaccctgggccccaaagggcgtaatgttgtcctggagaaaaagtatggcgctccacagattatcaacgatggggtgacgatcgccaaagaagtcgaactggaagatcccctggaaaacaccggggcccaactgatgcgggaagtcgcggctaaaaccaatgatgtggccggagatggcaccacaactgctaccgttctggcccaggccatgatccgggaggggttgaaaaatgtggcagcaggagccaatccagtggcgttacgtcggggaatcgaaaaagcgatcgaccggattgtggcggaaattgaagccgtggccaaacccgtggaaggcagcatgattgcccaggttgcagcggtgtctgccggtaacgacgatgaagtcggccagatgatttctgaagccatggatagagtcgggcgcgatggcgtgatcaccgtggaagagtctaagtccctggccacagaaatggatatcgtcgaagggatgcagatcgatcgcggctacatttccccctactttgtcacggatgctgagcggatggtgacggagtttgacaatgcccggctgctgattgtggacaaaaagattggtagcattcaagacctgatcccggctctggaaaaagtggcccgcgctggtcaacccctgttgatcattgccgaggatgtggaaggggaagctttagccaccctggtggtgaacaaactgcggggagttctcaatgtctgtgcgatcaaagcccccggttttggtgatcgtcgtaaagaaatgctcaaagatattgctgtgctcaccaacggccaggtgatttcggaagaaattggcctctccctcgatcgagtggatctggacatgctgggaatcgcccgcaaagtcacaatcagcaaggacaacaccacgattctgaccgacgccggcatcaaacccgatgttcaggctcgggtcgatcaactgcggaaacaactggaaaacagcgattctgagtacgacaaagaaaaactgcaggaacggattgccaaactggccggtggggttgccgtaatcaaagtcggagcagccaccgaaaccgaactgaaggatcgcaaactgcggctggaagatgccctcaatgccaccaaagcggcggttgcagaaggaatcgtccccggcggcggaaccaccctgttgcatatgagcagcaaactgcgggatctgcaagctaaccttagtcaggaagaaaaaactggagccgaaattgtggcgatcgccctggaagctcccctacgtcagattgctgacaataccggggcggaaggagcggttgtggtggaaaatgtccgcaatagtgatttcaaccagggatttaacgctcaaactggtgaatacgtagacatgatcgccgcagggattattgacccggccaaagtggtgcgttcagctttgcaaaatgccggttcgatcgctggcatggtgctgaccacagaagctttagtggtggataaacctgagaagaaagctgcagcccccggacccgacatgggtggtatgggcggcatgggtggtatgggcggcatgggcggcatgggcatgatgtaa

SEQ ID NO: 9297 - protein, 553 aa, Cyanothece sp. PCC 7425
MAKKVVFHEESRRALERGVNALADAVRITLGPKGRNVVLEKKYGAPQIINDGVTIAKEVELEDPLENTGAQLMREVAAKTNDVAGDGTTTATVLAQAMIREGLKNVAAGANPVALRRGIEKAIDRIVAEIEAVAKPVEGSMIAQVAAVSAGNDDEVGQMISEAMDRVGRDGVITVEESKSLATEMDIVEGMQIDRGYISPYFVTDAERMVTEFDNARLLIVDKKIGSIQDLIPALEKVARAGQPLLIIAEDVEGEALATLVVNKLRGVLNVCAIKAPGFGDRRKEMLKDIAVLTNGQVISEEIGLSLDRVDLDMLGIARKVTISKDNTTILTDAGIKPDVQARVDQLRKQLENSDSEYDKEKLQERIAKLAGGVAVIKVGAATETELKDRKLRLEDALNATKAAVAEGIVPGGGTTLLHMSSKLRDLQANLSQEEKTGAEIVAIALEAPLRQIADNTGAEGAVVVENVRNSDFNQGFNAQTGEYVDMIAAGIIDPAKVVRSALQNAGSIAGMVLTTEALVVDKPEKKAAAPGPDMGGMGGMGGMGGMGGMGMM

SEQ ID NO: 9298 - DNA, 1644 bp, Anaeromyxobacter dehalogenans 2CP-1
  CDS (1)..(1644): transl_table=11
atggcagccaaggaaatcgtcttcgaccagaaggcccgcgacgcgatcctcaagggcgtgaacacgctcgccgacgcggtgaaggtgaccctcgggccgaagggccggaacgtggtcatcgagaagagcttcggctccccgaccatcaccaaggacggcgtgacggtcgcgaaggagatcgagctcgagaacaagttcgagaacatgggcgcgcagatggtgaaggaggtcgcctccaagacctccgacgtggccggtgacggcaccaccaccgcgaccgtgctcgcccaggccatctaccgcgagggctcgaagctcgtcgcggccggccacaacccgatggacgtgaagcgcggcatcgacaaggccgtcgaggccatcgtgggcgagctgaagaagctctccaagccgacgaaggaccacaaggagatcgcccaggtcggcatcatctccgccaacggcgacaccaccatcggcaacatcatcgccgaggcgatggagaaggtcggcaaggagggcgtcatcaccgtcgaggaggccaagggcctcgagacgacgctcgacgtggtcgagggcatgcagttcgaccgcggctacctctcgccgtacttcgtgaccgacgcggagcgcatggaggcggtcctcgaggacgcctacatcctcatcaacgagaagaagatctcgaacatgaaggacctgctcccgctgctggagcagatcgcgcgctcgggcaagccgctcatcatcgtggccgaggaggtcgagggtgaggcgctggcgacgctggtcgtcaacaagctgcgcggcacgctgcacgtctgcgcggtgaaggccccgggcttcggcgaccgccgcaaggccatgctggaggacatcgcgatcctcaccggcggccgcatgatcgccgaggagctcggcctcaagctcgagcaggtcacgctgaaggacctcggccgcgccaagcgcgtcacggtggacaaggacaacaccaccatcgtcgacggcgccggcaagaaggaggacatcgaggcccgggtgaagaccatccgcgcgcagatcgaggagaccacctccgactacgaccgcgagaagctccaggagcgcctcgcgaagctggtgggcggcgtggcggtcatcaacgtcggcgcggccaccgagaccgagatgaaggagaagaaggcccgcgtcgaggacgcgctccacgcgacccgcgcggccgtcgaggagggcatcgtccccggcggcggcgtggcgtacctgcgctgcgtgaaggcgctcgagggcgtgaaggtgaacgagggcgagaaggtcggcctcgacatcgtccgccgcgccatcgaggagccgctccgccagatctccggcaacggcggctacgagggctcgatcgtggtgaacaaggtgaaggaggcgaaggaggccgcgttcggcttcaacgccgccacgggcgagtacgaggacctggtgaaggccggcgtcatcgacccgaccaaggtctcgcgctccgcgctgcagaacgcggcgtcggtcgcctcgctgatgctcaccaccatggcgatggtcgccgagaagccgaaggaggaggctgcggcccccgccggcggcggcatgggcggcatgggcgggatgggcggcatgatgtag

SEQ ID NO: 9299 - protein, 547 aa, Anaeromyxobacter dehalogenans 2CP-1
MAAKEIVFDQKARDAILKGVNTLADAVKVTLGPKGRNVVIEKSFGSPTITKDGVTVAKEIELENKFENMGAQMVKEVASKTSDVAGDGTTTATVLAQAIYREGSKLVAAGHNPMDVKRGIDKAVEAIVGELKKLSKPTKDHKEIAQVGIISANGDTTIGNIIAEAMEKVGKEGVITVEEAKGLETTLDVVEGMQFDRGYLSPYFVTDAERMEAVLEDAYILINEKKISNMKDLLPLLEQIARSGKPLIIVAEEVEGEALATLVVNKLRGTLHVCAVKAPGFGDRRKAMLEDIAILTGGRMIAEELGLKLEQVTLKDLGRAKRVTVDKDNTTIVDGAGKKEDIEARVKTIRAQIEETTSDYDREKLQERLAKLVGGVAVINVGAATETEMKEKKARVEDALHATRAAVEEGIVPGGGVAYLRCVKALEGVKVNEGEKVGLDIVRRAIEEPLRQISGNGGYEGSIVVNKVKEAKEAAFGFNAATGEYEDLVKAGVIDPTKVSRSALQNAASVASLMLTTMAMVAEKPKEEAAAPAGGGMGGMGGMGGMM

SEQ ID NO: 9300 - DNA, 1641 bp, Thioalkalivibrio sp. HL-EbGR7
  CDS (1)..(1641): transl_table=11
atgagcgcgaaagaagtccgcttcagtgatgacgcccgttcccgcatggtccgtggcgtgaacgtcctggccaatgccgtgaaggtcaccctgggtcccaagggccgcaatgtggtgctggagaagtccttcggcgcccccaccgtgaccaaggacggcgtgtccgtggccaaggagatcgaactggaagacaagttcgagaacatgggtgcccagatggtgaaggaagtctcctcccagacctccgacatcgccggtgacggcaccaccaccgccaccgtgctggcccaggccatcgtgcgcgagggcatgaagtccgtgaccgccggcatgaaccccatggacctcaagcgcggcatcgacaaggccgtgatcgccgccgtggaagagctgaagaagctgtccaagccctgcaccgacagcaaggccattgcccaggtgggcaccatctccgccaactccgacgagtccatcggccagatcatcgccgatgccatggcgaaggtgggcaaggaaggcgtgatcaccgtggaggaaggttcctccctggagaacgagctggacgtggtggaaggcatgcagttcgaccgcggctacctgtccccctacttcgtcaacaaccagcagaacatgagcgccgagctggatgactgcttcgtgctgctctacgacaagaagatctccaacatccgcgacctgctgcccgtgctggaaggcgtcgccaaggccggcaagcccctgctgatcatcgccgaggacatcgagggcgaggccctggccaccctggtggtgaacaccatccgcggcatcgtgaaggtggccgccgtgaaggccccgggcttcggtgaccgtcgcaaggccatgctgcaggatatcgccatcctgaccggcggccaggtgatctccgaagaggtcggcctgtccctggagaaggccagcctcgacgacctgggccaggccaagcgcatcgtggtgaccaaggaaaacagcaccatcatcgacggcgccggcaagcccgacgagatcaagggtcgtgtggagcagatccgtgcccagatcgaggacgccacctctgattacgacaaggagaagctccaggagcgcgtggccaagctggccggcggcgtggccgtgatcaaggtcggtgccgccactgaggtggaaatgaaggagaagaaggcccgcgtggaagacgccctgcacgccacccgcgctgcggtggaagaaggcgtggtgcccggcggcggtgtcgccctggtgcgtgccctgcaggccctcaagagcctcaagggtgccaaccacgaccaggacatcggcatcgccatcgcccgtcgcgcaatggaagagcccctgcgtcagatcgtgtccaactgcggcgaagagccctccgtggtgctgaacaacgtggtggaaggcaagggtaactacggttacaacgccgccaccggcgagtacggcgacatgatcgaaatgggtatcctggatcccaccaaggtcacccgcagcgccctgcagaacgccgcttccgtgtccggtttgatcatcaccaccgaggcgatggtcgccgagctgccgaagaagggcgactccgcccccgccggcggcggcatgggcgacatgggcggcatgggcatgatgtaa

SEQ ID NO: 9301 - protein, 546 aa, Thioalkalivibrio sp. HL-EbGR7
MSAKEVRFSDDARSRMVRGVNVLANAVKVTLGPKGRNVVLEKSFGAPTVTKDGVSVAKEIELEDKFENMGAQMVKEVSSQTSDIAGDGTTTATVLAQAIVREGMKSVTAGMNPMDLKRGIDKAVIAAVEELKKLSKPCTDSKAIAQVGTISANSDESIGQIIADAMAKVGKEGVITVEEGSSLENELDVVEGMQFDRGYLSPYFVNNQQNMSAELDDCFVLLYDKKISNIRDLLPVLEGVAKAGKPLLIIAEDIEGEALATLVVNTIRGIVKVAAVKAPGFGDRRKAMLQDIAILTGGQVISEEVGLSLEKASLDDLGQAKRIVVTKENSTIIDGAGKPDEIKGRVEQIRAQIEDATSDYDKEKLQERVAKLAGGVAVIKVGAATEVEMKEKKARVEDALHATRAAVEEGVVPGGGVALVRALQALKSLKGANHDQDIGIAIARRAMEEPLRQIVSNCGEEPSVVLNNVVEGKGNYGYNAATGEYGDMIEMGILDPTKVTRSALQNAASVSGLIITTEAMVAELPKKGDSAPAGGGMGDMGGMGMM

SEQ ID NO: 9302 - DNA, 1641 bp, Agrobacterium radiobacter K84
  CDS (1)..(1641): transl_table=11
atggcagctaaagaagtaaaattcggccgcagcgcccgcgaaaagatgcttcgtggcgtcgacatcctcgctgacgcagtgaaggtcacgctcggcccgaagggtcgtaacgtcgttatcgacaagtccttcggcgctccgcgcatcaccaaggacggcgtcaccgtcgccaaggaaatcgaactcgaagacaagttcgaaaacatgggcgcccagatggtccgcgaagttgcttcgaagaccaacgacatcgccggcgacggcaccacgaccgcaactgttctcgcccaggccatcgttcgcgaaggcgccaaggcagttgcagccggcatgaacccgatggacctgaagcgcggcatcgatctcgccgttgctgaagtcgtcaaggatctccaggccaaggccaagaagatcaacacttcggaagaagtcgcacaggtcggcaccatctccgcaaacggcgaaaagcagatcggtctcgatattgctgaagccatgcagaaggtcggcaacgaaggcgtcatcacggttgaagaagccaagaccgccgaaaccgaactcgaagtcgtcgaaggcatgcagttcgaccgcggctatctcagcccctacttcgtgaccaatccggaaaagatgatcgccgacctcgaagacgcgttcatcctgctccacgagaagaagctctcgaacctgcaggccatgcttccggttctggaagccgtcgttcagaccggcaagccgctcctcatcatcgctgaagacgtcgaaggcgaagctcttgctacgctcgtcgtcaacaagctgcgcggtggtctgaagatcgctgccgtcaaggctccgggcttcggcgaccgccgcaaggccatgctggaagacatcgccatcctgacgggcggcactgtcatctccgaagacctcggcatcaagctcgagtcggttacgctcgacatgctcggccgcgcgaagaaggtttcgatctccaaggaaaacaccacgatcgtcgacggtgctggccagaagtccgacatcgaaggccgcgttgcccagatcaaggctcagatcgaagaaaccacctctgactacgaccgcgaaaagctgcaggaacgtcttgccaagctcgctggcggcgttgccgttatccgcgttggcggctcgacggaaatcgaagtcaaggaaaagaaggaccgcatcgacgacgctctgaacgcgacgcgcgctgctgttcaggaaggcatcgtaccgggcggcggcacggctctgctgcgctcctccgttaagatcaccgtcaagggtgaaaacgacgaccaggaagccggcgtcaacatcgttcgtcgcgctctgcaggctccctgccgccagatcgctgaaaacgctggtgatgaagcctccatcgttgtcggcaagatcctcgacaagaacgaagacaactggggctacaacgctcagacgggcgtctacggcgacatgatcgccatgggcatcgtcgacccggtcaaggtcgttcgcacggctctgcaggacgcagcttcggttgcttcgctgctgatcaccaccgaagccatgattgccgagctgccgaagaaggacgctcctggcggcatgccaggcggcatgggcggcatgggtggaatggacatgatgtaa

SEQ ID NO: 9303 - protein, 546 aa, Agrobacterium radiobacter K84
MAAKEVKFGRSAREKMLRGVDILADAVKVTLGPKGRNVVIDKSFGAPRITKDGVTVAKEIELEDKFENMGAQMVREVASKTNDIAGDGTTTATVLAQAIVREGAKAVAAGMNPMDLKRGIDLAVAEVVKDLQAKAKKINTSEEVAQVGTISANGEKQIGLDIAEAMQKVGNEGVITVEEAKTAETELEVVEGMQFDRGYLSPYFVTNPEKMIADLEDAFILLHEKKLSNLQAMLPVLEAVVQTGKPLLIIAEDVEGEALATLVVNKLRGGLKIAAVKAPGFGDRRKAMLEDIAILTGGTVISEDLGIKLESVTLDMLGRAKKVSISKENTTIVDGAGQKSDIEGRVAQIKAQIEETTSDYDREKLQERLAKLAGGVAVIRVGGSTEIEVKEKKDRIDDALNATRAAVQEGIVPGGGTALLRSSVKITVKGENDDQEAGVNIVRRALQAPCRQIAENAGDEASIVVGKILDKNEDNWGYNAQTGVYGDMIAMGIVDPVKVVRTALQDAASVASLLITTEAMIAELPKKDAPGGMPGGMGGMGGMDMM

SEQ ID NO: 9304 - DNA, 1644 bp, Brevundimonas sp. BAL3
  CDS (1)..(1644): transl_table=11
atggccgctaaaatcgtacagttcaacaccgacgcgcgcgacaagatgctgcgcggcgtcaacgtgctcgccaacgccgtcaaggtgacgctcggtcccaagggccgcaacgtcgtgatccagaagtccttcggcgccccgcgctcgaccaaggacggcgtgtcggtcgccaaagagatcgagctggaagacgccttcgagaacatgggcgcccagatgatccgcgaagtcgcttcgaagacgaacgacaaggcgggtgacggcaccaccaccgcaaccgtcctggcgcaatcgatcgtgcaggaaggcctcaaggccgtcgccgccggcatgaacccgatggatctgaagcgcggcatcgacaaggccgtcaccgccgtcctcgccgacatcaaggcctcggccaagaaggtcgagaacaactccgagatcgcccaggtcggcaccatctcggccaacggcgacgctgaagtcggcgaaatgatcgccaaggccatggccaaggtaggcaacgaaggcgtcatcacggttgaagaagccaagaccgccgagaccgagctggacgtcgtcgaaggcatgcagttcgaccgcggctacctgagcccttacttcatcaccaacgccgacaagatggaggttcaactcgaagagcccctgatcctgctgttcgagaagaagctgtcgtcgctgcaggccatgctgccgatcctggaagccgtcgtgcaatcgggccgtccgctggtgatcatcgccgaggacatcgaaggcgaggccctggccaccctggtggtcaacaagctgcggggcggcctgcgcgtcgccgccgtcaaggctccgggcttcggtgatcgccgcaaggccatgctggaagacatcgccatcctgaccggcggccaggtcatctcggaagacctgggcatcaagcttgagaacgtcacgatcgacatgctcggcaaggccaagaaagtcacgatcaccaaggacgacaccaccatcgtggacggcgttggcggcaaggaagagatcgaggcccgcatcggccagatcaagcgccagatcgaggacaccacctcggactacgacaaggaaaagctgcaggaacgtctggccaagctggccggcggcgtcgccgtcatccgcgtcggcggctcgaccgaagtcgaagtgaaggaaaagaaggaccgcgtcgacgacgccctgaacgccacgcgtgcagccgttgaagaaggcatcgtcccgggcggcggcatcgccctgctgaaggcgaccaaggcgcttgacggcctgaccggcgacaacgccgaccagaccgccggcatcgccatcatccgtcgcgccatccaggccccgatccgtcagatcgtggaaaacgccggcgtcgaaggctcgatcgtcgtgggcaaggtgctggaaaacagctccgccacctacggcttcaacgcccagacggaagagtacggcgacctggtcgccatgggcgtgatcgacccggccaaggtggttcgcaccgccctgaccgacgccgcctcggtggcctcgatcctgatcacgaccgaagccgccgtcgccgacgcccccaagaagggcggctcctcggcccccgacatgggtggaatgggcggcatgggcggcatggacttctaa

SEQ ID NO: 9305 - protein, 547 aa, Brevundimonas sp. BAL3
MAAKIVQFNTDARDKMLRGVNVLANAVKVTLGPKGRNVVIQKSFGAPRSTKDGVSVAKEIELEDAFENMGAQMIREVASKTNDKAGDGTTTATVLAQSIVQEGLKAVAAGMNPMDLKRGIDKAVTAVLADIKASAKKVENNSEIAQVGTISANGDAEVGEMIAKAMAKVGNEGVITVEEAKTAETELDVVEGMQFDRGYLSPYFITNADKMEVQLEEPLILLFEKKLSSLQAMLPILEAVVQSGRPLVIIAEDIEGEALATLVVNKLRGGLRVAAVKAPGFGDRRKAMLEDIAILTGGQVISEDLGIKLENVTIDMLGKAKKVTITKDDTTIVDGVGGKEEIEARIGQIKRQIEDTTSDYDKEKLQERLAKLAGGVAVIRVGGSTEVEVKEKKDRVDDALNATRAAVEEGIVPGGGIALLKATKALDGLTGDNADQTAGIAIIRRAIQAPIRQIVENAGVEGSIVVGKVLENSSATYGFNAQTEEYGDLVAMGVIDPAKVVRTALTDAASVASILITTEAAVADAPKKGGSSAPDMGGMGGMGGMDF

SEQ ID NO: 9306 - DNA, 1635 bp, Cyanobium sp. PCC 7001
  CDS (1)..(1635): transl_table=11
atggctaagcgcatcatctacaacgagcaagcccgccgcgcgctcgaaaaaggcattgacatcctggccgaatccgtggccgtcaccctcggtcccaagggccgcaatgtggtgctggagaagaagttcggtgctccacagatcatcaacgatggcgtcaccatcgccaaggagatcgagctggaggatcacatcgagaacactggtgtggccctgatccgtcaggcggcctccaagaccaacgacgctgccggtgacggcaccaccactgccaccgtcctggcccacgccatggtcaaggccggtctgcgcaacgtggccgccggcgccaacgcgatcaccctcaagaagggcatcgacaaggcctccgacttcctcgtcaagaagatcgaggagcacgccaagccgatctccgactccagcgccattgcccaggtgggcaccatctccgccggcaacgacgaagaggtgggtcgcatgatcgccgacgccatggacaaggtcggcaaggaaggcgtgatctccctggaggaagggaaatcgatgaccaccgagctggaggtcaccgagggcatgcgtttcgacaagggctacatctctccctacttcgccaccgacaccgagcgcatggaagcggtgctcgaggagccctacatcctgctcaccgacaagaagatcggcctggtgcaggacctggtgcccgtgctcgagcagatcgcccgcaccggcaagcccctgctgatcatcgccgaggacatcgagaaggaagccctcgccaccctggtggtgaaccgtctgcgtggtgtgctcaatgtggccgccgtcaaggcccccggcttcggtgaccgccgcaaggccatgctcgaggacatcgccgttctcaccaatggccagctgatcaccgaggatgccggcctcaagctggagaacgccaagctcgagatgctcggcaccgcccgccgggtgaccatcaacaaggacaccaccaccatcgtggccgagggcaacgaggtggccgtgaaggcccgctgcgagcagatccgcaagcagatggacgaaaccgactcctcctacgacaaggagaagctgcaggagcgtctggccaagctgagcggtggtgtggccgtggtcaaggtgggtgccgccaccgagaccgagatgaaggacaagaagctccgtctcgaggatgccatcaacgccaccaaagcggcggtcgaagagggcattgttcctggtggtggcacaaccctggcccacctggctccggctctcgaagagtgggcagcggccaatctcaccggtgaagagctgatcggggccaccatcgtggcgtccgcgctcaccgcgccgctcaagcgcatcgccgagaacgccggtgccaacggcgccgtcgtcgccgaaaacgtgaagagcaagcccttcaacgagggttacaacgccgccaccggtgagtacgtggacatgctggccgccggcatcgtggatcccgccaaggtgacccgctccggcctgcagaatgccgcctcgatcgccggcatggtgctcaccaccgagtgcatcgtggcggacctgcccgagaagaaggaagcggcccctgccggtggtggtggcatgggcggagacttcgactactga

SEQ ID NO: 9307 - protein, 544 aa, Cyanobium sp. PCC 7001
MAKRIIYNEQARRALEKGIDILAESVAVTLGPKGRNVVLEKKFGAPQIINDGVTIAKEIELEDHIENTGVALIRQAASKTNDAAGDGTTTATVLAHAMVKAGLRNVAAGANAITLKKGIDKASDFLVKKIEEHAKPISDSSAIAQVGTISAGNDEEVGRMIADAMDKVGKEGVISLEEGKSMTTELEVTEGMRFDKGYISPYFATDTERMEAVLEEPYILLTDKKIGLVQDLVPVLEQIARTGKPLLIIAEDIEKEALATLVVNRLRGVLNVAAVKAPGFGDRRKAMLEDIAVLTNGQLITEDAGLKLENAKLEMLGTARRVTINKDTTTIVAEGNEVAVKARCEQIRKQMDETDSSYDKEKLQERLAKLSGGVAVVKVGAATETEMKDKKLRLEDAINATKAAVEEGIVPGGGTTLAHLAPALEEWAAANLTGEELIGATIVASALTAPLKRIAENAGANGAVVAENVKSKPFNEGYNAATGEYVDMLAAGIVDPAKVTRSGLQNAASIAGMVLTTECIVADLPEKKEAAPAGGGGMGGDFDY

SEQ ID NO: 9308 - DNA, 1674 bp, Microcoleus chthonoplastes PCC 7420
  CDS (1)..(1674): transl_table=11
atggcaaaaatcgtttcgtttaacgaagaatcacggcgagccttagaacggggagtcaatgctctggcagatgcagtccggattacccttggacccaaagggcggaatgtgctgctagagaagtcctttggcgctccccagattgttaatgatggtatcaccgtcgcccaagatattgaactagaagaccccttagagaatacgggggcgcgactgattcgagaagtcgcatccaagactaaagaaattgctggagatggtactacaaccgctaccgttctggcacaggagatgattcgacaaggactcaaaaacgttgcggctggtgctaatccagtggcggtacgtcgagggattgagaaaaccataaatcatctggttaaagaaattgagtcaatggctcaacccgtcgttggcgatgcgatcgcacaagtcgccactgtctccgccggaaacgacgaggaagtcgggcaaatgattgcccaggcgatggacaaggtaaccaaggatggagtaattaccgtagaagagtcaaaatcgctttccaccgaactggaagttgtggaagggatgcaaattgaccggggttacctctccccctactttgtcagcgatcaggaacggatgaccgtggaatttgaagattcctatatcctgattactgataaaaaaattaataacatccaagaattagtttccatcctggaaaaagttgcccgtgccagcaaacccctactgattattgctgaagatgtagaaggggaagccttagccaccttggtggtaaacaaagcacggggagttctcaacgtcgccgccgtcaaagcgccaggatttggcgatcgccgcaagcagatgctgcaagatattgcggttctgactgggggtcagctaatttccgaagaaatcggtctcagcttagatagcgcttctactgagatgatgggaacggcacggaaaatcacaattgacaaagactcaaccacgattgtcgccagtggtgaaaccaagccagaagtggagaagcgcattgcccaaatccgcaaacagcttgaggaaaccgattctgactacgataaagagaaactgcaagagcggattgctaaacttgctggtggtgtagcggtaattaaagtcggtgcagccacagaaacggaactcaaagatcgcaagctgcggattgaagatgccctgaatgccaccaaagccgcgatcgatgaagggattgttcctggcggtgcaaccacgctgattcgcttaatttccaaagttgatggcatcaaagctaacctggatgctgaagagcaaatcggtgcggatattgttgccaaaaccttagaagccccgctgcgtcagatggcggataatgctggggttgaaggtgcggtgattgtcgagaaagtacgagagagccaaggcaatatcggttacaatgccgcgacaggtaagctggaagacttaattgctgctggtattctcgatcccgctaaggttgtgcgttcagcacttcagaatgcaggttccattgccgggatggttctaaccaccgaagccctggttgtcgagaaacctgagccgaaatccgctgcgcctgacatgggcggcatgggcggcatgggcggcatgggtggcatgggcggcatgggtggcatgggcggcatgggcatgatgtag

SEQ ID NO: 9309 - protein, 557 aa, Microcoleus chthonoplastes PCC 7420
MAKIVSFNEESRRALERGVNALADAVRITLGPKGRNVLLEKSFGAPQIVNDGITVAQDIELEDPLENTGARLIREVASKTKEIAGDGTTTATVLAQEMIRQGLKNVAAGANPVAVRRGIEKTINHLVKEIESMAQPVVGDAIAQVATVSAGNDEEVGQMIAQAMDKVTKDGVITVEESKSLSTELEVVEGMQIDRGYLSPYFVSDQERMTVEFEDSYILITDKKINNIQELVSILEKVARASKPLLIIAEDVEGEALATLVVNKARGVLNVAAVKAPGFGDRRKQMLQDIAVLTGGQLISEEIGLSLDSASTEMMGTARKITIDKDSTTIVASGETKPEVEKRIAQIRKQLEETDSDYDKEKLQERIAKLAGGVAVIKVGAATETELKDRKLRIEDALNATKAAIDEGIVPGGATTLIRLISKVDGIKANLDAEEQIGADIVAKTLEAPLRQMADNAGVEGAVIVEKVRESQGNIGYNAATGKLEDLIAAGILDPAKVVRSALQNAGSIAGMVLTTEALVVEKPEPKSAAPDMGGMGGMGGMGGMGGMGGMGGMGMM

SEQ ID NO: 9310 - DNA, 1644 bp, Octadecabacter antarcticus 238
  CDS (1)..(1644): transl_table=11
atggctgctaaagacgtaaaattcgggaccgacgcccgcaatcgcatgctcaagggtgtcaacactcttgcagacgcggttaaagtcacgcttggcccaaagggtcgtaacgttgtgctggaaaaatctttcggcgcaccacggatcaccaaagacggtgtgtctgtcgccaaagagatcgaacttgaagacaagttcgagaacatgggcgcgcagatggttaaagaagttgcgagtcgcacgaacgacgaagcaggcgacggtacaacaactgcgacagttctggccgctgcaatcatccgcgaaggcatgaaatctgtcgccgctggcatgaacccaatggatctgaagcgcggtatcgacctcgcgactgccaaagttgttgaagccatcaaggctgcagcacgtgacgtgtccgacagcgacgaagtcgcgcaggttggcacgatttctgcgaacggtgaggccgaaatcggtcgccagattgctgacgcaatgcaaaaagtcggcaatgagggtgtcatcaccgttgaagagaacaaaggcctcgacactgagactgatgttgttgaaggcatgcagttcgaccgcggctacctgtcaccttactttgtcaccaaccctgacaaaatgacggttgagctggaagatgcggttatcctgttgcacgaaaagaagctgtcttcgcttcagccaatggttccgctgcttgaatcagtgatccagtccggcaagccacttttgatcatctcggaagacgttgagggcgaggcccttgcgacactcgttgtgaacaaactgcgtggcggtctgaaaattgcagctgttaaggcacctggtttcggcgatcgccgtaaagccatgttgcaggacatcgcaattttgaccggtggtcaggtgatttccgaagacctcggcatgaagcttgagaatgtcacaatcgacatgctgggttccgccaagcgcgttgcgatcaccaaagatgaaacaacaatcatcgatggcgcaggcgcaaaagctgaaatcgaagcacgtgttgttcagatccgtaaccagatcgaagaaacaacatccgattacgacaaagagaagctgcaagaacgtgttgccaaactggcaggcggcgttgctgttatccgcgtcggcggcatgtccgaagtcgaagtgaaagagcgtaaagaccgcgtcgacgacgcactgaacgcgacacgcgccgcggtgcaagaaggtatcgttgttggtggtggtgttgcacttgtgcaggccggcaaagcgcttgatggtctgaagggtgcgaactctgatcaggacgtcggtatcacgatcgtacgtaagtcgcttgaagcgcctttgcgtcagatcgccgaaaactccggtgttgacgggtccgtcgttgcgggcaaaatccgcgaaagcaatgacaagacgttcggctttaacgcgcagaccgaagaatatggcgacatgttcaagttcggcgtgatcgaccccgccaaagttgtgcgcacatcgttgcagtatgcggcatcggttgctggtctgttgatcacgacagaagccatggttgctgacaagcctgccaaagaaggcgctggcggcggcggcggcatgcccgacatgggcggcatgggcggcatgatgtaa

SEQ ID NO: 9311 - protein, 547 aa, Octadecabacter antarcticus 238
MAAKDVKFGTDARNRMLKGVNTLADAVKVTLGPKGRNVVLEKSFGAPRITKDGVSVAKEIELEDKFENMGAQMVKEVASRTNDEAGDGTTTATVLAAAIIREGMKSVAAGMNPMDLKRGIDLATAKVVEAIKAAARDVSDSDEVAQVGTISANGEAEIGRQIADAMQKVGNEGVITVEENKGLDTETDVVEGMQFDRGYLSPYFVTNPDKMTVELEDAVILLHEKKLSSLQPMVPLLESVIQSGKPLLIISEDVEGEALATLVVNKLRGGLKIAAVKAPGFGDRRKAMLQDIAILTGGQVISEDLGMKLENVTIDMLGSAKRVAITKDETTIIDGAGAKAEIEARVVQIRNQIEETTSDYDKEKLQERVAKLAGGVAVIRVGGMSEVEVKERKDRVDDALNATRAAVQEGIVVGGGVALVQAGKALDGLKGANSDQDVGITIVRKSLEAPLRQIAENSGVDGSVVAGKIRESNDKTFGFNAQTEEYGDMFKFGVIDPAKVVRTSLQYAASVAGLLITTEAMVADKPAKEGAGGGGGMPDMGGMGGMM

SEQ ID NO: 9312 - DNA, 1644 bp, Rhodobacteraceae bacterium KLH11
  CDS (1)..(1644): transl_table=11
atggctgcaaaggacgtcaagttcgacaccgatgcccgtaaccgcatgctggcaggtgtgaacatcctggccgatgctgttaaagtgaccctgggccccaaaggccgtaacgtggttctggataaatccttcggcgcgccgcgcatcaccaaagacggtgtttcggttgccaaggaagtcgaactggaagacaagttcgaaaacatgggcgcgcagatggtgaaagaagtcgccagccgcaccaatgacgaagccggcgacggcaccaccaccgcaaccgttctggcgcaatctatcgtcaaagaaggtctcaagcaggttgctgctggcctgaacccgatggacctgaagcgcggcatcgacctggcaaccgccaaggttgttgaaggcatcaaggcagcgtcgcgcgaagtcaaagactcggcagaagttgctcaggtcggcaccatctcggccaacggcgaagccgagattggccagcagatcgcagacgcgatgcagaaggttggcaacgaaggcgttatcaccgtcgaagaaaacaaaggtctggaaaccgagaccgatgttgtcgaaggtatgcagtttgaccgtggctacctgtcgccttacttcgtcaccaacgcagacaagatgattgcagagcttgaagactgcatgatcctgctgcacgaaaagaaactgtcttcgctgcagccgatggttccgctgctggagcaggtgatccagtcgcaaaagccgctgctgatcatcgcggaagacgttgaaggcgaagcgctggcaactctggttgtcaacaaactgcgcggcggcctgaaaattgctgctgtcaaggctccgggcttcggcgatcgccgcaaagccatgctgcaggacatcgcaatcctgaccggtggtcaggtcatcagcgaagatctgggcatgaagcttgagtccgtcaccatggacatgctgggcaccgccaagaaagttgagatcaccaaagacgaaaccaccgtcgtcgatggtgctggcgagaaggccgagatcgaagcacgcgttgctcagatccgtacccagatcgaggaaacctcgtcggattacgaccgtgagaagctgcaagagcgcgttgccaagctggcaggcggtgttgctgttatccgcgtcggcggcatgaccgaagttgaagtgaaagagcgtaaggaccgtgtggacgatgctctgaacgcgacacgcgctgccgttcaggaaggcgttgttgtgggcggcggtgtcgctctggttcaggccggtaaagcacttgagtcgctggaaggcggaaacgctgaccagaacgcgggcatcaacatcgttcgcaaggccatcgaatcgccgctgcgccagatcgccgagaacgcaggtgttgacggtgcggttgttgcgggcaaggttcgtgaatcgtccgatgcagctttcggcttcaacgcacagaccgaagaatatggcgacatgttctcgttcggcgtcatcgacccggccaaagtggttcggactgctctggaagacgcggcatcggttgctggcctgctggtcacgactgaggcaatggtcgccgacaagcctgccaaagaaggcgcggcacctgccggtggcatgcccgacatgggcggcatgggcggcatgatgtaa

SEQ ID NO: 9313 - protein, 547 aa, Rhodobacteraceae bacterium KLH11
MAAKDVKFDTDARNRMLAGVNILADAVKVTLGPKGRNVVLDKSFGAPRITKDGVSVAKEVELEDKFENMGAQMVKEVASRTNDEAGDGTTTATVLAQSIVKEGLKQVAAGLNPMDLKRGIDLATAKVVEGIKAASREVKDSAEVAQVGTISANGEAEIGQQIADAMQKVGNEGVITVEENKGLETETDVVEGMQFDRGYLSPYFVTNADKMIAELEDCMILLHEKKLSSLQPMVPLLEQVIQSQKPLLIIAEDVEGEALATLVVNKLRGGLKIAAVKAPGFGDRRKAMLQDIAILTGGQVISEDLGMKLESVTMDMLGTAKKVEITKDETTVVDGAGEKAEIEARVAQIRTQIEETSSDYDREKLQERVAKLAGGVAVIRVGGMTEVEVKERKDRVDDALNATRAAVQEGVVVGGGVALVQAGKALESLEGGNADQNAGINIVRKAIESPLRQIAENAGVDGAVVAGKVRESSDAAFGFNAQTEEYGDMFSFGVIDPAKVVRTALEDAASVAGLLVTTEAMVADKPAKEGAAPAGGMPDMGGMGGMM

SEQ ID NO: 9314 - DNA, 1650 bp, Ruegeria sp. R11
  CDS (1)..(1650): transl_table=11
atggctgctaaggacgtcaaattcgacaccgatgcccgcaaccgcatgctgaaaggcgtcaacattctggccgacgccgtgaaagtgaccctgggccccaaaggccgcaacgtggttctggacaaatcctttggcgcaccgcgcatcaccaaggacggtgtgtccgtggcgaaggaaatcgaactggaagacaagttcgagaacatgggcgcccagatggtgaaggaagttgcttcccgcaccaacgacgaagccggtgacggcaccaccactgcaaccgttctggctcaggcgatcgtcaaagaaggcctgaagcaggttgcagccggcctgaacccgatggacctgaagcgcggcatcgacctggcaactgccaaggttgtggaagcgatcaaggcatctgcacgtgacgtaaaagacagcgacgaagttgcgcaggttggcaccatctccgccaacggcgaagcagaaatcggccgtcagatcgcagacgcgatgcagaaagtcggcaacgaaggcgttatcaccgtcgaagaaaacaagggtctggaaacagagaccactgttgtcgaaggtatgcagttcgaccgcggctacctgtccccctactttgtcaccaaccctgacaagatgattgcagaactcgacgactgcatgatcctgctgcacgagaagaaactctcctcgctgcaagcaatggttccgctgctggagcaggtgatccagtcgcagaagccgctgctgatcatcgcagaagatgttgaaggcgaagcgctggcaactctggttgtcaacaaactgcgcggcggcctgaaaattgctgctgtcaaggcaccgggcttcggcgatcgccgcaaagccatgctgcaggacatcgccatcctgaccggcggtcaggtcatctccgaagatctgggcatgaagctcgagtccgtcaccatggacatgctgggcaccgccaagaaaatcgagatcaccaaagacgaaaccaccatcgttgacggtgcaggcgagaaggccgagatcgaagcacgtgttgctcagatccgtacccagatcgaagaaacctcttccgactacgaccgtgaaaagctgcaagagcgcgttgccaaactggcaggcggtgttgctgttatccgcgtcggcggcatgaccgaagtggaagtgaaagagcgcaaagaccgcgttgacgatgctctgaacgcaacccgcgcagctgtacaggaaggcgtcatcgttggtggtggtgttgctctggttcaggctggcaaggcactggacggcgttgagggtgcaaactctgaccagaacgctggtatcgccatcgtccgcaaagccatcgaagcgccgctgcgccagatcgctgaaaacgcaggtgtcgacggtgctgtcgttgcaggcaagatccgcgaatccgcagacacatccttcggctacaacgctcagaccgacgaatatggcgacatgttctccttcggcgtgatcgacccggcaaaagtgacccgtaccgctctggaagatgcggcatcggttgctggcctgctgatcaccaccgaagctatggttgccgacaagcccgccaaagaaggcgcggcagctggcggcatgcccgacatgggcggcatgggcggcatgggcggcatgatgtaa

SEQ ID NO: 9315 - protein, 549 aa, Ruegeria sp. R11
MAAKDVKFDTDARNRMLKGVNILADAVKVTLGPKGRNVVLDKSFGAPRITKDGVSVAKEIELEDKFENMGAQMVKEVASRTNDEAGDGTTTATVLAQAIVKEGLKQVAAGLNPMDLKRGIDLATAKVVEAIKASARDVKDSDEVAQVGTISANGEAEIGRQIADAMQKVGNEGVITVEENKGLETETTVVEGMQFDRGYLSPYFVTNPDKMIAELDDCMILLHEKKLSSLQAMVPLLEQVIQSQKPLLIIAEDVEGEALATLVVNKLRGGLKIAAVKAPGFGDRRKAMLQDIAILTGGQVISEDLGMKLESVTMDMLGTAKKIEITKDETTIVDGAGEKAEIEARVAQIRTQIEETSSDYDREKLQERVAKLAGGVAVIRVGGMTEVEVKERKDRVDDALNATRAAVQEGVIVGGGVALVQAGKALDGVEGANSDQNAGIAIVRKAIEAPLRQIAENAGVDGAVVAGKIRESADTSFGYNAQTDEYGDMFSFGVIDPAKVTRTALEDAASVAGLLITTEAMVADKPAKEGAAAGGMPDMGGMGGMGGMM

SEQ ID NO: 9316 - DNA, 1680 bp, Synechococcus sp. PCC 7335
  CDS (1)..(1680): transl_table=11
atggcgaaattagtattattcgatgagaagtcgcgccaagcgcttgagcgcggcgtcaatgccctggcggacgcagtcaagatcactatgggtccaaaaggccgaaacgtggtgctagaaaagaagtttggtgcacctcaaatcgtcaacgacggcatcactatcgcaaaggaaattgaacttgatgacccgtatgagaatacaggtgctcgtctggtccaagaagtagcttccaagaccaaagacctagcaggcgatggcacgacgactgccaccgtacttgctcaagcgctcattcgtgaaggtctaaaaaacgtggccgcaggtgcgaatccagttagtctacgtcgcggaatcgaaaaagcagttgcctatctagtttctgaaattgaagctgttgctaagcctgttgctggtaacgacattgctcaggtggcagctgtttcatccggaaacgatgaaatggttggtgacatgattgctcaggcaatggataaagttacaaaagatggcgtcattactgtagaagaatctaagtctctagacactgagcttgacgttgtagaagggatgcagattgatcgcggttatatgtctccttattttgtcaccgaccaagaacggatggtggttgagctagaaaatgctcgcatcttgattgttgacaagaagattagctcgattcaggacttagtgccagtgctagagcaggtcagtcgtactgggcagccgctgctggtgattgctgaagacgtcgaaggtgaagctctagctactttggtcgttaacaaagcgcgaggtgttctcaatgttgcttccattaaatctcctggttttggtgaacgtcgcaaagcactgttagctgatattgctgcgcttacaggtggccaggtaatttctgaagaggtcggtctatcgctagaatcaaccactatcgatatgcttggaacggcttcaaaggtcacagttaccaaagacaccacgaccttggtatctgaaaacggtaacaaagacgatattgctaagcgggtagagcagattcgtaaggaattatccttgacggattctgactacgataaggagaagctggctgaacgtttggcaaaactagctggcggtgttgctgttattaaagtgggcgcagcgactgaaactgagcttaaggatcgtaagctgcgaattgaagatgctctaagtgctactaaagcagcggttgaagaaggaattgttccaggtggtggcgctactttgcttcacctagctcaaaagctcgatagcatgaaagcgtctctttcaaatgaagagaaaacgggtgtagatattgtcatacgggcactagaggctccgttgcgtcaaattgctgacaactcgggcgcggaaggctctgtagtcgttgagaaagtcaaagacatggatgccaactttggctacaacgcgcttactggcaagtatgaagatctactgagttctggcattattgacccggcaaaggtagttcgctcagcgctacaagacgcggcttcagtcgccggtatggtactaaccactgaagttcttgtcgtagagaagcctgaacctgaacccgcaatgcccggtggcgacatgggcggcatgggtggcatgggcggcatgggtggcatgggcggcatgggcggcatgggcggcatgggcatgatgtag

SEQ ID NO: 9317 - protein, 559 aa, Synechococcus sp. PCC 7335
MAKLVLFDEKSRQALERGVNALADAVKITMGPKGRNVVLEKKFGAPQIVNDGITIAKEIELDDPYENTGARLVQEVASKTKDLAGDGTTTATVLAQALIREGLKNVAAGANPVSLRRGIEKAVAYLVSEIEAVAKPVAGNDIAQVAAVSSGNDEMVGDMIAQAMDKVTKDGVITVEESKSLDTELDVVEGMQIDRGYMSPYFVTDQERMVVELENARILIVDKKISSIQDLVPVLEQVSRTGQPLLVIAEDVEGEALATLVVNKARGVLNVASIKSPGFGERRKALLADIAALTGGQVISEEVGLSLESTTIDMLGTASKVTVTKDTTTLVSENGNKDDIAKRVEQIRKELSLTDSDYDKEKLAERLAKLAGGVAVIKVGAATETELKDRKLRIEDALSATKAAVEEGIVPGGGATLLHLAQKLDSMKASLSNEEKTGVDIVIRALEAPLRQIADNSGAEGSVVVEKVKDMDANFGYNALTGKYEDLLSSGIIDPAKVVRSALQDAASVAGMVLTTEVLVVEKPEPEPAMPGGDMGGMGGMGGMGGMGGMGGMGGMGMM

SEQ ID NO: 9318 - DNA, 1632 bp, Brachyspira hyodysenteriae WA1
  CDS (1)..(1632): transl_table=11
atggcagcaaaacagctattatttgatgaagaagctagacgtgcccttatgagaggtgtagatgctttagctaatgccgtaaaggtaactttaggaccgcgtggacgtaatgttgtaatagacaaaaaattcggtcctcctactataataaatgatggtgtaactatcgctaaagaaatagaattagaagatccatttgaaaatatgggtgctcaaatagttaaagaagtagctactaaaactaatgatgttgctggtgacggtactactactgctacagttttagctcaagctatggtaaaagaaggtttgaaaaatgtaactagcggtgctaatcctatgcttattaaaagaggtatagaaaaagctgttagtgaaatagttgctcatatcaaatctgaagctaaacaaatcaaaggtaaagaagagatcgctcaagttgctactatttctgctaataatgataaagaaattggttctttaatcagtgatgctatggaaaaagttggtaaagaaggtgttatcactgttgaagaagctaaatctttagaaactagcctttctttagtagaaggtatgcagtttgacagaggttatatttctccatattttgtgactaatggagacagcatgactgctgaattagaagatgctttacttcttatttatgataaaaaaatctctaatatgaaagaacttcttcctatacttgagaaaattgctcaaacaggaaaacctttcattattattgctgaagatattgaaaatgaagctttagctactttagtacttaacaaaatgagaggagtattaaatgtatgtgcagttaaagcccctggttttggtgatagaagaaaagctatgttagaagatatagctattcttactggcggtcaagttatcagcgaagatttaggtatgaaacttgaaaatgctgctatcgaacaattaggaagagctaaaaaaatcactgtagataaagaaaatactactattgttgaaggtgctggaagcaaagaagatgttaaaaacagagtagctactattaaaaaacaaatagaagaaactgacagcgattatgacagagaaaaattacaagaaagattagctaaactttctggcggtgttgctgttatcaatataggtgctgctactgaagtagaaatgaaagagaaaaaagctagagtagaagatgctttatctgcaactcgtgctgctgttgaagaaggtgtaattcctggcggcggtatcacttacttacatgctcagcataaattagagtctttaactgtagaaaatcctgatgaacaagttggtgttaatatagttaaaagagctattgaagagcctataagaatgatagctacaaatgctggtttagacggttctgttgttgctattgaagctaaaaaacaaaaaggcaatatgggtttcaatgctcttactaatgagtgggttgatatgttaaaagctggtattattgatcctgctaaagtttcaagaagtgctttacaaaatgctgcttctattgctagccaagtattaactgctgaagttattattactgatatacctgaacctgaaaaaccaatgcctccaatgcctggcggtggaatgggcggtatgtattaa

SEQ ID NO: 9319 - protein, 543 aa, Brachyspira hyodysenteriae WA1
MAAKQLLFDEEARRALMRGVDALANAVKVTLGPRGRNVVIDKKFGPPTIINDGVTIAKEIELEDPFENMGAQIVKEVATKTNDVAGDGTTTATVLAQAMVKEGLKNVTSGANPMLIKRGIEKAVSEIVAHIKSEAKQIKGKEEIAQVATISANNDKEIGSLISDAMEKVGKEGVITVEEAKSLETSLSLVEGMQFDRGYISPYFVTNGDSMTAELEDALLLIYDKKISNMKELLPILEKIAQTGKPFIIIAEDIENEALATLVLNKMRGVLNVCAVKAPGFGDRRKAMLEDIAILTGGQVISEDLGMKLENAAIEQLGRAKKITVDKENTTIVEGAGSKEDVKNRVATIKKQIEETDSDYDREKLQERLAKLSGGVAVINIGAATEVEMKEKKARVEDALSATRAAVEEGVIPGGGITYLHAQHKLESLTVENPDEQVGVNIVKRAIEEPIRMIATNAGLDGSVVAIEAKKQKGNMGFNALTNEWVDMLKAGIIDPAKVSRSALQNAASIASQVLTAEVIITDIPEPEKPMPPMPGGGMGGMY

SEQ ID NO: 9320 - DNA, 1638 bp, Persephonella marina EX-H1
  CDS (1)..(1638): transl_table=11
atggcaggaaagatgatagtttacggtgatgaggcaagatcaaaactgaaagccggtgttgataaattagcaaacgccgttaaagtaactcttggaccaagaggaagagaggttattcttgagaaaaaatggggatcaccagctgtaacaaaagacggtgtttcagttgctaaggagatagagcttacagatccacttgagaacatggctgctcagcttgttaaagaggttgcatcaaaaacagccgatgttgccggtgatggtacaacaacagctacaatactcacacaggctatatacacagaaggtcttaaagctatagcatcaggtgcaaaccctgtatatgtaaaaagaggaatagatgaggctgttaagcttgttgttgacgaacttaagaagatgtcaaaagaggtcagcggaagaactgagatagagcaggttgcaacaatctcagctaacaacgatcctgagatcggtaagatcatagctgatgctatggaaaaggtaggaaaggacggtgttataactgttgaagaatcaaaaacatctgagacaacacttgaagttgttgaaggtatgcagtttgatagaggatacctctcaccatactttgtaacaaatcctgaaaagatggaagctgttttagaaaacccatacatccttatatacgagaagaagataagcaatataagagagcttttacctgttcttgaaaaggttgttcagacaaacagacctctcctgataatagctgaggatgttgaaggtgaagcacttgccacactcgttgttaacaacataaaaggtgttctgaaggtatgtgctgttaaagctccaggatttggtgagagaagaaaggctatgctccaggatatagcaatactcacaggtggacaggctataactgaggatcttggaattaaacttgaaaacgttgatattgatatgttaggtcaggctgacaaggttgttgttgataaggacaacacaacaataataggtggaaaaggaaatcctgaggatattaaagcaagaatagagcagattaaggctcagatagagacaacaacatcagactacgacagagagaaattacaggagagacttgcaaaactctctggaggagttgctattattagagttggagctgcaacagaagctgaactgaaagagaagaaggacagagttgatgacgctgttcacgctacaaaggctgctgttgaggaaggaatagttcctggtggtggtgttgcactttacagagcctcaagagttctctgtgatataaaagaggaaaacacagacaaaaaatggggaatagatattgttagaaacgcatgtaaggttccattaaagcagatcgcttacaatgcaggatttgatggatctgttgtgttagaaaaagttaaagctaatgaggatgtgaactacggatttgacgctgcaacaggtgagtatgttgatatgataaaagccggtattatagacccaactaaggttgtgagaattgctatacagaacgcagcttcaatagctggaacaatgctcacagctgaggctcttgttgctgaaatccctgagaaggaagagaaaactccaggtggagctggagcaggaatggaagagatgggcttctaa

SEQ ID NO: 9321 - protein, 545 aa, Persephonella marina EX-H1
MAGKMIVYGDEARSKLKAGVDKLANAVKVTLGPRGREVILEKKWGSPAVTKDGVSVAKEIELTDPLENMAAQLVKEVASKTADVAGDGTTTATILTQAIYTEGLKAIASGANPVYVKRGIDEAVKLVVDELKKMSKEVSGRTEIEQVATISANNDPEIGKIIADAMEKVGKDGVITVEESKTSETTLEVVEGMQFDRGYLSPYFVTNPEKMEAVLENPYILIYEKKISNIRELLPVLEKVVQTNRPLLIIAEDVEGEALATLVVNNIKGVLKVCAVKAPGFGERRKAMLQDIAILTGGQAITEDLGIKLENVDIDMLGQADKVVVDKDNTTIIGGKGNPEDIKARIEQIKAQIETTTSDYDREKLQERLAKLSGGVAIIRVGAATEAELKEKKDRVDDAVHATKAAVEEGIVPGGGVALYRASRVLCDIKEENTDKKWGIDIVRNACKVPLKQIAYNAGFDGSVVLEKVKANEDVNYGFDAATGEYVDMIKAGIIDPTKVVRIAIQNAASIAGTMLTAEALVAEIPEKEEKTPGGAGAGMEEMGF

SEQ ID NO: 9322 - DNA, 1665 bp, Acidobacterium capsulatum ATCC 51196
  CDS (1)..(1665): transl_table=11
atggcaaagcagattctgcatggagaagattcccgccaggctatcctgcgcggtgtgaacactctggccgatgcagtcaaggtgacgctcggccccaagggccgcaatgtggtgattgagaagaagttcggttcgccgacgattaccaaggacggcgtgaccgtcgccaaggagatcgagctgaaggattcgctcgagaacatgggcgcgcagatggtgcgcgaggtggcctcgaagacctctgacgttgccggtgacggcaccaccaccgcgaccgtgctggctcaggccatctatcgcgagggtgtcaagacggtggccgccggtgcgaacccgatggctctgaagcgcggcatcgataaggctgtggagtcgatcgtgggcaagcgcgatgaaaacggcaacgtgattggcggcgccctgtcgaccttctcgaagccggtttccggcgacatgattgcccaggtgggcaccatctcggccaacagtgacgcgaccatcggcaccatcatcgccgaggcgatgaagaaggttggcaaggacggcgtgatcacggtcgaagagtcgaagacgctcgagacccagctcgatgtggtcgaaggcatgcagtttgaccgcggctacctgagcccctacttcgtgaccgatcctgaccgcatggaagccgtactggaagatccctacatcctgatctatgagaagaagatcagcaccatgaaggatctgctgcccctgctcgagcaggttgcccgcaacggcaagccgctcgtgatcatcgctgaggacgtggacggcgaagcgctggcgaccctggtcgtcaacaagctgcgcggcacgctgaacgtggctgcggtgaaggctcctggcttcggcgaccgccgcaaggccatgctgggcgacatcgccatcctgaccggcggcaacgcgatcaccgaagatctgggcctgaagcttgagaacatcaagctcgaagacctgggccgtgccaagcgcgtcaccatcgacaaggacaacaccaccatcgtcgaaggccgtggcgaggacaaggcgatcgaaggccgcgtgaaggagattcgcagccaggtcgagaagaccacctcggactatgaccgcgagaagctgcaggagcgcctcgccaagctggtgggcggcgtggccgtcatcaaggtcggtgctgctaccgagaccgagatgaaggagaagaaggctcgcgtggaagacgcgatgcacgcaacccgcgcggccgtggaagagggcatcgttccgggcggcggtgtggcgctggttcgctgcaccccggtggtcgatgagctcatcaagacgctcgaaggcgatgagaagatcggtgcacagatcattcgccgcgccatcgaagagcccctgcgccagattgtcggcaacgccggcgaagaaggcgctgtggtggtgggcaagatccacgagaacaaggacaccaactacggctataacgccggatcgggcgtctttgaggatctggtcaaggccggtgtcatcgacccgaccaaggtcacccgcactgccctgctgaatgcctcctcgatcgccggcctgatgctgacgaccgaagcgatggtcgctgagattcctgagcccaaggcggctccggcggctcccggccatggcggcatggaaggcatgtactaa

SEQ ID NO: 9323 - protein, 554 aa, Acidobacterium capsulatum ATCC 51196
MAKQILHGEDSRQAILRGVNTLADAVKVTLGPKGRNVVIEKKFGSPTITKDGVTVAKEIELKDSLENMGAQMVREVASKTSDVAGDGTTTATVLAQAIYREGVKTVAAGANPMALKRGIDKAVESIVGKRDENGNVIGGALSTFSKPVSGDMIAQVGTISANSDATIGTIIAEAMKKVGKDGVITVEESKTLETQLDVVEGMQFDRGYLSPYFVTDPDRMEAVLEDPYILIYEKKISTMKDLLPLLEQVARNGKPLVIIAEDVDGEALATLVVNKLRGTLNVAAVKAPGFGDRRKAMLGDIAILTGGNAITEDLGLKLENIKLEDLGRAKRVTIDKDNTTIVEGRGEDKAIEGRVKEIRSQVEKTTSDYDREKLQERLAKLVGGVAVIKVGAATETEMKEKKARVEDAMHATRAAVEEGIVPGGGVALVRCTPVVDELIKTLEGDEKIGAQIIRRAIEEPLRQIVGNAGEEGAVVVGKIHENKDTNYGYNAGSGVFEDLVKAGVIDPTKVTRTALLNASSIAGLMLTTEAMVAEIPEPKAAPAAPGHGGMEGMY

SEQ ID NO: 9324 - DNA, 1632 bp, Gemmatimonas aurantiaca T-27
  CDS (1)..(1632): transl_table=11
atggcagccaaagaactgcatttcaacgttgacgcacgcgcggcactgaagcgcggcgtcgatcagctcgccgaagcggtgaaggtcacgctcggccccaagggacgcaacgtcgtcatcgacaagaagttcggcgcgcccacggtgaccaaggacggcgtgaccgtcgccaaggaaatcgagctcgccgatccgatcgagaacatgggcgcgcagatggtgaaggaagtcgcgaccaagacgtcggatcttgctggcgacggcaccaccacggccaccgtgctggcgcaggcgatcttccgtgaaggcctcaagaacgtcaccgccggctccaacccgatggcgctcaagcgcggcatcgagaaggccgttgccggtatcgtcgaagagctgaagcgcatctccgtgcccaccacgggcaagaaggaaatcgcgcaggttggcaccatctcggcgaacaacgatcccgagatcggcaacctcatcgcggaagcgatggaaaaggtcggcaaggacggcgtcatcaccgtcgaagaggccaagggccttgagacgacgctggagacggtcgatggtatgcagttcgaccgtggctacctctcgccgtacttcgtcacggatccggaaaagatggaagccgttctcgagaacgcgctcatcctgatccacgacaagaagatctcggccatgaaggatctgctgccggcactcgaaaaggtcgcgcagctcggcaagcccctgctcatcatcgcggaagacgtcgaaggcgaagcgctggccacgctggtcgtgaacaagctccgcggcacgctgcgcatctgcgccgtgaaggccccgggcttcggtgatcgccgcaaggccatgctgcaggacatcgcgacgttgaccaaggggcaggtcatctccgacgaagtcggcttcaagctcgaaaacgcggtcctcaccgacctcggctcggccaagcgcatcgtgatcgacaaggacaacacgaccatcatcgacggcgctggtgaacagaaggacatcgaaggccgcgtgcgtgaaatccgtggtgcgatcgacaagagcacgtcggactacgatcgtgagaagctccaggagcgcctcgcgaagctcgccggtggtgtggccgtcatcaatgtcggcgccgcgaccgaagccgaaatgaaggaaaagaaggcccgcgtcgaagacgcgctgcacgccacgcgtgccgccgtcgaggaaggcatcgtccccggtggcggtgtggccctcattcgcgcgcagcacgtgctgaaggacgtgaaggtcgccgagcgcgacgagcagatcggtgtcgacatcgtgcgtcgcgcgatcgaagagccgctccgcatgatcgtgcagaatgcggggggcgaaggctccatcgtcgtcgagaagatccgcacggcgaaggaaaccagcttcggctacaacgcgctgaccgacgtgtacgaagatctcgtgcaggccggcgtcatcgacccgaccaaggtcacgcgcacggcgctgcagaacgcggcctcgatcgcgggtctcctgctgacgaccgaagcactgatcgtcgagaagaaggaagacaagccggccgctccggccggtggcccgggcatgggcggcatgtactaa

SEQ ID NO: 9325 - protein, 543 aa, Gemmatimonas aurantiaca T-27
MAAKELHFNVDARAALKRGVDQLAEAVKVTLGPKGRNVVIDKKFGAPTVTKDGVTVAKEIELADPIENMGAQMVKEVATKTSDLAGDGTTTATVLAQAIFREGLKNVTAGSNPMALKRGIEKAVAGIVEELKRISVPTTGKKEIAQVGTISANNDPEIGNLIAEAMEKVGKDGVITVEEAKGLETTLETVDGMQFDRGYLSPYFVTDPEKMEAVLENALILIHDKKISAMKDLLPALEKVAQLGKPLLIIAEDVEGEALATLVVNKLRGTLRICAVKAPGFGDRRKAMLQDIATLTKGQVISDEVGFKLENAVLTDLGSAKRIVIDKDNTTIIDGAGEQKDIEGRVREIRGAIDKSTSDYDREKLQERLAKLAGGVAVINVGAATEAEMKEKKARVEDALHATRAAVEEGIVPGGGVALIRAQHVLKDVKVAERDEQIGVDIVRRAIEEPLRMIVQNAGGEGSIVVEKIRTAKETSFGYNALTDVYEDLVQAGVIDPTKVTRTALQNAASIAGLLLTTEALIVEKKEDKPAAPAGGPGMGGMY

SEQ ID NO: 9326 - DNA, 1644 bp, Laribacter hongkongensis HLHK9
  CDS (1)..(1644): transl_table=11
atggcagcaaaagacgtcaagtttggtgattccgcccgttccaagatggttgacggggtaaacattctggctgatgccgtcaaggtcacccttggcccgaaaggccgcaatgtcgtgctggagcgcagctacggcgctccgaccatcaccaaggatggtgtgtccgttgccaaggaaatcaccctgaaggacaagttcgagaacatgggcgcccagatggtcaaggaagtggcttccaagaccaacgacgtcgctggtgacggcaccaccaccgctactgtgctggcccaggccatcatgcaggaaggcatgaagtacgtcgccgccggcatgaacccgatcgacctcaagcgcggcatcgacaaggccgtcgtggcgctggtggctgaaatcaagaacatcgccaagccgtgcgccaccaccaaggaaatcgcccaggtcggcgccatttccgccaacagcgacaccgtgatcggtgacaagatcgctgcggccatggaaaaggtcggcaaggaaggcgtgatcactgttgaagacggttcaggcctggaagacgagctggaagtggtcgaaggcatgcagttcgaccgtggctacctcagcccgtacttcatcaaccagccggaaaagcagatcgcccagctcgacaatccgttcatcctgctgtgtgacaagaaaatcaccaacatccgcgaactgttgccggttctggaacaagtctccaaggctggccgcccgttgctggtgattgctgccgaagatgtggaaggcgaagcgctggccacgctggtggtcaacaacatgcgcggtatcctcaagaccgtggccgtcaaggctccgggcttcggcgatcggcgcaaggccatgctggaagacatcgccatcctgaccggcggcaccgtaatcagcgaggaaatcggtctgccgctggaaaaggccactattgacatgctgggccaggccaagcgcatcgaggtcagcaaggacaccaccaccatcattgatggcgtgggcactgccgaagccatcaaggcccgtgtcgaacagatccgcgctcacatcgaaacggccagcagcgactacgaccgcgaaaagatgcaggaacgtctggccaagctggccggtggtgtggccgtgatcaaggtcggtgctgcgaccgaagtcgaaatgaaggaaaagaaggcccgcgtcgaagacgccctgcacgcaacccgcgctgccgtggaagaaggcatcgtggccggtggcggtgtggccctgctgcgcgcccgtgccaacctgaaggaagtggccaccatcaacgccgagcaggcagccggtgtgcagatcgtgatgcgcgcgatcgaatcgccgctgcgccagatcgtggccaacgccggtgacgagccgagcgtggtggtcaacaaggtgtacgaaggcagcggcaacttcggttacaacgctgcaaccggtgagtacggcgacctggtggaaatgggcgtgctcgacccggccaaggtgacccgttcggccctgcaacacgctgcttcggtggctggcctgatgctgaccactgattgcatggtggccgagctgccggaagacaagcctgccatgccggccggcggaatgggcggcatgggtggaatgggcggcatgatgtaa

SEQ ID NO: 9327 - protein, 547 aa, Laribacter hongkongensis HLHK9
MAAKDVKFGDSARSKMVDGVNILADAVKVTLGPKGRNVVLERSYGAPTITKDGVSVAKEITLKDKFENMGAQMVKEVASKTNDVAGDGTTTATVLAQAIMQEGMKYVAAGMNPIDLKRGIDKAVVALVAEIKNIAKPCATTKEIAQVGAISANSDTVIGDKIAAAMEKVGKEGVITVEDGSGLEDELEVVEGMQFDRGYLSPYFINQPEKQIAQLDNPFILLCDKKITNIRELLPVLEQVSKAGRPLLVIAAEDVEGEALATLVVNNMRGILKTVAVKAPGFGDRRKAMLEDIAILTGGTVISEEIGLPLEKATIDMLGQAKRIEVSKDTTTIIDGVGTAEAIKARVEQIRAHIETASSDYDREKMQERLAKLAGGVAVIKVGAATEVEMKEKKARVEDALHATRAAVEEGIVAGGGVALLRARANLKEVATINAEQAAGVQIVMRAIESPLRQIVANAGDEPSVVVNKVYEGSGNFGYNAATGEYGDLVEMGVLDPAKVTRSALQHAASVAGLMLTTDCMVAELPEDKPAMPAGGMGGMGGMGGMM

SEQ ID NO: 9328 - DNA, 1641 bp, Azotobacter vinelandii DJ
  CDS (1)..(1641): transl_table=11
atggctgcaaaagaagtcaagttcggtgattccgcccgcaagaaaatgctggtaggcgtgaacgtcctggccgatgccgtcaaggccactctcggcccgaaaggccgcaacgtggtcctggacaagagcttcggcgcaccgaccatcaccaaggatggcgtatccgtggccaaggaaatcgagctcaaagacaagttcgagaacatgggcgcccaactggtgaaggacgtggcctccaaggccaacgacgaagccggtgacggtaccaccaccgctaccgtactggcccaggccatcgtcaacgaaggcctgaaggccgttgccgcaggcatgaacccgatggatctgaagcgcggcatcgataaggcgaccatcgccatcgttgcggagctgaagtcgctggccaagccgtgctccgactccaaggcgatcgcccaggtaggcaccatttccgccaactccgacgagtccatcggtaacatcatcgccgaggccatgaacaaggtcggcaaggaaggcgtgatcaccgtcgaggaaggctcgggcctggagaacgagttgtccgtcgtcgaaggcatgcagttcgatcgtggctacctgtctccgtacttcatcaacaagcccgacaccatggttgccgaactggacaacccgctgctgctgctggtcgacaagaagatctccaacatccgcgagctgctgccggtgctggaagccgtggccaagtccggccgtccgctgctgatcgtcgccgaagacgtcgaaggcgaagccctggccaccctggtggtcaacaacatgcgtggcatcgtcaaggtcgctgccgtgaaggctccgggcttcggcgatcgtcgcaaggccatgctgcaggacatcgccatcctgaccggcgccaccgtgatctccgaggaagtcggcctgagcttggaaagcgccactctggagcatctgggtaacgccaagcgcgtcgtgctgaacaaggaaaacaccaccatcatcgacggtgccggtgcccaggccgacatcgaggctcgtgtggcgcagatccgcaagcagatcgaggaaacctcctccgattacgatcgcgagaagctgcaggagcgtctggccaagctggccggtggcgtggccgtgatcaaggtcggtgccgccaccgaggtcgagatgaaggagaaaaaggcccgcgtcgaagacgccctgcatgcgacccgtgcggcagtggaggagggcgtggttcccggcggcggcgtggctctggtgcgtgccctgcaggccatcgagggtctgaagggcgacaacgaagaccagaacgtcggcatcgccctgctacgtcgtgccgtcgaagcaccgctgcgtcagatcgtcgccaatgccggtgatgagccgagcgtggtggtcgacaaggtcaagcagggctctggcaacttcggcttcaacgctgccagcggcgtatacggcgacatgatcgagatgggcatcctcgatccggccaaggttacccgctccgcgctgcaggcggcttcttcgatcggtggactgatgatcaccaccgaggccatggtcgccgacattgtcgaagacaaggcagctccagccatgccggacatgggcggtatgggtggcatgggcggcatgatgtag

SEQ ID NO: 9329 - protein, 546 aa, Azotobacter vinelandii DJ
MAAKEVKFGDSARKKMLVGVNVLADAVKATLGPKGRNVVLDKSFGAPTITKDGVSVAKEIELKDKFENMGAQLVKDVASKANDEAGDGTTTATVLAQAIVNEGLKAVAAGMNPMDLKRGIDKATIAIVAELKSLAKPCSDSKAIAQVGTISANSDESIGNIIAEAMNKVGKEGVITVEEGSGLENELSVVEGMQFDRGYLSPYFINKPDTMVAELDNPLLLLVDKKISNIRELLPVLEAVAKSGRPLLIVAEDVEGEALATLVVNNMRGIVKVAAVKAPGFGDRRKAMLQDIAILTGATVISEEVGLSLESATLEHLGNAKRVVLNKENTTIIDGAGAQADIEARVAQIRKQIEETSSDYDREKLQERLAKLAGGVAVIKVGAATEVEMKEKKARVEDALHATRAAVEEGVVPGGGVALVRALQAIEGLKGDNEDQNVGIALLRRAVEAPLRQIVANAGDEPSVVVDKVKQGSGNFGFNAASGVYGDMIEMGILDPAKVTRSALQAASSIGGLMITTEAMVADIVEDKAAPAMPDMGGMGGMGGMM

SEQ ID NO: 9330 - DNA, 1638 bp, Rhizobium sp. NGR234
  CDS (1)..(1638): transl_table=11
atggcagctaaagaagtcaagttcggccgcaccgcgcgcgaaaagatgctgcgcggcgtcgacatcctcgccgatgcagtcaaggtaacgctcggcccgaagggtcgtaacgtcgttatcgacaagtccttcggcgctccgcgcatcaccaaggacggcgtttcggtcgccaaggaaatcgaactcgaagacaagttcgagaacatgggcgcccagatggtccgcgaagtcgcttcgaagaccaacgacatcgccggcgacggcacgacgacggcaaccgttctcgcccaggcgatcgttcgcgaaggcgccaaggccgttgccgccggcatgaacccgatggacctgaagcgcggcatcgaccttgccgtcgccgaagtcgtcaaggacctgctcgccaaggccaagaagatcaacacctcggacgaagttgcccaggtcggcacgatctcggcaaacggcgaaaagcagatcggcctcgacattgcagaagcaatgcagaaggtcggcaacgaaggcgtcatcacggttgaagaagccaagaccgccgagaccgagctcgaagtcgtcgaaggcatgcagttcgaccgcggctacctgtcgccctacttcgtcaccaacccggaaaagatggtcgccgatctcgaagacgctttcattctcctgcacgagaagaagctctcgaacctccaggcgatgctcccggttctcgaagccgtcgtccagaccggcaagccgctcctcatcatcgctgaagacgtcgaaggcgaagcgctcgctaccctcgtcgtcaacaagctgcgcggcggtctgaagatcgctgccgtcaaggctccgggcttcggcgaccgccgcaaggccatgctcgaagacatcgccatcctgacgggcggcacggtgatctccgaggacctcggcatcaagctcgaaaacgtcacgctcgacatgctcggccgtgcgaagaaggtctcgatctccaaggaaaacacgacgatcgtcgacggcgccggccagaaggccgacatcgaaggccgcgttgcccagatcaaggcccagatcgaagagaccacctccgactacgaccgcgagaagctgcaggaacgccttgccaagctcgccggcggcgttgccgtcatccgcgtcggcggtgcgacggaaatcgaagtgaaggaaaagaaggaccgcatcgacgacgccctcaacgcgacgcgcgctgccgttcaggaaggcatcgtaccgggcggcggcgtcgctctgctgcgctcctccgtcaagatcaccgccaagggcgaaaacgacgaccaggacgccggcgtcaacatcgttcgccgcgctctgcaggctccggcccgccagatcgctgaaaacgctggtgatgaagcctcgatcgttgtcggcaagatcctcgagaagaacaccgacgacttcggctacaacgctcagaccggtgaatatggcgacatgatcgccatgggcatcatcgacccggtcaaggtcgttcgcaccgccctgcaggacgcagcctcggttgcttcgctgctgatcaccaccgaagccatgatcgccgagctgccgaagaaggacgctccggcaatgccgggcggcatgggcggcatgggcggcatggacatgatgtga

SEQ ID NO: 9331 - protein, 545 aa, Rhizobium sp. NGR234
MAAKEVKFGRTAREKMLRGVDILADAVKVTLGPKGRNVVIDKSFGAPRITKDGVSVAKEIELEDKFENMGAQMVREVASKTNDIAGDGTTTATVLAQAIVREGAKAVAAGMNPMDLKRGIDLAVAEVVKDLLAKAKKINTSDEVAQVGTISANGEKQIGLDIAEAMQKVGNEGVITVEEAKTAETELEVVEGMQFDRGYLSPYFVTNPEKMVADLEDAFILLHEKKLSNLQAMLPVLEAVVQTGKPLLIIAEDVEGEALATLVVNKLRGGLKIAAVKAPGFGDRRKAMLEDIAILTGGTVISEDLGIKLENVTLDMLGRAKKVSISKENTTIVDGAGQKADIEGRVAQIKAQIEETTSDYDREKLQERLAKLAGGVAVIRVGGATEIEVKEKKDRIDDALNATRAAVQEGIVPGGGVALLRSSVKITAKGENDDQDAGVNIVRRALQAPARQIAENAGDEASIVVGKILEKNTDDFGYNAQTGEYGDMIAMGIIDPVKVVRTALQDAASVASLLITTEAMIAELPKKDAPAMPGGMGGMGGMDMM

SEQ ID NO: 9332 - DNA, 1635 bp, Exiguobacterium sp. AT1b
  CDS (1)..(1635): transl_table=11
atggcaaaagatattaaattctcagaagatgcacgtcacgcgatgcttcgcggcgtcgacgcactcgctgacgcagtcaaagtaacgattggaccaaaaggacgcaacgttgtcctcgagaagaaattcggttcaccactcatcacaaacgatggtgtgacaatcgcgaaagaaatcgaactcgaagaccgcttcgaaaacatgggcgcgaaactcgttgcggaagtcgcgtcgaagacgaacgaagtcgcaggggacggtacgacaacagcgacagtcctcgcacaagcgatgattcgtgaaggactcaagaacgtcacggcgggcgcgaacccgatgatccttcgtaaaggaatcgacaaagcggtcacacgtgcgcttgaagagttgaaagccatctcgaaaccaatcgagtcaaaagaagcgatcgcacaagttgcggccatctcggcagcggacgaagaagttggcgaattgatcgcagaagcgatggagcgcgtcggtaacgatggtgtcatcacaatcgaagaatcacgcggcttcacgactgagctcgacgttgtcgaagggatgcagttcgaccgtggatacttgtcaccatacatgatctcagactctgacaagatggaagcgtcactcgacaatccgtacatcttgatcacagacaagaagatctcaaacattcaagaaatcatcccagtgctcgagcaagtcgtgcaacaagggaagccgatcttgatcgtcgcagaagatatcgaaggcgatgccctcgcgacactcgtcttgaacaaactccgtggtacgttcaacgcggtagcggtcaaagcaccaggattcggtgaccgtcgtaaagcgatgcttgaagacctcgcgacactcacaggtggtcaagttatcacagaagacctcggtctcgacctcaaatcggcatcactcgatatgctcggtcgcgcatcgaaagtcgtcgtcacaaaagacacaacgactgtcgtcgaaggtgcagggaacgaagaaacaatcaaagcacgcgttcaaacgattcgtaaccaaatcgaagagacaacgtctgatttcgaccgtgaaaaactccaagagcgtctcgcgaaactcgcaggtggcgtagccgtcgtcaaagtcggtgcagctacggagactgagcttaaagagcgtaaactccgcatcgaagacgcactcaacgcgacacgtgcagcagtcgaagaaggaatcgtggcgggtggtggtacatcactcatcaacgtcatcccagccgttcgtgcgttgctttcagaagtgacagcggatgaagcgactggtgtcaaactcgtccttcgtgcactcgaagcaccggtccgtcaaatcgcggaaaacgcgggtgaagaaggttcggtcatcgtcgagaaactcaagaacgagtcagtcggtgtcggctacaacgcggcaactggcgaatatgtcgacatgatcgcacatggtatcgtcgacccagcgaaagtgacgcgttcagcactccaaaacgcagcatctgtctcagcgatgttcctcacaacagaggccgtcatcgcagacaagccagaaaaagacgctcctgcaatgcctgacatgggcggcatgggtggaatgggcggtatgatgtaa

SEQ ID NO: 9333 - protein, 544 aa, Exiguobacterium sp. AT1b
MAKDIKFSEDARHAMLRGVDALADAVKVTIGPKGRNVVLEKKFGSPLITNDGVTIAKEIELEDRFENMGAKLVAEVASKTNEVAGDGTTTATVLAQAMIREGLKNVTAGANPMILRKGIDKAVTRALEELKAISKPIESKEAIAQVAAISAADEEVGELIAEAMERVGNDGVITIEESRGFTTELDVVEGMQFDRGYLSPYMISDSDKMEASLDNPYILITDKKISNIQEIIPVLEQVVQQGKPILIVAEDIEGDALATLVLNKLRGTFNAVAVKAPGFGDRRKAMLEDLATLTGGQVITEDLGLDLKSASLDMLGRASKVVVTKDTTTVVEGAGNEETIKARVQTIRNQIEETTSDFDREKLQERLAKLAGGVAVVKVGAATETELKERKLRIEDALNATRAAVEEGIVAGGGTSLINVIPAVRALLSEVTADEATGVKLVLRALEAPVRQIAENAGEEGSVIVEKLKNESVGVGYNAATGEYVDMIAHGIVDPAKVTRSALQNAASVSAMFLTTEAVIADKPEKDAPAMPDMGGMGGMGGMM

SEQ ID NO: 9334 - DNA, 1638 bp, Escherichia coli
  CDS (1)..(1638): transl_table=11
atggctgccaaggatattcgtttcggtgaagacgcccgcgcccgcatggtccgcggcgtgaacgtgctcgccaacgccgtcaaggcgaccctgggcccgaagggccgcaacgtcgtgctcgagaagagcttcggcgccccgacgatcaccaaggacggcgtgtccgtcgccaaggagatcgaactggccgacaagttcgagaacatgggcgcgcagatggtcaaggaagtcgcttccaagacctccgacaacgccggcgacggcaccaccaccgccaccgtgctggcccaggccctgatccgcgagggcatgaaggccgtggccgccggcatgaacccgatggacctcaagcgcggcatcgacaaggccgtcacctcggccgtcgaggagctgaagaagatctccaagccctgctcgaccagcaaggagatcgcccaggtcggttcgatctcggccaactccgacaccgacatcggcgagctgatcgccaaggccatggacaaggtcggcaaggaaggcgtgatcaccgtcgaggagggctcgggcctggagaacgagctcgacgtcgtcgagggcatgcagttcgaccgcggctacctgtcgccgtacttcatcaacaacccgcagtcgatgcaggccgagctggaggatccgttcatcctgctgcacgacaagaagatctcgaacgtccgcgacctgctgccgatcctcgagggcgtggccaaggccggcaagccgctgctgatcgtcgccgaggacgtcgagggcgaggcgctggccacgctggtggtcaacaccatccgcggcatcgtgaaggtctgcgcggtcaaggccccgggcttcggcgaccgccgcaaggcgatgctggaggacatggccatcctcaccggtggcaccgtgatctccgaggaagtcggcctctcgctcgagaaggcgaccatcaacgacctcggccgcgcgaagaaggtgcaggtctcgaaggagaacaccaccatcatcgacggcgccggcgacaccgcggacatcgaagcccgcatcaagcagatcaaggcgcagatcgaggagaccacctcggactacgaccgcgagaagctgcaggagcgcgtggccaagctggccgggggcgttgcggtgatcaaggtcggcgccgccaccgaagtcgagatgaaggaaaagaaggcgcgcgtcgaagacgccctgcatgccacccgtgcggcggtcgaggaaggcatcgtcccgggcggcggcgtcgccctgatccgtgccaaggccgcgatcgccgagctgaagggcgccaacgaggaccagaaccacggcatcgcgatcgccctgcgcgcgatggaagccccgctgcgcgagatcgtcaccaacgccggcgacgagccgagcgtggtgctgaaccgcgtcgccgaaggcaccggcgcgttcggctacaacgccgccaacggcgagttcggcgacatgatcgagttcggcatcctggacccgaccaaggtcacgcgctccgcgctgcagaacgcggcgtccatcgccggcctgatgatcaccaccgaagcgatggtggccgaagcgccgaagaaggaagagccggccgctccgggcggcggcatgggcggcatgggcggcatggatttctaa

SEQ ID NO: 9335 - protein, 545 aa, Escherichia coli
MAAKDIRFGEDARARMVRGVNVLANAVKATLGPKGRNVVLEKSFGAPTITKDGVSVAKEIELADKFENMGAQMVKEVASKTSDNAGDGTTTATVLAQALIREGMKAVAAGMNPMDLKRGIDKAVTSAVEELKKISKPCSTSKEIAQVGSISANSDTDIGELIAKAMDKVGKEGVITVEEGSGLENELDVVEGMQFDRGYLSPYFINNPQSMQAELEDPFILLHDKKISNVRDLLPILEGVAKAGKPLLIVAEDVEGEALATLVVNTIRGIVKVCAVKAPGFGDRRKAMLEDMAILTGGTVISEEVGLSLEKATINDLGRAKKVQVSKENTTIIDGAGDTADIEARIKQIKAQIEETTSDYDREKLQERVAKLAGGVAVIKVGAATEVEMKEKKARVEDALHATRAAVEEGIVPGGGVALIRAKAAIAELKGANEDQNHGIAIALRAMEAPLREIVTNAGDEPSVVLNRVAEGTGAFGYNAANGEFGDMIEFGILDPTKVTRSALQNAASIAGLMITTEAMVAEAPKKEEPAAPGGGMGGMGGMDF

SEQ ID NO: 9336 - DNA, 1623 bp, Candidatus Protochlamydia amoebophila UWE25
  CDS (1)..(1623): transl_table=11
atggccgctaaaattattaaatttaaagaagatgccagacaaaaaattttaaaaggtgtccgtactttagctgacgctgttaaagttaccctcggtcctaaaggacgtaatgtcgttattgacaaatcttatggaactccccatatcacaaaagacggagtcactgttgctaaagaaatcgaactggaagataagttcgaaaatatgggcgcacaaatggttaaagaagttgctagtaaaacagctgataaagctggcgatggaactacgactgcaaccgtattagctgaagcaatctactctgaaggacttagaaatgtagcagcaggtgctaatcctcttgatctaaaacgtggaatggaaaaagctgttaaagttattgttcaagaactcaaaaaaagaagcaaaacagttgatgatcgcaatgaaatcgcacaagtagccactatttctgctaataacgatgctgaaatcggagaaatgattgctcaagcgattgaaaaagttggccgtgatggaacaatcactgttgaagaaggcaaaggatttgaaactgaacttgatgtcgtcaaaggaatgaaatttgatcgaggttatttatccgcttatttcatgacaaattcggaatctcaagaatgtatcttagaagatgcttatgtcttaatttatgagaaaaaaatcagtgcgattaaagaaattattccgcttctacaagccgttgtggaaacaggtcgccctcttcttattatcgctgaagatgttgaaggtgaagctcttgcaacgcttgttgtcaatcgcctacgtgcaggtttaaaagtttgtgctgttaaagcacccggctttggtgatcgtcgtaaagccatgttacaagatattgccattcttactggtggagaactcataagtgaagaaattggtttaaaattggaaacaacaacaatcgaacaattaggtcgtgttaaaaaagctgttttaacaaaagatgaaacaacccttgttgaaggggctggaactaaagcggctattcttgatcgcgcttcacaaatcaaacgtcaaattgaagaaagcacttcggactatgataaagagaaacttcaagaacgacttgctaagctcgtcggtggagttgctgtgattcatgtcggagctgctacagaaattgaaatgaaagaaaagaaagaccgtgtagatgatgcacaaagagctaccgctgcagccgtagaagaagggattcttcctggcggtggaacagcctttattcgttgcattccagctgttaatagtttagctgacagtttagaaggcgatgaaaaaacaggtgctaaaatcatggcgcgctcgttaagtgctccccttcgtcaaattgctgaaaatgcaggacaagaaggtgccatcattttgcaagctgtagaaaaaatgaaagaaaaagaaggatataacgcattaacaggcgaatatgtagacatgatcacagccggtatcttagatcctactaaagttgttcgctgcgcgttagagaacgccgtttctgttgctgctatgttactaacaacagaggctattgttgcggacatcccagaagagaaaccggctcctgcggcgcctgtcggcatggattattaa

SEQ ID NO: 9337 - protein, 540 aa, Candidatus Protochlamydia amoebophila UWE25
MAAKIIKFKEDARQKILKGVRTLADAVKVTLGPKGRNVVIDKSYGTPHITKDGVTVAKEIELEDKFENMGAQMVKEVASKTADKAGDGTTTATVLAEAIYSEGLRNVAAGANPLDLKRGMEKAVKVIVQELKKRSKTVDDRNEIAQVATISANNDAEIGEMIAQAIEKVGRDGTITVEEGKGFETELDVVKGMKFDRGYLSAYFMTNSESQECILEDAYVLIYEKKISAIKEIIPLLQAVVETGRPLLIIAEDVEGEALATLVVNRLRAGLKVCAVKAPGFGDRRKAMLQDIAILTGGELISEEIGLKLETTTIEQLGRVKKAVLTKDETTLVEGAGTKAAILDRASQIKRQIEESTSDYDKEKLQERLAKLVGGVAVIHVGAATEIEMKEKKDRVDDAQRATAAAVEEGILPGGGTAFIRCIPAVNSLADSLEGDEKTGAKIMARSLSAPLRQIAENAGQEGAIILQAVEKMKEKEGYNALTGEYVDMITAGILDPTKVVRCALENAVSVAAMLLTTEAIVADIPEEKPAPAAPVGMDY

SEQ ID NO: 9338 - DNA, 1644 bp, Bartonella henselae str. Houston-1
  CDS (1)..(1644): transl_table=11
atggctgctaaagaagtcaagtttggccgtgaagcgcgtgagcgtttgttgcgcggcgttgatatccttgctaacgctgttaaagtaacactcggccctaaagggcgcaatgtggtgatcgataaatcatttggtgcgcctcgcattacaaaagatggtgtatccgttgcaaaagaaatcgaactggaagataagttcgaaaatatgggtgcgcaaatgttgcgtgaagttgcttctaaaaccaatgacattgctggtgatggaacaacaacggcaactgttttaggacaggctattgtccaagaaggtgtaaaagccgttgctgcaggcatgaacccaatggatctcaaacgtggtatcgatgctgctgttgatgaagtggtggcaaatcttttcaaaaaagcgaaaaaaatccaaacttcagcagaaattgcacaagtgggaacaatttccgctaatggtgctgctgaaatcggcaaaatgatcgctgatgccatggaaaaagttggcaatgaaggtgtcattaccgttgaagaagcaaaaactgctgaaacggaattagaagtcgttgaaggaatgcagtttgatcgtggatatctttccccttactttgtcaccaatgctgagaaaatggtggctgatcttgatgatccttacattcttattcacgaaaagaaactctctaatctccaatccttgcttccagtacttgaagctgttgttcagtctggtaaaccacttctcattatcgctgaagatgtggaaggtgaagctttggcaacgctcgttgtcaacaaactgcgtggtggtttgaaaattgctgctgtgaaagctccaggatttggtgatcgccgtaaagccatgttagaagatattgcaatcttaacatccggacaggttatttctgaagatgttggcattaaattggaaaatgtcactttggatatgcttggtcgtgcaaagaaagtcaatatttctaaagaaaataccacgattattgatggtgctggacaaaagagcgaaattaatgcgcgcgtcaaccaaatcaaggtacagatcgaagaaacaacttctgactatgaccgtgaaaaattgcaagaaagacttgctaaactcgctggaggtgttgctgttatccgtgttggtggagcaacagaagttgaagtgaaagaaaagaaagatcgtgttgatgatgccttgaacgcaacacgtgcagctgtggaagaaggtattgttgccggtggtggaaccgcattgttgcgtgcagcaaatgccctgactgttaaaggaagcaatcctgatcaggaagctggtatcaatattgttcgtcgtgcactccaagcgccagcacgccaaattgctaccaatgccggtgaagaagcagcgattatcgttggcaaagtgcttgaaaacaatgcagatacatttggttacaacaccgcaaccggtgaatttggtgatttgattgctttgggaatcgttgatcctgtgaaggttgtgcgctctgctcttcagaatgctgcctcaattgctagccttctcattacaacagaagcaatggttgctgaagttccaaagaaagacacaccagtgcctccaatgcctggtggcggaatgggtggaatgggcggaatggatttctaa

SEQ ID NO: 9339 - protein, 547 aa, Bartonella henselae str. Houston-1
MAAKEVKFGREARERLLRGVDILANAVKVTLGPKGRNVVIDKSFGAPRITKDGVSVAKEIELEDKFENMGAQMLREVASKTNDIAGDGTTTATVLGQAIVQEGVKAVAAGMNPMDLKRGIDAAVDEVVANLFKKAKKIQTSAEIAQVGTISANGAAEIGKMIADAMEKVGNEGVITVEEAKTAETELEVVEGMQFDRGYLSPYFVTNAEKMVADLDDPYILIHEKKLSNLQSLLPVLEAVVQSGKPLLIIAEDVEGEALATLVVNKLRGGLKIAAVKAPGFGDRRKAMLEDIAILTSGQVISEDVGIKLENVTLDMLGRAKKVNISKENTTIIDGAGQKSEINARVNQIKVQIEETTSDYDREKLQERLAKLAGGVAVIRVGGATEVEVKEKKDRVDDALNATRAAVEEGIVAGGGTALLRAANALTVKGSNPDQEAGINIVRRALQAPARQIATNAGEEAAIIVGKVLENNADTFGYNTATGEFGDLIALGIVDPVKVVRSALQNAASIASLLITTEAMVAEVPKKDTPVPPMPGGGMGGMGGMDF

SEQ ID NO: 9340 - DNA, 1623 bp, Symbiobacterium thermophilum IAM 14863
  CDS (1)..(1623): transl_table=11
atgactgcgaagcagattatctttgatgaggccgcccggcgcaagctgcaggccggtgtggacgctcttgccaataccgtgaaggtcaccctcggtccccgcggccgcaacgtcgtgctggacaagaagttcggcgccccggccgtcgccaacgacggcgtgacgatcgcccgtgagatcgagctggaggatccgttcgagaacatgggcgcccagctggtgaaggaggtcgccaccaagaccaacgacgtcgcgggtgacggcaccaccacctccactgtgctggcccaggccatcgtgaaggagggcctgaagaacgtcaccggcggcgcgaacccgatgatcctgaagcggggcatcgagaaggccgtccaggtggcggttgaggagctgcgcaagcaggctatccccgtcgagaccaacaaggccatcgccgaggtcgcggccatctccgccaacaacgaccgggagatcggcgagctcgtggccaaggcgatggacaccgtgggcaaggacggcgtgatcaccgtcgaggagtccaagacgctccacaccgagctggagaccgtcgagggcatgcagttcgaccggggctacgtctccgcctacatggtcaccgacaccgagaagatggaggccgtcctgaacgagccctacatcctgatcaccgataagaagatctccgcggtccaggacctgctgccgatcctggagaaggtcgtgcagcgcggcaagccgctgctgatcatcgcggaggacgtcgagggcgaggcgctggccaccctggtggtcaacaagctgcgcggcaccctgcaggtcgcggcggtcaaggccccgggcttcggcgaccggcgcaaggccatgctggaggacatcgccatcctgaccggcggcgaggtcgtctccgaggagctgggccgcaagctcgagaacgccaccatcgagatgctcggccaggcccgccaggtgcgcatcgagaaggagaagaccaccatcatcgatggcgccggctccagcgaggccatcaagaaccgggtcgccgccatcaagcggcagattgaggagaccacttcggacttcgaccgcgagaagctgcaggagcggctggccaagctggccggcggcgtggcggtcatcaaggtcggcgccgccaccgaggtcgagctgaaggagaagaagctgcgcatcgaggacgccctgaacgcgacccgtgcggccgttgaggagggcatcgtcgccggcggcggcgtggcgctgctgcagacccagaaggccatcgacgagctgatcaagacgctggagggcgacgagaaggtcggcgcccagatcgtccggcgtgcggtcgaggagccgctgcgctgcatcgtcgagaacggcggcctcgagggctccgtcgtcgtcgagaaggtgcgcaccctgccggttggccacggcttcgacgccatgaaggaggagtacgtggacatggtcgccgccggcatcatcgacccggtcaaggtgacccgttccgccctccagaacgccgcttccatcgctgcgctgatcctgaccaccgaggccctggtcaccgagaagcccgagaagaaggagaacaaccccgcgcccaacatggatatgatgtaa

SEQ ID NO: 9341 - protein, 540 aa, Symbiobacterium thermophilum IAM 14863
MTAKQIIFDEAARRKLQAGVDALANTVKVTLGPRGRNVVLDKKFGAPAVANDGVTIAREIELEDPFENMGAQLVKEVATKTNDVAGDGTTTSTVLAQAIVKEGLKNVTGGANPMILKRGIEKAVQVAVEELRKQAIPVETNKAIAEVAAISANNDREIGELVAKAMDTVGKDGVITVEESKTLHTELETVEGMQFDRGYVSAYMVTDTEKMEAVLNEPYILITDKKISAVQDLLPILEKVVQRGKPLLIIAEDVEGEALATLVVNKLRGTLQVAAVKAPGFGDRRKAMLEDIAILTGGEVVSEELGRKLENATIEMLGQARQVRIEKEKTTIIDGAGSSEAIKNRVAAIKRQIEETTSDFDREKLQERLAKLAGGVAVIKVGAATEVELKEKKLRIEDALNATRAAVEEGIVAGGGVALLQTQKAIDELIKTLEGDEKVGAQIVRRAVEEPLRCIVENGGLEGSVVVEKVRTLPVGHGFDAMKEEYVDMVAAGIIDPVKVTRSALQNAASIAALILTTEALVTEKPEKKENNPAPNMDMM

SEQ ID NO: 9342 - DNA, 1644 bp, Mannheimia succiniciproducens MBEL55E
  CDS (1)..(1644): transl_table=11
atggcagcaaaagacgttaaattcggtaatgatgcccgcgtaaaaatgttagcgggtgtaaacgtattggcagacgcagtaaaagtgactttaggtcctaaaggtcgtaatgtcgtattagacaaatcattcggtgcgccgactatcacgaaagacggtgtttccgtggcgcgcgagatcgaattggaagataaattcgaaaatatgggcgcgcaaatggtaaaagaagtggcgtccaaagctaacgatgccgccggtgacggtacgacaacggcaaccgtacttgctcaggctatcgtaaacgaaggtttaaaagcggtagctgccggcatgaatccgatggatttaaaacgcggtattgataaagcggttgcggcggtggttaccgagttaaaagcgctttcaaaaccttgtgaaacctcaaaagaaatcgaacaagttggtacgatttccgccaactccgacagcattgtgggtcaattaatcgcccaagctatggaaaaagtgggtaaagaaggggttattaccgttgaagacggcacaggtcttgaagacgaactggatgtggttgaaggtatgcaattcgaccgcggttatttatcgccgtattttatcaacaaaccggaaaccgcaaccgttgaactggatagtccgttcattttgttagtagacaaaaaaatctccaacatccgtgagttattgccggtattggaagcggtggcgaaagcgggtaaaccgttattgatcattgcggaagatgtggaaggtgaagcgttggcaaccttggtggtaaacaccatgcgcggtattgtgaaagtggctgcggtgaaagcgccgggcttcggtgatcgtcgtaaagccatgttacaggacattgcaatcttaaccgccggtaccgtaatttccgaagaaatcggcatggaactggaaaaagcgacattggaagatcttggtcaggcaaaacgtgtggttattaacaaagataacaccactattatcgacggtatcggcgatgaagcgcaaatcaaaggccgtgtggcgcaaattcgtcaacaaatcgaagaatccacttccgattatgacaaagaaaaactgcaggaacgcgtagcgaaacttgccggcggcgttgccgttatcaaagtaggtgcggcaaccgaagttgaaatgaaagagaaaaaagatcgcgtggaagatgcgttacacgcaacccgtgcggccgttgaagaaggtatcgttgccggtggcggtgtggccttaattcgcgcggcaagtaaagcggcggcaagtttgcaaggcgataacgaagaacaaaacgtcggtatcaaattagcattacgcgcaatggaatcgccgcttcgtcaaattgtagcgaatgcaggtgaagaggcttctgtagttgcaagtgcggttaaaaacggcgaaggaaacttcggttataatgcaggtaccgaacaatacggtgatatgattgcaatgggtatcttggatccaactaaagtaacccgcagtgcattacaatttgccgcatctatcgccggtcttatgattaccaccgaagcgatggtaaccgaattaccgaaagacgataaattagatgcggcagctgcaatgggcggcatgggtggaatgggcggtatgatgtag

SEQ ID NO: 9343 - protein, 547 aa, Mannheimia succiniciproducens MBEL55E
MAAKDVKFGNDARVKMLAGVNVLADAVKVTLGPKGRNVVLDKSFGAPTITKDGVSVAREIELEDKFENMGAQMVKEVASKANDAAGDGTTTATVLAQAIVNEGLKAVAAGMNPMDLKRGIDKAVAAVVTELKALSKPCETSKEIEQVGTISANSDSIVGQLIAQAMEKVGKEGVITVEDGTGLEDELDVVEGMQFDRGYLSPYFINKPETATVELDSPFILLVDKKISNIRELLPVLEAVAKAGKPLLIIAEDVEGEALATLVVNTMRGIVKVAAVKAPGFGDRRKAMLQDIAILTAGTVISEEIGMELEKATLEDLGQAKRVVINKDNTTIIDGIGDEAQIKGRVAQIRQQIEESTSDYDKEKLQERVAKLAGGVAVIKVGAATEVEMKEKKDRVEDALHATRAAVEEGIVAGGGVALIRAASKAAASLQGDNEEQNVGIKLALRAMESPLRQIVANAGEEASVVASAVKNGEGNFGYNAGTEQYGDMIAMGILDPTKVTRSALQFAASIAGLMITTEAMVTELPKDDKLDAAAAMGGMGGMGGMM

SEQ ID NO: 9344 - DNA, 1653 bp, Photobacterium profundum SS9
  CDS (1)..(1653): transl_table=11
atggctgctaaagacgttaaatttggcaatgacgctcgaattaaaatgctagaaggtgtaaacgttctggctgacgctgtaaaagtaacactaggtcctaaaggccgtaacgttgttctagacaaatcatttggcgcaccaacaatcacaaaagatggtgtttctgttgcacgtgaaatcgaacttgaagacaagttccaaaacatgggcgcacaaatggtaaaagaagtggcttcgcaagcgaatgacgcggcgggcgacggaactacgacagcaacagtattggctcagtctattattgctgaaggtctaaaagctgttgctgctggcatgaacccaatggatcttaaacgtggtatcgacaaagcggttattgctgctgttgcagcactgaaagagctgtctgtaccatgtgaagatacgaaagctatcgcacaggtaggtactatctctgcaaatgctgatgcaactgtgggtaacctaattgcagaagcaatggaaaaagtaggtcgcgacggtgttatcactgttgaagaaggtcaagcactgcatgatgagcttgatgttgttgaaggtatgcagtttgaccgcggttacctgtctccttacttcatcaataaccaagaagcgggttctattgatctagaaagtccattcattctacttgtagacaagaaagtatcgaacattcgtgaactacttccagctctagaaggcgtagcgaaagcgtctcgtccactgcttatcattgcagaagacgttgaaggcgaagcactagcaacattagttgtgaacaacatgcgtggcatcgtaaaagttgctgccgttaaagcacctggtttcggtgaccgtcgcaagtcaatgctacaagacattgctgtgctaacggctggtacggttatttctgaagaaatcggtctagagctagaaaaagtacaacttgaagatcttggtcaagcgaagcgtattactatcactaaagaaaatacgactatcattgatggtgctggtgaagaaacaatgattcaaggtcgtgttgctcaaattcgtcaacaaatcgaagacgcaacatctgactacgataaagaaaaacttcaagagcgtgttgcgaaactggcaggcggcgttgctgttattaaagttggcgcggcaactgaagttgaaatgaaagagaagaaagatcgtgttcaagatgcactacacgcaacgcgtgcagctgtagaagaaggcgtggttgctggtggtggtgttgcactaatccgcgcagcatccaaagttgctgcttctggtcttgaaggcgacaacgaagagcagaatgtaggtattcgtgttgcacttcgtgcgatggaatctcctcttcgtcaaatcgttaaaaatgcgggtgatgaagattcagttgttgctaacaatgttcgtgctggcgaaggtaactacggttacaacgctgcaacgggtgtttatggtgacatgatcgcaatgggtattcttgacccaacgaaagtaacgcgttcagcacttcagttcgcagcatcagttgcaggtcttatgattactactgaagctatgattaccgatatgccagcgaaagatgcctctgcaatgcctgatatgggcggcatgggtggtatgggtggcatgggcggtatgatgtaa

SEQ ID NO: 9345 - protein, 550 aa, Photobacterium profundum SS9
MAAKDVKFGNDARIKMLEGVNVLADAVKVTLGPKGRNVVLDKSFGAPTITKDGVSVAREIELEDKFQNMGAQMVKEVASQANDAAGDGTTTATVLAQSIIAEGLKAVAAGMNPMDLKRGIDKAVIAAVAALKELSVPCEDTKAIAQVGTISANADATVGNLIAEAMEKVGRDGVITVEEGQALHDELDVVEGMQFDRGYLSPYFINNQEAGSIDLESPFILLVDKKVSNIRELLPALEGVAKASRPLLIIAEDVEGEALATLVVNNMRGIVKVAAVKAPGFGDRRKSMLQDIAVLTAGTVISEEIGLELEKVQLEDLGQAKRITITKENTTIIDGAGEETMIQGRVAQIRQQIEDATSDYDKEKLQERVAKLAGGVAVIKVGAATEVEMKEKKDRVQDALHATRAAVEEGVVAGGGVALIRAASKVAASGLEGDNEEQNVGIRVALRAMESPLRQIVKNAGDEDSVVANNVRAGEGNYGYNAATGVYGDMIAMGILDPTKVTRSALQFAASVAGLMITTEAMITDMPAKDASAMPDMGGMGGMGGMGGMM

SEQ ID NO: 9346 - DNA, 1632 bp, Thermus thermophilus HB8
  CDS (1)..(1632): transl_table=11
atggcgaagatcctggtgtttgacgaggctgcgcgccgcgccctggagcgcggggtcaacgcggtggccaacgcggtgaaggtcaccctcggtcctcggggccggaacgtggtcctggagaagaagtttggctcccccaccatcaccaaggacggggtgacggtggccaaggaggtggagctggaggaccacctggagaacatcggggcccagctcctcaaggaggtggcctccaagaccaacgacgtggccggtgacgggaccaccacggccaccgtcctcgcccaggccatcgtccgggagggcctgaagaacgtggccgccggggccaaccccctcgccctcaagcggggcattgagaaggcggtggaggccgcggtggagaagatcaaggccctcgccatccccgtggaggaccggaaggccattgaggaggtggccaccatctccgccaacgatcccgaggtcggcaagctgattgccgacgccatggagaaggtggggaaggagggcatcatcaccgttgaggagtccaagagcctcgagaccgagctcaagttcgttgaggggtaccagtttgacaaggggtacatctccccctacttcgtcaccaaccccgagacgatggaggcggtcctcgaggacgccttcatcctcatcgtggagaagaaggtctccaacgtccgtgagctcctccccatcctggagcaggtggcccagacgggcaagcccctcctgatcatcgccgaggacgtggagggcgaggctttggccaccctggtggtgaacaagctccggggcaccctgagcgtggccgcggtgaaggctcccggcttcggtgaccgcaggaaggagatgctcaaggacatcgcggccgtcaccggcggcaccgtgatctccgaggagctcggcttcaagctggagaacgccaccctctccatgctgggccgggccgagcgggtgcgcatcaccaaggacgagaccaccatcgtgggcggcaagggcaagaaggaggacattgaggcccggatcaacggcatcaagaaggagctggagaccaccgacagcgagtacgcccgggagaagctccaggagcgcctggcgaagctcgcgggtggcgtggccgtgatccgggtgggcgccgccacggagaccgagctcaaggagaagaagcaccgctttgaggacgccctgaacgccacccgggccgcggtggaggagggcatcgtgcccggcggcggcgtgaccctcctccgggccatcagcgccgtggaggagctcatcaagaagctggagggcgacgaggccacgggcgccaagatcgtgcgccgggccctggaggaacccgcccgccagatcgccgagaacgccgggtacgagggctccgtcatcgtccagcagatcctggccgagaccaagaacccccgctacggcttcaacgccgccaccggggagttcgtggacatggtggaggcgggcatcgttgaccccgccaaggtgacccgctctgccctgcagaacgccgcctccatcggcgccctcatcctcaccaccgaggcggtggtggcggagaagcccgagaagaaggagtccacccccgcctccgcgggcgccggggacatggacttctaa

SEQ ID NO: 9347 - protein, 543 aa, Thermus thermophilus HB8
MAKILVFDEAARRALERGVNAVANAVKVTLGPRGRNVVLEKKFGSPTITKDGVTVAKEVELEDHLENIGAQLLKEVASKTNDVAGDGTTTATVLAQAIVREGLKNVAAGANPLALKRGIEKAVEAAVEKIKALAIPVEDRKAIEEVATISANDPEVGKLIADAMEKVGKEGIITVEESKSLETELKFVEGYQFDKGYISPYFVTNPETMEAVLEDAFILIVEKKVSNVRELLPILEQVAQTGKPLLIIAEDVEGEALATLVVNKLRGTLSVAAVKAPGFGDRRKEMLKDIAAVTGGTVISEELGFKLENATLSMLGRAERVRITKDETTIVGGKGKKEDIEARINGIKKELETTDSEYAREKLQERLAKLAGGVAVIRVGAATETELKEKKHRFEDALNATRAAVEEGIVPGGGVTLLRAISAVEELIKKLEGDEATGAKIVRRALEEPARQIAENAGYEGSVIVQQILAETKNPRYGFNAATGEFVDMVEAGIVDPAKVTRSALQNAASIGALILTTEAVVAEKPEKKESTPASAGAGDMDF

SEQ ID NO: 9348 - DNA, 1617 bp, Geobacillus kaustophilus HTA426
  CDS (1)..(1617): transl_table=11
atggcaaaacaaatcaagttcagtgaagaagcgcgccgtgcgatgttgcgcggggtggacaaacttgcagacgcagtgaaagtcacattaggtccgaaaggccgcaacgtcgtattggagaaaaaattcggttcgccgctcatcacgaatgacggggtaacgatcgcgaaagaaatcgagctcgaagatccgtttgaaaacatgggcgcgaaattggtcgctgaagtcgccagcaaaacgaacgacatcgctggggacggtacaacaaccgctacggtattggctcaagcgatgatccgcgaaggcttgaaaaacgtagcagctggtgccaacccgatgggcatccgtcgcggtatcgaaaaagcggttgctgttgcggttgaagaattgaaagccatctccaaaccgattaaaggaaaagagtcgatcgcccaagttgctgcgatctcggctgctgacgaagaagtcggccaattgatcgctgaagcgatggaacgcgttggcaatgatggcgttatcacgcttgaagagtcgaaaggcttcacgacggaactcgacgttgtcgaagggatgcaattcgaccgcggttacgtttcaccgtacatgattacggatacggaaaaaatggaagctgtccttgaaaatccgtacatcctcatcacggacaaaaaagtatcgagcattcaagaactgttgccggtcttagaacaagtcgtccaacaaggccgtccgctcctgatcattgcggaagatgttgaaggcgaagcattggcgacgcttgttgtcaacaaactgcgcggcacgttcaatgcggttgctgtcaaagcgcctggcttcggcgatcgccgcaaagcgatgctcgaagacattgcgattttgacaggcggcgaagtgatctcggaagagcttggccgtgaattaaaatcgacgacgatcgcgtcgcttggtcgtgcggcgaaagttgttgtcacgaaagaaacgacgacgatcgtcgaaggcgctggcgattcggagcgcatcaaagcgcgcatcaaccaaatccgtgcgcagcttgaagaaacgacgtccgaattcgatcgcgaaaaactgcaagaacgcttggcgaaattggctggcggcgtagcggtcatcaaagtcggtgcggcaacagaaacagaattgaaagaacgcaaactgcgcatcgaagacgcgctcaactcgactcgtgcggctgttgaagaaggcattgtcgccggcggtggcacggctctcatgaacatctacaacaaagtcgctgccatcgaagcggaaggcgatgaagcaaccggtgtgaaaatcgtattgcgcgcgatcgaagaaccggttcgtcaaatcgcgcaaaacgctggtctggaaggctcgatcatcgttgagcgcctgaaaaacgaaaaaccgggcatcggcttcaatgcggcaacaggtgaatgggtcgacatgatcgaagctggtatcgttgacccgacgaaagtcactcgttcggcgctgcaaaacgctgcatctgtcgccgcaatggtcttgacgacagaagcggtcgttgccgacaaaccggaagaaaacaaaggcaacaacaacatgccggatatgggcggcatgatgtaa

SEQ ID NO: 9349 - protein, 538 aa, Geobacillus kaustophilus HTA426
MAKQIKFSEEARRAMLRGVDKLADAVKVTLGPKGRNVVLEKKFGSPLITNDGVTIAKEIELEDPFENMGAKLVAEVASKTNDIAGDGTTTATVLAQAMIREGLKNVAAGANPMGIRRGIEKAVAVAVEELKAISKPIKGKESIAQVAAISAADEEVGQLIAEAMERVGNDGVITLEESKGFTTELDVVEGMQFDRGYVSPYMITDTEKMEAVLENPYILITDKKVSSIQELLPVLEQVVQQGRPLLIIAEDVEGEALATLVVNKLRGTFNAVAVKAPGFGDRRKAMLEDIAILTGGEVISEELGRELKSTTIASLGRAAKVVVTKETTTIVEGAGDSERIKARINQIRAQLEETTSEFDREKLQERLAKLAGGVAVIKVGAATETELKERKLRIEDALNSTRAAVEEGIVAGGGTALMNIYNKVAAIEAEGDEATGVKIVLRAIEEPVRQIAQNAGLEGSIIVERLKNEKPGIGFNAATGEWVDMIEAGIVDPTKVTRSALQNAASVAAMVLTTEAVVADKPEENKGNNNMPDMGGMM

SEQ ID NO: 9350 - DNA, 1641 bp, Ruegeria pomeroyi DSS-3
  CDS (1)..(1641): transl_table=11
atggctgctaaggacgtcaagttcaataccgaagcccgcaacaagatgctcaagggcgtcaacatcctggccgacgcggtcaaggtgaccctgggccccaaaggccgcaacgtggttctggacaagagcttcggcgcgccccgcatcaccaaggacggtgtgtcggtcgccaaggaaatcgaactggaagacaagttcgagaacatgggcgcgcagatggtgaaagaagtcgccagccgcaccaatgacgaggccggcgacggcaccaccaccgccaccgtgctggcccaggccatcgtgcgcgaaggcatgaaatcggttgccgccggcatgaacccgatggatctgaagcgcggcatcgacctggccaccgccaaggttgtcgaggccattaaggcagcctcgcgccccgtcaacgacagcgccgaagtggcgcaggtcggcaccatctcggccaacggcgaatccgaaatcggccgccagatcgccgaagccatgcagaaggtcggcaacgagggtgtcatcaccgtcgaagagaacaagggcctggaaaccgagaccgacgtggtcgagggcatgcagttcgaccgtggctacctgtcgccctatttcgtcaccaacgcagacaagatgatcgcagaactcgaagactgcatgatcctgctgcacgaaaagaaactgtcctcgctgcagccgatggttccgctgctcgagcaggtgatccagtcgcaaaagccgctgctgatcatcgccgaggatgtcgaaggcgaagcgctggccaccctcgtggtgaacaagctgcgcggcggcctgaaaatcgcagccgtcaaggcaccgggcttcggcgatcgccgcaaggccatgctgcaggacatcgccatcctgaccggcggtcaggtgatcagcgaagacctgggcatgaagctcgagtccgtcaccatggacatgctgggcaccgccaagaaaatctcgatcaccaaggacgagaccaccatcgttgatggcgcaggcgagaaggccgagatcgaagcacgtgttgcccagatccgcacccagatcgaagagaccaccagcgactacgaccgtgaaaagctgcaagagcgcgtggccaagctggccggcggtgttgccgtgatccgcgtcggtggcatgaccgaagtcgaagtgaaagagcgcaaggaccgcgtcgatgacgccctgaacgccacccgcgcagccgtgcaggaaggtgttgttgtgggcggcggtgtcgctctggttcaggcaggcaaggttctggccgacctggaaggcgcaaatgccgaccagaccgccggtatcaacatcgtgcgcaaggccatcgaagcgccgctgcgccagatcgccgagaacgcaggcgtcgacggcgccgtggttgccggcaaggtgcgcgaatcgggcgatgcctcgttcggcttcaacgcgcagaccgaagaatatggcgacatgttcaagttcggcgtgatcgacccggccaaggttgtccgcaccgctctggaggatgcgtcctcggttgccggtctgctgatcaccaccgaagctatggttgccgacaagccgcagaaagacgcccccgcaggcggcggcatgcccgacatgggcggcatgggcggcatgatgtaa

SEQ ID NO: 9351 - protein, 546 aa, Ruegeria pomeroyi DSS-3
MAAKDVKFNTEARNKMLKGVNILADAVKVTLGPKGRNVVLDKSFGAPRITKDGVSVAKEIELEDKFENMGAQMVKEVASRTNDEAGDGTTTATVLAQAIVREGMKSVAAGMNPMDLKRGIDLATAKVVEAIKAASRPVNDSAEVAQVGTISANGESEIGRQIAEAMQKVGNEGVITVEENKGLETETDVVEGMQFDRGYLSPYFVTNADKMIAELEDCMILLHEKKLSSLQPMVPLLEQVIQSQKPLLIIAEDVEGEALATLVVNKLRGGLKIAAVKAPGFGDRRKAMLQDIAILTGGQVISEDLGMKLESVTMDMLGTAKKISITKDETTIVDGAGEKAEIEARVAQIRTQIEETTSDYDREKLQERVAKLAGGVAVIRVGGMTEVEVKERKDRVDDALNATRAAVQEGVVVGGGVALVQAGKVLADLEGANADQTAGINIVRKAIEAPLRQIAENAGVDGAVVAGKVRESGDASFGFNAQTEEYGDMFKFGVIDPAKVVRTALEDASSVAGLLITTEAMVADKPQKDAPAGGGMPDMGGMGGMM

SEQ ID NO: 9352 - DNA, 1668 bp, Synechococcus elongatus PCC 6301
  CDS (1)..(1668): transl_table=11
atggctaagctgatcctgtttcacgaagactcccgccaagctcttgaacggggagtcaacgccctcgcgaatgctgtcaaggtgactttgggcccccgcggacgtaacgtcctgctcgagaaaaagtttggggcacctgaaatcatcaatgatggcgtcagcatcgccaaagaaattgaactggaagatccccacgagaatgcaggggctcgccttgttcaggaagttgccgccaagactaaagagatcgcaggcgacggtaccacgactgcaactgtgctggctcaggcgatcgtgcgggaaggcttgaccaacgtggccgctggtgccaacccgatcgtgctgcgtcgtggcattgaaaaagcagtggcaaccttggtggaagcgatcgctgctaaagcgcaacccgtggcggatgaggcggccatccgctcgatcgctgcggtgtcggcgggcaacgacgatgaagtcggccaaatgattgccgatgctgtggctaaggtcaccaaagacggcgtgatcacggttgaggaatcaaaatctctggcgacggaactagaagttgtcgaagggatgcagttcgaccgcggctacctctcgccctacttcgtcaccgaccaagatcggcaggtcgtggagtacgacaatccgctcatcctgctgacggacaaaaaaattgcctcgattcaggatctggtgccggttctggaagatgtggcccgtgccggtcgtccgctgctgatcattgctgaagacatcgaaggcgaagccttggcaaccctcgtggtcaacaaagcccgtggtgtcctcaacaccgtcgcagtcaaagcgcctgcctttggcgatcgccgtaaagccatcctgcaagatattgccgtgctgactggcggtcaggtcatttccgaagaagtcggcctcagcttggccgatgccaacagcagcgtcctcggcaaggcccaaaagatcacgatcagcaaagacaccacgatcatcgtggcaggcgatgagaacaaagctgatgtggctgctcgcatcgctcaaatccgccgcagtctggaagaaactgactcggactacgatcgcgagaaactgcaagagcgcatcgccaaattggcgggcggcgtggctgtgatcaaagtcggcgcgccgaccgagactgagctgaaaaaccgcaagctgcgcattgaagatgccctcaatgccacccgtgctgcgatcgaagaaggggttgtgcccggcggtgggacgacgctactgcacctcgccagtgccttgacctcactgcaagcgtcgctgaccgtggctgacgaaaaactgggtgtggaaatcgtggcccgtgccctcgaagctcccctgcgtcagatcgcggacaacgccggtgctgaaggttctgtcgtcgtcgaaaaactgcgggacaaagacttcaactttggctacaacgccctgacaggccaatacgaagacctcgtggctagcggcattctcgatccggccaaagtggtgcgatcggcactgcaagatgcggcatccgtcgcctcgctgattctgacgactgaagtcttggttgtcgatcagcccgagccggagccggcaatgcctgctggcggtgacatgggcggtatgggtggcatgggtatgccgggaatgggcggtatgggcatgatgtag

SEQ ID NO: 9353 - protein, 555 aa, Synechococcus elongatus PCC 6301
MAKLILFHEDSRQALERGVNALANAVKVTLGPRGRNVLLEKKFGAPEIINDGVSIAKEIELEDPHENAGARLVQEVAAKTKEIAGDGTTTATVLAQAIVREGLTNVAAGANPIVLRRGIEKAVATLVEAIAAKAQPVADEAAIRSIAAVSAGNDDEVGQMIADAVAKVTKDGVITVEESKSLATELEVVEGMQFDRGYLSPYFVTDQDRQVVEYDNPLILLTDKKIASIQDLVPVLEDVARAGRPLLIIAEDIEGEALATLVVNKARGVLNTVAVKAPAFGDRRKAILQDIAVLTGGQVISEEVGLSLADANSSVLGKAQKITISKDTTIIVAGDENKADVAARIAQIRRSLEETDSDYDREKLQERIAKLAGGVAVIKVGAPTETELKNRKLRIEDALNATRAAIEEGVVPGGGTTLLHLASALTSLQASLTVADEKLGVEIVARALEAPLRQIADNAGAEGSVVVEKLRDKDFNFGYNALTGQYEDLVASGILDPAKVVRSALQDAASVASLILTTEVLVVDQPEPEPAMPAGGDMGGMGGMGMPGMGGMGMM

SEQ ID NO: 9354 - DNA, 1635 bp, Synechococcus elongatus PCC 6301
  CDS (1)..(1635): transl_table=11
atggctaaacggatcatttacaacgaaaacgcccgtcgcgcccttgaaaaaggcatcgacattctggcggaagccgttgcagtcaccctcggccccaaaggtcgcaacgttgttcttgagaaaaagttcggcgcaccgcaaatcatcaatgacggtgtgacgatcgccaaagaaatcgaactggaagaccacatcgaaaacaccggtgtggcgctgattcgtcaagccgcttccaaaaccaacgacgcagccggtgacggcaccaccaccgcaaccgtcttggcgcacgctgtggtcaaagaaggtctgcgtaacgtggctgctggcgctaacgccattttgctgaagcgcgggatcgacaaagccaccaacttcttggttgagcaaatcaagtcccacgctcgtccggtcgaagactccaagtcgatcgcccaagtcggtgcaatctcggctggcaacgactttgaagtcggccaaatgatcgccgatgctatggacaaagtcggcaaagaaggcgtcatctcgctggaagaaggcaaatcgatgaccaccgaactggaggtcaccgaagggatgcgtttcgacaagggctacatctcgccctactttgccaccgacaccgagcggatggaagccgtctttgacgagcccttcatcttgatcaccgacaagaaaatcggtttggttcaagacttggtgcccgtgctggagcaagtggctcgcgctggccgtccgctggtgatcatcgccgaggacatcgagaaagaagccctcgccaccttggtcgtcaaccgtctgcgtggcgtgctcaacgttgctgcagtcaaagcgcctggtttcggcgatcgccgcaaagccatgctggaagacattgctgtcctgactggtggtcaactgatcactgaagacgcaggtctgaagctggataccaccaagcttgatcagctgggtaaagcccgccggatcacgatcaccaaagacaacaccacgatcgtggctgaaggcaacgaagcggctgtgaaggcccgcgttgaccaaatccgtcgccaaatcgaagaaactgagtcgtcctacgacaaagagaagctgcaagagcgcttggctaagctctccggtggcgttgcagtcgtcaaagttggcgcggcaaccgaaactgaaatgaaagaccgcaaactgcgtctggaagatgcgatcaacgccaccaaagcggcggttgaagaaggcatcgtccctggtggcggcaccaccttggcgcacctcgctcctcagctggaagagtgggcaaccgctaacctcagcggtgaagagctgaccggcgctcaaatcgtggctcgtgccttgacggctccgctgaagcggattgctgaaaacgctggcctcaacggtgctgtgatctccgagcgcgtcaaagaactgcccttcgacgaaggctacgacgcctccaacaaccagttcgtgaatatgttcacggctggcatcgttgacccggccaaagtgactcgtagtgccctgcaaaacgcagcttcgatcgcagccatggtgctgacgaccgagtgcattgtggtcgacaaaccggaaccgaaagaaaaagccccggctggtgctggcggcggcatgggcgacttcgactactaa

SEQ ID NO: 9355 - protein, 544 aa, Synechococcus elongatus PCC 6301
MAKRIIYNENARRALEKGIDILAEAVAVTLGPKGRNVVLEKKFGAPQIINDGVTIAKEIELEDHIENTGVALIRQAASKTNDAAGDGTTTATVLAHAVVKEGLRNVAAGANAILLKRGIDKATNFLVEQIKSHARPVEDSKSIAQVGAISAGNDFEVGQMIADAMDKVGKEGVISLEEGKSMTTELEVTEGMRFDKGYISPYFATDTERMEAVFDEPFILITDKKIGLVQDLVPVLEQVARAGRPLVIIAEDIEKEALATLVVNRLRGVLNVAAVKAPGFGDRRKAMLEDIAVLTGGQLITEDAGLKLDTTKLDQLGKARRITITKDNTTIVAEGNEAAVKARVDQIRRQIEETESSYDKEKLQERLAKLSGGVAVVKVGAATETEMKDRKLRLEDAINATKAAVEEGIVPGGGTTLAHLAPQLEEWATANLSGEELTGAQIVARALTAPLKRIAENAGLNGAVISERVKELPFDEGYDASNNQFVNMFTAGIVDPAKVTRSALQNAASIAAMVLTTECIVVDKPEPKEKAPAGAGGGMGDFDY

SEQ ID NO: 9356 - DNA, 1641 bp, Brucella abortus bv. 1 str. 9-941
  CDS (1)..(1641): transl_table=11
atggctgcaaaagacgtaaaattcggccgcactgcgcgcgaaaagatgctgcgcggcgtcgatatcctcgctgacgctgttaaggtcacgctcggcccgaagggccgcaatgtcgttatcgagaagtccttcggcgctccgcgcatcaccaaggacggcgtttcggtcgccaaggaagtcgaactggaagacaagtttgaaaacatgggcgcacagatgctgcgcgaagtggcttccaagaccaacgatactgccggtgacggcaccacgaccgcgaccgttctcggtcaggccatcgttcaggaaggcgccaaggccgttgccgctggcatgaacccgatggacctgaagcgcggcatcgacctcgctgtcaacgaagttgtggctgagctgctgaagaaggccaaaaagatcaacacttcggaagaagttgcccaggttggcaccatctctgccaacggcgaagccgaaatcggcaagatgatcgccgaagcgatgcagaaggtcggcaacgaaggcgtcatcacggttgaagaagccaagaccgccgaaaccgaactcgaagtcgtcgaaggcatgcagttcgaccgcggctacctgtcgccttacttcgtcaccaaccctgaaaagatggttgctgacctcgaagacgcctacatccttctgcacgaaaagaagctctcgaaccttcaggctctcctgccggttctcgaagctgtcgtccagacctccaagccgcttctcatcattgctgaagacgtcgaaggcgaagctcttgcaacgctcgtcgtcaacaagctgcgcggcggcctgaagattgctgccgtcaaggctccgggcttcggcgatcgccgcaaggccatgctcgaagacatcgcgatcctcactggcggtcaggtcatctccgaagacctcggcatcaagcttgaaagcgttacgctcgacatgctgggccgcgccaagaaggtttcgatctccaaggaaaacacgacgatcgttgacggtgcaggccagaaggccgaaatcgacgctcgcgttggccagatcaagcagcagatcgaagaaaccacttcggactacgaccgtgaaaagcttcaggaacgtcttgccaagctcgctggcggcgttgccgtgatccgcgtcggcggtgcaacggaagttgaagtgaaggaaaagaaggaccgcgttgacgacgccctgaacgcaacccgcgctgcggttgaagaaggtatcgttgccggcggcggcaccgccctgctccgcgcttcgaccaagatcaccgcaaagggtgtgaatgccgaccaggaagctggcatcaacatcgttcgtcgcgcgatccaggctccggcccgccagatcacgaccaatgccggtgaagaagcttcggtaatcgttggcaagatcctcgaaaacacgtccgaaaccttcggctacaacacggccaatggcgaatatggcgacctgatctcgctcggcattgttgacccggtcaaggttgtccgcacggctctgcagaacgcagcttcggttgccggcctgctgatcacgacggaagcaatgatcgccgaactgccgaagaaggacgcagctccggctggcatgcctggcggtatgggtggcatgggcggcatggacttctaa

SEQ ID NO: 9357 - protein, 546 aa, Brucella abortus bv. 1 str. 9-941
MAAKDVKFGRTAREKMLRGVDILADAVKVTLGPKGRNVVIEKSFGAPRITKDGVSVAKEVELEDKFENMGAQMLREVASKTNDTAGDGTTTATVLGQAIVQEGAKAVAAGMNPMDLKRGIDLAVNEVVAELLKKAKKINTSEEVAQVGTISANGEAEIGKMIAEAMQKVGNEGVITVEEAKTAETELEVVEGMQFDRGYLSPYFVTNPEKMVADLEDAYILLHEKKLSNLQALLPVLEAVVQTSKPLLIIAEDVEGEALATLVVNKLRGGLKIAAVKAPGFGDRRKAMLEDIAILTGGQVISEDLGIKLESVTLDMLGRAKKVSISKENTTIVDGAGQKAEIDARVGQIKQQIEETTSDYDREKLQERLAKLAGGVAVIRVGGATEVEVKEKKDRVDDALNATRAAVEEGIVAGGGTALLRASTKITAKGVNADQEAGINIVRRAIQAPARQITTNAGEEASVIVGKILENTSETFGYNTANGEYGDLISLGIVDPVKVVRTALQNAASVAGLLITTEAMIAELPKKDAAPAGMPGGMGGMGGMDF

SEQ ID NO: 9358 - DNA, 1632 bp, Prochlorococcus marinus str. NATL2A
  CDS (1)..(1632): transl_table=11
atggctaagcgcatcatttacaacgagcaagcccgccgagcactcgagcgtggtattgacattttggctgaatcagtcgcagtcactttagggccgaaaggtcgtaatgttgttctcgagaaaaagttcggtgcacctcaaataatcaatgatggtgtaaccattgctaaggagatcgaactcgaagatcacattgaaaacactggagttgctctaatacgtcaagccgcatcaaaaacaaatgatgcagctggagatggcacgaccactgcaactgttcttgctcatgcaatggtcaaagctggtttgaaaaatgttgcagcaggagcaaatgcaatcactttgaaaaaaggaattgataaggcaactgagtttttggttgaaaaaataaaagatcattccaagccaattagtgacagtaatgcaattgctcaatgtggcacgattgctgctggtaatgatgaagaagttggcaaaatgattgctgatgctatggataaagttggaaaagaaggtgttatctctttagaagaaggcaagtcaatgaccactgagttagaggtcactgaaggaatgcgttttgataaaggatacatctctccttatttcgcaactgatactgagagaatggaagcagttttggacgagccttatatacttcttactgacaagaaaattggtctagttcaagatcttgttcctgtcttagaacaagttgctaaaactggtaaacctcttctaataattgctgaagatatagaaaaagaagctttggcgacattagttgtcaatcgcttaagaggtgttcttaacgttgccgcagttaaggctcctggttttggtgatcgtagaaaggcgatgcttgaagatatggctgttttaactaatggccaactcattactgaggatgcaggcttaaaacttgagaatgcaactcttgatatgcttggaacttcaaggagagtgaccattaataaggacacatcaacaattgtggctgaaggcaatgaagtcgctgtaaatgcaagatgtgaacaaatcaagaagcagatggatgagaccgactcaacctatgacaaagaaaaacttcaggaaagattagctaagctatctggtggggtagctgtagtgaaggtgggagctgcgactgagactgagatgaaagacaagaagcttcgattagaggatgcaattaacgcaactaaagctgcagttgaagaaggcattgttcctggtggtggaactactctcgctcatttagctcctgcgttgggagattggtcttcctccaatctttctggtgaggaattaataggtgcaaacattgttgaagctgctcttacttcaccattaatgcgcatagccgaaaatgctggtgctaatggagcagttgttgctgagaatgttaaatctaagccggtcaatgatggctataacgctgcaactggtgaatatgtagatatgctttctgctggaatcgttgatcctgcgaaggtaacaagatcaggcttgcaaaatgctgcttcaatagcaggaatggttcttacaactgaatgcatagttgctgatctaccagagaagaaagactcttcatcagcaggtggtggaatgggtggtgattttgattactaa

SEQ ID NO: 9359 - protein, 543 aa, Prochlorococcus marinus str. NATL2A
MAKRIIYNEQARRALERGIDILAESVAVTLGPKGRNVVLEKKFGAPQIINDGVTIAKEIELEDHIENTGVALIRQAASKTNDAAGDGTTTATVLAHAMVKAGLKNVAAGANAITLKKGIDKATEFLVEKIKDHSKPISDSNAIAQCGTIAAGNDEEVGKMIADAMDKVGKEGVISLEEGKSMTTELEVTEGMRFDKGYISPYFATDTERMEAVLDEPYILLTDKKIGLVQDLVPVLEQVAKTGKPLLIIAEDIEKEALATLVVNRLRGVLNVAAVKAPGFGDRRKAMLEDMAVLTNGQLITEDAGLKLENATLDMLGTSRRVTINKDTSTIVAEGNEVAVNARCEQIKKQMDETDSTYDKEKLQERLAKLSGGVAVVKVGAATETEMKDKKLRLEDAINATKAAVEEGIVPGGGTTLAHLAPALGDWSSSNLSGEELIGANIVEAALTSPLMRIAENAGANGAVVAENVKSKPVNDGYNAATGEYVDMLSAGIVDPAKVTRSGLQNAASIAGMVLTTECIVADLPEKKDSSSAGGGMGGDFDY

SEQ ID NO: 9360 - DNA, 1644 bp, Thiobacillus denitrificans ATCC 25259
  CDS (1)..(1644): transl_table=11
atggctgcaaaagacgtacgttttggtgattccgcgcgtcaccgcatggtggcgggtgtcaacgttctggctgacgccgtcaaggtgacgctgggcccgaaaggccgcaacgtggtactcgaccgttctttcggcgccccgacggtgaccaaggacggcgtgtcggtcgccaaggaaatcgagctcaaggacaagctcgagaacatgggcgcgcagatggtcaaggaagtcgcgtcgaagacctccgacgtcgccggtgacgggaccacgaccgcgaccgtgctcgcccagtcgatcgtcaacgaaggcatgaagttcgtcgccgcgggcatgaacccgatggacctcaagcgtggcatcgacaaggcggtcaacgcgatcaccgaagaactgaagaagatctcgaagccctgcacgacgagcaaggaaatcgcccaggtcggctcgatctcggccaactccgacgccccgatcggccagatcatcgccgacgcgatggacaaggtcggcaaggaaggcgtgatcacggtcgaagacggctccgggctggaaaacgagctcgacgtcgtcgagggcatgcagttcgaccgcggctacctgtcgccctacttcatcaacaacgccgacaagcagatggcgatcatggacgatcccttcatcctcttgttcgacaagaagatctccaacatccgtgacctgctgcccgtgctcgagcaggtcgccaaggccggcaagccgctgatgatcgtcgccgaagacgtcgacggcgaagcgctcgccacgctcgtcgtcaacaacatccgcggcatcctcaagacctgcgcggtcaaggcgccgggcttcggcgaccgtcgcaaggcgatgctcgaagacatggccatcctgaccggcggcaccgtgatcgccgaggaagtcggcttgagcctcgagaaggccaccctgcaggatctgggccgcgccaagcgcatcgaggtcggcaaggagaacaccacgatcatcgacggcgccggtgacggcaacgcgatcaagggccgcatcgcccagatcaacaagcagatcgaggaagtcacctccgactacgacaaggaaaagctgcaggagcgcaaggccaagctggccggtggcgtcgccgtgatcaaggtcggcgctgcgaccgaagtcgagatgaaggagaagaaggcccgcgtcgaagacgcgctgcacgcgacccgtgccgcggtcgaagaaggcatcgttcccggcggcggcgtggcactgctgcgcgccaaggccgcggctgccgcgatcaagggcgacaaccacgaccaggatgcgggcgtgaagatcgtgctgcgcgcgatcgaggagccgctgcgccagatcgtcaagaactgcggcgacgagccgtcggtcgtcgtcaacaaggtgctcgaaggcgagggcaacttcggctacaacgccggcaccagcgagtacggcgacatggtcgcgatgggcgtgctcgacccgaccaaggtcacgcgcaccgcgctgcagaacgccgcatcgatcgccggcctgatgctgactaccgactgcatggtcgccgacctgccggaagacaaggcgcccgcgatgccgatgggtggcggcatgggcgacatgggcggcatgggcatgatgtaa

SEQ ID NO: 9361 - protein, 547 aa, Thiobacillus denitrificans ATCC 25259
MAAKDVRFGDSARHRMVAGVNVLADAVKVTLGPKGRNVVLDRSFGAPTVTKDGVSVAKEIELKDKLENMGAQMVKEVASKTSDVAGDGTTTATVLAQSIVNEGMKFVAAGMNPMDLKRGIDKAVNAITEELKKISKPCTTSKEIAQVGSISANSDAPIGQIIADAMDKVGKEGVITVEDGSGLENELDVVEGMQFDRGYLSPYFINNADKQMAIMDDPFILLFDKKISNIRDLLPVLEQVAKAGKPLMIVAEDVDGEALATLVVNNIRGILKTCAVKAPGFGDRRKAMLEDMAILTGGTVIAEEVGLSLEKATLQDLGRAKRIEVGKENTTIIDGAGDGNAIKGRIAQINKQIEEVTSDYDKEKLQERKAKLAGGVAVIKVGAATEVEMKEKKARVEDALHATRAAVEEGIVPGGGVALLRAKAAAAAIKGDNHDQDAGVKIVLRAIEEPLRQIVKNCGDEPSVVVNKVLEGEGNFGYNAGTSEYGDMVAMGVLDPTKVTRTALQNAASIAGLMLTTDCMVADLPEDKAPAMPMGGGMGDMGGMGMM

SEQ ID NO: 9362 - DNA, 1629 bp, Nitrobacter winogradskyi Nb-255
  CDS (1)..(1629): transl_table=11
atggctgccaaggaagtgaggttctcgtcggacgcgcgggaaaagatgctgcgcggcgtggacacgcttgcaaatgcggtcaaggtcacgctcggccccaagggacgcaacgtcgttatcgagaagtcgttcggtgcgccccgcatcaccaaggacggcgtcaccgtcgccaaggagatcgagctcgacgacaagttcgagaatatgggcgcgcagatggtgcgcgaggtggcgtccaagaccaacgatctcgccggcgacgggacgacgaccgcgacggtgctggcgcaggcgattgttaaggaaggtgccaaggcggtggcggccggtatgaacccgatggacctcaagcgcggcatcgatctcgccgtcgaggccgtcgtcaaggacctcaccaagaatgccaagaagatcacatccaattccgagatcgcgcaggttgcgaccatctcggccaacggggataccgagatcggtcggttcctcgccgaggccatgcagaaggtcggcaacgaaggcgtaatcacggtcgaagaggcgaagagcctggagaccgagctcgaagtggtcgaaggcatgcagttcgaccgcggctacgtttccccgtatttcgtgaccgacgccgagaagatgcgtgtggagttcgaagatccctatgttctgatccacgagaagaagctctccggcctgcaagcgatggtgccgcttctcgaatccgtcgttcagtccggcaagccgctcctggtcatcgcggaggatgtcgagggcgaggcgctcgcgacgctggtcgtcaacaagttgcgcggcggcctcaaggttgcggccgtcaaggcgccgggcttcggtgaccgccgcaaggccatgctcgaggacatcgcgatcctcactggcggcacggcgatctccgaggatctcgggatcaagctcgagaacgtgacgctcaatatgctcggccgcgccaagaaggtcgtgatcgacaaggagaataccacgatcgtcgatggcgccggccgcaagaaggacatcgaagcgcgcgtgacccagatcaaggcgcagatcgaggagaccacgtccgactacgaccgcgagaagctgcaggagcgtcttgccaagctcgcgggaggcgtcgcggtaatccgtgttggcggggccactgaggtcgaggtcaaggagcgcaaggatcgtgtcgacgatgcaatgcatgcgacccgcgcggcggtcgaggagggcattctgccgggcggtggtgtggcgttgttacgcgccctgaaggcgctcgacgctgtcaaaccggataaccccgatcagaaggccggcgtcgacatcgtgcgccgtgcgatccaggtgcctgcccggcagatcatccagaatgccggcgaggacggttctctggtcgtcggcaagctcttggagaagaatacctacaattggggcttcaacgccgcgaccggcgaatatcaagacctggtcggggtcggcgtgattgatcccgccaaggtcgtccgcacggcgttgcaggacgcagcctcagtcgcttcgttgttgatcacgaccgaagcgctggtggccgagaagccgaagaaggacgtggctcccgcgcttccgcccggcggcggcatggacttctga

SEQ ID NO: 9363 - protein, 542 aa, Nitrobacter winogradskyi Nb-255
MAAKEVRFSSDAREKMLRGVDTLANAVKVTLGPKGRNVVIEKSFGAPRITKDGVTVAKEIELDDKFENMGAQMVREVASKTNDLAGDGTTTATVLAQAIVKEGAKAVAAGMNPMDLKRGIDLAVEAVVKDLTKNAKKITSNSEIAQVATISANGDTEIGRFLAEAMQKVGNEGVITVEEAKSLETELEVVEGMQFDRGYVSPYFVTDAEKMRVEFEDPYVLIHEKKLSGLQAMVPLLESVVQSGKPLLVIAEDVEGEALATLVVNKLRGGLKVAAVKAPGFGDRRKAMLEDIAILTGGTAISEDLGIKLENVTLNMLGRAKKVVIDKENTTIVDGAGRKKDIEARVTQIKAQIEETTSDYDREKLQERLAKLAGGVAVIRVGGATEVEVKERKDRVDDAMHATRAAVEEGILPGGGVALLRALKALDAVKPDNPDQKAGVDIVRRAIQVPARQIIQNAGEDGSLVVGKLLEKNTYNWGFNAATGEYQDLVGVGVIDPAKVVRTALQDAASVASLLITTEALVAEKPKKDVAPALPPGGGMDF

SEQ ID NO: 9364 - DNA, 1635 bp, Anabaena variabilis ATCC 29413
  CDS (1)..(1635): transl_table=11
atggcaaagcgcattatctacaacgaaaacgctcgtcgcgctctagagcgaggcattgatatcctggctgaggctgtagctgttacccttggccccaaaggtcgtaacgtagtattagagaaaaaatttggtgcgccgcaaatcgttaatgacggtgtaaccatcgctaaagaaatagaattagaagatcatattgaaaacactggcgttgctttgattcgccaagcagcttccaaaaccaacgatgcagcaggtgacggtacaaccaccgcaaccgttttggctcatgccattgtgaaagaaggtttgcggaacgtagcggctggtgctaacgcaattctgttgaagcgcggtattgataaagctaccggcttcttggttgacagaatcaaagaacacgcccgtcctgtagaagattctaaatccatcgctcaagttgggtcaatctctgctggtaacgacgatgaagtcggtcagatgattgccgaagcaatggacaaagtaggtaaggaaggcgttatctctctagaagaaggtaagtctgtaactaccgaattggaaatcaccgaagggatgcgctttgacaaaggctatatttccccctacttcgctaccgacccagagcggatggaagcgattttcgatgagcctttcttgttgttgaccgataagaaaattgctctcgtccaagatttagtaccagttctagagcaagtagctcgtgctggtcgtcctctggtgattatcgctgaagatattgaaaaagaagctctagcaaccctagtagttaaccgtttacgcggtgtactcaacgtagctgctgtgaaggctcctggcttcggcgatcgccgtaaggctatgctagaagatatcgctatcctcaccggcggtcaactaatcaccgaagatgctggtctgaagctagaaaacaccaagctggaaagcttgggtaaagctcgccgcatcaccatcaccaaagacagcaccacaattgttgctgaaggtaacgacgttgctgttaaaggtcgtgtagaacaaattcgtcgtcaaatggaagaaactgaatcttcctacgacaaagaaaaactacaagaacgtttggctaaactttctggtggtgtagctgtagttaaagttggtgcagctaccgaaaccgaaatgaaagacaagaaacttcgcctagaagacgctatcaacgctaccaaggcggctgtagaagaaggtatcgttcctggtggcggtacaaccctagctcacctcactcctgaattggaagtttgggctaacagcaacctcaaagatgaagagttgactggtgctttgattgtcgctcgtgcattacccgcgcctctcaagagaattgcggaaaacgctggtcaaaacggcgctgtaattgctgaacgcgtcaaagaaaaagcattcaacgttggtttcaacgcggctaccaacgaatttgtagatatgttcgaggctggtatcgttgaccccgcgaaggtaacacgttctgcactgcaaaacgctgcttccatcgctggaatggtgttaacaaccgagtgcatcgttgttgacaaaccagaacccaaggatgctgctcctgctggcgctggtgctggcggcggtgacttcgattactaa

SEQ ID NO: 9365 - protein, 544 aa, Anabaena variabilis ATCC 29413
MAKRIIYNENARRALERGIDILAEAVAVTLGPKGRNVVLEKKFGAPQIVNDGVTIAKEIELEDHIENTGVALIRQAASKTNDAAGDGTTTATVLAHAIVKEGLRNVAAGANAILLKRGIDKATGFLVDRIKEHARPVEDSKSIAQVGSISAGNDDEVGQMIAEAMDKVGKEGVISLEEGKSVTTELEITEGMRFDKGYISPYFATDPERMEAIFDEPFLLLTDKKIALVQDLVPVLEQVARAGRPLVIIAEDIEKEALATLVVNRLRGVLNVAAVKAPGFGDRRKAMLEDIAILTGGQLITEDAGLKLENTKLESLGKARRITITKDSTTIVAEGNDVAVKGRVEQIRRQMEETESSYDKEKLQERLAKLSGGVAVVKVGAATETEMKDKKLRLEDAINATKAAVEEGIVPGGGTTLAHLTPELEVWANSNLKDEELTGALIVARALPAPLKRIAENAGQNGAVIAERVKEKAFNVGFNAATNEFVDMFEAGIVDPAKVTRSALQNAASIAGMVLTTECIVVDKPEPKDAAPAGAGAGGGDFDY

SEQ ID NO: 9366 - DNA, 1683 bp, Anabaena variabilis ATCC 29413
  CDS (1)..(1683): transl_table=11
atggcaaaaattatttcgtttgatgaagaatcacggcgtgctttagagcggggtgtcaatgccctggctgatgctgtaaaaattaccttgggtcccaagggtcgcaacgtgcttttagaaaaaaaatatggcacaccccaaattgtgaacgatggtattaccgttgctaaagaaattgaattagaagatcctttagaaaatactggtgccagattaattcaagaggtagcagctaaaaccaaggatgtagctggtgatggcacaactacggctaccgttttagtgcaagccctaattaaagaaggtttgaagaacgtcgcggctggtagcaatccagtaagcttaaagcggggtatcgataaaactactgaggcgctagtagcggaaattgctaaagtcgccaagcctgtagaaggtagtgcgatcgctcaagttgccactgtttcagctggtaacgatgaagaagttggtgccatgattgctcaagcagtggaaaaagtcaccaaagatggtgtaatcactgtggaagaatctaaatccctgacaactgaactagacgtagtggaagggatgcagattgacagaggttatatttccccctacttcatcaccaacaacgagcgccaaacggtggagttagaaaatgtgcggattttgattactgacaaaaaaatcagcagtattcaagaattagtccccgttttagaaaaagtagctcgtttgggtcaacccctactgatcattgctgaagatgtagaaggagatgccctggctactctagttgtgaacaaagcacggggtgtactttctgtagcggcaattaaagccccaggatttggcgaacgccgcaaagcattgttgcaagacatcgccatcctcacagacggtcaactaatttcggaagaaattggcttaagcttagataccgcttctctagaagctttgggtacggcgcagaaaatcacaattgaaaaagacaacaccacaattgttgctggtaacaccaccaagccagaaattcaaaagcggattgcacaaattcgcagacaactggaagagactgattctgagtacgatagcgagaaattacaagaacgtattgccaagttagctggtggtattgcagtgatcaaagtcggtgcagcaactgaaaccgaactcaaagaccgcaagctcagaattgaagacgcactcaacgccaccaaagcggctgttgcggaaggtatcgttcctggtggtggcaaaactctgatttacttggcgagtaaggtagacgagattaagaaaaactttgacgaagaagaaaaaatcggcgctgacatcgttaaacgagctttagaagctcctttacggcagattgcagataacgctggtgtagaaggttctgtcatcgtctccagagtcaaagacagcgatttcaacaccggttacaacgctgctaccggagaatttgaagacctgattgcggctggtattatcgaccccgcaaaagttgtccgttcagcattgcaaaacgccgcttccattgccggtctagttttaaccaccgaagcgatcgttgtggaaaaaccagagaaaaaagctgctgctcctgctgatgccggtatgggcggcatgggtggcatgggcggtatgggcggtatgggtggcatgggtggcatgggcggtatgggtatgttctaa

SEQ ID NO: 9367 - protein, 560 aa, Anabaena variabilis ATCC 29413
MAKIISFDEESRRALERGVNALADAVKITLGPKGRNVLLEKKYGTPQIVNDGITVAKEIELEDPLENTGARLIQEVAAKTKDVAGDGTTTATVLVQALIKEGLKNVAAGSNPVSLKRGIDKTTEALVAEIAKVAKPVEGSAIAQVATVSAGNDEEVGAMIAQAVEKVTKDGVITVEESKSLTTELDVVEGMQIDRGYISPYFITNNERQTVELENVRILITDKKISSIQELVPVLEKVARLGQPLLIIAEDVEGDALATLVVNKARGVLSVAAIKAPGFGERRKALLQDIAILTDGQLISEEIGLSLDTASLEALGTAQKITIEKDNTTIVAGNTTKPEIQKRIAQIRRQLEETDSEYDSEKLQERIAKLAGGIAVIKVGAATETELKDRKLRIEDALNATKAAVAEGIVPGGGKTLIYLASKVDEIKKNFDEEEKIGADIVKRALEAPLRQIADNAGVEGSVIVSRVKDSDFNTGYNAATGEFEDLIAAGIIDPAKVVRSALQNAASIAGLVLTTEAIVVEKPEKKAAAPADAGMGGMGGMGGMGGMGGMGGMGGMGMF

SEQ ID NO: 9368 - DNA, 1644 bp, Pseudoalteromonas haloplanktis TAC125
  CDS (1)..(1644): transl_table=11
atggcagcaaaagaagtactttttgcaggtgacgcacgcgctaaaatgctaactggcgtaaacatcctggcaaacgcagtaaaagttacattaggtcctaaaggccgtaacgttgtactagataaatcatttggctctccagttatcactaaagatggtgtatctgtagcaaaagaaatcgaacttgaagacaagtttgaaaacatgggcgcacaaatggttaaagaagttgcatctaaagctaacgatgcagccggcgatggtacaactaccgctacagtacttgcacagtctattgtaaacgaaggccttaaagctgttgcagcaggcatgaacccaatggaccttaagcgcggcatcgacaaagcagtaattgctgctgttgcagagcttaaagcgttatctgttccatgctctgacactaaagcaattgcacaagtaggtactatttcagctaactctgataaagagattggcgacatcattgcacaagcaatggaaaaagtaggccgtaacagtggtgttattactgtagaagaaggtcaatcactagaaaatgaactcgatgttgttgaaggcatgcagtttgaccgtggttacctatctccttactttattaacagcccagaaaaaggtactgttgaactagataacccatttattctacttgtagataaaaaaatatctaacattcgcgaattattaccaacattagaagcagttgctaaagcaagcaagccactactaatcatcgcagaagaccttgaaggcgaagcattagctacattagtagttaataacatgcgtggtattgttaaagtatcagcagtgaaagctcctggttttggcgaccgtcgtaaagcaatgctacaagatatcgctgtattaactggcggtactgtgatttcagaagaaatcggccttgagcttgaaaaagcaacagttgaagacctaggtacagctaagcgcgtaattatcactaaagatgatacaacaatcattgatggtgctggcgaagaagcaggtattaacggccgtgtttcacaaattaaagcacaaatcgaagaagcaacatcagactacgataaagaaaaactacaagagcgcatggctaaactagctggcggtgttgcagtaatcaaagttggtgctgcgactgaaatggaaatgaaagagaaaaaagaccgcgttgaagatgcattaaatgcaactcgtgcagcggttgaagaaggtgtagtacctggcggcggcgttgcactagttcgtgcagcaagtaagctggttgatttagttggcgacaacgaagatcaaaaccacggtattaaagttgcacttcgtgcaatggaagcgccacttcgtcaaatcgtaacaaacgcaggtgacgaagcttcagttgtaattaacgcagttaaagcaggttcaggtaactttggttacaatgctgctactggcgaatacaatgacatgattgaaatgggtatcctagatccaactaaagtaacacgctctgcactacaatttgcagggtctattgcgggtctaatgatcactaccgaagctatggtagctgaaatccctaaagatgatagcgctcctgatatgggtggcatgggcggtatgggtggaatgggcggtatgatgtaa

SEQ ID NO: 9369 - protein, 547 aa, Pseudoalteromonas haloplanktis TAC125
MAAKEVLFAGDARAKMLTGVNILANAVKVTLGPKGRNVVLDKSFGSPVITKDGVSVAKEIELEDKFENMGAQMVKEVASKANDAAGDGTTTATVLAQSIVNEGLKAVAAGMNPMDLKRGIDKAVIAAVAELKALSVPCSDTKAIAQVGTISANSDKEIGDIIAQAMEKVGRNSGVITVEEGQSLENELDVVEGMQFDRGYLSPYFINSPEKGTVELDNPFILLVDKKISNIRELLPTLEAVAKASKPLLIIAEDLEGEALATLVVNNMRGIVKVSAVKAPGFGDRRKAMLQDIAVLTGGTVISEEIGLELEKATVEDLGTAKRVIITKDDTTIIDGAGEEAGINGRVSQIKAQIEEATSDYDKEKLQERMAKLAGGVAVIKVGAATEMEMKEKKDRVEDALNATRAAVEEGVVPGGGVALVRAASKLVDLVGDNEDQNHGIKVALRAMEAPLRQIVTNAGDEASVVINAVKAGSGNFGYNAATGEYNDMIEMGILDPTKVTRSALQFAGSIAGLMITTEAMVAEIPKDDSAPDMGGMGGMGGMGGMM

SEQ ID NO: 9370 - DNA, 1665 bp, Nitrosococcus oceani ATCC 19707
  CDS (1)..(1665): transl_table=11
atggcagctaaagatgtaagatttagcgaagatgcacgccatcgcatgatgcatggcgtcaatgttttggccgatgcggtacgggtcaccttgggccccagggggcggaatgtggtgctggagaagagctttggcgcacccaccattaccaaggacggcgttagcgttgccaaagaaattgaacttaaggataggttcgagaacatgggcgcccagatggtcaaggaagtggcttcccagacttccgatgtggcaggagatgggaccaccacagcaactgtgctggctcagagcatactgcgcgagggtatgaaggcggtggccgctggcatgaaccccatggatctcaaacggggcgttgacaaggcagtggtggctgcggttgaagaactgaaaaaactctccaagccctgcgaggatagcaaggctatcggccaggtgggcactatctccgccaatgcggaagagtccgtgggtaaaatcattgccgaagccatggataaggtaggtaaggaaggcgtgattacggtggaggaaggttctggcttggataatgagctggaagttgtggaaggaatgcagtttgatcggggttatctctcgccctatttcatcaccgatcagcagtccatggcggcggatctggatgatccttatatccttattcacgataaaaaaatctccaatattcgcgacttgctgccggtgctggaaagcgtggccaaagcgggtaagccgttactggtgatttctgaggatgtggaaggcgaagcgctggcgaccctggtggtcaataccatccgcggtatcgttaaagtgtgcgcggtcaaggcaccaggctttggtgatcgccgtaaggccatgctggaagatatcgccgtgctgactggcggcacggtcatttccgaggaggttggtctttccctggataaagtgaccctggatgatttgggtcgggccaagaaaatcaccgttaataaggaaaacaccaccatcgtagatggtgcgggtagtgctgacgatattaaagcccgggtcgagcaagtccggatacagattgaggaagccacttccgattacgataaagagaagctccaggagcgggttgctaaattggcaggtggcgtggccgtcatcaaggtgggcgccgcgaccgaaatggagatgaaagagaaaaaggcccgtgtggaagacgctctgcacgccacccgtgcggcggtagaagaaggcgtggtccctggtggtggggtagcgctgattcgggctctattaggtattaaggatcttaaaggtgcgaatcatgatcaagatgtgggcattaatattgcccgtcgcgccatggaagaacctctgcgccagatcgtgaacaattctggggaagaggcttctgtcatcgttaaccagattaagggaggcgagggtaactacggttacaatgccgccaccggagagtttggcgacatgattgccatgggaatcctggaccccaccaaggtcagccggacggccctgcaaaatgctgccagcgtggcgggtctgatgatcaccaccgaggcgatgattgccgaggcgccgaaggacgaggaggcatctcctggcggtgcgcctggcatgggcggcggcatgggtggtatgggcggcatgggtgatatgggcatgatgtaa

SEQ ID NO: 9371 - protein, 554 aa, Nitrosococcus oceani ATCC 19707
MAAKDVRFSEDARHRMMHGVNVLADAVRVTLGPRGRNVVLEKSFGAPTITKDGVSVAKEIELKDRFENMGAQMVKEVASQTSDVAGDGTTTATVLAQSILREGMKAVAAGMNPMDLKRGVDKAVVAAVEELKKLSKPCEDSKAIGQVGTISANAEESVGKIIAEAMDKVGKEGVITVEEGSGLDNELEVVEGMQFDRGYLSPYFITDQQSMAADLDDPYILIHDKKISNIRDLLPVLESVAKAGKPLLVISEDVEGEALATLVVNTIRGIVKVCAVKAPGFGDRRKAMLEDIAVLTGGTVISEEVGLSLDKVTLDDLGRAKKITVNKENTTIVDGAGSADDIKARVEQVRIQIEEATSDYDKEKLQERVAKLAGGVAVIKVGAATEMEMKEKKARVEDALHATRAAVEEGVVPGGGVALIRALLGIKDLKGANHDQDVGINIARRAMEEPLRQIVNNSGEEASVIVNQIKGGEGNYGYNAATGEFGDMIAMGILDPTKVSRTALQNAASVAGLMITTEAMIAEAPKDEEASPGGAPGMGGGMGGMGGMGDMGMM

SEQ ID NO: 9372 - DNA, 1644 bp, Rhodobacter sphaeroides 2.4.1
  CDS (1)..(1644): transl_table=11
atggctgccaaggacgtcaagttcgacaccgatgcccgcgaccgcatgctgcgtggcgtgaacatcctcgccgatgcggtgaaggtcacgctgggcccgaaaggccgcaacgtcgtgatcgacaagtcgttcggcgcgccgcgcatcaccaaggacggtgtgtcggtcgccaaggagatcgaactctccgacaagttcgagaacatgggcgcccagatggtgaaggaagtcgcttcccgcaccaacgacgaggcgggtgacggcaccaccaccgccaccgtgctcgcccaggcgatcatcaaggaaggcctcaaggccgtcgccgccggcatgaacccgatggacctcaagcgcggcatcgacctcgcgacctcgaaagtcgtcgaggcgatcaaggccgccgcccgtccggtgaacgactcgcacgaagtcgctcaggtcggcacgatctcggccaacggcgaagcgcagatcggccgcttcatcgctgacgcgatgcagaaggtcggcaacgagggtgtcatcaccgtcgaagagaacaagggcctcgagaccgaagtcgaagtcgtcgaaggcatgcagttcgaccgcggctacctctcgccctacttcgtcaccaacgccgacaagatgacggccgagctcgacgacgtctacatcctgctccacgagaaaaaactctcgtcgctgcagccgatggtcccgctgctcgaggccgtgatccagtcgcagaagccgctgctgatcatcgccgaggacgtggaaggcgaagccctcgccacgctcgtggtcaacaagctgcgcggtggcctgaagatcgctgccgtcaaggctccgggcttcggtgaccgtcgcaaggccatgctgcaggacatcgcgatcctgaccggcggccaggtgatctcggaagacctcggcatgaagctcgagaatgtcaccatcgacatgctcggccgcgccaagaagatctcgatcaacaaggacaacaccacgatcgtggacggcaacggcgacaaggccgagatcgacgcgcgcgtggcccagatccgcaaccagatcgaggaaacctcgtccgactacgaccgcgagaagctgcaggagcgggtcgcgaaactggcgggcggcgtggccgtcatccgcgtcggcggcatgaccgaagtcgaagtgaaagagcgcaaggaccgcgtcgatgacgccctgaacgcgacccgtgcggccgtgcaggaaggcatcgtcgtcggcggcggcgtggccctgatccagggcggcaaggcgctcgacggcctgaccggcgagaaccccgaccagaacgcgggcatcaccatcgtgcgtcgcgcgctggaagctccgctgcgccagatcgcccagaacgcgggcgtggacggttcggtcgtggccggcaaggtgcgcgagtcgaacgagaagtccttcggcttcaacgcccagaccgaagaatatggcgacatgttcaagttcggcgtgatcgacccggccaaggtggttcgcaccgctctggaagacgcggcctcggtcgcttcgctgctcatcaccaccgaagccatgatcgccgacaagccggagccgaaatctccggccggcggcccgggcatgggcggcatgggcggcatggacggcatgatgtaa

SEQ ID NO: 9373 - protein, 547 aa, Rhodobacter sphaeroides 2.4.1
MAAKDVKFDTDARDRMLRGVNILADAVKVTLGPKGRNVVIDKSFGAPRITKDGVSVAKEIELSDKFENMGAQMVKEVASRTNDEAGDGTTTATVLAQAIIKEGLKAVAAGMNPMDLKRGIDLATSKVVEAIKAAARPVNDSHEVAQVGTISANGEAQIGRFIADAMQKVGNEGVITVEENKGLETEVEVVEGMQFDRGYLSPYFVTNADKMTAELDDVYILLHEKKLSSLQPMVPLLEAVIQSQKPLLIIAEDVEGEALATLVVNKLRGGLKIAAVKAPGFGDRRKAMLQDIAILTGGQVISEDLGMKLENVTIDMLGRAKKISINKDNTTIVDGNGDKAEIDARVAQIRNQIEETSSDYDREKLQERVAKLAGGVAVIRVGGMTEVEVKERKDRVDDALNATRAAVQEGIVVGGGVALIQGGKALDGLTGENPDQNAGITIVRRALEAPLRQIAQNAGVDGSVVAGKVRESNEKSFGFNAQTEEYGDMFKFGVIDPAKVVRTALEDAASVASLLITTEAMIADKPEPKSPAGGPGMGGMGGMDGMM

SEQ ID NO: 9374 - DNA, 1623 bp, Carboxydothermus hydrogenoformans Z-2901
  CDS (1)..(1623): transl_table=11
atggctggcaaacaaatattatttagagaagatgcccggagagctttagaaagaggcgtaaacgctctggcagatgcggtaaaggttactcttggtccgaaaggccgtaacgttgttttagaaaagaaatttggttcaccgcaaattattaacgacggtgtttccattgctcgggaaattgaacttgctgaccctgtagaaaacatgggagcgcagcttgtaaaagaagttgctaccaaaaccaacgatgtagccggtgacggtactaccaccgctaccgttttggctcaggctatcattcgggaaggcttaaagaacgttactgccggtgccaacccgatgattttacggaaaggtattgaaaaagctgttgccaaagcggtagaagaaattaaggctattgccaagccggtagaaacttccgaagctatcgcccaggttgctgcaatttctgctaacgacgaggaaatcggtaagctaattgctgaagcaatggaaaaagtgggtaaagacggggttatcaccgtagaagagtcccagggtcttggcactaccttagaagtagttgaaggtatgagctttgaccggggttacatttctccttacatgattaccgaccccgataagatggaagctattttaaacgatccttacatcctcatcaccgataagaagatttccgcgattgctgacttactgccgattttagaaaaagttgtgcaaaccggtaagccccttttaatcattgctgaagatgtcgaaggggaagctctcgctaccctggttgtgaacaaactgcgcggtaccttgacctgtgtcgctgtaaaagctcccggctttggtgaccggagaaaggctatgcttgaagatatcgccatcctcaccaacggccaggtggtaagcgaagagcttggctttaagctcgaaaatgctaccctttcgatgctcggtcgggctaagcaagtccgggttaagaaagaagaaaccatcattgttggtggtcaaggttctccggaagctattgaaaagcggattgctcaaatcaagaagcaaatcgaagaaaccacttccgattttgaccgggaaaaattacaggagcgtctggctaagcttgccggtggcgtagcggtaatccaggtaggtgctgctaccgaaaccgaaatgaaagaaaagaaactccgcattgaagacgctttgaacgctacccgggcagcggtggaagaaggtattgtagctggtggtggcacaacctacatccacatcattaaggctttggaagagcttgaaaagaccgctaccggcgatgaaagaaccggtatcgccattgtccggaaagctttagaagaacccttaaagcaaattgctattaacgctggcttagagggttcggtcatcgttgaaaaggttaagaccttaccggtaggccatggcttcaacgctctaaccgaagaatatgttgacatgatagctgctggtattgttgacccggctaaggtcacccggagtgctttacaaaacgctgcctccgttgctgctatgctcctcaccacggaagctttggtggctgaaaagccggaaaaagaaaagaaaggccctgacatgcccaacatggacatgatgtaa

SEQ ID NO: 9375 - protein, 540 aa, Carboxydothermus hydrogenoformans Z-2901
MAGKQILFREDARRALERGVNALADAVKVTLGPKGRNVVLEKKFGSPQIINDGVSIAREIELADPVENMGAQLVKEVATKTNDVAGDGTTTATVLAQAIIREGLKNVTAGANPMILRKGIEKAVAKAVEEIKAIAKPVETSEAIAQVAAISANDEEIGKLIAEAMEKVGKDGVITVEESQGLGTTLEVVEGMSFDRGYISPYMITDPDKMEAILNDPYILITDKKISAIADLLPILEKVVQTGKPLLIIAEDVEGEALATLVVNKLRGTLTCVAVKAPGFGDRRKAMLEDIAILTNGQVVSEELGFKLENATLSMLGRAKQVRVKKEETIIVGGQGSPEAIEKRIAQIKKQIEETTSDFDREKLQERLAKLAGGVAVIQVGAATETEMKEKKLRIEDALNATRAAVEEGIVAGGGTTYIHIIKALEELEKTATGDERTGIAIVRKALEEPLKQIAINAGLEGSVIVEKVKTLPVGHGFNALTEEYVDMIAAGIVDPAKVTRSALQNAASVAAMLLTTEALVAEKPEKEKKGPDMPNMDMM

SEQ ID NO: 9376 - DNA, 1644 bp, Pelodictyon luteolum DSM 273
  CDS (1)..(1644): transl_table=11
atgactgctaaagatattctctttgatgccgacgcacgtgccaaactgaaagtgggcgtcgacaagctggccaacaccgtgaaagtcacgctcggacctgccggccgcaatgttcttatcgacaaaaaattcggtgcaccgacctccaccaaggacggcgttaccgttgccaaggaaattgaactcgatgatgccatcgagaacatgggtgctcagatggttcgcgaagtggcttccaagaccagcgatgttgccggtgacggtaccaccaccgcaactgtccttgcacaggccatctaccgtgaaggcctgaagaacgtcgccgcaggcgcacgtccgatcgacctcaagagaggcatcgaccgcgctgtgaaagaggttgtcgccgagctccgcaacatcagccgcagcatctccggtaagaaagagatcgcacaggtcggcaccatttcggccaacaacgatcctgaaatcggcgagctgattgcagaagccatggacaaggtcggaaaagacggcgtcatcaccgttgaagaagcaaagggcatggagacagagctgaaggttgtcgagggcatgcagttcgaccgcggctacctctctccctatttcgtgaccaattccgagaccatggaggctgagctcgaagacgcgctgatcctgatccatgacaagaagatcggcaacatgaaagagctgcttccgatcctcgagaagtccgctcagtccggcaggccgctgctcatcattgctgaggacatcgaaggcgaagcactcgcgacactcgtcgtcaaccgcctccgcggcaccctgaaagtctgcgccgtgaaggctccgggcttcggcgaccgccgcaaggcaatgcttgaggacatcgccatcctcaccggcggtaccgtcatctccgaagagaagggctacaagctcgagaacgccaccgtcaactatctcggccaggctgcccgcattaccgtcgacaaggacaataccaccattgtcgaaggcaaaggcactcaggacgagatcaaggcacgcatcaacgagatcaagggccagatcgacaagtcgacttccgactacgacaccgagaagctgcaggagcgccttgcaaaactctccggcggcgttgccgtcctcaacatcggtgcttccaccgaggtcgagatgaaggagaagaaggcccgtgttgaagatgcgctgcacgcaacccgtgccgcagtgcaggaaggtattgtcgtcggcggcggtgtggctctgatccgtgcgatcaagggcctttccaacgcaatcgcagacaacgaggaccagaagaccggtatcgatatcatccgccgcgcacttgaagaacccctccgccagattgttgccaacaccggcaccaccgatggcgcggttgtccttgagcgtgtgaagcagggtgaaggcgatttcggcttcaacgcccgcactgagcagtacgaggatcttgtggcggccggcgtggtcgatccgaccaaggttacccgcagcgcgctcgagaatgcggcatctgttgccagcatccttctgaccaccgaagcctgcatcaccgacatcaaggaagacaagtccgacatgcctgcaatgcctccgggcggcatgggtggaatgggtggcatgtactga

SEQ ID NO: 9377 - protein, 547 aa, Pelodictyon luteolum DSM 273
MTAKDILFDADARAKLKVGVDKLANTVKVTLGPAGRNVLIDKKFGAPTSTKDGVTVAKEIELDDAIENMGAQMVREVASKTSDVAGDGTTTATVLAQAIYREGLKNVAAGARPIDLKRGIDRAVKEVVAELRNISRSISGKKEIAQVGTISANNDPEIGELIAEAMDKVGKDGVITVEEAKGMETELKVVEGMQFDRGYLSPYFVTNSETMEAELEDALILIHDKKIGNMKELLPILEKSAQSGRPLLIIAEDIEGEALATLVVNRLRGTLKVCAVKAPGFGDRRKAMLEDIAILTGGTVISEEKGYKLENATVNYLGQAARITVDKDNTTIVEGKGTQDEIKARINEIKGQIDKSTSDYDTEKLQERLAKLSGGVAVLNIGASTEVEMKEKKARVEDALHATRAAVQEGIVVGGGVALIRAIKGLSNAIADNEDQKTGIDIIRRALEEPLRQIVANTGTTDGAVVLERVKQGEGDFGFNARTEQYEDLVAAGVVDPTKVTRSALENAASVASILLTTEACITDIKEDKSDMPAMPPGGMGGMGGMY

SEQ ID NO: 9378 - DNA, 1635 bp, Synechococcus sp. CC9605
  CDS (1)..(1635): transl_table=11
atggcaaagcgcatcatctacaacgagaacgcccgtcgcgctctcgaaaaaggcatcgacatcctctgcgaagccgtcgccgtgaccctgggccccaaaggccgcaacgtggtgctcgagaaaaagttcggtgcaccccagatcatcaatgacggcgtcaccatcgccaaggagatcgagctcgaagaccacatcgagaacaccggtgttgctctgattcgtcaggccgcctccaaaaccaacgacgctgccggtgacggcaccaccaccgctaccgttttggcccatgccatggtcaaggcaggtctgcgcaacgtggctgccggtgccaatgccatcaccctgaagaagggcatcgacaaggcgtccgatttcctggtcagcaagatcaaggaaatggccaagcccatcgctgacagcaatgccatcgcccaggtgggcaccatctccgctggcaacgacgaggaagtcggcaagatgatcgccgacgccatggacaaggttggcaaggaaggtgtgatttccctcgaagagggcaagtccatggagaccgaactcgaggtcaccgagggcatgcgcttcgacaagggctacatctccccttatttcgccaccgacaccgagcggatggaagccgtcctcgacgagccctacatcctgctcaccgacaagaagatcggtctggtgcaggatctggtgcccgtgctggagcaaatcgcccgcaccggcaagcctctgctgatcattgcagaggacatcgagaaggaagccctcgccactctggtggtgaaccgcctgcgcggtgtgctgaacgtggccgccgtgaaggcccctggtttcggtgatcgccgtaaggccatgttggaagacatggcagtactgaccaacggtcagctgatcaccgaggacgctggtctcaagctggagaacgccaagctggagatgctgggcaccgcccgtcgcatcacaatcaacaaggacaccaccaccatcgttgccgagggcaacgaggcggctgtcggcgcccgctgcgaacagatcaagaagcagatggacgagaccgactccacctacgacaaggagaagctgcaggagcgtctggccaagctggccggtggcgtggctgtggtgaaggtgggtgcggccaccgaaaccgagatgaaggacaagaaactccgtctcgaggacgccatcaacgccaccaaggcggctgttgaggaaggcatcgttcctggtggcggcaccaccctggcgcacctggctccggccctggagcagtgggcagcctccagcctgtccggcgaagaactgatcggcgccaacatcgtggctgctgctctcaccgctccgctgatgcggatcgctgaaaacgctggtgccaacggtgctgttgtggctgagaacgtcaaggctcgcgctggtgccgaaggcttcaacgctgcctccggtgagtacgtcgacatgctggctgccggcatcgtcgatcccgccaaggtgacccgctccggtctgcaaaatgccgcatccatcgctggcatggtgctaaccaccgagtgcatcgtggctgatttgcctgagaagaaggaagcagctcctgccggcggcggcatgggcggcggcgacttcgactactga

SEQ ID NO: 9379 - protein, 544 aa, Synechococcus sp. CC9605
MAKRIIYNENARRALEKGIDILCEAVAVTLGPKGRNVVLEKKFGAPQIINDGVTIAKEIELEDHIENTGVALIRQAASKTNDAAGDGTTTATVLAHAMVKAGLRNVAAGANAITLKKGIDKASDFLVSKIKEMAKPIADSNAIAQVGTISAGNDEEVGKMIADAMDKVGKEGVISLEEGKSMETELEVTEGMRFDKGYISPYFATDTERMEAVLDEPYILLTDKKIGLVQDLVPVLEQIARTGKPLLIIAEDIEKEALATLVVNRLRGVLNVAAVKAPGFGDRRKAMLEDMAVLTNGQLITEDAGLKLENAKLEMLGTARRITINKDTTTIVAEGNEAAVGARCEQIKKQMDETDSTYDKEKLQERLAKLAGGVAVVKVGAATETEMKDKKLRLEDAINATKAAVEEGIVPGGGTTLAHLAPALEQWAASSLSGEELIGANIVAAALTAPLMRIAENAGANGAVVAENVKARAGAEGFNAASGEYVDMLAAGIVDPAKVTRSGLQNAASIAGMVLTTECIVADLPEKKEAAPAGGGMGGGDFDY

SEQ ID NO: 9380 - DNA, 1632 bp, Rhodospirillum rubrum ATCC 11170
  CDS (1)..(1632): transl_table=11
atggctgccaaagacgtcaagttttccagcgacgcccgtgatcgcctgctgcgcggcgtcgacaccctggccaatgcggtcaaggtgacgctcggccccaagggccgcaacgtggtgatcgacaaaagcttcggcgccccgcgcatcaccaaggacggcgtgtccgtcgccaaggaaatcgaactgaaggacaagttcgagaacatgggcgcgcagatgctgcgcgaggtcgcctccaaatccgccgatgtcgccggcgatggcacgaccaccgccaccgtgctggcccaggccatcgtccgcgagggcagcaaggcggtcgccgccggcatgaacccgatggacctcaagcgcggcatcgatctggcggtcgccgccgtcgtcaaggacgtgaagacgcgctcgcgcaagatcgccaccaatgatgaaattgcccaggtcggcaccatctcggccaatggcgatgaagaggtcggcaagatcatcgcccgggcgatggacaaggtcggtcacgagggcgtgatcaccgtcgaggaggccaagggcctcgataccgagctcgacgtggtcgaaggcatgcagttcgatcgcggctatctgtcgccctatttcgtgaccaacgccgagaagatggtcgccgatctggaaaacccctacatcctgatccacgaaaagaagctctcgggcctgcagccgctgctgccggtgctcgaagccgtcgtccagtcggggcggccgctgctgatcatcgccgaagatgtcgagggcgaggccctggccaccctggtggtcaaccgtctgcgcggcggcctcaaggtcgcctcggtcaaggccccgggctttggcgatcgccgcaaggcgatgctcgaagacatcgccatcctgaccggtgggcaggtgatcagcgaagacctgggcatcaagcttgagaccgtcaccctcgacatgctgggcacggccaagacggtgacgatcaccaaggacaacaccaccatcgtcgacggcgccggcgtcaaggccgatatcgacgcccgctgcgcccagatccgcgccaccatcgaagacaccactagcgattacgaccgggaaaagctgcaagaacgtctggccaagttgtcgggcggcgtcgcggtgatccgggttggcggtgccagcgaagtcgaggtcaaggagaagaaggaccgcgtcgacgacgcgatgcacgccacccgcgccgccgttgaggaaggcatcatcgccggcggcggtgtcgccctgctgcatgcggccaaggccctggacgccctgagcccggccaacgccgatcagaaggtcgggatcgagatcgtgcggcgcgccctgcaggcgccggtgcgccagatcgccgagaacgccggcgtcgatggcgccgtggtcgccggcaagctgcttgaaagctccgatgccgatttcggctacaacgcccagaccggggtctatgagaatctggtcaaggtcggggtgatcgatccgaccaaggtcgtgcgcaccgccctccagggggcggcctcggtggcctcgctgctgatcaccaccgaggcgatggtcgccgaaatccccgagaagaagccggccctgcccgccggcggcggcatgggcgacatggacttctaa

SEQ ID NO: 9381 - protein, 543 aa, Rhodospirillum rubrum ATCC 11170
MAAKDVKFSSDARDRLLRGVDTLANAVKVTLGPKGRNVVIDKSFGAPRITKDGVSVAKEIELKDKFENMGAQMLREVASKSADVAGDGTTTATVLAQAIVREGSKAVAAGMNPMDLKRGIDLAVAAVVKDVKTRSRKIATNDEIAQVGTISANGDEEVGKIIARAMDKVGHEGVITVEEAKGLDTELDVVEGMQFDRGYLSPYFVTNAEKMVADLENPYILIHEKKLSGLQPLLPVLEAVVQSGRPLLIIAEDVEGEALATLVVNRLRGGLKVASVKAPGFGDRRKAMLEDIAILTGGQVISEDLGIKLETVTLDMLGTAKTVTITKDNTTIVDGAGVKADIDARCAQIRATIEDTTSDYDREKLQERLAKLSGGVAVIRVGGASEVEVKEKKDRVDDAMHATRAAVEEGIIAGGGVALLHAAKALDALSPANADQKVGIEIVRRALQAPVRQIAENAGVDGAVVAGKLLESSDADFGYNAQTGVYENLVKVGVIDPTKVVRTALQGAASVASLLITTEAMVAEIPEKKPALPAGGGMGDMDF

SEQ ID NO: 9382 - DNA, 1620 bp, Moorella thermoacetica ATCC 39073
  CDS (1)..(1620): transl_table=11
atggctgctaaacagctggcctttgatgtagaagccaggcgggccctggaaaagggcgtcagcaccgttgcccaagcagtgaaggtgaccttgggccccaagggacgcaatgtggttttggagcgtaaattcggttccccggtaattaccaaagacggggtaaccgttgctaaagaaatcgaattaaaggatccctacgagaacatgggtgcccagctctgccgggaagtggcctccaagaccaacgacgtggcgggcgatgggacaactacagctaccgtcctggcccaggccattatgctggagggcttaaagaatgtagccgccggtgccaatcccattttcgtcaagaagggtattgaccgggcagttgaaaccgtagtagacgaaatcaagaagatcagcatcccggtggagtccaaggaaagtatcgcccatgtagcctccattgctgccaacgaacgtgagatcggcgaactcattgccgatgccatggagaaggttggcaaagacggcgtcatcaccgtggaagaatccaagggtactgctaccactgttgaggtagtagaaggtatggaattcgaccgcggttatgtatcaccgtactttgtgaccaatactgaagccatggaagctgagtttgaggaaccctatatacttatccatgaaaagaagatctcggccatcaacgacctcctgcccctgctggagaaagtcgtccgtaccggcaaacccctggtaattattgccgaggacattgaaggcgaggccctcgccaccctggtggtcaacaaactgcggggcaccctgaactgcgctgccgtcaaagcccctggttttggcgatcgccgcaaggccatgatggaggatatcgccatcctcaccggcggcaccttcctctccgaagacctgggggtcaagctggagaacgtcgacctgaatatgcttggtcgggccaagaaggttaaaattgccaaggagaagaccaccatcgttgagggctacggcaagaaagaggctgttgacggccggatagcccagattaagaaacaaatcgaagaaaccgactccgattacgaccgcgagaaattgcaggagcgtctggccaagctggccggtggcgtggccgtcatccgtgttggtgcggctaccgaaactgaactgaaggaaaagaaacaccgggttgaagacgccctggcagctacccgggcggccgttgaagagggtatcgttcccggtggcggtgctaccctggtacacgccatcccggccgtggaaaagatccaggccgagggtgacgaggctgtcggtgtcaggattgtccgccgggctctggaagaacccctgcgccagattgcagccaatgctggtctggaaggttcggttattgttgagcgggtacgcagcgagcaacccggtatcggctttgacgccgtgaaggaggagtatgtggacatgattaaggccggtatcgttgacccggccaaggtcacccgcagcgccctccagaacgcggccagcatcgcctccatgctcttgactaccgaggccattatcgccgaaattcccaaggaagaaaaagcgcctgccatgccgcccggtggcggaatggattactaa

SEQ ID NO: 9383 - protein, 539 aa, Moorella thermoacetica ATCC 39073
MAAKQLAFDVEARRALEKGVSTVAQAVKVTLGPKGRNVVLERKFGSPVITKDGVTVAKEIELKDPYENMGAQLCREVASKTNDVAGDGTTTATVLAQAIMLEGLKNVAAGANPIFVKKGIDRAVETVVDEIKKISIPVESKESIAHVASIAANEREIGELIADAMEKVGKDGVITVEESKGTATTVEVVEGMEFDRGYVSPYFVTNTEAMEAEFEEPYILIHEKKISAINDLLPLLEKVVRTGKPLVIIAEDIEGEALATLVVNKLRGTLNCAAVKAPGFGDRRKAMMEDIAILTGGTFLSEDLGVKLENVDLNMLGRAKKVKIAKEKTTIVEGYGKKEAVDGRIAQIKKQIEETDSDYDREKLQERLAKLAGGVAVIRVGAATETELKEKKHRVEDALAATRAAVEEGIVPGGGATLVHAIPAVEKIQAEGDEAVGVRIVRRALEEPLRQIAANAGLEGSVIVERVRSEQPGIGFDAVKEEYVDMIKAGIVDPAKVTRSALQNAASIASMLLTTEAIIAEIPKEEKAPAMPPGGGMDY

SEQ ID NO: 9384 - DNA, 1620 bp, Erythrobacter litoralis HTCC2594
  CDS (1)..(1620): transl_table=11
atggctgcgaaagaagtaaaatttgcgtcggatgcgcgtgatcgcatgctccgcggcgtggatacgcttgcgaatgcggtcaaggtaactctcggccccaagggccgcaatgtggtgatcgagaagagcttcggcgcgccgcgcatcaccaaggacggcgtgactgtcgccaaggaaatcgaactcaaggacaagttcgaaaacatgggcgcacagatgctacgcgaagtcgccagcaagcagaacgacaaggcgggcgatggcaccacgactgccaccgttctcgcgcaggccatcgtccgcgaaggtgccaaggccgttgctgccggcatgaacccgatagacctcaagcgcggcatcgaccttgccgtcggcaccgtagtcaaggacctcgaaagccatgccaagaaggtgtccgccaacagcgaaatcgcacaggtcgcgaccatttccgccaatggcgacgaaaccgtcggtcgcttccttgccgaagccatggacaaagtcggcaatgaaggcgtgatcacggtcgaggaagccaagagcctcgaaaccgagctcgaaacggtcgagggcatgcagttcgatcgcggctatctctcgccctacttcgtgaccaacaccgaaaagctgaaggtggaactcgaggatccctacatcctcatccatgagaagaagctgtcgaacctgcaagcgctgatcccgctgctcgaacaggtcgtgcagtctggcaagccgttgctgatcatcgcggaggatgtcgagggcgaagccctggcaaccctggtggtgaacaagcttcgtggcggcctcaaggtcgcggcggtcaaggcacccggcttcggcgatcgccgcaaggccatgctggaggatgttgctatcctcaccgccggcaatgtggtcagcgaggaacttggcaccaagctggaaaatgtcacgatcggcatgctcggccgggccaagaaggtcattatcgacaaggacaacacgacaatcgtcgatggtgccggcaacaaggcggacatcgacgcccgggtcagccagatccgcgcccagatcgagaccacgaccagcgactacgaccgtgaaaaacttcaggaacgcgtggccaagctggctggcggggtggccgtcatccgcgtcggcggggccaccgaagtcgaggtcaaggagcgcaaggaccgggtcgacgacgcgctgcatgcaactcgtgcggctgtcgaagagggcatccttccgggcggcggtatagccctgctccgggcgctcaagtcgctcgatggcctcaaggccgccaatgacgaccagcagtctggcatcgacatcgtgcgccgcgccctgcgcgctccggctcgccaaatagccgagaacgcgggtgaggacggtgcctatatcgtcggcaagctgcttgaaggcgacgactacaaccacggcttcaacgccgcgaccggcgaatatgaagacctggtgaagtcgggtgtcatcgatccggcgaaggtggtgcgcactgcgctgcaggacgcggcttcggttgcctcgctgctgatcaccaccgaggcgctggtggccgaactgcccaaggaagacacgcccgcaccgatgccggcgatggacttctaa

SEQ ID NO: 9385 - protein, 539 aa, Erythrobacter litoralis HTCC2594
MAAKEVKFASDARDRMLRGVDTLANAVKVTLGPKGRNVVIEKSFGAPRITKDGVTVAKEIELKDKFENMGAQMLREVASKQNDKAGDGTTTATVLAQAIVREGAKAVAAGMNPIDLKRGIDLAVGTVVKDLESHAKKVSANSEIAQVATISANGDETVGRFLAEAMDKVGNEGVITVEEAKSLETELETVEGMQFDRGYLSPYFVTNTEKLKVELEDPYILIHEKKLSNLQALIPLLEQVVQSGKPLLIIAEDVEGEALATLVVNKLRGGLKVAAVKAPGFGDRRKAMLEDVAILTAGNVVSEELGTKLENVTIGMLGRAKKVIIDKDNTTIVDGAGNKADIDARVSQIRAQIETTTSDYDREKLQERVAKLAGGVAVIRVGGATEVEVKERKDRVDDALHATRAAVEEGILPGGGIALLRALKSLDGLKAANDDQQSGIDIVRRALRAPARQIAENAGEDGAYIVGKLLEGDDYNHGFNAATGEYEDLVKSGVIDPAKVVRTALQDAASVASLLITTEALVAELPKEDTPAPMPAMDF

SEQ ID NO: 9386 - DNA, 1638 bp, Syntrophus aciditrophicus SB
  CDS (1)..(1638): transl_table=11
atgggtgcaaaattactgcagtatgatgaagaagcgagaaaatccatcctgaacggtgtcaacgccctggctgatgccgtaaaggtaacgcttggtccaaagggccgcaacgtgattatcgataaaagcttcggcgcgccgaccgtaaccaaggacggcgtcaccgtcgccaaggaagtcgaactggaagacaaatttgaaaacatgggcgcccagatggtcagggaagtggccagcaagaccagcgatgtcgccggtgatggaaccacgaccgccacgatcctcgcccaggcgatctaccgggaaggggccaaaaccgttgccgcaggcagcaatcccatggatgtgaaacgcggtatcgaaaaagcggtggccgccgttgtcaccgagctcaagaatatcagcaaacccacaaaagatcagaaagaaatcgcccaggtcgggaccatctccgcgaacaacgacgaaaccatcggcaatatcattgctgaagccatgggtaaagtcggcaaggaaggcgttatcaccgtcgaagaagccaaaggactggagacggaactggagatcgtcgaaggcatgcagttcgaccggggttatctctctccctacttcgtaaccaatccggaaaaaatggaagtcagcctggaagacgccctgatcctgatttatgaaaagaaaatcagtggaatgaaggacctgctgcccattcttgagcagatcgcgaagatgggtcgtccgctgctgatcatcgccgaggacattgaaggcgaagccctggcgaccctcgtggtcaacaagattcgcggcaccctccatgtcgcagccgtcaaggcccccggcttcggcgacaggcgcaaggccatgcttgaagacatcgccatccttacgggcggaacggtgatttccgaggatatgggttacaagctggaaaatacgcgcctggaagatctcggacgcgccaagagaatccagatcgacaaggacaacaccaccatcatcgacggcgccggcgaacgggccgccctggaaggccgtgtgaaacagatacgcgcccagatcgacgaaacgacttccgattatgaccgggagaaacttcaggaaagactggcgaaactcgtaggcggtgtcgcggtgatcaaggtcggcgcggcgacggaaacggaaatgaaggaaaagaaagcccgcgtcgaagacgccctgaatgcaacccgggctgccgtggaagaaggcatcgtacccggcggcggtgtggcatatatccgtacgcttccgatactggaggctctgaagcttgagggtgacgaacaggtcggcgtcaacatcgtacgcaaggcccttgaagaacctctgaagatgattgccgcgaacgccggcatggaaggcaccatcgttgtggaaaaggtcaaggaacagtccggcgccttcggcttcaatgcccggaccgaagtctatgaagacatgatcgaagccggcgtcatcgatcccaccaaagtgacccgcttcgcgctgcagaatgcggccagcgtggcttccctcatgctgaccacccagtgcatgattgctgagaagcctgaagaaaagggcgctggaatgcccggaatgcctcctggaggcggttaccccggtatgggcatgtaa

SEQ ID NO: 9387 - protein, 545 aa, Syntrophus aciditrophicus SB
MGAKLLQYDEEARKSILNGVNALADAVKVTLGPKGRNVIIDKSFGAPTVTKDGVTVAKEVELEDKFENMGAQMVREVASKTSDVAGDGTTTATILAQAIYREGAKTVAAGSNPMDVKRGIEKAVAAVVTELKNISKPTKDQKEIAQVGTISANNDETIGNIIAEAMGKVGKEGVITVEEAKGLETELEIVEGMQFDRGYLSPYFVTNPEKMEVSLEDALILIYEKKISGMKDLLPILEQIAKMGRPLLIIAEDIEGEALATLVVNKIRGTLHVAAVKAPGFGDRRKAMLEDIAILTGGTVISEDMGYKLENTRLEDLGRAKRIQIDKDNTTIIDGAGERAALEGRVKQIRAQIDETTSDYDREKLQERLAKLVGGVAVIKVGAATETEMKEKKARVEDALNATRAAVEEGIVPGGGVAYIRTLPILEALKLEGDEQVGVNIVRKALEEPLKMIAANAGMEGTIVVEKVKEQSGAFGFNARTEVYEDMIEAGVIDPTKVTRFALQNAASVASLMLTTQCMIAEKPEEKGAGMPGMPPGGGYPGMGM

SEQ ID NO: 9388 - DNA, 1644 bp, Anaeromyxobacter dehalogenans 2CP-C
  CDS (1)..(1644): transl_table=11
atggcagccaaggaaatcgtcttcgatcagaaggcccgcgacgcgatcctcaagggcgtgaacacgctcgccgacgcggtgaaggtgaccctcgggccgaagggccggaacgtggtcatcgagaagagcttcggctccccgaccatcaccaaggacggcgtgacggtcgcgaaggagatcgagctcgagaacaagttcgagaacatgggcgcgcagatggtgaaggaggtcgcctccaagacctccgacgtggccggcgacggcaccaccaccgcgaccgtgctcgcccaggccatctaccgcgagggctcgaagctcgtcgcggccggccacaacccgatggacgtgaagcgcggcatcgacaaggccgtcgaggcgatcgtcggcgagctgaagaagctctccaagccgaccaaggaccacaaggagatcgcccaggtcggcatcatctcggccaacggcgacaccaccatcggcaacatcatcgccgaggcgatggagaaggtgggcaaggagggcgtcatcaccgtcgaggaggccaagggcctcgagacgacgctcgacgtggtcgagggcatgcagttcgaccgcggctacctctcgccgtacttcgtgacggacgcggagcgcatggaggcggtcctcgaggacgcctacatcctcatcaacgagaagaagatctcgaacatgaaggacctgctcccgctgctggagcagatcgcgcgctcgggcaagccgctcatcatcgtggccgaggaggtcgagggtgaggcgctggcgacgctcgtcgtcaacaagctgcgcggcacgctgcacgtgtgcgcggtgaaggcccccggcttcggcgaccgccgcaaggccatgctggaggacatcgcgatcctcaccggcggccgcatgatcgccgaggagctcggcctcaagctcgagcaggtcacgctgaaggacctcggccgcgccaagcgcgtcacggtggacaaggacaacaccaccatcgtggacggcgccggcaagaaggaggacatcgaggcccgggtgaagaccatccgcgcgcagatcgaggagaccacctccgactacgaccgcgagaagctccaggagcgcctcgcgaagctggtcggcggcgtcgcggtcatcaacgtcggcgcggccaccgagaccgagatgaaggagaagaaggcccgcgtcgaggacgcgctccacgcgacccgcgcggccgtcgaggagggcatcgtccccggcggcggcgtggcctacctgcgctgcgtgaaggcgctcgagggcgtgaaggtgaacgagggcgagaaggtcggcctcgacatcgtccgccgcgccatcgaggagccgctccgccagatctccggcaacggcggctacgagggctcgatcgtggtgaacaaggtgaaggaggcgaaggaggccgcgttcggcttcaacgccgccacgggcgagtacgaggatctggtgaaggccggcgtcatcgacccgaccaaggtctcgcgctccgcgctgcagaacgcggcgtcggtcgcctcgctgatgctcaccaccatggcgatggtcgcggagaagccgaaggaggagtctgcggcccccgccggcggcggcatgggcggcatgggcgggatgggcggcatgatgtag

SEQ ID NO: 9389 - protein, 547 aa, Anaeromyxobacter dehalogenans 2CP-C
MAAKEIVFDQKARDAILKGVNTLADAVKVTLGPKGRNVVIEKSFGSPTITKDGVTVAKEIELENKFENMGAQMVKEVASKTSDVAGDGTTTATVLAQAIYREGSKLVAAGHNPMDVKRGIDKAVEAIVGELKKLSKPTKDHKEIAQVGIISANGDTTIGNIIAEAMEKVGKEGVITVEEAKGLETTLDVVEGMQFDRGYLSPYFVTDAERMEAVLEDAYILINEKKISNMKDLLPLLEQIARSGKPLIIVAEEVEGEALATLVVNKLRGTLHVCAVKAPGFGDRRKAMLEDIAILTGGRMIAEELGLKLEQVTLKDLGRAKRVTVDKDNTTIVDGAGKKEDIEARVKTIRAQIEETTSDYDREKLQERLAKLVGGVAVINVGAATETEMKEKKARVEDALHATRAAVEEGIVPGGGVAYLRCVKALEGVKVNEGEKVGLDIVRRAIEEPLRQISGNGGYEGSIVVNKVKEAKEAAFGFNAATGEYEDLVKAGVIDPTKVSRSALQNAASVASLMLTTMAMVAEKPKEESAAPAGGGMGGMGGMGGMM

SEQ ID NO: 9390 - DNA, 1629 bp, Synechococcus sp. JA-3-3Ab
  CDS (1)..(1629): transl_table=11
atggcaaaacagattctgtttagggaagaggcccgcaaggcattggagcagggcatcaatcaactggcggatgcagttaaggttaccattggcccgaaagggcgcaacgtccttctggagaaaaagttcggcgccccccagatcgtcaacgacggggtcaccattgccaaggaaattgaattggcggatcctttggagaacaccggtgcccagctgatgcgggaagtggccaccaagaccaacgacgtggccggagacggcaccaccacagccaccattttggcccagagcatggtgcaggaggggttgaagaatatttcggcaggagccaaccctgtagctttgcggcgcggcatcgagaagaccactgcctacctggtggagcaaattgccgctcaagctaagcctgtggaaggccgcaagaacatcgccgaggtagctaccatctctgccggcaacgacccggaagtgggggagatgatcgccagggccatggatgccgtggggcgagatggggtgattacggtcgaagagtccaagtccttggaaacccaattggaagttgtcgaagggatgcagttcgaccgcggctacatttccccctatttcgtcaccgatacggagcggatggtggccgaatacgaaaatgcctatctgctcatcaccagtaataagctctccaatcttcaggatctggtgcctgttctggagcgggtagcgcgagagggacggccgctgctggtgattgccgaggatgtggagggagaagccctggccactttggtggtcaacaagctgcggggggtgttgaacgcggtggcggtgaaggcgccggcttttggggatcggcgcaaggccatgttggaggacattgccatcctcaccggtgggcagctcatctccgaggatatcggcatcaagctggagaacgtcaccctggacatgatgggggtggcccgcaagattaccgttaccaaagacaagaccaccattgtgaccgacggcagcaccaaggcggcggtggagaaacgggtggcccagatccgcaagcaactggagaccaccgattccgagtacgaccgcgagaagctgcaggagcggatcgccaagctggccggtggggtggcggtgatcaaggtgggagctgccactgaaacggagcttaaagaccgcaagctgcgcattgaagatgccctcaacgccacgcgggcggcagtggaggaagggatcgtccccggtggcggggcaacgttgctgcacctttccaaagggatcccggccttcaaggccaacttgaacgcagaagaacaggtgggggcggacattgtctgccgggctttgcaggcgccgctctatcagattgcccacaacgctggcctggaggggtcggtggtggtggaaaaggttctggagaaggagatgccctttggctttgatgccctgacgggcacctatgtggacatgtttgctcaggggatcgtggatccggccaaggtcgtacgctcggcgctgcagaatgccgcttccatcgccgccatgtacctcaccaccgaagccattgtggtggaaaagcccgaacccaagacgaaaacaggagcgagccgctccggcggtgcggggatgatgtaa

SEQ ID NO: 9391 - protein, 542 aa, Synechococcus sp. JA-3-3Ab
MAKQILFREEARKALEQGINQLADAVKVTIGPKGRNVLLEKKFGAPQIVNDGVTIAKEIELADPLENTGAQLMREVATKTNDVAGDGTTTATILAQSMVQEGLKNISAGANPVALRRGIEKTTAYLVEQIAAQAKPVEGRKNIAEVATISAGNDPEVGEMIARAMDAVGRDGVITVEESKSLETQLEVVEGMQFDRGYISPYFVTDTERMVAEYENAYLLITSNKLSNLQDLVPVLERVAREGRPLLVIAEDVEGEALATLVVNKLRGVLNAVAVKAPAFGDRRKAMLEDIAILTGGQLISEDIGIKLENVTLDMMGVARKITVTKDKTTIVTDGSTKAAVEKRVAQIRKQLETTDSEYDREKLQERIAKLAGGVAVIKVGAATETELKDRKLRIEDALNATRAAVEEGIVPGGGATLLHLSKGIPAFKANLNAEEQVGADIVCRALQAPLYQIAHNAGLEGSVVVEKVLEKEMPFGFDALTGTYVDMFAQGIVDPAKVVRSALQNAASIAAMYLTTEAIVVEKPEPKTKTGASRSGGAGMM

SEQ ID NO: 9392 - DNA, 1635 bp, Synechococcus sp. JA-3-3Ab
  CDS (1)..(1635): transl_table=11
atggccaagtcgatcatttttagcgaagaagcccgtcgtgcccttgaacacggcatggacattttggcggaagctgtagccgttactctcggccccaaagggcgcaacgtcgtcctggagaagaagtttggcgcaccccaaattgttaacgatggggtaaccatcgccaaagagatcgagctggaagaccacattgaaaacactggcgtctccttgatccgtcaggcggcttccaagaccaatgacacggctggggacggcaccaccaccgccaccgtcctggcccacgccatggttaaagaagggctgaaaaacgtggccgccggcgccaacccgattgccctcaagcgcggcatcgacaaagccgtgaagttcctggtggacaagatcgccgaacatgcccgcccggtggaagactccaaagccattgcccaggtggcggccatttccgccggcaacgatgaggaagtgggccgcatgatcgccgaggccatggacaaagtgggccgcgaaggggtgatctccttggaagaaggcaagtccatgaccactgagctggaagtgacggaggggatgcgctttgacaaaggctacatctccccctacttcgtcaccgacacggagcggatggaggcggttctggaaaacccctacatcctgattaccgataagaaaatcaccctggtacaagacctggtgccggtgctggagcaagtggcccgcgccggtcgtccgctgctgatcatcgccgaagacatcgagaaagaagccctggccactctggtggtgaacaagctgcggggcgtgctgagcgtggtggcggtgaaagcgcctggctttggggatcgccgtaaggccatgctggaagacatcgccatcctcactggcggtgaggtcatcagcgaagagcgcggcctgaagctggagaacgcccgtctcgactccttcggctcggcccgtcgcgtcacggtaaccaaagaccacaccaccatcgtggccgaaggcaacgaagcggctgtcaaagcccgctgtgagcaaatccgtcgccaaattgaagaaaccgactccacctacgacaaagaaaaactgcaagagcgcctggccaagctctccggcggtgtggcggtgatcaaagtgggcgcggccaccgaaactgagatgaaggatcgcaagctgcgcctggaggacgccatcaacgccaccaaggcggcggtggaagaggggatcgtccccggcggcggcactaccctggcgcacctgatgccggcggtaacggagtgggcgcaggccaacttgtccggcgatgagctggtaggggccatgctggttgcccgcgcgctgggcgctccgctgcgccgcattgccgagaatgccggccagaacggctcgatcgtgctggagcgggtgaaagagaaacccttcacggtgggttacgacgcccagaacgacgcctatgtggatatgtttgaggcgggcatcgttgacccggccaaagtcacccgctctgccctgcaaaacgctgcctcgattgccagcatggtgctcaccaccgaggccatcgtggtagacaagccggagcccaagagcaacaagcccgctggcggtggcggcggcgtggatgactacgactactaa

SEQ ID NO: 9393 - protein, 544 aa, Synechococcus sp. JA-3-3Ab
MAKSIIFSEEARRALEHGMDILAEAVAVTLGPKGRNVVLEKKFGAPQIVNDGVTIAKEIELEDHIENTGVSLIRQAASKTNDTAGDGTTTATVLAHAMVKEGLKNVAAGANPIALKRGIDKAVKFLVDKIAEHARPVEDSKAIAQVAAISAGNDEEVGRMIAEAMDKVGREGVISLEEGKSMTTELEVTEGMRFDKGYISPYFVTDTERMEAVLENPYILITDKKITLVQDLVPVLEQVARAGRPLLIIAEDIEKEALATLVVNKLRGVLSVVAVKAPGFGDRRKAMLEDIAILTGGEVISEERGLKLENARLDSFGSARRVTVTKDHTTIVAEGNEAAVKARCEQIRRQIEETDSTYDKEKLQERLAKLSGGVAVIKVGAATETEMKDRKLRLEDAINATKAAVEEGIVPGGGTTLAHLMPAVTEWAQANLSGDELVGAMLVARALGAPLRRIAENAGQNGSIVLERVKEKPFTVGYDAQNDAYVDMFEAGIVDPAKVTRSALQNAASIASMVLTTEAIVVDKPEPKSNKPAGGGGGVDDYDY

SEQ ID NO: 9394 - DNA, 1635 bp, Synechococcus sp. JA-2-3B'a(2-13)
  CDS (1)..(1635): transl_table=11
atggccaaatcaatcatcttcagtgaagaagcccgccgcgctctagagcacggcatggatattttggcagaagccgtagccgttaccctgggtcccaaagggcgcaacgtcgtgctggagaagaagtttggcgccccccaaatcatcaacgacggggtaaccattgccaaagaaatcgagctggaagaccatattgagaacacaggcgtttccttgatccggcaggcggcttccaagaccaatgacacggctggggatggcaccaccacggccacggtcttggctcacgccatggtgaaagaaggtctgaaaaacgtggctgccggcgccaacccgattgccctaaagcgagggatcgacaaggcggtgaagtttttggtagacaaaatcgccgaacatgcccgcccggtcgaagattccaaagccattgcccaggtggcggccatttccgccggtaacgatgaagaagtgggccgtatgattgccgaggccatggacaaggtgggccgcgaaggggtgatctccctggaagaaggcaagtccatgaccaccgagctggaagtgacggaagggatgcgcttcgacaagggctacatctccccttacttcgtcaccgataccgagcggatggaagcggttctggaaaacccctacatcctcatcaccgataagaagatcaccctggtgcaagacctggtaccggttctggagcaggtggcccgcgccggtcgtcctctgctgatcatcgccgaagacatcgagaaagaagcgctggctaccctggtggtgaacaagctgcggggtgtgctgagcgtggtagcggtaaaagcccctggcttcggggatcgccgcaaggccatgctggaagacatcgccatcctgaccggcggtgaggtgatcagcgaagagcgaggcctgaagctggagaacgctcgcctcgattccttcggcactgcccgtcgcgtcacggtgaccaaggacaacaccaccatcgtggcggaaggcaacgaagcggctgtgaaagcccgttgcgagcaaattcgtcgccaaattgaggaaaccgactccacctacgacaaagaaaaactgcaagagcgcctggccaagctctccggcggtgtggcagtgatcaaagtgggcgcggccactgaaaccgagatgaaagaccgcaagttgcgcctggaagatgccatcaacgccaccaaagcggcggtagaagaagggatcgttcccggcggcggtaccaccttggcacacctgatcccagtggtaaccgagtgggcgcaagccaacctgtccggcgatgaactggtgggggccaacctggtcgcccgcgctctgggcgctccgctgcgccgcattgctgagaacgccggccaaaacggctccattgtgctggagcgggtgaaagataagcccttcaacaccggctacgatgcccagaacgacgccttcgtggatatgttcgaggcgggcattgtagacccggccaaggttacccgttctgccctgcaaaacgccgcttccattgcggggatggtgctgaccactgaagcgatcgtggtggacaagcccgagcccaaaaccaacacgccggcaagcagcggcagcggcatgagtgactacgactactaa

SEQ ID NO: 9395 - protein, 544 aa, Synechococcus sp. JA-2-3B'a(2-13)
MAKSIIFSEEARRALEHGMDILAEAVAVTLGPKGRNVVLEKKFGAPQIINDGVTIAKEIELEDHIENTGVSLIRQAASKTNDTAGDGTTTATVLAHAMVKEGLKNVAAGANPIALKRGIDKAVKFLVDKIAEHARPVEDSKAIAQVAAISAGNDEEVGRMIAEAMDKVGREGVISLEEGKSMTTELEVTEGMRFDKGYISPYFVTDTERMEAVLENPYILITDKKITLVQDLVPVLEQVARAGRPLLIIAEDIEKEALATLVVNKLRGVLSVVAVKAPGFGDRRKAMLEDIAILTGGEVISEERGLKLENARLDSFGTARRVTVTKDNTTIVAEGNEAAVKARCEQIRRQIEETDSTYDKEKLQERLAKLSGGVAVIKVGAATETEMKDRKLRLEDAINATKAAVEEGIVPGGGTTLAHLIPVVTEWAQANLSGDELVGANLVARALGAPLRRIAENAGQNGSIVLERVKDKPFNTGYDAQNDAFVDMFEAGIVDPAKVTRSALQNAASIAGMVLTTEAIVVDKPEPKTNTPASSGSGMSDYDY

SEQ ID NO: 9396 - DNA, 1620 bp, Synechococcus sp. JA-2-3B'a(2-13)
  CDS (1)..(1620): transl_table=11
atggcaaagcggattctgtttagagaagaggcccgcaaggcattggagcagggcatcaaccaactggcggatgcaatcaaggttacgattggccccaaaggacgcaacgtggtcttggagaagaagtttggtgccccccaaatcgtcaacgacggggtcacgattgccaaggaaattgagttggccgatcctttggagaacacaggcgcccagttgatgcgggaagtggcctctaagaccaacgatgtggccggagatggtaccaccacagccaccatcctggcccaaagcatggtgcgggaagggctcaaaaacatctcggcgggcgccaaccctgtggctctgcggcgcggcattgaaaagaccactgcctacttggtggagcaaattgcagctcatgccaagcctgtggaaggccgtaaaaccatcgccgaagtagccactatctctgccggcaatgacagcgaagtgggagagatgatcgccaaggccatggatgctgtagggcgagatggggtgatcacggtcgaagaatccaagtcgctggaaaccgagttggacgtggtggaggggatgcagtttgaccgcggctacatttccccctatttcgtcacagactcggagcggatggtggccgagtatgagaatgcttatctgctgattaccagcaacaagatctccagcctgcaagatctggtgcccatcctagagcgggtggcccgcgagggtcggcctcttctggtcattgcggaggatgtggagggagaggctctggccacattggtggtgaaccgcctgcggggggtactcaatgcggtggcggtcaaggctccggcttttggggatcggcgcaaagccatgctggaagatatcgccattctcaccggcgggcagctcatctctgaggatgtgggcatcaagttggataaggtcactctggacatgatgggggtagcccgcaagatcaccgtcaccaaagacaagaccaccatcgtgaccgatggcagcaccaaagcggcggtggaaaagcgagtggctcaaattcgcaagcaactggaaaccaccgattccgagtacgaccgcgaaaaattgcaagaacgcatcgccaagttagccgggggagtggcggtgatcaaagtgggggctgccactgaaaccgaactcaaagatcgcaagctgcgcattgaggatgccctgaatgccacccgagctgcggtggaagaagggatcgtccctggcggcggggcgacgctattgcacctctccaaagggatcccggctttcaaggccaagttgaatgccgaagaacaggtgggggcagaaattgtttaccgagccttgcaggcccctctctttcagattgcccacaatgccggtctggaagggtcagtggtggtggaaaaggttttggagaaggagatgccctttggcttcgatgccctgaccggaacctatgtggatatgtttgcccaggggatcgtggatccggccaaagtggtgcgctcagcgctgcaaaacgcggcttccatagccggaatgtacctcacaaccgaagcgattgtggtggaaaagcctgagcccaagccggcggctggctctgcacctaaggggatgatgtag

SEQ ID NO: 9397 - protein, 539 aa, Synechococcus sp. JA-2-3B'a(2-13)
MAKRILFREEARKALEQGINQLADAIKVTIGPKGRNVVLEKKFGAPQIVNDGVTIAKEIELADPLENTGAQLMREVASKTNDVAGDGTTTATILAQSMVREGLKNISAGANPVALRRGIEKTTAYLVEQIAAHAKPVEGRKTIAEVATISAGNDSEVGEMIAKAMDAVGRDGVITVEESKSLETELDVVEGMQFDRGYISPYFVTDSERMVAEYENAYLLITSNKISSLQDLVPILERVAREGRPLLVIAEDVEGEALATLVVNRLRGVLNAVAVKAPAFGDRRKAMLEDIAILTGGQLISEDVGIKLDKVTLDMMGVARKITVTKDKTTIVTDGSTKAAVEKRVAQIRKQLETTDSEYDREKLQERIAKLAGGVAVIKVGAATETELKDRKLRIEDALNATRAAVEEGIVPGGGATLLHLSKGIPAFKAKLNAEEQVGAEIVYRALQAPLFQIAHNAGLEGSVVVEKVLEKEMPFGFDALTGTYVDMFAQGIVDPAKVVRSALQNAASIAGMYLTTEAIVVEKPEPKPAAGSAPKGMM

SEQ ID NO: 9398 - DNA, 1635 bp, Methylobacillus flagellatus KT
  CDS (1)..(1635): transl_table=11
atggctgcaaaacaagtgatttttggtgatgacgcccgcgccaagattgtcaatggcgtgaacattctggcaaatgccgtcaaggtaaccctgggtcccaagggccgcaacgtcgttctggagcgctccttcggctccccgactgtcaccaaggacggcgtatctgtcgccaaggaaatcgagctgagcgacaagctggaaaatatgggtgcgcagctggtgaaagaagtcgcttccaagaccaatgacaatgccggcgacggtaccactactgctaccgttctggcacaagccatcgtccgcgaaggcttcaagtatgttgctgcaggcttcaacccgactgacctcaagcgcggtatcgacaaggcagttgccgaaatcgtgaacgagatcaaggccatcgccaagcccaccaccaccagcaaggaaattgcccaggttggctccatttccgccaattccgacgccgatatcggccagatcattgccgatgcgatggacaaggtaggcaaggaaggtgtgattaccgttgaagacggttccggcctgcaaaacgagctggatgtcgtggaaggcatgcaattcgaccgtggttacctgtctccatacttcatcaacaacccagagcgccagatcgccctgctggaaaacccattcgtgttgttgtacgacaagaagatcagcaacatccgcgacctgctgcctactctggaacaagttgccaaggctggtcgtcccctgctgatcatcgctgaagatgtggaaggtgaagcactggccaccctggtggtcaacaacatccgcggcatcctgaaggccgtggctgtgaaggcacctggcttcggtgaccggcgcaaggccatgctggaagatatcgccatcttgactggtggtaccgtgattgccgaagaagtcggcctgagcctggagaaggtgacactggaaaacctcggccaagccaagcgtgttgaaatcggcaaggaaaacaccaccatcatcgatggtgctggctcagaaaacaacatcaaggtacgtatcgaccagatcaagaagcagatcgaagacgctaccagcgactatgatcgcgaaaaactgcaggaacgcgtagccaagttggccggcggtgttgccgtgatcaaggttggcgctgccaccgaaaccgaaatgaaggaaaagaaggctcgcgttgaggatgctttacatgctacacgtgctgccgttgaagaaggcatcgtgcctggcggtggcgttgccctgttgcgcgcccgttcttccatcaaggagctgaagggcgacaacccagatcaagacgctggcatcaagatcgtgttgcgcgcgatcgaagagcctctgcgccagatcgtcgccaacgctggtgacgagccatccgttgtggtcaacaaagtactggaaggtactggcaactacggttacaacgcttccaatggcacctacggtgacctggttgagctgggtgttctggatccagccaaggtaacgcggtccgcactgcagaacgctgcgtctgtagcttccttgatcctgactaccgatgcattggtagcagagctgcctaaggaagaagctgcgccagccatgcctgacgcaggcggcatgggtggcatgggcttctaa

SEQ ID NO: 9399 - protein, 544 aa, Methylobacillus flagellatus KT
MAAKQVIFGDDARAKIVNGVNILANAVKVTLGPKGRNVVLERSFGSPTVTKDGVSVAKEIELSDKLENMGAQLVKEVASKTNDNAGDGTTTATVLAQAIVREGFKYVAAGFNPTDLKRGIDKAVAEIVNEIKAIAKPTTTSKEIAQVGSISANSDADIGQIIADAMDKVGKEGVITVEDGSGLQNELDVVEGMQFDRGYLSPYFINNPERQIALLENPFVLLYDKKISNIRDLLPTLEQVAKAGRPLLIIAEDVEGEALATLVVNNIRGILKAVAVKAPGFGDRRKAMLEDIAILTGGTVIAEEVGLSLEKVTLENLGQAKRVEIGKENTTIIDGAGSENNIKVRIDQIKKQIEDATSDYDREKLQERVAKLAGGVAVIKVGAATETEMKEKKARVEDALHATRAAVEEGIVPGGGVALLRARSSIKELKGDNPDQDAGIKIVLRAIEEPLRQIVANAGDEPSVVVNKVLEGTGNYGYNASNGTYGDLVELGVLDPAKVTRSALQNAASVASLILTTDALVAELPKEEAAPAMPDAGGMGGMGF

SEQ ID NO: 9400 - DNA, 1644 bp, Rhodopseudomonas palustris BisB5
  CDS (1)..(1644): transl_table=11
atgtccgctaaagaagtgaaattcggcgtcgacgcccgcgaccgcatgatgcgcggcgtggacattctcgccaatgcggtgaaggtcacgctcggcccgaagggccgcaacgtcgtgctcgacaagtcgttcggcgctccgcgtatcaccaaggacggcgtcaccgtcgccaaggagatcgagctcgacgacaagttcgagaacatgggcgcgcagatggtgcgcgaagtcgcctcgaagtcggccgacgccgccggtgacggcaccaccaccgcgaccgtactggcccaggcgatcgtccgcgaaggcggcaaggccgtcgccgccggcatgaacccgatggatctgaagcgtggcatcgacctcgcggtcgaagcggtcgtcgcggatctcgtcaagaactccaagaaggtcacctcgaacgaggagatcgcccaggtcggcacgatttcggccaatggcgacgtcgagatcggcaagttcctgtcggacgcgatgaagaaggtcggcaacgagggtgtcatcaccgtcgaggaagccaagtcgctcgagaccgaactcgacgtcgtcgagggcatgcagttcgatcgcggctacatctcgccctacttcgtcaccaacgccgacaagatgcgcgttgaattcgacgacgcctacatcctgatcaacgagaagaagctctccaacctcaacgagctgctgccgctgctcgaagccgtcgtccagaccggcaagccgctggtgatcgtcgctgaggacgtcgaaggcgaagcgctcgccaccctcgtcgtcaaccgcctgcgcggcggcctcaaggtcgcggccgtcaaggctccgggcttcggcgatcgccgcaaggccatgctgcaggacatcgcgatcctgaccggcggccaggcgatctcggaagacctcggcatcaagatggagaacgtcacgctccagatgctcggcaaggccaagaaggtgatgatcgacaaggaaaacaccacgatcgtcaacggcgccggcaagaaggccgacatcgaagcccgcgtcgcgcagatcaaggcgcagatcgaggaaaccacctcggactacgaccgcgagaagctgcaggagcgtctggccaagctcgccggcggcgtcgcggtgatccgcgtcggcggcgcgaccgagatcgaagtgaaggagcgcaaggatcgcgttgatgacgcgatgcacgccacccgcgctgcggtcgaggaaggcatcgtcccgggcggcggcgtcgctctgctgcgcgcctccgagcagctcaagcgcatcaagacccagaacgacgaccagaagaccggcgtcgagatcgtgcgcaaggcgctctccgccccggcccgccagatcgccatcaacgccggcgaagacggctcggtgatcgtcggcaaggtgctcgagaaggaccagtacaactacggcttcgacagccagactggcgaatacggcgacctggtcaagaagggcatcatcgacccgaccaaggtggtccgcaccgcgatccagaacgcagcctccgttgccgcgctgctgatcaccaccgaagcgatggtggccgagctgccgaagaagggtggcgctgccggtggcatgcccccgggcggcggcggcatgggcggcatggacttctga

SEQ ID NO: 9401 - protein, 547 aa, Rhodopseudomonas palustris BisB5
MSAKEVKFGVDARDRMMRGVDILANAVKVTLGPKGRNVVLDKSFGAPRITKDGVTVAKEIELDDKFENMGAQMVREVASKSADAAGDGTTTATVLAQAIVREGGKAVAAGMNPMDLKRGIDLAVEAVVADLVKNSKKVTSNEEIAQVGTISANGDVEIGKFLSDAMKKVGNEGVITVEEAKSLETELDVVEGMQFDRGYISPYFVTNADKMRVEFDDAYILINEKKLSNLNELLPLLEAVVQTGKPLVIVAEDVEGEALATLVVNRLRGGLKVAAVKAPGFGDRRKAMLQDIAILTGGQAISEDLGIKMENVTLQMLGKAKKVMIDKENTTIVNGAGKKADIEARVAQIKAQIEETTSDYDREKLQERLAKLAGGVAVIRVGGATEIEVKERKDRVDDAMHATRAAVEEGIVPGGGVALLRASEQLKRIKTQNDDQKTGVEIVRKALSAPARQIAINAGEDGSVIVGKVLEKDQYNYGFDSQTGEYGDLVKKGIIDPTKVVRTAIQNAASVAALLITTEAMVAELPKKGGAAGGMPPGGGGMGGMDF

SEQ ID NO: 9402 - DNA, 1647 bp, Lawsonia intracellularis PHE/MN1-00
  CDS (1)..(1647): transl_table=11
atggcttctaaagaaatcctttttgatgctaaagcccgtgaaaaactttcacgaggtgtagataaacttgcaaatgctgttaaagtaacacttggacctaaaggccgtaatgtcgttattgaaaagtcttttggttccccagttattacaaaagatggtgtatctgttgcaaaagaaattgaacttgaagataagtttgaaaatatgggcgctcaaatggttaaagaagtagcttccaaaactagcgatattgctggtgatggaactacaacagcaacagtccttgcacaagctatttatcgtgaaggtgtaaaacttgtagcagctggtcgtaatcctatggccattaaacgtggcatagataaagctgttgttgctgttactaaagaactaagcgacattacaaagcctactcgtgaccaaaaagaaatagctcaagttggaaccatttctgcaaactctgatacaacaataggtaatatcatagctgaagctatggctaaagttggaaaagaaggtgttatcacagttgaggaagctaaaggtcttgaaactacattagatgtggttgaaggaatgaagtttgaccgtggctacctctctccatactttgtaactaatcctgagaaaatggtttgtgaacttgataacccttatatcctttgtaatgagaaaaagattactagcatgaaagacatgctaccaatcttagaacaagttgctaaagtaaaccgtccactccttattattgctgaagacgtagaaggtgaagcacttgcaacacttgtagtcaataagctccgtggagcactccaagttgtagccgtaaaagctcctggttttggtgaacgccgtaaagctatgcttgaagatattgctatccttactggaggagaagcaatatttgaagatcgtggtataaagcttgaaaatgtaagcttgtcttctttaggaacagctaaacgtgtagttattgacaaagaaaatactactatcgttgatggtgctggaaaatcagaagatattaaagctcgagttaaacaaattcgtgcacaaattgaagaaacaagctcagattatgatcgtgaaaaacttcaagaacgtcttgcaaaacttgttggtggagtagctgttatccatgttggagctgctactgaaactgaaatgaaagagaagaaggatcgtgtagaagatgctctaaatgcaacaagagctgcggttgaagaaggtattgtccctggtggtggtactgcttttgtccgctccattaaagtccttgatgatattaaacctgctgatgatgatgaacttgctggacttaatatcatccgtcgttctcttgaagagcctttacgtcaaattgctgcaaatgctggctatgaaggttctattgttgtagaaaaagttcgtgaagcaaaagatggttttggatttaatgctgcatcaggagaatatgaagaccttattaaagctggtgtcattgatcctaaaaaagttacacgtattgcattacaaaatgcagcatcagtagcctccttacttctaactacagaatgcgctattgctgaaaaaccagaacctaaaaaagatatgcctatgcctggcggtggtatgggtggtatgggtggtatggacggtatgtactag

SEQ ID NO: 9403 - protein, 548 aa, Lawsonia intracellularis PHE/MN1-00
MASKEILFDAKAREKLSRGVDKLANAVKVTLGPKGRNVVIEKSFGSPVITKDGVSVAKEIELEDKFENMGAQMVKEVASKTSDIAGDGTTTATVLAQAIYREGVKLVAAGRNPMAIKRGIDKAVVAVTKELSDITKPTRDQKEIAQVGTISANSDTTIGNIIAEAMAKVGKEGVITVEEAKGLETTLDVVEGMKFDRGYLSPYFVTNPEKMVCELDNPYILCNEKKITSMKDMLPILEQVAKVNRPLLIIAEDVEGEALATLVVNKLRGALQVVAVKAPGFGERRKAMLEDIAILTGGEAIFEDRGIKLENVSLSSLGTAKRVVIDKENTTIVDGAGKSEDIKARVKQIRAQIEETSSDYDREKLQERLAKLVGGVAVIHVGAATETEMKEKKDRVEDALNATRAAVEEGIVPGGGTAFVRSIKVLDDIKPADDDELAGLNIIRRSLEEPLRQIAANAGYEGSIVVEKVREAKDGFGFNAASGEYEDLIKAGVIDPKKVTRIALQNAASVASLLLTTECAIAEKPEPKKDMPMPGGGMGGMGGMDGMY

SEQ ID NO: 9404 - DNA, 1644 bp, Ruegeria sp. TM1040
  CDS (1)..(1644): transl_table=11
atggctgctaaggacgtcaaattcgacaccgatgcccgcaaccgtatgctgaagggtgtcaacaccctcgcagacgccgttaaagtgaccctcggccccaaaggccgcaacgtggttctcgaaaaatccttcggcgcaccgcgcatcaccaaagacggtgtgtctgttgccaaggaaatcgaactggaagacaagttcgagaacatgggcgcacagatggtgaaggaagttgcttcccgcaccaacgacgaagccggtgacggcaccaccaccgcgaccgttctggctcagtccatcgttcgcgaaggtctgaagcaggttgcagcgggcctgaacccgatggacctcaagcgtggcatcgatctggcaaccgacaaagttgtcgaagcgatcaaagccatggcgcgcgaagtcaaagactccgacgaagttgctcaggtcggcaccatctccgcgaacggcgaagctgaaatcggccgccagatcgcggacgcgatgcagaaagtcggcaacgacggcgtcatcaccgttgaagaaaacaaaggtctggaaaccgagaccgatgttgtcgaaggcatgcagttcgaccgcggctacctgtcgccctacttcgtgaccaacgccgacaagatgaccgcagagctcgaagactgcctcatcctgttgcacgagaagaaactctcctccctgcagccgatggttccgctccttgagcaggtgatccaatcccaaaagccgctcctcatcatcgctgaggacgtcgaaggcgaagcgctggcaactctggttgtgaacaaactgcgtggcggcctgaaaatcgcagccgtgaaggcacctggcttcggcgatcgccgcaaggccatgctgcaggacatcgcgatcctgaccggcggtcaagtgatctccgaagacctcggcatgaagctcgagtccgtgaccatggacatgcttggcaccgccaagaaaatccagatcaccaaagacgagaccaccatcgttgacggtgcgggcgagaaagcagagatcgaagcacgtgttgctcagatccgcgctcagatcgaagaaaccacttccgactacgaccgtgagaagctgcaagagcgcgttgccaaactggcaggcggtgttgccgtgatccgcgtcggcggcatgaccgaagtcgaagtgaaagagcgcaaagaccgtgtggacgatgctctgaacgcaacccgcgcagctgtgcaggaaggcgtgatcgtcggtggtggtgttgctctggttcaggctggcaagtccctcgaaggtctcaccggtgtcaacgcagaccagaacgcaggcatcgcaatcgtgcgccgcgcgctcgaagcaccgctgcgtcagatcgctgagaacgcaggcgtcgacggcgccgtggttgcaggcaagatccgtgagtccgaagacaagaacttcggcttcaacgctcagaccgaagaatatggcgacatgttctcctttggtgtgatcgatccggccaaagtgacccgcaccgcgctggaagacgcagcctccatcgccggtctgctgatcacaaccgaagccatggttgcagacaagcccgccaaagaaggcgcggcacctgcaggtggcatgcccgacatgggcggcatgggcggcatgatgtaa

SEQ ID NO: 9405 - protein, 547 aa, Ruegeria sp. TM1040
MAAKDVKFDTDARNRMLKGVNTLADAVKVTLGPKGRNVVLEKSFGAPRITKDGVSVAKEIELEDKFENMGAQMVKEVASRTNDEAGDGTTTATVLAQSIVREGLKQVAAGLNPMDLKRGIDLATDKVVEAIKAMAREVKDSDEVAQVGTISANGEAEIGRQIADAMQKVGNDGVITVEENKGLETETDVVEGMQFDRGYLSPYFVTNADKMTAELEDCLILLHEKKLSSLQPMVPLLEQVIQSQKPLLIIAEDVEGEALATLVVNKLRGGLKIAAVKAPGFGDRRKAMLQDIAILTGGQVISEDLGMKLESVTMDMLGTAKKIQITKDETTIVDGAGEKAEIEARVAQIRAQIEETTSDYDREKLQERVAKLAGGVAVIRVGGMTEVEVKERKDRVDDALNATRAAVQEGVIVGGGVALVQAGKSLEGLTGVNADQNAGIAIVRRALEAPLRQIAENAGVDGAVVAGKIRESEDKNFGFNAQTEEYGDMFSFGVIDPAKVTRTALEDAASIAGLLITTEAMVADKPAKEGAAPAGGMPDMGGMGGMM

SEQ ID NO: 9406 - DNA, 1650 bp, Myxococcus xanthus DK 1622
  CDS (1)..(1650): transl_table=11
atggcgaaggacattcttttcgacgtgcgcgcgcgtgaggccatcctccgcggcgtcaacatcctggccgacgcggtcaaggtcaccctgggccccaagggccgcaacgtcgtcatcgagaagagcttcggctccccgaccatcaccaaggacggtgtgacggtcgccaaggagatcgagctcgagaacaagttcgagaacatgggcgcgcagatggtcaaggaggttgcctccaagacgtctgacgtcgccggtgacggcaccaccacggccaccgtgctggcgcaggccatcttccgcgagggcgcgaagctggtcgccgcgggccacaacccgatggacatcaagcgcggcatcgacaaggccgtgggcgccatcgtcgccgagctgaagaagctggccaagccgaccaaggacaagaaggagattgcccaggtcggtaccatctccgccaacggtgacgagaccatcggcaccatcatcgcggacgcgatggagaaggtgggcaaggaaggcgtcatcaccgtcgaagaggccaagggcctggagacgacgctggacgtggtcgaaggcatgcagttcgaccgcggctacctgtccccgtacttcgtgacggacccggagcgcatggaggcggcgctcaacgacgcgctcatcctcatcaacgagaagaagatctcctcgatgaaggacctcctgcccatcctggagcaggttgcccgcgccggtaagcccctgctcatcatcgccgaggacatcgagggcgaggccctggccaccctggtggtcaacaagatccgcggcgtgctgaacgtgtgcgcggtgaaggcgccgggcttcggtgaccgccgcaaggccatgctcgaggacatcgccaccctgacgggcggccggatgatcgccgaggacctgggcatcaagctggacaccatcaccctccaggacctgggccgcgcgaagcgcatcacggtggacaaggacaacaccaccatcgtcgacggtgccggtggccagcaggagatcgaagcgcgcgtgaagcagatccgcgcccagatcgaggagacctccagcgactacgaccgcgagaagctccaggagcgcctggcgaagctcgtgggcggcgtggccgtcatcaacgtcggcgcggccaccgagacggagatgaaggagaagaaggcccgcgtcgaggacgcgctcaacgcgacccgcgcggccgtcgaagagggcgtcgtccctggcggcggcgtggcctacatccgctgcctcaaggcgctggacggcctgcagctgtccggcggtgagaagttcggcgtggacatcatccgccgcgccgtcgaggagcccctccgccagatcgtcggcaacggcggcctggagggcagcgtggtggtgaacaaggtcaaggagtcctccggtccgttcggcttcaacgccgccacgggcacctacgaggacctgctggccgccggcgtcatcgacccggccaaggtcagccgcaccgcgctgcagaacgcggcgtccgtgtcctcgctgatgctcaccaccgaggccatggtggcggagcgtccgaaggaggagaaggacctccccgccggcggtggcatgggcgggatgggtggcatgggcggtatgggcggtatgggcatgtag

SEQ ID NO: 9407 - protein, 549 aa, Myxococcus xanthus DK 1622
MAKDILFDVRAREAILRGVNILADAVKVTLGPKGRNVVIEKSFGSPTITKDGVTVAKEIELENKFENMGAQMVKEVASKTSDVAGDGTTTATVLAQAIFREGAKLVAAGHNPMDIKRGIDKAVGAIVAELKKLAKPTKDKKEIAQVGTISANGDETIGTIIADAMEKVGKEGVITVEEAKGLETTLDVVEGMQFDRGYLSPYFVTDPERMEAALNDALILINEKKISSMKDLLPILEQVARAGKPLLIIAEDIEGEALATLVVNKIRGVLNVCAVKAPGFGDRRKAMLEDIATLTGGRMIAEDLGIKLDTITLQDLGRAKRITVDKDNTTIVDGAGGQQEIEARVKQIRAQIEETSSDYDREKLQERLAKLVGGVAVINVGAATETEMKEKKARVEDALNATRAAVEEGVVPGGGVAYIRCLKALDGLQLSGGEKFGVDIIRRAVEEPLRQIVGNGGLEGSVVVNKVKESSGPFGFNAATGTYEDLLAAGVIDPAKVSRTALQNAASVSSLMLTTEAMVAERPKEEKDLPAGGGMGGMGGMGGMGGMGM

SEQ ID NO: 9408 - DNA, 1644 bp, Haemophilus somnus 129PT
  CDS (1)..(1644): transl_table=11
atgacagcaaaagacgtaaaatttggtaatgatgctcgtgtaaaaatgctagcaggtgtgaatgttttagcagatgcagtaaaagttactttaggacctaaaggtcgcaacgtaattttagacaaggcttttggtgcacctactattactaaagacggtgtgtctgtggctcgtgaaatcgaattggaagataaatttgaaaatatgggtgcacaaatggtgaaagaggttgcctctaaagcaaatgatgctgcaggcgatggtacaaccacagcaacagttttggctcaagcgattgtcagcgaaggtctaaaagcagtagctgccggaatgaatccgatggatttaaaacgtggaattgataaagcagttaatgcagtggttgaagagctaaaaattctttctaaaccttgtgaaacgtcaaaagaaattgaacaggttggtacaatttccgcaaacgccgatgaaactgtcggtaagcttattgctcaagcaatggaaaaagtcggtaaagagggggttattaccgttgaggacggttccggtctttcagatgaattggatgttgttgagggtatgcaatttgaccgcggttatttatcaccatacttcattaataaaccggaagccgcaactgttgaattagataatccgtttattcttcttgttgataaaaagatctctaatattcgtgaattattaccggtcctagaaggtgtagcgaaagctggtaaaccattgttaattatcgcagaagatgtggaaggcgaagcacttgcaacgttggttgttaacacgatgcgtggtattgttaaagttgctgcggttaaagccccgggatttggagatcgtcgtaaagcgatgttacaggatattgctatcttaactgcaggtactgtcatttcagaagaaatcggaatggagcttgaaaaagcaactcttgaagatttaggtcaagcaaaacgtgtggtgatcaacaaagataacacgactattattgacggtattggtgatgaagctcaaatcaaaggtcgagttgctcaaattcgtcaacaaattgaagaagcaacttccgattatgataaagaaaaactacaagagcgtgttgcaaaattagccggcggtgttgctgtaattaaggttggtgcggcaactgaagttgaaatgaaagagaaaaaagatcgtgttgatgatgcgttacatgcaacgcgtgccgctgttgaagaagggattgttgccggtggtggtgttgcattaatccgtgctgcaacaaaagttgcaacaacattaaaaggcgataacgaagatcaagatgtaggtatcaaacttgctttacgtgcaatggaagcaccacttcgtcaaatcgtaaccaatgcaggagaagaagcttctgtagttgcaagtgcggttaaaaatggtgaaggaaactttggttataatgctggtacggagcagtatggtgatatgatcgcaatgggaattttagatccgacaaaagtaactcgttccgcactacaatttgctgcatctatcgcaggattaatggttacaactgaatgtatggtagccgatctgccgaaagaggagaaagccgatctgacaggcggaatgggtggtatgggtggaatgggcggtatgatgtag

SEQ ID NO: 9409 - protein, 547 aa, Haemophilus somnus 129PT
MTAKDVKFGNDARVKMLAGVNVLADAVKVTLGPKGRNVILDKAFGAPTITKDGVSVAREIELEDKFENMGAQMVKEVASKANDAAGDGTTTATVLAQAIVSEGLKAVAAGMNPMDLKRGIDKAVNAVVEELKILSKPCETSKEIEQVGTISANADETVGKLIAQAMEKVGKEGVITVEDGSGLSDELDVVEGMQFDRGYLSPYFINKPEAATVELDNPFILLVDKKISNIRELLPVLEGVAKAGKPLLIIAEDVEGEALATLVVNTMRGIVKVAAVKAPGFGDRRKAMLQDIAILTAGTVISEEIGMELEKATLEDLGQAKRVVINKDNTTIIDGIGDEAQIKGRVAQIRQQIEEATSDYDKEKLQERVAKLAGGVAVIKVGAATEVEMKEKKDRVDDALHATRAAVEEGIVAGGGVALIRAATKVATTLKGDNEDQDVGIKLALRAMEAPLRQIVTNAGEEASVVASAVKNGEGNFGYNAGTEQYGDMIAMGILDPTKVTRSALQFAASIAGLMVTTECMVADLPKEEKADLTGGMGGMGGMGGMM

SEQ ID NO: 9410 - DNA, 1686 bp, Trichodesmium erythraeum IMS101
  CDS (1)..(1686): transl_table=11
atggctaaaattgtagaatttgatgataagtccagacgctctctagaacgaggtatcaatactctagctgatgcggtcagaattactatgggcccaaagggtagaaatgtattactagagaaaaaatatggcgctccccaaattgttaatgatggtattacagtagctaaggatattgaactggaagaccctctagaaaacactggggctaaattaattcaagaagtggcgtctaaaactaaggatattgctggagatggcacaactacagctactgttttagctcagtctatgattaaagaaggcctcaaaaacgtagctgctggtgcgaacccagtggcagttcgtagagggattgagaaaactgttagtctgctagtgaaagaaatacaaacagttgctaaaccggtagagggagaagcgatcgctcaagttgctacggtatctgcaggtggtgatgcagaggtaggcagaatgatttctgaggccatggataaagttaccaaggatggggtaattactgttgaagagtctaagtctctttctacagacttagaggttgtggaaggaatgcaaattgatcgcggttatctttctccttattttgtgactgatcaagaacggttagtagtcgactttgaaaatgctcgcatcttaattactgataagaaaatctcttctattcaagatttggtaccggtactggaaaaagttgctcgtgctggtcagtctttattaattattgctgaggatattgaaggggaagctttagctactttggtggttaataaagcaaggggtgtactgaatgttgctgcagtgaaggctcctggttttggcgatcgccgtaaggcaatgctccaagatattgctattctcacgggtggtcaactcatctcggaagaggttggtctgagtctagagatggtagacctagatatgatgggtattggtcgcaaaatttctattaacaaggataacacaactattgttgctgatgggggaacggctgaggaagttaaaaagcggatcgctcaaattcgcaaacagcttggtgaaagcgactctgattatgataaagaaaagttacaagagcgcattgctaagttagctggtggggtggcagtcattaaggttggtgctgctactgaaactgagcttaaagaccggaagttacgcattgaggatgctttgaatgcgacaaaggctgctgtagaggagggtattgtccctggtggcggtactactttgattcacttgtctactaaagtggaggagctaaaaggtagtctcaataatgaagaagagaaaattggtgctgatattgttagacgtgctttagaagcacctttaaatcaaattgctaataactctggtgtagagggttcggtaattgtagaaaaagtacgttctactgattttagtgttggttacaatgtgataactggcgagtacgaagatctgattgctgctggtattcttgacccggcgatggtggtacgttctgcgttgcaaaatgcgggttctattgctggtatggtcttaactactgaggctgtggttgttgagaagcctgagaagaaaggtgctgctcctgatatggatggcggcatgggcggcatgggcggcatgggcggcatgggcggcatgggcggcatgggtatgcctggtatgggaatgatgtaa

SEQ ID NO: 9411 - protein, 561 aa, Trichodesmium erythraeum IMS101
MAKIVEFDDKSRRSLERGINTLADAVRITMGPKGRNVLLEKKYGAPQIVNDGITVAKDIELEDPLENTGAKLIQEVASKTKDIAGDGTTTATVLAQSMIKEGLKNVAAGANPVAVRRGIEKTVSLLVKEIQTVAKPVEGEAIAQVATVSAGGDAEVGRMISEAMDKVTKDGVITVEESKSLSTDLEVVEGMQIDRGYLSPYFVTDQERLVVDFENARILITDKKISSIQDLVPVLEKVARAGQSLLIIAEDIEGEALATLVVNKARGVLNVAAVKAPGFGDRRKAMLQDIAILTGGQLISEEVGLSLEMVDLDMMGIGRKISINKDNTTIVADGGTAEEVKKRIAQIRKQLGESDSDYDKEKLQERIAKLAGGVAVIKVGAATETELKDRKLRIEDALNATKAAVEEGIVPGGGTTLIHLSTKVEELKGSLNNEEEKIGADIVRRALEAPLNQIANNSGVEGSVIVEKVRSTDFSVGYNVITGEYEDLIAAGILDPAMVVRSALQNAGSIAGMVLTTEAVVVEKPEKKGAAPDMDGGMGGMGGMGGMGGMGGMGMPGMGMM

SEQ ID NO: 9412 - DNA, 1635 bp, Trichodesmium erythraeum IMS101
  CDS (1)..(1635): transl_table=11
atggctaaacgtattatctacaacgaaaatgctcgtcgcgccttagaaaaaggtatggatattcttgcggagtctgtagcagtaacactcggtcctaaaggtcgaaacgttgttcttgagaaaaaatttggcgcaccccaaattgttaatgatggtgtaacaattgctaaagaaattgaattggaagaccatgtagaaaatactggtgtttccctaattcgtcaagcagcttccaaaactaacgatgcagcaggtgatggtacaaccactgcaactgtacttgctcatgcaatggtaaaagaaggtctacggaacgtggctgctggcgcaaaccctattgctctcaagcgtggtattgacaaagctgctggttttctagtagaaaaaattgctgaacatgctcgtcaaattgaagattccaaggcgatagctcaagttggtgctatttctgctggtaatgatgaagaagtaggtaaaatgattgccgaagccatggataaagtgggtaaagaaggtgtgatttctcttgaagaaggaaagtcaatgcagactgagttggaaattactgaaggtatgcgctttgacaagggttacatctctccctacttcgcaacagacatggaacggatggaagcttctcttgaagaacctcagattctgataactgataagaaaattgctttagtacaagacttagtaccagtattagaacaagttgctcgttctggcaaaccattattaatattggctgaagatattgagaaagaagctttggcaaccctagttgttaaccgtttacggggtgtagtgaatgttgctgcagttaaagctcctggttttggggatcgtcgtaaagctatgttagaagatatcgcggtattaactggcggtcaagttatcactgaagatgctggcttgaaactagaaaatgccaagttagatatgcttggtaaagcacgtcgcattacgatcactaaagataatactactatcgttgctgaaggtaacgaaaaagaagttaaagcacgttgcgaacaaattcgtcgtcaaatggatgaaactgactcttcctacgacaaagagaaattacaagagcgtttagctaaattagctggtggtgtagcggttgttaaagttggtgctgctactgaaacagaaatgaaagatcgcaagttacgcttggaagatgctatcaacgcaactaaagctgctgtagaagaaggtatcgttcctggtggtggtacaactctagcgcacttagctcctgagttggaaacttgggcaaatgaaaatctacaatctgaagagttaactggttctttaattgttagtcgtgctttattagctccactgaagcgcattgctgaaaatgctgggcaaaatggtgctgtaattggcgaacgggtgaaagagaaggatttcaatactggttttaatgcagcaaacaatgagtttgttgatatgtttgaagctggtattgttgacccagcgaaggtaactcgttcggctctacaaaacgctgcttctattgctggtatggtgttaacaactgagtgtattgttgttgacaaacctgagcctaaggaaaacgcacctgctggcgctggtatgggcggtggcgatttcgattactaa

SEQ ID NO: 9413 - protein, 544 aa, Trichodesmium erythraeum IMS101
MAKRIIYNENARRALEKGMDILAESVAVTLGPKGRNVVLEKKFGAPQIVNDGVTIAKEIELEDHVENTGVSLIRQAASKTNDAAGDGTTTATVLAHAMVKEGLRNVAAGANPIALKRGIDKAAGFLVEKIAEHARQIEDSKAIAQVGAISAGNDEEVGKMIAEAMDKVGKEGVISLEEGKSMQTELEITEGMRFDKGYISPYFATDMERMEASLEEPQILITDKKIALVQDLVPVLEQVARSGKPLLILAEDIEKEALATLVVNRLRGVVNVAAVKAPGFGDRRKAMLEDIAVLTGGQVITEDAGLKLENAKLDMLGKARRITITKDNTTIVAEGNEKEVKARCEQIRRQMDETDSSYDKEKLQERLAKLAGGVAVVKVGAATETEMKDRKLRLEDAINATKAAVEEGIVPGGGTTLAHLAPELETWANENLQSEELTGSLIVSRALLAPLKRIAENAGQNGAVIGERVKEKDFNTGFNAANNEFVDMFEAGIVDPAKVTRSALQNAASIAGMVLTTECIVVDKPEPKENAPAGAGMGGGDFDY

SEQ ID NO: 9414 - DNA, 1644 bp, Ralstonia eutropha H16
  CDS (1)..(1644): transl_table=11
atggcagctaaagacgtagtgttcggcgacgccgcacgtgccaagatggtcgaaggcgtgaacatcctcgccaacgcagtcaaggtgaccctgggcccgaagggccgcaacgtggtgctggagcgcagcttcggcggcccgaccgtgaccaaggacggcgtgtccgtggccaaggaaatcgagctgaaggacaagctgcagaacatgggcgcccagatggtcaaggaagtggcttccaagaccagcgacaacgccggtgacggtaccaccaccgctaccgtgctggcccagtcgatcgtgcgcgaaggcatgaagttcgttgccgccggcatgaacccgatggacctgaagcgcggcatcgacaaggctgttgccgccgccgtggaagagctgaagaaggtcagcaagcccaccaccaccagcaaggaaatcgcccaggttggcgcgatctcggccaacagcgacacctccatcggtgagcgcatcgccgaagccatggacaaggtcggcaaggaaggcgtgatcacggttgaagacggcaagtcgctggccgacgagctggaagtcgtggaaggcatgcagttcgaccgcggctatctgtcgccgtacttcatcaacaacccggaaaagcaggttgtccagctggacaacccgttcgtgctgctgttcgacaagaagatcagcaacatccgcgacctgctgccggtgctggagcaagtggccaaggccggccgcccgctgctgatcgtcgctgaagacgtcgagggcgaagccctggcgaccctagtggtcaacaacatccgtggcatcctgaagaccgccgccgtcaaggccccgggcttcggcgaccgccgcaaggccatgctggaagacatcgccatcctgaccggcggcaccgtcatcgctgaagaaatcggcctgacgctggaaaaggctggcctgaacgacctgggccaggccaagcgcatcgagatcggcaaggaaaacaccatcatcatcgacggcgccggcgacgcagctgcgatcgaaggccgcgtcaagcaaatccgcgcccagatcgaagaagcgacctcggactacgaccgtgagaagctgcaagagcgcgtggccaagctggccggcggtgttgccgtgatcaaggttggcgctgccaccgaagtcgaaatgaaggaaaagaaggcccgcgtggaagacgccctgcacgccacccgcgctgcggtggaagaaggcatcgtccccggcggtggtgtggccctgctgcgtgcccgcgctgcgatctcggcactgaccggcgaaaacgccgaccagaacgccggtatcaagatcgtgctgcgcgccatggaagagccgctgcgccagatcgtgctgaacgccggtgaagaagcttcggtggtcgttgccaaggttatcgaaggcaagggcaactacggctacaacgccgcttcgggcgagtacggcgacctggtggaaatgggcgtgctggacccgaccaaggtcacccgcaccgcactgcagaacgccgcttcggtggcttcgctgatgctgaccaccgactgcgcagttgccgaatcgccgaaggaagaatcggctccggcaatgccgggcggcatgggcggcatgggcggcatggaaggcatgatgtaa

SEQ ID NO: 9415 - protein, 547 aa, Ralstonia eutropha H16
MAAKDVVFGDAARAKMVEGVNILANAVKVTLGPKGRNVVLERSFGGPTVTKDGVSVAKEIELKDKLQNMGAQMVKEVASKTSDNAGDGTTTATVLAQSIVREGMKFVAAGMNPMDLKRGIDKAVAAAVEELKKVSKPTTTSKEIAQVGAISANSDTSIGERIAEAMDKVGKEGVITVEDGKSLADELEVVEGMQFDRGYLSPYFINNPEKQVVQLDNPFVLLFDKKISNIRDLLPVLEQVAKAGRPLLIVAEDVEGEALATLVVNNIRGILKTAAVKAPGFGDRRKAMLEDIAILTGGTVIAEEIGLTLEKAGLNDLGQAKRIEIGKENTIIIDGAGDAAAIEGRVKQIRAQIEEATSDYDREKLQERVAKLAGGVAVIKVGAATEVEMKEKKARVEDALHATRAAVEEGIVPGGGVALLRARAAISALTGENADQNAGIKIVLRAMEEPLRQIVLNAGEEASVVVAKVIEGKGNYGYNAASGEYGDLVEMGVLDPTKVTRTALQNAASVASLMLTTDCAVAESPKEESAPAMPGGMGGMGGMEGMM

SEQ ID NO: 9416 - DNA, 1662 bp, Synechococcus sp. CC9311
  CDS (1)..(1662): transl_table=11
atggccaaacttctcagcttctcgaacgaatcacgcgagtctctcgagcgaggcatgaatgcccttgctgatgccgttcgggtcacgatcggacctcgtggccgcaacgtggtgctcgagaagtcctacggctcgcccgacatcgttaatgacggtgacacgatcgccaaggaaattgaacttgcagatccgttcgaaaacattggggccaagctgatccagcaggtggcgtcgaagaccaaggacaaagctggcgatggcaccacgactgccaccgtgctcgcccaagcgatggtggaagaggggcttcgcaatacagctgctggtgctagcccaatcgaactgcgccgagggatggaaaaagctgtggcggctgtggtcgcgagcctgaatcaacgcagtcagtccgtaagcggtgatgcgattcgccaggttgccacggtgagttcaggcggagatgaggaggtgggtcgcatggtggctgaggccatggacagggtgagttttgacggtgtgatcactgttgaggagtccaagtctctggctactgagcttgaagtcactgaaggcatggccttcgatcgcggctacagctctccctatttcgtcaccgacggtgatcgtcagatctgcgaatttgagaatgcgttactgcttctcaccgaccgcaagatcagctcggtgactgacttggtccctgtgctggaaacggttcagaaatcaggatcacccttggtgattttggctgaagaagtggatggcgaagccctagcaactctggttgtgaacaagaaccgaggggtgctgcaggtggctgccgtgcgtgctccatcgtttggcgagcggcgtaaagcggctcttgccgacatcgctgttcttactggcggtcaagtcatcagcgaagacagggcgatgaccctcgacaaggtgacgatggaagacctgggacgggcacgccggatcacgatcagcaaggacagcaccacgatcgtggcgagcgatgacagcaaagaggccgtcagtgcccgcgttgcttcaatcaagcgtgagctcgacaacacggattcggaatacgaccaagagaaactcaacgagcgcatcgcgaagcttgctggaggcgtggccgttatcaaggttggcgccccgacagagacggagctcaaaaaccgcaagctacgtattgaggatgctttgaatgccacccgtgcagctgtggaggaaggcattgttgctggaggtggatcaacccttctgcatatttctgcagaactcgatgccctgacctctgggctggaaggtgatcaaaagactggcgtcgaaatcgttcagcgtgccctgagcgcccccctgcgtcagatcgctgaaaatgccggttcaaacggtgacgtggtggtggatcgcgttcgcaatagcggagagggattcaacgctctcactggcaacttcgaagacctcatgaatgctggaattctggatgcatccaaggtggttcgtcttgcgcttcaggatgcggtctcgattgcatctttggtggtaaccactgaagttgtcgtggcagataagcctgagcctcctgcgcctgcaggtggcggtggtgatcctatgggcggcatgggtggtatggatcccatgggcggcatgggcggcatgggaatgatgtaa

SEQ ID NO: 9417 - protein, 553 aa, Synechococcus sp. CC9311
MAKLLSFSNESRESLERGMNALADAVRVTIGPRGRNVVLEKSYGSPDIVNDGDTIAKEIELADPFENIGAKLIQQVASKTKDKAGDGTTTATVLAQAMVEEGLRNTAAGASPIELRRGMEKAVAAVVASLNQRSQSVSGDAIRQVATVSSGGDEEVGRMVAEAMDRVSFDGVITVEESKSLATELEVTEGMAFDRGYSSPYFVTDGDRQICEFENALLLLTDRKISSVTDLVPVLETVQKSGSPLVILAEEVDGEALATLVVNKNRGVLQVAAVRAPSFGERRKAALADIAVLTGGQVISEDRAMTLDKVTMEDLGRARRITISKDSTTIVASDDSKEAVSARVASIKRELDNTDSEYDQEKLNERIAKLAGGVAVIKVGAPTETELKNRKLRIEDALNATRAAVEEGIVAGGGSTLLHISAELDALTSGLEGDQKTGVEIVQRALSAPLRQIAENAGSNGDVVVDRVRNSGEGFNALTGNFEDLMNAGILDASKVVRLALQDAVSIASLVVTTEVVVADKPEPPAPAGGGGDPMGGMGGMDPMGGMGGMGMM

SEQ ID NO: 9418 - DNA, 1644 bp, Nitrosomonas eutropha C91
  CDS (1)..(1644): transl_table=11
atggcagctaaagaagtaagatttggagatgcagcgcgcagcgccgtaatcactggcgtaaatgtactggcagatgcggttaaagtgacgttaggccctaaaggacgcaatgttgtactggagcgttcatacggcgcccccaccatcaccaaggatggcgtatcggttgcgaaagagattgaactgaaagacaagttcgaaaacatgggcgcacaaatggtcaaggaagtcgccagcaaaacctcggatacagcaggagatggcacaacgacggcaactgttttagcacaagccatcgtcaaggaaggtatgcgttatgtcgcagccggaatgaatccaatggatctgaagcgcgggatcgaaaaggcagttagcgccgctgttgaagaattgaaaaaactttccaagccatgttccaccagcaaggaaatcgctcaagttggcagcatttctgccaattccgatgccgaaatcggcagaatcattgctgaagcaatggataaagtcggcaaggaaggcgtcattacggttgaagatggttccggcctggaaaatgagctggatgtcgtggaaggcatgcagtttgaccggggttatctctctccctattttgtcagcagcgctgagaaacagattgcagcactcgaaaaccctttcattctgttgcacgacaaaaaaatatccaatattcgtgaccttctgccaatactcgaacaagtagccaaagcaggtaaaccactgctgatcattgctgaagatgttgatggtgaagccctggcaacactggtcgtgaacaatattcgcggcatcctcaaaacatgcgcagtcaaggcacctggttttggtgatcgtcgtaaggctatgctggaagatatcgcgatcctgacgggtggtacggtgattgccgaagaagtcggtttatccctggagaaagctaaactggaagatctgggccaggctaaacgcgttgaagttggcaaggaaaacaccaccattattgatggtgccggagataccaaagccattgaagcacgcgttacacagattcgcaagcaaatcgaagaagcaaccagtgactatgatcgcgagaagcttcaagaacgcgtagccaaactggctgggggtgtagctctaatcaaggttggcgctgccacggaaatggagatgaaagagaaaaaagctcgcgttgaagatgcctttcacgcaacacgcgctgcggttgaagaaggtattgttcctggtggtggcgtcgccctgctgcgtacaattgatgctgtgagcaaggccaaaggcgacaaccatgatcaggattccggcatcaaaattgttttgcgtgcactggaagagccactacgccagatcgtaaccaactgcggagatgaagcttctgtagtcgtcaacaaagttaaggaaggtaaaggtaactttggttacaatgctgcaacgggtgaatatggcgatctagttgctatgggcgtgctggaccctaccaaagtaacccgctcggctctgcaaaacgcctcatcagttgcaggattgattctgacgacggacgcaatggttgcagagcttccaaaagaagattcgcctggggcaggtgccggcatgggcggtatgggtggcatgggcggtatggacatgtaa

SEQ ID NO: 9419 - protein, 547 aa, Nitrosomonas eutropha C91
MAAKEVRFGDAARSAVITGVNVLADAVKVTLGPKGRNVVLERSYGAPTITKDGVSVAKEIELKDKFENMGAQMVKEVASKTSDTAGDGTTTATVLAQAIVKEGMRYVAAGMNPMDLKRGIEKAVSAAVEELKKLSKPCSTSKEIAQVGSISANSDAEIGRIIAEAMDKVGKEGVITVEDGSGLENELDVVEGMQFDRGYLSPYFVSSAEKQIAALENPFILLHDKKISNIRDLLPILEQVAKAGKPLLIIAEDVDGEALATLVVNNIRGILKTCAVKAPGFGDRRKAMLEDIAILTGGTVIAEEVGLSLEKAKLEDLGQAKRVEVGKENTTIIDGAGDTKAIEARVTQIRKQIEEATSDYDREKLQERVAKLAGGVALIKVGAATEMEMKEKKARVEDAFHATRAAVEEGIVPGGGVALLRTIDAVSKAKGDNHDQDSGIKIVLRALEEPLRQIVTNCGDEASVVVNKVKEGKGNFGYNAATGEYGDLVAMGVLDPTKVTRSALQNASSVAGLILTTDAMVAELPKEDSPGAGAGMGGMGGMGGMDM

SEQ ID NO: 9420 - DNA, 1644 bp, Pseudomonas aeruginosa UCBPP-PA14
  CDS (1)..(1644): transl_table=11
atggctgccaaagaagttaagttcggcgattccgctcgcaagaaaatgctggtcggcgtgaacgtgctggccgatgccgtcaaggccaccctcggcccgaaaggccgcaacgtggttctggacaagtcgttcggcgctccgaccatcaccaaggatggcgtttccgtcgccaaggaaatcgagctgaaagacaagttcgagaacatgggcgcgcaactggtgaaagacgttgcctccaaggccaacgatgctgccggtgacggcaccaccaccgcgaccgtcctggcccaggccatcgtcaacgaaggcctgaaggccgttgccgccggcatgaacccgatggacctgaagcgtggcatcgacaaggccaccgtggccatcgtcgcccagctgaaagagctggccaagccctgcgccgacaccaaggccatcgcccaggtaggcaccatctccgccaactccgacgagtccatcggccagatcattgccgaagccatggaaaaagtcggtaaagaaggcgtgatcaccgtcgaggaaggctcgggcctggaaaacgaactgtccgtcgtcgaaggcatgcagttcgatcgcggctacctgtccccctacttcgtgaacaagccggacaccatggctgccgagctggatagcccgctgctgctgctggtcgacaagaagatctccaacatccgcgaaatgctgccggtgctggaagccgtcgccaaggccggccgtccgctgctgatcgtcgccgaggacgtcgagggcgaagccctggccaccctggtggtgaacaacatgcgtggcatcgtcaaggtcgcggccgtcaaggctccgggcttcggcgaccgccgcaaggccatgctgcaggacatcgccatcctcaccggcggtaccgtgatcagcgaagaagtcggcctgagcctggaaggcgctaccctggagcacctgggcaacgccaagcgcgtcgtgatcaacaaggaaaacaccaccatcatcgatggcgccggtgtgcaggctgatatcgaagcccgcgtcctgcagatccgcaagcagatcgaggaaaccacttccgactacgaccgcgagaagctgcaagagcgcctggccaagctggccggcggtgttgccgtgatcaaggtaggcgctgccaccgaagtcgagatgaaagagaagaaagcccgcgtcgaagacgccctgcacgctacccgtgcggcggtggaagagggcgtggttcccggcggcggcgtagccctggttcgtgccctgcaagccatcgaaggcctgaagggtgacaacgaggagcagaacgtcggtatcgccctgctgcgtcgcgccgtcgaatcgccgctgcgccagatcgtggccaacgccggcgacgagccgagcgtagtggtcgacaaggtcaagcagggttccggcaactacggcttcaacgctgctaccggcgtgtacggcgacatgatcgagatgggcatcctggacccggccaaggtcactcgttccgctctgcaggctgcggcctccatcggcggtctgatgatcaccaccgaagccatggttgccgagatcgtggaagacaagccggccatgggcggcatgcctgacatgggcggcatgggcggcatgggcggcatgatgtaa

SEQ ID NO: 9421 - protein, 547 aa, Pseudomonas aeruginosa UCBPP-PA14
MAAKEVKFGDSARKKMLVGVNVLADAVKATLGPKGRNVVLDKSFGAPTITKDGVSVAKEIELKDKFENMGAQLVKDVASKANDAAGDGTTTATVLAQAIVNEGLKAVAAGMNPMDLKRGIDKATVAIVAQLKELAKPCADTKAIAQVGTISANSDESIGQIIAEAMEKVGKEGVITVEEGSGLENELSVVEGMQFDRGYLSPYFVNKPDTMAAELDSPLLLLVDKKISNIREMLPVLEAVAKAGRPLLIVAEDVEGEALATLVVNNMRGIVKVAAVKAPGFGDRRKAMLQDIAILTGGTVISEEVGLSLEGATLEHLGNAKRVVINKENTTIIDGAGVQADIEARVLQIRKQIEETTSDYDREKLQERLAKLAGGVAVIKVGAATEVEMKEKKARVEDALHATRAAVEEGVVPGGGVALVRALQAIEGLKGDNEEQNVGIALLRRAVESPLRQIVANAGDEPSVVVDKVKQGSGNYGFNAATGVYGDMIEMGILDPAKVTRSALQAAASIGGLMITTEAMVAEIVEDKPAMGGMPDMGGMGGMGGMM

SEQ ID NO: 9422 - DNA, 1629 bp, Solibacter usitatus Ellin6076
  CDS (1)..(1629): transl_table=11
atggcgaaacagattgtatattccgaagcttcccgtcaggcgattctgcgcggtgtaaaccagctcgcggatgccgtgaaggtgaccctcggcccgaagggccgtaacgttgttctggagaagaagtttggcggcccgacgatcaccaaagacggtgtgacggtcgcgaaggaaatcgaactgaaggatccgctggagaacatgggcgcgcagatggtgcgcgaagtggcctccaagacgagcgacgtggccggcgacggcaccacgaccgcgacgattctggcgcagagcatctaccgcgaaggcgttaaggccgttgcggcgggcgcgaacccgatggcgctgaagcgcggcatcgacaaggccgtcgagctggcgaccgaggaagtgaagaagctctccaagcccgtgtcgggcgacatgatcgcgcaggttggaacgatttcggccaacagcgataagacgatcggcaacatcatcgccgacgcgatgaagaaggtcggcaaggatggcgtgatcacggtcgaggaatcgaagaccatggttaccgaactggacaccgtggaaggcatgcagttcgaccgcggctatctctcgccctacttcgtgagcgatgcggagcggatggaagccgttctcgaggatccgtacatcctgatccacgagaagaagatcagcaacatgaaggacctgctgccgctgctcgagcagatcgcccgttccggcaagccgctcctgatcatcgcggaagaagtggaaggcgaagcgctggccaccctcgtggtgaacaagctgcgcggcacgctgaacgcttgcgcggtgaaggctccgggctttggcgatcgccgcaaggcgatgttggaagacatcggcatcctgaccggcggcaagccgatcatggaagatatcggcgtgaagctggaaggcgttcggctcgaggacctgggccgcgccaagcgcgtcacggtggacaaggacaacaccaccatcgttgacggcgccggcaatccgaagggaatcgaagggcgcatcaagcaactgcgcgcgcagatcgacgagaccaccagcgattacgaccgcgagaagctccaggaacgcctggcgaagcttgccggcggcgtggcggtgatcaaggtcggcgcggccaccgagaccgaaatgaaggaaaagaaggctcgcgtggaagatgctctgcatgcgacccgcgccgcggttgaggaaggcatcgttcccggcggcggcgtggcgctgctccgtgcggcgaaggccctggcgacgttcaaggtggatggcgatgagcagatcggggtgagcatcgtgaagcgcgcctgcgaagagccgctgcgccagatcgtgtccaactccggcacggagggtgcgatcgtggtggataaggttcgcgagaatgcgaacaacaactacggctacaacgcggctaccgacacctatgaagacctggtggcagcgggcgtgatcgatccgacgaaagtgacgcggtctgccctgcagcacgcggcctcgatcgccggcttgatgctgacgacggaagccatgatcgccgagatcccggagaagaagtctgctccggccggcggccccggcggccacggtcccgagatggactactaa

SEQ ID NO: 9423 - protein, 542 aa, Solibacter usitatus Ellin6076
MAKQIVYSEASRQAILRGVNQLADAVKVTLGPKGRNVVLEKKFGGPTITKDGVTVAKEIELKDPLENMGAQMVREVASKTSDVAGDGTTTATILAQSIYREGVKAVAAGANPMALKRGIDKAVELATEEVKKLSKPVSGDMIAQVGTISANSDKTIGNIIADAMKKVGKDGVITVEESKTMVTELDTVEGMQFDRGYLSPYFVSDAERMEAVLEDPYILIHEKKISNMKDLLPLLEQIARSGKPLLIIAEEVEGEALATLVVNKLRGTLNACAVKAPGFGDRRKAMLEDIGILTGGKPIMEDIGVKLEGVRLEDLGRAKRVTVDKDNTTIVDGAGNPKGIEGRIKQLRAQIDETTSDYDREKLQERLAKLAGGVAVIKVGAATETEMKEKKARVEDALHATRAAVEEGIVPGGGVALLRAAKALATFKVDGDEQIGVSIVKRACEEPLRQIVSNSGTEGAIVVDKVRENANNNYGYNAATDTYEDLVAAGVIDPTKVTRSALQHAASIAGLMLTTEAMIAEIPEKKSAPAGGPGGHGPEMDY

SEQ ID NO: 9424 - DNA, 1632 bp, Syntrophobacter fumaroxidans MPOB
  CDS (1)..(1632): transl_table=11
atggcgaaacagctgatctacgatgtcaaagctcgcgaagctttgctgagcggagtgaatattctggcggacgcagtgaaggtaacgcttggtcccaaaggccgcaacgtggtgattgaaaaggcattcggcgggcctaccgtgaccaaggacggcgtgaccgttgccaaggaaatcgagctcgaggacaagttcgagaacatgggtgcccagatggtgaaggaagtcgccagcaagaccagcgacgttgccggtgacgggaccaccacggcgaccatactcgctcagtccatctattacgaaggttccaagctggttgccgccggtgccaatcccatggcgctcaagcgcggcatcgaaaaggctgtgcaggtggtggtggacgaactgaagaagatcagcaagcccaccaaggaccagaaggaaatcgcccaggtcggcaccatttcggcgaacaacgatcccaccatcggcaacatcatcgccgaagccatgaacaaggtgggcaaggaaggtgtgatcacggtcgaggaagccaaggccatggagacaaccctggaagttgtcgagggcatgcagttcgatcgcggctatatttccccgtatttcgtgaccgaccccgaaaagatggaagtccttctgaacgaacccctgattctcatcaacgagaagaagatcagcaacatgaaggacctgctgccggtcctggagcagatcgccaagatgggcagaccgttgctgatcattgccgaagacgtcgaaggcgaagcgctggccaccctggtggtgaacaagctgcgcggaacgctgcatgtgtgcgccgtgaaggcaccgggattcggcgatcgccgcaaggccatgctcgacgacatcgccattctgaccggcggccaggtgatcagtgaagagaagggcatcaagctcgagtccgtcgggctgaacgatctcgggaaagcaaagaccatccggatcgacaaggacaacaccaccatcgtcgacggcgcgggcgatcgcaaggcgctcgaagggcgggtgcgccagattcggacccagatcgacgagaccaccagcgattacgaccgtgagaagctgcaggagcggctggcaaaaatggtcggcggagtggcggtcatcagtgtcggcgcggccaccgaaaccgaaatgaaagagaagaaggcgcgcgtcgaggacgctttgaacgctacccgggccgcagtggaggaaggcatcgttcccggcggcggagtggcctatctgcgctgcctcggggcactgggagcggtgaacctggaaggcgacgaaaaactggggctcaacatcgtcaaacgcgcacttgaagagcccgcccgccagattgccatgaatgccggtgaggaaggctccgtaatcgtgcagagggtcaagtccgaaacgggcgctttcggtttcgacgcggaaaccagccagttctgcgacctcatcgaagcgggtgtcatcgatccgaccaaagtgacccgtaccgctctgctcaacgcggccagcgtttcggcattgatgctgaccaccgagtgcatggtttcggaaatcccgaaagaggacaagggagcccctgcagggatgggcggaatgccccccggaggcggaatgtactaa

SEQ ID NO: 9425 - protein, 543 aa, Syntrophobacter fumaroxidans MPOB
MAKQLIYDVKAREALLSGVNILADAVKVTLGPKGRNVVIEKAFGGPTVTKDGVTVAKEIELEDKFENMGAQMVKEVASKTSDVAGDGTTTATILAQSIYYEGSKLVAAGANPMALKRGIEKAVQVVVDELKKISKPTKDQKEIAQVGTISANNDPTIGNIIAEAMNKVGKEGVITVEEAKAMETTLEVVEGMQFDRGYISPYFVTDPEKMEVLLNEPLILINEKKISNMKDLLPVLEQIAKMGRPLLIIAEDVEGEALATLVVNKLRGTLHVCAVKAPGFGDRRKAMLDDIAILTGGQVISEEKGIKLESVGLNDLGKAKTIRIDKDNTTIVDGAGDRKALEGRVRQIRTQIDETTSDYDREKLQERLAKMVGGVAVISVGAATETEMKEKKARVEDALNATRAAVEEGIVPGGGVAYLRCLGALGAVNLEGDEKLGLNIVKRALEEPARQIAMNAGEEGSVIVQRVKSETGAFGFDAETSQFCDLIEAGVIDPTKVTRTALLNAASVSALMLTTECMVSEIPKEDKGAPAGMGGMPPGGGMY

SEQ ID NO: 9426 - DNA, 1641 bp, Gramella forsetii KT0803
  CDS (1)..(1641): transl_table=11
atggcaaaagatataaaatttgacatccaggcccgtaacgggattaaacgtggagtagatgcattggccaatgctgtaaaagtaaccttaggacctaaagggcgtaatgttattatcagtaagtcttttggtgcaccaaccgtaactaaagatggtgtaactgtagcaaaagagatcgaacttgaagatcctctagaaaatatgggagctcaaatggtaaaagaagttgcttctaaaaccaacgatcttgctggtgatggtactactactgcaactgtgcttgctcaggcaatcgtacaggaaggtttgaagaacgttgctgcaggtgcaaacccgatggatcttaaaagaggaatcgataaagctgtagaagcacttactgcagatcttgcaaaacaaactaaagaagttggtgattcttcagaaaaaattaagcaggtagcttctatttctgccaacaacgatgatatgatcggtgatttgatcgctcaggcattcggaaaagttggaaaagaaggagttattactgttgaagaagcaaaaggtactgaaacgcatgtagatgttgtggaagggatgcagtttgatagaggttatctttctccatatttcgttacgaattcagagaaaatgacagcagatcttgaagatccttatatccttctttttgataagaagatttcttcaatgaaagatctacttccggtactggagccagtagctcaatctggaaaaccattattgatcattgctgaagatgttgacggagaagcacttgctacgctggttgtaaataaacttcgtggatcacttaaaattgcagctgtaaaagctccaggttttggtgaccgtagaaaagcaatgttagaagatatcgctattctcacaggaggaactgtaatttctgaagaaagaggtttctctcttgagaacgcaacgatagatatgttgggtactgctgaaaaagtagctattgataaagataatactactgtagtaaatggagctggagatgataaggcgatcaaagaacgtgtgaaccagatcaaagctcagatagagtctactacttcagattatgatagagagaagctacaggagcgtcttgctaaattagcaggtggtgttgccgtactttatgtaggtgcagcttcagaagttgaaatgaaagagaagaaagaccgtgtagatgatgcacttcatgcaaccagagcggctgtagaagaaggtattgttgccggtggtggtgttgctttaattagagctcaggttgtacttagcaagatcaaaactgaaaatcctgatgaagctaccggagttaaaattgtctctaaagcaattgaatctccattaagaaccattgttgaaaatgctggaggagaaggttctgtagtgatcaataaagttcttgaaggtaaaaaagactttggttatgatgcgaagactgaaacatatgtagatatgctgaaggctggtattatagatcctaagaaagtaaccagagtagcacttgaaaatgctgcatctgttgccggaatgatccttactaccgagtgtgcactgaccgatattccagaagataatgctggtggaggcggaatgccacaaggtatgggtggcggaatgccaggaatgatgtag

SEQ ID NO: 9427 - protein, 546 aa, Gramella forsetii KT0803
MAKDIKFDIQARNGIKRGVDALANAVKVTLGPKGRNVIISKSFGAPTVTKDGVTVAKEIELEDPLENMGAQMVKEVASKTNDLAGDGTTTATVLAQAIVQEGLKNVAAGANPMDLKRGIDKAVEALTADLAKQTKEVGDSSEKIKQVASISANNDDMIGDLIAQAFGKVGKEGVITVEEAKGTETHVDVVEGMQFDRGYLSPYFVTNSEKMTADLEDPYILLFDKKISSMKDLLPVLEPVAQSGKPLLIIAEDVDGEALATLVVNKLRGSLKIAAVKAPGFGDRRKAMLEDIAILTGGTVISEERGFSLENATIDMLGTAEKVAIDKDNTTVVNGAGDDKAIKERVNQIKAQIESTTSDYDREKLQERLAKLAGGVAVLYVGAASEVEMKEKKDRVDDALHATRAAVEEGIVAGGGVALIRAQVVLSKIKTENPDEATGVKIVSKAIESPLRTIVENAGGEGSVVINKVLEGKKDFGYDAKTETYVDMLKAGIIDPKKVTRVALENAASVAGMILTTECALTDIPEDNAGGGGMPQGMGGGMPGMM

SEQ ID NO: 9428 - DNA, 1656 bp, Magnetococcus sp. MC-1
  CDS (1)..(1656): transl_table=11
atggctgccaaagaagtaaagttcggcgaagctgcacgcgccaaaatgctgaatggtgttaatatcctggctaacgctgttaaagtcaccctgggccccaaaggccgcaatgtggtgctggacaaatcctggggcgccccccgcatgaccaaggatggcgtctccgttgccaaagagatcgaactggaagataagtttgaaaatatgggcgcacaaatggtgcgtgaggtctcctccaaaaccgccgatgtggccggtgatggtaccaccaccgccaccgtgctggcccaagcgatcatccgcgaaggcatgaaagcggttgccgctggcatgaaccccatggatctgaagcgcggtattgatctggctgtcgaagccgtggttgtgggtctgaaagggatctcccgcgaagtggctaactcccaagagatcgcccaagtgggcgcgatctccgccaactccgataaagtggtaggcgacatgatcgctgaggccatggataaagttggtaaagagggtgttatcaccgtggaagaggccaaaggcctggaaaccaccctggatgtggtggaaggtatgcagtttgaccgtggctacctctccccctattttgtcaccaacgccgacaaaatgttggtgcaaatggagaatcccctgatcctgttggtggagaaaaaaatctccaacctgcaacagattctgcaaatcctggaaggcgctgtgcaatcctcccgccccctgatgattatcgccgaggatgttgagggcgaagccctcgctaccctagtggtcaacaagctgcgtggcggcctgaaagtgtgcgccgtcaaagcccccggctttggcgaccgtcgtaaggcgatgatggaagatatcgcaaccctaaccggtggcgtgctggtttctgaggatgtgggcgttaagctggaaaatgtcaccatggatatgctgggtatggctaaatccatcgtcgtgaccaaagaagacaccaccatcatcgacggtgctggcgaccacgaagccatcaaggcccgtgtcaaccagatccgtgcacaaattgaagagacctcctccgattatgaccgtgagaagctgcaagagcgtctggccaagttggctggcggtgtcgcggtaatcaaggttggtggtgcgactgaagttgaagtgaaagagcgcaaagaccgtgttgatgacgccctgcacgccacccgcgccgctgtggaagagggcattgttcctggtggtggtgtggccctgctgcgcgcccgtgaagcctccctgaccaacctgcaaggtgccaaccatgaccaacaggtgggcatcaacatcgtgacccgcgccctggaagagcccctgcgcatcatcgcttccaatgccggtgctgagggttccgtggtggttaaccgtgtggttgagaccaaagagaccaactttggcttcaacgccgccaccggcgtgtatgaagatctggtcgccagcggtgttatcgaccctgccaaggttgtgcgtcatgccctgcaagctgcggcttccgttgctggcttgatgatcaccaccgaagccatggttgctgaactgcctaaagatgagcctgccatgcccggcggtgacatgggcggtatgggcggcatgggcggtatgggcggcatgatgtaa

SEQ ID NO: 9429 - protein, 551 aa, Magnetococcus sp. MC-1
MAAKEVKFGEAARAKMLNGVNILANAVKVTLGPKGRNVVLDKSWGAPRMTKDGVSVAKEIELEDKFENMGAQMVREVSSKTADVAGDGTTTATVLAQAIIREGMKAVAAGMNPMDLKRGIDLAVEAVVVGLKGISREVANSQEIAQVGAISANSDKVVGDMIAEAMDKVGKEGVITVEEAKGLETTLDVVEGMQFDRGYLSPYFVTNADKMLVQMENPLILLVEKKISNLQQILQILEGAVQSSRPLMIIAEDVEGEALATLVVNKLRGGLKVCAVKAPGFGDRRKAMMEDIATLTGGVLVSEDVGVKLENVTMDMLGMAKSIVVTKEDTTIIDGAGDHEAIKARVNQIRAQIEETSSDYDREKLQERLAKLAGGVAVIKVGGATEVEVKERKDRVDDALHATRAAVEEGIVPGGGVALLRAREASLTNLQGANHDQQVGINIVTRALEEPLRIIASNAGAEGSVVVNRVVETKETNFGFNAATGVYEDLVASGVIDPAKVVRHALQAAASVAGLMITTEAMVAELPKDEPAMPGGDMGGMGGMGGMGGMM

SEQ ID NO: 9430 - DNA, 1602 bp, Phaeodactylum tricornutum
  CDS (1)..(1602): transl_table=11
atggcaaagaaaattttatatcaagacaatgctcgacgagccttagaacgtggaatggaaataatggttgaagctgtttcagttacattaggaccaaaaggtcgaaatgttgtattagaaaaatcttatggttcgcctcaaattgttaatgatggtgtaacaattgcgaaagaaatcaaattattagatcatatagaaaataccggcgtttcattaatccgccaagcggcttcaaagactaatgatgtcgcaggtgacggaacaacaactgcaacagttttagcgtatgcgatggtaaaagaaggattgaaaaatgttgcagcaggcgcaaatccaatttcaattaaattaggaatggaaaaagcatctcaatatttggtaacacaaattaatgaattcgctcaaccagtagaggatattcaatcgattcaacaagttgcttcaatttcagcaggaaatgatgaaattattggatctttaattgccgatgcattatcaaaagttggaaaagaaggtgtaatttcgttagaagaaggaaaaggtattgttacagaattagaaattactgaaggtatgaagctagaaaaaggttttatttcaccatattttattacaaatactgaaaagatggaagtttcctatgataatccttatattctactaacagataagcggattacactagttcaacaagatttactaccaattttggagcaaataactaaaacaaaacgccctctcttaatcattgctgaagatgttgaaaaagaggcattagcaacattaattttaaataaattaagaggaattattaatgttgttgcagttcgtgcaccggggtttggtgaactaagaaagcaaatgttggaagacatagctattttaactggtgggacagttattacacaggatgctggcttaagtttagataatattcaattaaatttattaggccaagctcgacgaattattgtcaataaagattcaacaacaattgtttcggatggacaaacattaaatgaaattaatattagatgcgaacaattgcgtaaacaggttaatattgctgatacgggttatgaaaaagaaaaattacaggatcgaattgccaaattatctggtggaattgctgtaattcgtgtgggggctgttactgaaactgaaatgaaggataaaaaattacgtttagaggatgcaattaatgctactcgagcagccgtagaagaaggtatcgtgccaggtggtggtgcaaccttaacacatttgtcggaaaatttggttacgtgggcaaaaaataatctaaaagaagatgaattaatcggtgcaatgattatatcgcgggcgatcttagcgcctttgcggcggattgcggaaaatgctggtattaatggtcctgttattattgaaaaagtacagcaacaagaatttgaaattggttataatgctgctaaaaatacatttggtaatatgtatacagagggaatagttgatccagctaaagttacaagatcaggattacaaaatgctacttcaattgcaagtatgattttaactacagagtgtattatcgttgatgatgttaaaagttcaaacgaatcttag

SEQ ID NO: 9431 - protein, 533 aa, Phaeodactylum tricornutum
MAKKILYQDNARRALERGMEIMVEAVSVTLGPKGRNVVLEKSYGSPQIVNDGVTIAKEIKLLDHIENTGVSLIRQAASKTNDVAGDGTTTATVLAYAMVKEGLKNVAAGANPISIKLGMEKASQYLVTQINEFAQPVEDIQSIQQVASISAGNDEIIGSLIADALSKVGKEGVISLEEGKGIVTELEITEGMKLEKGFISPYFITNTEKMEVSYDNPYILLTDKRITLVQQDLLPILEQITKTKRPLLIIAEDVEKEALATLILNKLRGIINVVAVRAPGFGELRKQMLEDIAILTGGTVITQDAGLSLDNIQLNLLGQARRIIVNKDSTTIVSDGQTLNEINIRCEQLRKQVNIADTGYEKEKLQDRIAKLSGGIAVIRVGAVTETEMKDKKLRLEDAINATRAAVEEGIVPGGGATLTHLSENLVTWAKNNLKEDELIGAMIISRAILAPLRRIAENAGINGPVIIEKVQQQEFEIGYNAAKNTFGNMYTEGIVDPAKVTRSGLQNATSIASMILTTECIIVDDVKSSNES

SEQ ID NO: 9432 - DNA, 1638 bp, Campylobacter fetus subsp. fetus 82-40
  CDS (1)..(1638): transl_table=11
atggcaaaagaaattattttcgcagatgatgcaagaaatagattatatagcggtgtaaaaaaattaaacgatgcggtaaaagttactatgggaccaagaggtcgtaatgtacttatccaaaaaagctttggtgcaccttctatcacaaaagacggcgtaagcgttgcaaaagagatagaacttaaagatactatagaaaatatgggtgcaggtttagtcagagaagttgctagcaaaacaaacgatgaagcaggagacggtactacaactgctacagttttagctcacgctatatttaaagaaggacttaggaacataactgccggcgcaaatcctatcgaagtaaaacgcggaatggataaattcgttgaggctgttacaagcgagttaaaatcagccgctaaaaaagtagacggtaaaaaagagatagctcaagtagctactatttcagcaaatagcgatagctcaatcggtgatcttatagccgaagctatggaaaaagttggtaaagacggtgtcatcacagtagaagaagcaaaatctataaatgacgagttaaatgtcgttgaaggtatgcagtttgatcgtggatatttaagtccgtatttcatcacaaacgctgaaaaaatgcaagtcgaattaagtagtccatttatacttttatttgataagaaaattacaaatttaaaagatctacttccggttttagaacaaattcaaaaaacaggaaaacctcttcttatcgttgctgaggatatcgagggtgaagctcttgcaactttagttgtaaataaattaagaggcgttttaaatatttcagcagtaaaagctcctggatttggagatagaagaaaagctatgcttgaagatatagctattttaaccggcggtgaagtgatcagcgaagagttaggcagaactttagagagtgctagcttacaagatcttggtcaagcagatagagttgttatagataaagataacactactatagtaaatggtgccggagataaagattcgatagaagctagaattaatcaaataaaagctcaaatagctgagactacaagcgattatgataaagaaaagttgcaagaaagactagctaaattaagcggcggtgttgctgttatcaaagtaggagctgcgacagaaacagaaatgaaagaaaaaaaagatagagtagacgacgctctaaatgctacaaaagcagcagtagaagagggcatcgtagtcggaggcggtgcagcgcttatcaaagccggaaatagagtaaatctaagcttaaaaggtgatgagttaattggcgctgagatagttaaacgtgcgctttttgcccctcttcgtcagatagctgaaaatgccggattcgacgctggagtagtggcaaattctgtatcatgcgcagattgccctaattatggatttaacgcagctagcggcgaatatgttgatatgtttgaagctggaattatagatcctgttaaagtagaaagaatagctttacaaaacgcagttagcgtagcaagcttacttcttactactgaagctacggttagtgagataaaagaggataaacctgctatgcctccgatgccagacatgggcggtatgggcggaatgggcggaatgatgtaa

SEQ ID NO: 9433 - protein, 545 aa, Campylobacter fetus subsp. fetus 82-40
MAKEIIFADDARNRLYSGVKKLNDAVKVTMGPRGRNVLIQKSFGAPSITKDGVSVAKEIELKDTIENMGAGLVREVASKTNDEAGDGTTTATVLAHAIFKEGLRNITAGANPIEVKRGMDKFVEAVTSELKSAAKKVDGKKEIAQVATISANSDSSIGDLIAEAMEKVGKDGVITVEEAKSINDELNVVEGMQFDRGYLSPYFITNAEKMQVELSSPFILLFDKKITNLKDLLPVLEQIQKTGKPLLIVAEDIEGEALATLVVNKLRGVLNISAVKAPGFGDRRKAMLEDIAILTGGEVISEELGRTLESASLQDLGQADRVVIDKDNTTIVNGAGDKDSIEARINQIKAQIAETTSDYDKEKLQERLAKLSGGVAVIKVGAATETEMKEKKDRVDDALNATKAAVEEGIVVGGGAALIKAGNRVNLSLKGDELIGAEIVKRALFAPLRQIAENAGFDAGVVANSVSCADCPNYGFNAASGEYVDMFEAGIIDPVKVERIALQNAVSVASLLLTTEATVSEIKEDKPAMPPMPDMGGMGGMGGMM

SEQ ID NO: 9434 - DNA, 1665 bp, Pelobacter propionicus DSM 2379
  CDS (1)..(1665): transl_table=11
atggcagcaaaaatcatcaagtttgaccaggaagggcgtaacgccatcctgaagggcgtcaacatcctcgccgataccgtaaaagttaccctcggccccaagggtcgtaatgtcgttatcgacaaatccttcggcgcaccgctgatcaccaaggacggcgtgaccgttgctaaggaaatcgaactggaagacaagttcgaaaacatgggcgcccagctggtcaaggaagtcgcctccaagacttccgacgttgccggtgacggcaccaccaccgcaacggttctggcccaggccatctaccgccagggctccaagctggtggcagccggtcacaaccccatggaaatcaagcgcggcatcgataaggctgttgaaaccatcgtcgccgaactgcagaagatctccaagccgatcgtcgaccacaaggaaatcgcccaggtcggcaccatttccgccaacaacgacaagaccatcggtgacatcatcgccgaggccatggagaaggtcggcaaggaaggggttatcaccgtcgaggaagccaagtccatggataccaccctggaaaccgtggaaggcatgcagttcgaccgtggctatctctccccctacttcgtcaccgatccggagcgtatggaagctgccctggagaacgccctgatcctgatccacgacaagaagatctccaacatgaaggacctgctcccgattctggagcagaccgccaagtccggtcgtccgctgctgatcatcgccgaggacattgaaggcgaagccctggcaactctggttgtcaacaagctgcgtggcgtgctgaacgtggctgccgtcaaggcacccggcttcggtgaccgtcgcaaggcaatgctggaagacatcgccaccctgaccggcggcctggtgatctccgaagaagtcggccacaagcttgagcaggccaccatggacatgctcggccgcgccaagcgcatcaccattgacaaggacaacaccaccatcatcgatggtgaaggcaaggaagccgacatccagggtcgcgtcaagcagatccgcgcccagatcgaagaaaccaccagcgactacgacaaggaaaagctgcaggagcgccttgccaaactggtgggcggcgtggccgtcatcaaggtcggcgcggcaaccgaagtcgagatgaaagaaaagaaggcccgcgtcgaggatgcgctgcacgctacccgtgccgctgttgatgaaggcgtggtccctggtggtggcgttgcctatatccgtacactgagcgcactggataacctgaatctggaaaacgagcagcagttcggcgtaaccgtggtcaagttggcacttgaagcgccgatccgccagatcgctgacaatgccggtatcgatgcctccatcgttgtcgacaaggtcaggaacggcaaggatgccttcggttacgacgcagcctccgatgagtatgtggacatgctcaaggccggcatcatcgacccgaccaaggtttcccgctccgctctgcagaacgcttcctccatcgccggtctgatgctgaccaccgaagcgctgatcgccgagaagccgcgtgaagaaggtgccatgggtggcggtatgcctggtggcatgggcggcatgggtggcatgggtggcatgggtggcatgggcggcatgatgtaa

SEQ ID NO: 9435 - protein, 554 aa, Pelobacter propionicus DSM 2379
MAAKIIKFDQEGRNAILKGVNILADTVKVTLGPKGRNVVIDKSFGAPLITKDGVTVAKEIELEDKFENMGAQLVKEVASKTSDVAGDGTTTATVLAQAIYRQGSKLVAAGHNPMEIKRGIDKAVETIVAELQKISKPIVDHKEIAQVGTISANNDKTIGDIIAEAMEKVGKEGVITVEEAKSMDTTLETVEGMQFDRGYLSPYFVTDPERMEAALENALILIHDKKISNMKDLLPILEQTAKSGRPLLIIAEDIEGEALATLVVNKLRGVLNVAAVKAPGFGDRRKAMLEDIATLTGGLVISEEVGHKLEQATMDMLGRAKRITIDKDNTTIIDGEGKEADIQGRVKQIRAQIEETTSDYDKEKLQERLAKLVGGVAVIKVGAATEVEMKEKKARVEDALHATRAAVDEGVVPGGGVAYIRTLSALDNLNLENEQQFGVTVVKLALEAPIRQIADNAGIDASIVVDKVRNGKDAFGYDAASDEYVDMLKAGIIDPTKVSRSALQNASSIAGLMLTTEALIAEKPREEGAMGGGMPGGMGGMGGMGGMGGMGGMM

SEQ ID NO: 9436 - DNA, 1644 bp, Azoarcus sp. BH72
  CDS (1)..(1644): transl_table=11
atggccgccaaacaagtgcttttcggtgacgacgcccgcgccaaggtcgtgcaaggcgtcaacatcctcgccaacgccgtcaaggtgaccctcggccccaagggccgcaacgtggtgctggagcgctccttcggcgcgcccaccgtgaccaaggacggcgtctcggtcgccaaggaaatcgagctgaaggacaagttcgagaacatcggcgcgcagctggtgaaggaagtcgcctccaagaccgccgacaacgccggtgacggcaccaccaccgccaccgtgctggcccaggccatcgtgcgcgaaggcttcaagttcgtcgccgccggcttcaacccggccgacctcaagcgcggcatcgacaaggcggtggccgccatcgtcgacgagctgaaggccctgtccaagccgaccaccaccagcaaggaaatcgcccaggtcggcgccatttccgccaattcggacgccgacatcggcgacatcatcgccaaggccatcgacaaggtgggcaaggaaggcgtcatcaccgtcgaggacggcaagtcgctgaataacgaactcgacgtggtcgagggtctgcagttcgaccgcggctacctgtcgccctacttcatcaacaacccggacaagcaggtcgccgaactcgacaaccccttcatcctgctgttcgacaagaagatctccaacatccgcgagctgctgccggtgctggagcaggtcgccaaggccggcagcccgctgctggtcgtcgccgaggatgtcgacggcgaagcgctcgccaccctggtggtgaacaccatccgcggcatcctcaaggtggtggcggtgaaggcgccgggcttcggcgaccgccgcaaggccattctggaagacatcgccatcctcaccggcggccaggtgatcgccgaggaagtcggcctcagcctggaaaaggccacgctcgccgacctcggccaggccaagcgcgtcgaggtgcaaaaggagaacaccacgctgatcgacggcgccggcagtgtcgaggcgatcaaggcgcgcgtgtcctcgatcgacgccctgatcgccgccgccacttccgactacgaccgcgagaagctgcaggaacgcaaggccaagctggctggcggcgtcgccgtcatcaaggtgggcgcggccaccgaagtggagctgaaggagaagaaggcgcgcgtcgaggatgcgctgcatgccacccgcgccgcggtggaagaaggcatcgtgcccggcggcggcgtcgccctgctgcgcgcccgtgccgcgatcaaggacctgaagggcgacaaccacgagcaggacgccggcatcaagatcgtgctgcgcgcggtggaagagccgctgcgccagatcgtcgccaacgccggcgacgaggcctcggtggtggtggcccgcgtgctcgaaggcagcggcaacttcggctacaacgccgccaacggccagtacggcgatctggtggaacagggcgtgctggaccccgccaaggtcacccgctccgcattgcagaacgccgcctcggtcgcggcgctgatcctcaccactgacgcgctggtggccgaacaggcggacgacaagccggccacggccggcctgccgcacggcgggccgggcgggttcggcgggccggagttctaa

SEQ ID NO: 9437 - protein, 547 aa, Azoarcus sp. BH72
MAAKQVLFGDDARAKVVQGVNILANAVKVTLGPKGRNVVLERSFGAPTVTKDGVSVAKEIELKDKFENIGAQLVKEVASKTADNAGDGTTTATVLAQAIVREGFKFVAAGFNPADLKRGIDKAVAAIVDELKALSKPTTTSKEIAQVGAISANSDADIGDIIAKAIDKVGKEGVITVEDGKSLNNELDVVEGLQFDRGYLSPYFINNPDKQVAELDNPFILLFDKKISNIRELLPVLEQVAKAGSPLLVVAEDVDGEALATLVVNTIRGILKVVAVKAPGFGDRRKAILEDIAILTGGQVIAEEVGLSLEKATLADLGQAKRVEVQKENTTLIDGAGSVEAIKARVSSIDALIAAATSDYDREKLQERKAKLAGGVAVIKVGAATEVELKEKKARVEDALHATRAAVEEGIVPGGGVALLRARAAIKDLKGDNHEQDAGIKIVLRAVEEPLRQIVANAGDEASVVVARVLEGSGNFGYNAANGQYGDLVEQGVLDPAKVTRSALQNAASVAALILTTDALVAEQADDKPATAGLPHGGPGGFGGPEF

SEQ ID NO: 9438 - DNA, 1635 bp, Psychromonas ingrahamii 37
  CDS (1)..(1635): transl_table=11
atgtctaaagaaattaaatttggaaatgattctcgtagcaaaatgttaaacggcgttaatatcttagccgatgcagttaaaatcactttagggccaaagggtcgtaatgttgtgatcgataaaagttacggtgcgccacaaattaccaaagacggtgtcacggttgctaaagaaattgaactggaagataagtttgaaaacatgggcgcacagatggtaaaagatgttgcgtcacaaactaatgatgctgccggtgacggaacaacaacggcaaccgtattggcgcaggctattattgctgatggtttaaaagccgttgctgctggtatgaatccaatggatttaaaacgcggtattgatcaaaccgtaaaagcggctgttgctgagttaaaaaaattatctacaccttgttcagattcaaaagccatcacacaggtaggcactatctcagccaactcggatcatgaaattggtgaaatcattgcgcaagcgatgcaaaaagttggtaaccagggtgttatcacggtagaagaaggtcaaggtctagaaactgaattagacgtggttgaaggtatgcagtttgatcgtggttacctgtctccttactttatgacaaatcatgaatccggtacggttgaacttgaaaacccgtatattttattagttgataaaaaaatcggtaatattcgtgaattattgcctacattagaagccgttgcaaaagcctctaagccattactgattattgcagaagatgtagaaggtgaagcattagcaacattagtagtcaacaatatgcgtggtatcgttaaagtctgcgccgttaaagcacctggttttggtgatcgccgtaaagcaatgttacaagatattgccacattaacgggcggtacggttatctctgaagagattggtttggatatggaaaaagtccaacttgaagatttaggtcaggctaaacgtgttgtgatcaacaaagatgaaaccactattattgatggtattggtgacgagtccgttatcaatgcacgagtaagccaaattaaacaacaaattgaagcttccacgtctgactacgataaagaaaaactgcaggaacgttcagctaaattagctggtggtgttgcggttattaaagttggcgcatccactgaagttgaaatgaaagagaaaaaagatcgcgtagatgatgcattgcatgcaacacgtgctgcggttgaagaaggtgttgttgccggtggtggtgttgctctggtacgtgtcgctgctatattaaaaggcttaacgggtgagaacgaagatcagaatgtgggtattcgtgttgcactgcgcgccatggaagcaccattgcgtcaaatcgtagaaaactgcggtgaagaagcttctgttgtagcaaacaatgtgcgccagggtgaaggaaactacggttacaatgcaactacaggtgaatacggtgatatgttagagatgggtattattgacccgactaaagtagcccgtagcgcactgcagtttgctgcatcggtagctgctcttatgatcacgactgaatgtatgatcaccgatcgccctgttgcggcttcagcagcagcgcctgatatgggcggtatgggtggaatgggcggtatgatgtga

SEQ ID NO: 9439 - protein, 544 aa, Psychromonas ingrahamii 37
MSKEIKFGNDSRSKMLNGVNILADAVKITLGPKGRNVVIDKSYGAPQITKDGVTVAKEIELEDKFENMGAQMVKDVASQTNDAAGDGTTTATVLAQAIIADGLKAVAAGMNPMDLKRGIDQTVKAAVAELKKLSTPCSDSKAITQVGTISANSDHEIGEIIAQAMQKVGNQGVITVEEGQGLETELDVVEGMQFDRGYLSPYFMTNHESGTVELENPYILLVDKKIGNIRELLPTLEAVAKASKPLLIIAEDVEGEALATLVVNNMRGIVKVCAVKAPGFGDRRKAMLQDIATLTGGTVISEEIGLDMEKVQLEDLGQAKRVVINKDETTIIDGIGDESVINARVSQIKQQIEASTSDYDKEKLQERSAKLAGGVAVIKVGASTEVEMKEKKDRVDDALHATRAAVEEGVVAGGGVALVRVAAILKGLTGENEDQNVGIRVALRAMEAPLRQIVENCGEEASVVANNVRQGEGNYGYNATTGEYGDMLEMGIIDPTKVARSALQFAASVAALMITTECMITDRPVAASAAAPDMGGMGGMGGMM

SEQ ID NO: 9440 - DNA, 1659 bp, Magnetospirillum magnetotacticum MS-1
  CDS (1)..(1659): transl_table=11
atggctgccaaggaagtcaagttctccaccgacgcccgcacccgtatgctgcgcggcgtcgacattctcgccgatgcggtgaaggtcactttgggccccaagggccgtaacgttgtgatcgagaagtcgttcggcgctccgcgcatcaccaaggacggcgtcaccgtcgccaaggagatcgagctggccgacaagttcgagaacatgggcgcccagatggtgcgcgaagtggcctcgaagaccgccgatctggccggtgacggcaccaccaccgccaccgttctggcccaggccatcgtccgcgagggcgtcaaggctgtcgccgctggcctcaatccgatggatctgaagcgcggcgtcgatctggccgtggccgccgtggtcgccgacgtcaagtcgcgctcgcgcaaggtcgccaccaatgccgagatcgcccaggtcggcaccatctccgccaatggcgagaaggaaatcggcgacatgatcgccaaggccatggaaaaggtcggcaacgagggtgtcatcaccgtcgaggaagccaagggcctggacaccgagctggacgtggtcgagggcatgcagttcgaccgtggctataccagcccgtatttcgtgaccaatgccgagaagatgaccgtcgagctggataacccctatatcctgctgcacgagaagaagctgtcgggtctgcagcccctgctgccggtgctcgagcaggtggtccagtcgggccgtccgctggtgatcatcgccgaggatatcgagggcgaggccctggccaccctggtggtcaacaagctgcgcggcggcctgaaggtcgcggccgtgaaggctccgggcttcggcgatcgccgcaaggccatgctggaagacatcgccatcctgaccggtggccaggtcatcagcgaagacctgggcatcaagctggaaagcgtcaacctggagatgctgggcacgtccaagcgcatcaccatcaccaaggaagacaccaccatcgtcgacggctcgggcgacaagtccgccatcgacgcccgctgcaagcagatccgcgcgcaggtcgaggaaaccacctcggactacgaccgcgagaagctgcaggagcgtctggccaagctggctggcggcgtggccgtcatcaaggtcggcggcgcctccgagatcgaggtgaaggagcgcaaggatcgcgtcgatgacgccctgcacgccacccgcgccgcggtcgaggaaggcatcgtcccgggcggcggcgtcgccctgctgcatgccgtcaaggccctggaaggcctgaagtccggcaatgccgatcaggaagtcggcatcagcatcgtgcgtcgcgccctgcaggcccccgtgcgtcagatcgccgaaaacgccggtcatgacggcgccgtggttgctggcaagatcggcgagtccaaggatctggccttcggcttcgacgctcagaccggcgtctataccgacatgatcaaggccggcatcatcgacccgaccaaggtcgtgcgtaccgccctgcaggacgccgcttcggtggccggtctgctgatcaccaccgaagccatgatcgccgagcgtcccaagaaggacgccggtggcatgcccggcggcgacatgggcggcatgggcggcatgggtggcatgggcggcatggacttctaa

SEQ ID NO: 9441 - protein, 552 aa, Magnetospirillum magnetotacticum MS-1
MAAKEVKFSTDARTRMLRGVDILADAVKVTLGPKGRNVVIEKSFGAPRITKDGVTVAKEIELADKFENMGAQMVREVASKTADLAGDGTTTATVLAQAIVREGVKAVAAGLNPMDLKRGVDLAVAAVVADVKSRSRKVATNAEIAQVGTISANGEKEIGDMIAKAMEKVGNEGVITVEEAKGLDTELDVVEGMQFDRGYTSPYFVTNAEKMTVELDNPYILLHEKKLSGLQPLLPVLEQVVQSGRPLVIIAEDIEGEALATLVVNKLRGGLKVAAVKAPGFGDRRKAMLEDIAILTGGQVISEDLGIKLESVNLEMLGTSKRITITKEDTTIVDGSGDKSAIDARCKQIRAQVEETTSDYDREKLQERLAKLAGGVAVIKVGGASEIEVKERKDRVDDALHATRAAVEEGIVPGGGVALLHAVKALEGLKSGNADQEVGISIVRRALQAPVRQIAENAGHDGAVVAGKIGESKDLAFGFDAQTGVYTDMIKAGIIDPTKVVRTALQDAASVAGLLITTEAMIAERPKKDAGGMPGGDMGGMGGMGGMGGMDF

SEQ ID NO: 9442 - DNA, 1635 bp, Bacillus cereus G9241
  CDS (1)..(1635): transl_table=11
atggcaaaagatattaaatttagtgaagaagcacgtcgttcgatgcttcgcggtgtcgacactcttgcaaatgcagtaaaagtaacgcttggaccaaaaggtcgtaacgttgttcttgagaaaaaattcggttcaccacttattacaaatgacggtgtaacaatcgcaaaagaaattgaattagaagatgcattcgaaaacatgggtgcgaaattagtagcagaagttgctagcaaaacaaatgatgtagctggtgacggaacaacaactgcaactgtattagcacaagctatgattcgtgaaggtcttaaaaacgtaacagctggtgcgaacccaatgggtcttcgtaaaggtattgaaaaagctgttactgctgcaatcgaagaattaaaaacaatttctaaaccaatcgaaggtaaatcttctatcgcacaagtagctgctatttctgcggctgacgaagaagtaggtcaattaattgctgaagcaatggagcgcgttggtaacgacggcgttattactttagaagaatctaaaggtttcacaacagaattagacgtagtagaaggtatgcaatttgatcgtggatatgcatctccttacatgattactgattctgacaaaatggaagcagttcttgataacccatacatcttaatcactgacaaaaagatttctaacattcaagaaatcttaccagtattagagcaagtggtacaacaaggtaaaccacttcttatcatcgctgaagatgtagaaggcgaagctttagctacgttagtagtgaacaaacttcgtggtacattcaatgtagtagctgttaaagctcctggatttggtgaccgtcgtaaagcaatgctagaagatatcgcaatcttaactggtggcgaagtaatcactgaagaattaggccgtgacttaaaatctgctacagttgaatctttaggacgcgctggtaaagttgttgtaacgaaagaaaacacaactgtagttgaaggtatcggaaatacacaacaaatcgaagctcgcatcggtcaaatccgtgcgcaattagaagaaactacttctgaattcgatcgtgaaaaattacaagagcgtcttgcaaaacttgcaggtggcgtagcagtaattaaagtaggtgcagcaactgaaactgagttgaaagagcgcaaacttcgcattgaagatgcacttaactcaactcgtgcagcagtagaagaaggtatcgttgcaggtggtggtacttcacttatgaacgtatacacgaaagtagcttctatcgtagctgaaggcgacgaagcaacaggtatcaacatcgtacttcgcgcactagaagagccagttcgtcaaatcgcaatcaacgctggtctagaaggatctgtagttgtagagcgtctaaaaggcgaaaaagtaggcgttggtttcaacgcagcaactggcgagtgggttaacatgcttgaaactggtatcgtagatccagctaaagtaactcgctctgcacttcaaaacgcagcatctgttgcagctatgttcttaacgactgaagctgtagtagctgacaaaccagaaccaaatgcaccagcaatgcctgacatgggcggcatgggcatgggcggtatgggcggaatgatgtaa

SEQ ID NO: 9443 - protein, 544 aa, Bacillus cereus G9241
MAKDIKFSEEARRSMLRGVDTLANAVKVTLGPKGRNVVLEKKFGSPLITNDGVTIAKEIELEDAFENMGAKLVAEVASKTNDVAGDGTTTATVLAQAMIREGLKNVTAGANPMGLRKGIEKAVTAAIEELKTISKPIEGKSSIAQVAAISAADEEVGQLIAEAMERVGNDGVITLEESKGFTTELDVVEGMQFDRGYASPYMITDSDKMEAVLDNPYILITDKKISNIQEILPVLEQVVQQGKPLLIIAEDVEGEALATLVVNKLRGTFNVVAVKAPGFGDRRKAMLEDIAILTGGEVITEELGRDLKSATVESLGRAGKVVVTKENTTVVEGIGNTQQIEARIGQIRAQLEETTSEFDREKLQERLAKLAGGVAVIKVGAATETELKERKLRIEDALNSTRAAVEEGIVAGGGTSLMNVYTKVASIVAEGDEATGINIVLRALEEPVRQIAINAGLEGSVVVERLKGEKVGVGFNAATGEWVNMLETGIVDPAKVTRSALQNAASVAAMFLTTEAVVADKPEPNAPAMPDMGGMGMGGMGGMM

SEQ ID NO: 9444 - DNA, 1614 bp, Azotobacter vinelandii
  CDS (1)..(1614): transl_table=11
atggcgaagagccgcatcctgtttcgcaacgccgcgcgcgagaaggtcctgcagggggcgacccaactggccgacgcggtgcgcgtgaccctggggccgaaatccaagtcggtactgatccagaggcagtggggcccgcccacggtctgcaacgatggtgtgaccatcgccaagcaggtgagcctggaggatgccgaggagaacctcggcgcggccatgctgcgccaggccgccgagcgcaccggcgaggcggtcggcgacggtaccagcacctccaccgtgctggcccaggcgatcttcgccgacggtgtgcgcaacgtggtcgccggcgccagcggcatcgatctcaagcgtggcctcgaccgcggcctgcaggtggctgtcgactccctgaaggcgcagtctcggcctgtgctggagcgcaaggaaaaggctcaggtcgccagtatttccgcgcacaacgacgacgagatcggcgagttggtggccgaggccatggagaaggtcggcggcgagggcgtcatcaccgtcgaggaatcgaagaccaccgagaccatcctcgaagtggtcgagggcatgcagttcgagcgcggctacgtgtcgccgtacttcgtcagcgatccggagaagatgcaggccgtgctggaggatgccttcgtcctgctctgcgagcagaaggtcagcctgttgcaggatctcattcccctgctggaggaggtcgccaaggccggccggccgctgctgttcgtcgccgaggacatcgagggcgaggcgctggccacgttgatcctcaaccatatccgcggcgtgctgcatgccgtggcggtcaaggcgccgggtttcggcgaccggcgcaaggaaatgctggaggacatcgccgtgctgaccggcggcgaagtgatcagccgcgatctggggcgcagcctggcggacaccaccctggcccagctcggtcgcatccagcgcgtggtggtcgacaaggaaaccaccacgctgatcggcggcgccggcgactcggcggcgctcgaatcgaggatgaagcagatccgcgcgcagatcgacaagaccgctggcgactacgaccgcgagaagctacaggagcgcctggccaagctctccggtggcgtggcggtgatccgtgccggtgcaccgaccgaggccgaaatgaaggcccgcaaggacgccctggacgatgccatcgcggccaccaaggcggcgatcgccgaaggcatagtccccggcggcggtctcgcgctgctgcgcgcggtgccggcgctgctcgccgaggaggcccggctcgaaggcgacgcgcgcaccggtctgcagatcctgcgccgcgccctggagacgccggtgcggaccatcgccgagaattccgcggtggacgatggcgtggtggtcgccaggctgctgggcgaggagggcgatatcggcttcgatgcggcgcagaaccgctatgtcgacatgttcgaggccggcatcatcgatccgaccaaagtggtgcgggtggccctggaaaacgccgtatcggtggccagcatcctgctgctgaccgaggcgaccatgaccgaactgcccgagcccgggcccgaggagccgcgcctgccggagtga

SEQ ID NO: 9445 - protein, 537 aa, Azotobacter vinelandii
MAKSRILFRNAAREKVLQGATQLADAVRVTLGPKSKSVLIQRQWGPPTVCNDGVTIAKQVSLEDAEENLGAAMLRQAAERTGEAVGDGTSTSTVLAQAIFADGVRNVVAGASGIDLKRGLDRGLQVAVDSLKAQSRPVLERKEKAQVASISAHNDDEIGELVAEAMEKVGGEGVITVEESKTTETILEVVEGMQFERGYVSPYFVSDPEKMQAVLEDAFVLLCEQKVSLLQDLIPLLEEVAKAGRPLLFVAEDIEGEALATLILNHIRGVLHAVAVKAPGFGDRRKEMLEDIAVLTGGEVISRDLGRSLADTTLAQLGRIQRVVVDKETTTLIGGAGDSAALESRMKQIRAQIDKTAGDYDREKLQERLAKLSGGVAVIRAGAPTEAEMKARKDALDDAIAATKAAIAEGIVPGGGLALLRAVPALLAEEARLEGDARTGLQILRRALETPVRTIAENSAVDDGVVVARLLGEEGDIGFDAAQNRYVDMFEAGIIDPTKVVRVALENAVSVASILLLTEATMTELPEPGPEEPRLPE

SEQ ID NO: 9446 - DNA, 1689 bp, Crocosphaera watsonii WH 8501
  CDS (1)..(1689): transl_table=11
atggcaaaaattgtctcatttagtgatgaatccagacgcgcattagaacaaggggttaacgccctcgctgatgccgtcaaaattacccttggtcccaaaggccgcaacgtattgttagagaagaaatttggcgcaccccaaattgttaacgacggaatcaccgttgctaaagaaattgaattagaagatcccctcgaaaatacaggggcaagattaatccaagaaatcgcctctaaaaccaaagaagtggctggagatggaactactactgccacagttattggtcaagctttgatcaaagaaggactcaaaaacgtcattgccggggctaaccctgtggccttacgtcgtggtatggaaaaaaccatggcttatttagtccaggaaatcgaaaatattgctaaacctgtagaaggggcagcgatcgcccaagttgccaccgtttcttctggtaacgaccaagaagtgggtgacatgatctccttggccatggataaagtcaccaaagacggcgttatcaccgtagaagaatctaagtctcttaataccgagttagaggtagttgaagggatgcagatcgatcgcggttatatctctccttatttcatcaccgatcaagaacggcaacaagtggaatttgaagatgccttaatcttgatcaccgataaaaaaattagtgcgatcgccgatttggtccccattttagaaaacgttgcccgtgcaggtaaacctctattaatcgtctccgaagacatagaaggggaagccctagccactctggtagtcaataaagccagaggtgtcttaaatgtggctgcgattaaagcccctgctttcggactgagacgtaaagctatcttacaagatattgccattctcaccggaggtagcctgatctcagaagatgtgggcttaagtctggagacagtggacttggatatgttgggacaagctaccaagatcaatatttccaaagataacaccaccatcgttgctaacaccgatgatagggtaaaagcagcagtggacaaacgtattgaccaactacgtagagaactggccgctactgattccagttacgatacagaacaactacaaaaacgcatcgctaagttagccggtggggtagctgttattaaggtaggggctgccacagaaacggaattaaaggatcgtaaactacggatcgaagatgccctcaacgctactaaggcagccgtagatgagggtatcgtccctggaggtggtactaccttaattcacttagcttctaaggtggctgagtataaagatagcctcaccaatgctgaagaaaaagtggctgctgatctcgtagccaaggcattagaagcccccttacgccagttagcaaataatgctggtttagagggttctgtaattgttgaaaaagtcagagaaagcgactttaacatcggttacaacgccattaccggtgaggttgaagacatgatttctgccggtattattgaccctgctaaggtggttcgttccgctttacaaaatgctgcttctattgctggtatggttttaaccacagaagctttagtggttgaaaaacccgaaccagaagcccccgcagcccctgatatgggcggcatgggcggcatgggcggcatgggcggcatgggcggcatgggcggcatgggcggcatgggtatgggcttctaa

SEQ ID NO: 9447 - protein, 562 aa, Crocosphaera watsonii WH 8501
MAKIVSFSDESRRALEQGVNALADAVKITLGPKGRNVLLEKKFGAPQIVNDGITVAKEIELEDPLENTGARLIQEIASKTKEVAGDGTTTATVIGQALIKEGLKNVIAGANPVALRRGMEKTMAYLVQEIENIAKPVEGAAIAQVATVSSGNDQEVGDMISLAMDKVTKDGVITVEESKSLNTELEVVEGMQIDRGYISPYFITDQERQQVEFEDALILITDKKISAIADLVPILENVARAGKPLLIVSEDIEGEALATLVVNKARGVLNVAAIKAPAFGLRRKAILQDIAILTGGSLISEDVGLSLETVDLDMLGQATKINISKDNTTIVANTDDRVKAAVDKRIDQLRRELAATDSSYDTEQLQKRIAKLAGGVAVIKVGAATETELKDRKLRIEDALNATKAAVDEGIVPGGGTTLIHLASKVAEYKDSLTNAEEKVAADLVAKALEAPLRQLANNAGLEGSVIVEKVRESDFNIGYNAITGEVEDMISAGIIDPAKVVRSALQNAASIAGMVLTTEALVVEKPEPEAPAAPDMGGMGGMGGMGGMGGMGGMGGMGMGF

SEQ ID NO: 9448 - DNA, 1623 bp, Crocosphaera watsonii WH 8501
  CDS (1)..(1623): transl_table=11
atggctaaatccattgtttacaacgaagatgcacgtcgtgctttagaaagaggtatggacatcctagctgagtctgtggccgttacccttggacctaaaggccgcaacgttgtcctagaaaagaaatttggcgccccgcaaattattaatgacgggatcaccattgcaaaagaaattgaattagaagaccatatcgaaaataccggagtttccttgattcgtcaagcagcttctaaaaccaacgatgtcgctggagacggaactaccaccgctacagttttagcccatgcgatcgttaaagagggtttacgcaacgttgcggccggtgctaaccccatcgctttgaaacggggtatcgataaagctaccgacttcttagtagaaaaaatcgcggcccacgctcaacccatcgcagactcaaaagcgatcgctcaagtcggtgccatctccgcaggaaacgacgaagaagttggtgcaatgatcgccgaagcgatggataaagtaggtaaagaaggggttatttccttagaagaaggaaagtccatgttcaccgaactggaaatcaccgaagggatgcgctttgataaagggtatatttccccttattttgtcaccgatgctgaacgcatggaagcagtatttgaagaaccctgcatcctcttaacggacaaaaaaattaacctcgtacaagacttagtgcctgttttagagcaagttgctcgtcaaggtaagtctttaatgatcatcgccgaagatatcgaaaaagaagccttagcaaccctggtggttaaccgtttacggggtgtgttaaacgtagctgcggtgaaagctcctggatttggcgatcgccgtaaacagatgctcgaagacatcgctgttttaactggtggtactgttatcagcgaagatgctggcctcaagttagagaatgccaagttagaaatgttaggctctgctcgtcgggtaactttaactaaagacgacacaactattgttgccgaaggcaacgaagaaggggttaaatctcgttgtgagcttatccgtcgtcaaatggaagatacagagtcttcctacgatcaagagaagttacaagagcgtttagctaagttatccggtggtgtagctgtcatcaaagtgggtgctgctactgaaaccgaaatgaaggatcgtaagttacgtttagaagatgccatcaacgccacaaaagcagccgtagaagagggtatcgtccctggtggtggtaccaccttagcacacctcactcctaccctagaagagtggtctaacggcaatctagctaacgaagagttaaccggtgctttgattgttgctcgtgctttaactgcacccttaaaacgtattgctgaaaatgctggtcaaaacggtgcggtagttgctgagagagtcaaagaacaagactttaacaccggttacgacgctgctagtggtcagtttaccgatatgttagctgctggtatcgttgatcctgctaaagtgactcgttccggtttacaaaatgctgcttcgatcgcaggtatgatcctcaccaccgaatgtattgtggtggataaacctgagaaagaaaaagcacctgctggtggtggtggagacttcgactactaa

SEQ ID NO: 9449 - protein, 540 aa, Crocosphaera watsonii WH 8501
MAKSIVYNEDARRALERGMDILAESVAVTLGPKGRNVVLEKKFGAPQIINDGITIAKEIELEDHIENTGVSLIRQAASKTNDVAGDGTTTATVLAHAIVKEGLRNVAAGANPIALKRGIDKATDFLVEKIAAHAQPIADSKAIAQVGAISAGNDEEVGAMIAEAMDKVGKEGVISLEEGKSMFTELEITEGMRFDKGYISPYFVTDAERMEAVFEEPCILLTDKKINLVQDLVPVLEQVARQGKSLMIIAEDIEKEALATLVVNRLRGVLNVAAVKAPGFGDRRKQMLEDIAVLTGGTVISEDAGLKLENAKLEMLGSARRVTLTKDDTTIVAEGNEEGVKSRCELIRRQMEDTESSYDQEKLQERLAKLSGGVAVIKVGAATETEMKDRKLRLEDAINATKAAVEEGIVPGGGTTLAHLTPTLEEWSNGNLANEELTGALIVARALTAPLKRIAENAGQNGAVVAERVKEQDFNTGYDAASGQFTDMLAAGIVDPAKVTRSGLQNAASIAGMILTTECIVVDKPEKEKAPAGGGGDFDY

SEQ ID NO: 9450 - DNA, 1650 bp, Sulfitobacter sp. NAS-14.1
  CDS (1)..(1650): transl_table=11
atgtctgctaaggacgtaaaattcgggaccgacgcccgtaacaagatgcttaagggtgtgaacatccttgccgatgccgtgaaagtcacactgggccccaaaggccgtaacgttgtgctggacaaatcctttggcgcgcctcgcatcaccaaagacggtgtatccgtagcgaaagaaatcgaactggaagacaagttcgaaaacatgggcgcacagatggtcaaggaagttgcttcccggaccaacgacgaagcgggtgacggtacaacaaccgcaaccgttctggcccaagccatcgttaaagaaggcatgaaatcggttgccgctggcatgaacccgatggacctgaagcgcggcatcgacatggcgaccaccactgtcgtcgaagcgatcaaagcagcagcgcgccctgtcaacgacagcgacgaagttgcccaagtcggcaccatctctgcaaacggcgagaaagaaatcggccgtcagatcgcggacgcgatgcagaaagtcggcaacgaaggtgtgatcaccgtcgaagagaacaaaggcctggaaacagagaccgatgttgttgaaggcatgcagttcgaccgcggttacctgtccccttacttcgtcaccaactccgacaagatgactgtcgagctggaagacgcgattatcctgctgcacgagaaaaaactgtcctcgctgcagccaatggttcccctgcttgagcaagtgatccagtcgcaaaaaccactgctgatcatctcggaagatgttgaaggcgaagcgctggcaactctggttgtcaacaaactgcgcggcggcctgaaaatcgcagcggtcaaagcacctggtttcggcgatcgccgcaaagccatgctgcaagaccttgcgatcctgacaggcggtcaagtgatctccgaagatctgggcatgaagctcgagtccgttacaatggacatgctgggttcggccaagaaagtcaccatcaccaaagacgaaacaacaatcgttgacggcgctggcgagaaggcggagattgaagcacgtgttgctcagatccgtaaccagatcgaagaaaccacatccgactacgacaaagagaagctgcaagaacgcgttgccaaactggcaggcggtgttgccgtgatccgcgttggcggcatgtccgaagttgaagttaaagagcgcaaagaccgcgttgatgatgccctgaacgcgacacgtgccgctgttcaagaaggtatcgttgttggtggtggtgttgcactggttcaagcgggcaaaaagctcgaagggctgacaggcgacaacgcggaccagaacgttggtatcggcatcgtccgcaaggcgctcgaagcgcctctgcgtcagatcgctgagaacgctggtgttgacggttccgtagtggccggcaaaatccgcgaaagcgacgacctgaagttcggcttcaacgctcagaccgaagaatatggcgacatgttcaaattcggtgttatcgaccctgctaaagttgtgcgtacagcgctgcaagacgcggcatccgttgctggtctgctgatcacaaccgaagccatggttgccgacaaaccgtcgaaagacggcggcgcagccggcggcatgcccgacatgggcggcatgggcggcatgggcggcatgatgtaa

SEQ ID NO: 9451 - protein, 549 aa, Sulfitobacter sp. NAS-14.1
MSAKDVKFGTDARNKMLKGVNILADAVKVTLGPKGRNVVLDKSFGAPRITKDGVSVAKEIELEDKFENMGAQMVKEVASRTNDEAGDGTTTATVLAQAIVKEGMKSVAAGMNPMDLKRGIDMATTTVVEAIKAAARPVNDSDEVAQVGTISANGEKEIGRQIADAMQKVGNEGVITVEENKGLETETDVVEGMQFDRGYLSPYFVTNSDKMTVELEDAIILLHEKKLSSLQPMVPLLEQVIQSQKPLLIISEDVEGEALATLVVNKLRGGLKIAAVKAPGFGDRRKAMLQDLAILTGGQVISEDLGMKLESVTMDMLGSAKKVTITKDETTIVDGAGEKAEIEARVAQIRNQIEETTSDYDKEKLQERVAKLAGGVAVIRVGGMSEVEVKERKDRVDDALNATRAAVQEGIVVGGGVALVQAGKKLEGLTGDNADQNVGIGIVRKALEAPLRQIAENAGVDGSVVAGKIRESDDLKFGFNAQTEEYGDMFKFGVIDPAKVVRTALQDAASVAGLLITTEAMVADKPSKDGGAAGGMPDMGGMGGMGGMM

SEQ ID NO: 9452 - DNA, 1635 bp, Croceibacter atlanticus HTCC2559
  CDS (1)..(1635): transl_table=11
atggcaaaagatataaaatttgatttagcagcaagagacggcattaaacgcggtgtcgatgctttagctaacgcagtaaaagtaactctaggaccaaaaggtcgtaacgtaattattagcaaatcatttggagcaccacaggttacaaaagatggtgttagtgttgctaaggaaatagaattagaagacgctcttgaaaatatgggagcgcaaatggttaaagaagtagcttcaaaaactaatgatttagctggagacggtacaactactgctacagttttggctcaagcaatagtagcagaaggtttaaagaatgttgctgcaggtgctaacccaatggacctaaaacgcggtatagataaagctgtagaggcattaacaaaagaccttgcaaagcaatctaaagaagtaggtaactcttcagaaaaaattaagcaagtggcatctatttctgcaaacaatgatgaccaaattggtgagcttattgcacaggcatttggtaaagtaggaaaagaaggtgttatcactgttgaagaagctaaaggaacagatacgtatgtagatgttgtcgaaggtatgcagtttgaccgtggtttcttatcgccatactttgttacagatagcgaaaagatgacaacagacttagagaacccttatattcttttagtagataagaaggtgtcttctatgaaagatttattaccagttttagagccagttgctcaaacaggtaagccgttgttaattattgcagaagatgtagacggtgaagcattggcaactcttgtagtaaataaattacgcggttctttaaaaattgcagctgtaaaagcaccaggatttggagaccgtcgtaaagcaatgcttgaagatatagcaatcctaactggtggtcaggtaatttctgaagaaagaggctttactcttgaaaatgcaactatcgagcaattaggtacagcagaaactgtaactatagataaggataacacaacagttgtaaatggttctggagataaagacatgattaagaatcgtgttaatcagattaaatctcaaattgaaactacaacttcagattacgataaagaaaaattacaagagcgtttagctaaactttctggtggtgttgctgtactttatgtaggtgctgcaagtgaagttgagatgaaagagaaaaaagatcgtgtagatgatgcacttcatgcaactcgtgcagctgtagaagaaggtattgttgctggtggtggtgttgcattagtacgcgctaaaaaagttttagagaaattaacttctgaaactttagatgaaactaccggtatacagattgtatctaaagctatcgaggcaccattacgtacaattgtacaaaatgcaggtggcgaaggttctgttgttattaacaaagttcttgaaggtaagaaagactttggatatgatgctaaaacagagcaatatgtagatatgcttaaagctggaattatagatcctaaaaaagtaacacgtatagcattagaaaatgctgcatctgttgccggaatgatcttaactacagaatgtgctttaatcgatattaaagaagataacgctggtggcggaatgcctccaatgggtggcggaatgccaggaatgatgtaa

SEQ ID NO: 9453 - protein, 544 aa, Croceibacter atlanticus HTCC2559
MAKDIKFDLAARDGIKRGVDALANAVKVTLGPKGRNVIISKSFGAPQVTKDGVSVAKEIELEDALENMGAQMVKEVASKTNDLAGDGTTTATVLAQAIVAEGLKNVAAGANPMDLKRGIDKAVEALTKDLAKQSKEVGNSSEKIKQVASISANNDDQIGELIAQAFGKVGKEGVITVEEAKGTDTYVDVVEGMQFDRGFLSPYFVTDSEKMTTDLENPYILLVDKKVSSMKDLLPVLEPVAQTGKPLLIIAEDVDGEALATLVVNKLRGSLKIAAVKAPGFGDRRKAMLEDIAILTGGQVISEERGFTLENATIEQLGTAETVTIDKDNTTVVNGSGDKDMIKNRVNQIKSQIETTTSDYDKEKLQERLAKLSGGVAVLYVGAASEVEMKEKKDRVDDALHATRAAVEEGIVAGGGVALVRAKKVLEKLTSETLDETTGIQIVSKAIEAPLRTIVQNAGGEGSVVINKVLEGKKDFGYDAKTEQYVDMLKAGIIDPKKVTRIALENAASVAGMILTTECALIDIKEDNAGGGMPPMGGGMPGMM

SEQ ID NO: 9454 - DNA, 1593 bp, Roseovarius sp. 217
  CDS (1)..(1593): transl_table=11
atgctcaagggcgtgaacatcctggccgacgcggtcaaggtgacactgggtcccaagggccgcaatgtggttctggacaaatcctttggctctccgcgcatcaccaaggacggtgtatcggttgccaaggaaatcgagctggaagacaagttcgagaacatgggcgcgcagatggtgaaagaagtcgccagccgcaccaatgatgaggccggcgacggcaccaccaccgcgacggttctggcgcaagccatcgtcaaggaaggtatgaaggcggttgccgccggcatgaacccgatggatctcaagcgcggcatcgaccaggcaacgagcaaggttgtagaggccatcaaggccgcatcgcgccccgtgaacgacagcgccgaagttgcgcaggtcggcacaatctctgccaatggcgagtccgaaatcggtcgtcagatcgcagaagcgatgcagaaggtcggcaacgaaggtgtcatcaccgtcgaagagaacaagggcctcgagaccgagaccgatgtggtcgaaggcatgcagttcgaccgtggctatctcagcccctacttcgtgaccaacagcgacaagatgattgccgatctggatgattgtctcatcctgctgcacgagaagaaactgtcgagccttcagccgatggtgccgctgctcgagcaggtgatccagagccagaagccgctcttgatcattgccgaggacgtcgaaggcgaagcgctggcgactctcgtggtcaacaagctgcgtggcggtctcaagattgcggctgtcaaggcccccggctttggcgatcgtcgcaaggcgatgctgcaggatatcgccattctgaccggcggtcaggtgatctctgaagatctgggcatgaagctcgagaatgtcggcatggacatgcttggctctgccaagaaaatctcgatcaccaaggatgcgaccaccatcgttgatggtgcaggcgagaaggccgagatcgaagcacgggtcagccagatccgtcagcagatcgaggacaccacgtctgattacgatcgcgaaaagctgcaagagcgcgtggccaaactggccggtggtgttgccgtgatccgcgttggcggcatgaccgaaacggaagtgaaagagcgcaaggaccgcgtcgatgacgcgctcaatgcaacccgcgcagccgtgcaagaaggcatcgttgtcggcggtggcgtggctctggttcaggctgccaagaaactggctggtcttgagggtgaaaacagcgaccagaacgccgggatcgccatcgtgcgtcgcgcgctggaagcgccgctgcgtcagatcgccgagaatgctggtgttgacggatctgtcgtcgcgggcaaaatccgtgagagcgaagatcccaagttcggctacaacgcccagaccgacgaatatggcgacatgttcaagtttggcgtcatcgacccggccaaggttgtccgcaccgcgcttgaggatgcctcctcgatcgctggcctgctgatcaccaccgaagcgatggtggccgacaagccgcagaaggaaagctctggcggcggtatgcccgacatgggcggcatgggcggcatgatgtaa

SEQ ID NO: 9455 - protein, 530 aa, Roseovarius sp. 217
MLKGVNILADAVKVTLGPKGRNVVLDKSFGSPRITKDGVSVAKEIELEDKFENMGAQMVKEVASRTNDEAGDGTTTATVLAQAIVKEGMKAVAAGMNPMDLKRGIDQATSKVVEAIKAASRPVNDSAEVAQVGTISANGESEIGRQIAEAMQKVGNEGVITVEENKGLETETDVVEGMQFDRGYLSPYFVTNSDKMIADLDDCLILLHEKKLSSLQPMVPLLEQVIQSQKPLLIIAEDVEGEALATLVVNKLRGGLKIAAVKAPGFGDRRKAMLQDIAILTGGQVISEDLGMKLENVGMDMLGSAKKISITKDATTIVDGAGEKAEIEARVSQIRQQIEDTTSDYDREKLQERVAKLAGGVAVIRVGGMTETEVKERKDRVDDALNATRAAVQEGIVVGGGVALVQAAKKLAGLEGENSDQNAGIAIVRRALEAPLRQIAENAGVDGSVVAGKIRESEDPKFGYNAQTDEYGDMFKFGVIDPAKVVRTALEDASSIAGLLITTEAMVADKPQKESSGGGMPDMGGMGGMM

SEQ ID NO: 9456 - DNA, 1644 bp, Idiomarina baltica OS145
  CDS (1)..(1644): transl_table=11
atggcagcaaaagaagtaaaatttggcaataacgcgcgtcaaagaatgttgaaaggtgtaaacacccttgcagacgcggttaaagtgaccttaggtcctaaaggccgtaacgttgttctagataaatcattcggcgcaccaaccatcactaaagatggtgtttctgtagcgaaagaaatcgagcttgaagacaagttcgaaaacatgggcgcgcagatggttaaagaggttgcctctaaagctaacgacgaagcaggcgacggtacaaccactgcaacggttttagcacaagctatcgtaaacgaaggcgtgaaagcagttgcagcgggtatgaacccaatggatctgaagcgcggtatcgataaagcagttactgccgctgtcgaagaactgaagaagatctctcaaccttgtgctgacagcaaagccattgcacaagtaggtactatctcagctaactctgatagcaccattggagaaatcattgctaaggcgatggataaagtcggtcaggaaggcgttattaccgttgaagaaggtcaagcgctgcaagacgagcttgatgttgtcgaaggtatgcagttcgaccgtggttacttgtctccttacttcatcaataaccaagaaagcggctctgttgaactcgacaacccattcatcttgttggttgataagaaagtatcgaacattcgtgaattactgcctgtacttgaaggcgtatcgaaagcaggtaagccattgcttattatcgctgaggacgttgaaggcgaagcgttggcgaccttggttgttaacaacatgcgcggcattgtaaaagttgcggctgttaaggcacctggtttcggcgatcgtcgtaaagctatgcttcaagacatcgcggtattgaccggtggtaccgtcgtttctgaagaaatcggcatggagcttgaaaaaactcagctcgaagacttgggtactgctaaacgtgttgttattactaaagacaacaccactgttgttgatggtaatggtgatgacgctgcgattgaaggtcgtgtcacgcaaatcaaacaacagatggaagaaacttcatctgattacgaccgtgagaaactacaagagcgtcttgcgaaactcgctggcggtgttgcggtaattaaagttggcgcagcaactgaagttgagatgaaagagaagaaagctcgagtggaagacgcgttgcacgcaactcgtgctgcggttgaagaaggtgttgtaccgggtggtggcgttgccttggttcgcgctgcaagcaagctagcggaattaaccggcgacaatgaagagcaaaacgtaggtattcgcatgatgctacgtgcgatggaagcaccactgcgtcaaatcgcatataacgcaggtgctgaagcgtctgttgttgcaaaccgcgtacgtgaaggtgaaggtaacttcggctacaacgcaggtaatgacacctacggtgacatgctagagatgggtatccttgacccaactaaagttactcgctctgcactgcaatttgctgcatcggttggttcattgatgatcacgaccgaagcaatggttgccgaaatccctaaagacgatgagtctgcgggtggtatgggcgacatgggtggcatgggcggtatgggcggcatgatgtaa

SEQ ID NO: 9457 - protein, 547 aa, Idiomarina baltica OS145
MAAKEVKFGNNARQRMLKGVNTLADAVKVTLGPKGRNVVLDKSFGAPTITKDGVSVAKEIELEDKFENMGAQMVKEVASKANDEAGDGTTTATVLAQAIVNEGVKAVAAGMNPMDLKRGIDKAVTAAVEELKKISQPCADSKAIAQVGTISANSDSTIGEIIAKAMDKVGQEGVITVEEGQALQDELDVVEGMQFDRGYLSPYFINNQESGSVELDNPFILLVDKKVSNIRELLPVLEGVSKAGKPLLIIAEDVEGEALATLVVNNMRGIVKVAAVKAPGFGDRRKAMLQDIAVLTGGTVVSEEIGMELEKTQLEDLGTAKRVVITKDNTTVVDGNGDDAAIEGRVTQIKQQMEETSSDYDREKLQERLAKLAGGVAVIKVGAATEVEMKEKKARVEDALHATRAAVEEGVVPGGGVALVRAASKLAELTGDNEEQNVGIRMMLRAMEAPLRQIAYNAGAEASVVANRVREGEGNFGYNAGNDTYGDMLEMGILDPTKVTRSALQFAASVGSLMITTEAMVAEIPKDDESAGGMGDMGGMGGMGGMM

SEQ ID NO: 9458 - DNA, 1635 bp, Dokdonia donghaensis MED134
  CDS (1)..(1635): transl_table=11
atggcaaaagacattcaatttaatatagaagcacgcgacggattaaagcgtggtgtagataaacttgcaaacgcagtaaaagttactttaggacctaaaggtcgtaacgtgattatttcaaaatcttttggagcgccacacgtaacaaaggatggtgtaactgtagcaaaagaaatagaactagaagatgctcttgaaaatatgggagcacagatggtaaaagaagttgcttcaaaaactaatgaccttgctggtgacggtacaaccacagcaacagtacttgcacaagctatcgttacagaaggacttaaaaacgtagctgctggtgcaaacccaatggatcttaaaagaggtattgataaggcagtagaggctatcgttgcagatttagaaaaacaaactgcaaaagtgggcaactcttcagacaagataaagcaagtagcatctatctctgcaaacaatgatgaagtgataggagagcttatcgcagaagcttttggaaaagtaggtaaagaaggtgttatcactgtagaagaagcaaaaggaacagaaacgtatgtagatgttgtagagggtatgcagtttgatcgcggtttcctttctccatactttgtgacaaacagtgagaaaatgagtgcagagctagacagcccgtatatcttactatttgacaagaagatttcaaatatgaaagatttacttcctgtgcttgagcctgtggcacaaacaggaaagccacttcttatcattgcagaagatgtagatggagaagcacttgctacacttgtggtaaataaactacgtggtgctcttaaaattgctgctgtaaaagcaccaggttttggagatcgtcgtaaggctatgctagaagatattgctatccttactggaggtactgtaatctcagaagagagaggctttacactagaaaacactacgctagatatgctaggtactgcagagacagtaactatagataaagacaatacaactgttgtaaacggatctggagactcagatatgattaaagctcgcgtagggcaaatcaaatctcaaatagagactactacatcagactatgacaaagaaaaactacaagagcgccttgcaaaacttgcaggtggagttgcggtactttacgtaggtgctgcctctgaggttgagatgaaagagaaaaaagaccgtgtagatgacgctttacacgcaactcgtgccgctgtagaagaaggtatcgttgccggtggaggtgttgctcttgtacgtgcaaagaagtctcttgacaaaatcaaaacagaaaatgcagaccaagagactggtgtgcagatcgtaaaccgtgcgattgagtctccacttagaacgattgtttctaatgctggtggtgaaggagccgtggtgatttctaaagtactagaaggaaagaaagactttggttttaacgcaaaaaatggtgagtacacagatatgcttaaagctggaattatcgatcctaaaaaagtaacacgtgtagcactagaaaatgctgcttctgtttctggaatgattcttactacagagtgtgcacttacagacattaaagaagatgctccagcagcaatgccacctatgggaggaggcggaatgccaggaatgatgtaa

SEQ ID NO: 9459 - protein, 544 aa, Dokdonia donghaensis MED134
MAKDIQFNIEARDGLKRGVDKLANAVKVTLGPKGRNVIISKSFGAPHVTKDGVTVAKEIELEDALENMGAQMVKEVASKTNDLAGDGTTTATVLAQAIVTEGLKNVAAGANPMDLKRGIDKAVEAIVADLEKQTAKVGNSSDKIKQVASISANNDEVIGELIAEAFGKVGKEGVITVEEAKGTETYVDVVEGMQFDRGFLSPYFVTNSEKMSAELDSPYILLFDKKISNMKDLLPVLEPVAQTGKPLLIIAEDVDGEALATLVVNKLRGALKIAAVKAPGFGDRRKAMLEDIAILTGGTVISEERGFTLENTTLDMLGTAETVTIDKDNTTVVNGSGDSDMIKARVGQIKSQIETTTSDYDKEKLQERLAKLAGGVAVLYVGAASEVEMKEKKDRVDDALHATRAAVEEGIVAGGGVALVRAKKSLDKIKTENADQETGVQIVNRAIESPLRTIVSNAGGEGAVVISKVLEGKKDFGFNAKNGEYTDMLKAGIIDPKKVTRVALENAASVSGMILTTECALTDIKEDAPAAMPPMGGGGMPGMM

SEQ ID NO: 9460 - DNA, 1635 bp, Synechococcus sp. RS9917
  CDS (1)..(1635): transl_table=11
atggccaagcgcatcatctacaacgagaacgcccgtcgcgcgctcgagaaaggcatcgacatcctggccgagtctgtggccgtgaccctcggtcccaagggccggaacgtggtgctcgagaagaagttcggtgctccccagatcatcaacgatggcgtcaccatcgccaaggagatcgagctcgaggatcacatcgagaacacaggtgtggccctgattcgtcaggctgcttccaagaccaacgacgccgccggtgacggcaccaccaccgccaccgtcctggcgcacgccatggtgaaggccggtctgcgcaacgtggccgccggtgccaatgcgatcaccctcaagaagggcatcgacaaggctgccgatttcctcgtcggcaagatcaaggagcacgccaagccgatcagcgacagcaacgccatcgcccaggtgggcaccatttccgccggcaacgatgaggaagtgggtcggatgatcgccgacgccatggacaaagtcggcaaggaaggcgtgatctccctggaagagggcaaatcgatgaccaccgagctggaggtcaccgagggcatgcgtttcgacaagggctacatctcgccctatttcgccaccgacacggagcggatggaagccgtcctcgatgagccctacatccttctcactgacaaaaagatcggtctggtgcaggatctggtgcccgtgctcgagcagatcgcccgcaccggcaagcccctgctgatcatcgcggaagacatcgagaaggaagcgctcgccaccctggtggtgaaccgtctgcgtggtgtgctgaacgtggctgccgtcaaggcacccggcttcggtgatcgccgcaaggccatgctcgaggacatggctgtgctcaccaatggccagctcatcaccgaagatgccggcctcaagctcgagaacgccaagctcgagatgctgggcaccgcccgtcgcgtgaccatcaataaggacaccaccaccatcgtggccgaaggcaacgaggtggccgtgaaggcgcgctgcgagcagatcaagaagcagatggacgaaaccgagtccacctatgacaaagagaagctccaggagcgtctcgccaagctcgccggtggtgtggccgtggtgaaggtgggtgcagccaccgaaaccgagatgaaagacaagaaactccgtctcgaagatgccatcaacgccaccaaggcggctgttgaggagggcattgttcctggcggcggtaccaccctggcccatctcgcccccgcgcttgagcagtgggccgcaggcagcctcaacggtgaggagctgatcggtgccaaaatcgtggcggcggccctgaccgctcccttgatgcgcatcgccgagaacgctggtgtcaacggtgctgtggtcgcagaaaacgtgaaggccaagcctttcaatgagggctacaacgctgccaacggcgaatatgtcgacatgctggctgccggcattgtcgatcccgccaaagtgacccgctccggactgcagaacgctgcctccatcgccggcatggtgctcaccaccgagtgcatcgtggccgatctgcccgagaaaaaggaagcagctcctgccggtggcggcatgggcggtggcgatttcgactactga

SEQ ID NO: 9461 - protein, 544 aa, Synechococcus sp. RS9917
MAKRIIYNENARRALEKGIDILAESVAVTLGPKGRNVVLEKKFGAPQIINDGVTIAKEIELEDHIENTGVALIRQAASKTNDAAGDGTTTATVLAHAMVKAGLRNVAAGANAITLKKGIDKAADFLVGKIKEHAKPISDSNAIAQVGTISAGNDEEVGRMIADAMDKVGKEGVISLEEGKSMTTELEVTEGMRFDKGYISPYFATDTERMEAVLDEPYILLTDKKIGLVQDLVPVLEQIARTGKPLLIIAEDIEKEALATLVVNRLRGVLNVAAVKAPGFGDRRKAMLEDMAVLTNGQLITEDAGLKLENAKLEMLGTARRVTINKDTTTIVAEGNEVAVKARCEQIKKQMDETESTYDKEKLQERLAKLAGGVAVVKVGAATETEMKDKKLRLEDAINATKAAVEEGIVPGGGTTLAHLAPALEQWAAGSLNGEELIGAKIVAAALTAPLMRIAENAGVNGAVVAENVKAKPFNEGYNAANGEYVDMLAAGIVDPAKVTRSGLQNAASIAGMVLTTECIVADLPEKKEAAPAGGGMGGGDFDY

SEQ ID NO: 9462 - DNA, 1647 bp, Reinekea sp. MED297
  CDS (1)..(1647): transl_table=11
atggctgctaaagaagttttgtttggtatctctgctcgagacaaaatgcaaaacggcgttaacctgctggctgacgcggtaaaagtgacgttgggtcctaaaggccgaaatgtcgttctggataaatcctttggtgcaccgaatgtcaccaaagacggtgtgtctgttgccaaagaaatcgaactggaagacaagttcgagaacatgggcgcacagatggttaaagaagttgcttcaaaagcgaacgatgaagcgggtgatggtaccactacggccaccgttctggctcaggcattcgttaacgaaggcttgaagtccgttgctgcgggcatgaacccgatggatctgaagcgcggcatcgacaaagcggcggcggctgttgttgaagagctggcgaagctgtctaagccttgcaccgattacaaagcgattgctcaggtcggtaccatttctgccaactctgacgccaccattggtcagctgattgctgatgcaatggaaaaagtcggcaaagaaggcgtgatcactgttgaagaaggcagtggctttgttgatgagctggacgtggttgaaggtatgcagttcgaccgtggttacctgtcaccttacttcgtgactaaccaggaatcgatggctgcagagctggaaaacccatacatcctgctggtggacaaaaagatctctaacattcgtgatctgattccggtcctggaatctgttgcgaaggcgagccgtccattgatgatcatcgcggaagacatcgaaggcgaagcgctggccactctggttgttaacaacatgcgtggcacagttaaagtcgccgctgcgaaagcgcctggttttggcgatcgtcgtaaagcgatgttgcaagacctggcgattctgactggcggtaccgtcatttcagaagaagtcggtctggacttggaaagtgccactctggagcacttgggttctgctaagaaagtgaacctgactaaagaaaccacagttgtcgtcgacggtgccggttctgaagcggacatcaatgctcgtgtcgaacagattcgcgcagaaattgagcagtcttcgtctgattacgacaaagagaagcttcaggaacgtgttgctaaactggccggtggtgtcgcggtcattaaggttggtgcagctactgaagttgaaatgaaagagaaaaaagcccgtgttgacgatgctctgcatgcgacccgtgcggccgtcgaagagggtgttgttgctggtggtggtgttgctctggttcgtgccatggcgaacgttgctgacctgaaaggtgacaacgaagaacaaaacgtcggtattgctctggcactgcgagcgatggaagcgccattgcgtcagatcgttgaaaacgccggtgatgaatctgctgttgttctgaatgaagtcaaaaacggttccggtaacttcggctacaacgctgcgaccggtgaatatctggacatgatcgaagccggtatcatcgacccagcgaaagtgactcgtactgcactgcaggcggcgtcctctgttgctggtctgatgattaccacagaagccatgattgctgataagcctgaagaaggcggttctgctggtggcggcatgccagacatgggtggcatgggcggtatgggcggcatgatgtag

SEQ ID NO: 9463 - protein, 548 aa, Reinekea sp. MED297
MAAKEVLFGISARDKMQNGVNLLADAVKVTLGPKGRNVVLDKSFGAPNVTKDGVSVAKEIELEDKFENMGAQMVKEVASKANDEAGDGTTTATVLAQAFVNEGLKSVAAGMNPMDLKRGIDKAAAAVVEELAKLSKPCTDYKAIAQVGTISANSDATIGQLIADAMEKVGKEGVITVEEGSGFVDELDVVEGMQFDRGYLSPYFVTNQESMAAELENPYILLVDKKISNIRDLIPVLESVAKASRPLMIIAEDIEGEALATLVVNNMRGTVKVAAAKAPGFGDRRKAMLQDLAILTGGTVISEEVGLDLESATLEHLGSAKKVNLTKETTVVVDGAGSEADINARVEQIRAEIEQSSSDYDKEKLQERVAKLAGGVAVIKVGAATEVEMKEKKARVDDALHATRAAVEEGVVAGGGVALVRAMANVADLKGDNEEQNVGIALALRAMEAPLRQIVENAGDESAVVLNEVKNGSGNFGYNAATGEYLDMIEAGIIDPAKVTRTALQAASSVAGLMITTEAMIADKPEEGGSAGGGMPDMGGMGGMGGMM

SEQ ID NO: 9464 - DNA, 1635 bp, Robiginitalea biformata HTCC2501
  CDS (1)..(1635): transl_table=11
atggcaaaagacataacttttgatattgaagcaagggacgggctgaagcgcggggtagacgccctggccaacgccgttaaagtaaccctcgggccaaaaggccggaacgtaatcatcagcaaatccttcggggccccggtggtcaccaaggacggggttaccgtagctaaggaaatcgaactggaagatgccctggagaacatgggtgcccagatggtcaaggaggttgcctccaaaaccaatgacctggcaggcgacggaaccactactgccactgtcctggcacaatccatcgtcaaggaaggcctcaagaacgtggcagccggcgccaaccccatggacctcaagcgcggtattgacaaggccgtagaggcaatcgtcgagaaccttgccaagcaagccaaaaaagtaggcgactccagcgaaaagatcaagcaggtagccgccatttcctccaacaacgacgagacgatcggggaactgatcgccgaggcgttcaacaaagttggcaaggaaggggtgattaccgttgaggaggccaaaggaaccgacacgtatgtggacgtggtagagggaatgcaattcgaccgcggatacctctccccgtatttcgtaacggactccgagaagatgatctccgagctggacaacccgtacatcctgctctttgacaagaagatttccaccatgaaggacctgctgcccgtgctggaaccggtagcacagtccggaaagcccctgctgatcatcgcagaggatgtggatggggaagccctggccaccctggtggtcaacaaactgcgcggcagcctgaagatcgccgctgtgaaggctcccggattcggcgaccgccgcaaagccatgctggaagatatcgccatattgacgggcggaaccgtaatctctgaggagcgcggcttcacccttgaaaacgccagcctggatatgctcggcacctgcgaaaaggtctccattgacaaggacaatacgacgattgtcaacggttccggttctgccaaggacatcaaggcccgtgtcaaccagatcaaatcgcagatcgagaccactacctcggactacgaccgcgagaaactgcaggaacgcctggccaaactggccggcggggtggccgtcctctacgtaggggccgcttccgaagtggagatgaaagagaagaaggaccgtgtggacgacgcgttgcacgccacccgtgccgccgttgaggaaggcattgtcgccggtgggggcgttgccctggtacgcgccttttcggtactgtccaaggtgaaaaccgaaaacgccgacgaagccaccgggctgcagattgtcgcccgggccatcgagtccccgcttcgcaccatcgtggaaaacgccgggggcgaaggctccgtggtagttgccaaggtacacgaggggaaaggagactttggctacgacgccaagagcgagaaatacgtggaaatgatgaaggccgggatcatcgatcccaagaaggtgacgcgtattgccctggaaaatgccgcatcggttgcaggcatgatcctgaccaccgaatgcgccctgacggacatcaaggaggacgcccctgccggaccgcccatgggcggaggcggcggcatgcccggcatgatgtaa

SEQ ID NO: 9465 - protein, 544 aa, Robiginitalea biformata HTCC2501
MAKDITFDIEARDGLKRGVDALANAVKVTLGPKGRNVIISKSFGAPVVTKDGVTVAKEIELEDALENMGAQMVKEVASKTNDLAGDGTTTATVLAQSIVKEGLKNVAAGANPMDLKRGIDKAVEAIVENLAKQAKKVGDSSEKIKQVAAISSNNDETIGELIAEAFNKVGKEGVITVEEAKGTDTYVDVVEGMQFDRGYLSPYFVTDSEKMISELDNPYILLFDKKISTMKDLLPVLEPVAQSGKPLLIIAEDVDGEALATLVVNKLRGSLKIAAVKAPGFGDRRKAMLEDIAILTGGTVISEERGFTLENASLDMLGTCEKVSIDKDNTTIVNGSGSAKDIKARVNQIKSQIETTTSDYDREKLQERLAKLAGGVAVLYVGAASEVEMKEKKDRVDDALHATRAAVEEGIVAGGGVALVRAFSVLSKVKTENADEATGLQIVARAIESPLRTIVENAGGEGSVVVAKVHEGKGDFGYDAKSEKYVEMMKAGIIDPKKVTRIALENAASVAGMILTTECALTDIKEDAPAGPPMGGGGGMPGMM

SEQ ID NO: 9466 - DNA, 1635 bp, Synechococcus sp. WH 7805
  CDS (1)..(1635): transl_table=11
atggctaagcgcatcatctacaacgagaacgcacgccgcgctctcgagaaaggcatcgacatcctggctgaatccgttgccgtcaccctcggccctaaaggtcgcaacgtggtgttggaaaagaagttcggcgcccctcagatcatcaatgacggtgtcaccatcgccaaagagatcgagctcgaggatcacatcgagaacacaggtgttgctctgatccgtcaggccgcctccaaaacgaacgacgctgccggtgacggcaccaccaccgccactgtcctggcccacgccatggtgaaggccggtttgcgcaatgtggctgctggcgctaatgccatcacgctgaagaaaggcatcgataaggcctccgatttcctcgtggccgagatcaaaaacaaggccaacccgatcagcgacagcaacgccatcgctcaggtgggcaccatctccgctggtaacgatgaggaagtgggtcggatgatcgccgacgccatggacaaggtcggtaaggaaggcgtgatctccctggaggagggcaagtcgatgaccaccgaactggaggtcaccgagggcatgcgtttcgacaagggttatatctctccctacttcgccaccgacaccgagcgcatggaagcggtgctggatgagccctacatcctgctcaccgataagaagatcggcctggtgcaggatcttgttccggtgctggaacagattgcccgcactggcaagcctctgctgatcattgctgaggacatcgagaaggaagctctggccaccctggtggtgaaccgtcttcgtggtgtgctgaacgtggctgccgtgaaggctcctggcttcggtgaccgccgtaaggccatgctcgaagacatggctgtgttgaccaacggtcagctgattactgaggacgccggcctcaagctcgagaacgccaagatcgagatgctgggcactgcccgccgcgtgacgatcaacaaggacaccaccacgatcgttgctgagggcaatgaagtggccgtgaaggcccgctgcgagcagatcaagaagcagatggacgaaaccgagtccacctatgacaaggagaagctgcaggagcgtctggccaagctggctggcggtgtcgccgtggtgaaggtgggtgcagccaccgaaactgagatgaaggacaagaagcttcgtctcgaagacgccatcaatgccaccaaggctgcggttgaggagggcatcgttcctggtggcggtaccaccctggctcatctggctcccgcccttgagcagtgggcctcgtccacgctcagcggtgaagaactgatcggtgccaacatcgtggctgcggctctgaccgccccactgatgcgcatcgctgagaatgccggtgtcaacggtgctgtcgttgccgagaacgtgaaggccaagtccttcaacgagggctacaacgctgccaatggcgaatatgtcgacatgcttgctgcaggcatcgttgatcctgccaaggtgacacgttccggtctgcagaacgcggcatcaatcgctggaatggtgctcactaccgaatgcatcgtggcggatcttcccgagaagaaggaagcagcacctgccggcggcggcatgggtggtggcgacttcgactactga

SEQ ID NO: 9467 - protein, 544 aa, Synechococcus sp. WH 7805
MAKRIIYNENARRALEKGIDILAESVAVTLGPKGRNVVLEKKFGAPQIINDGVTIAKEIELEDHIENTGVALIRQAASKTNDAAGDGTTTATVLAHAMVKAGLRNVAAGANAITLKKGIDKASDFLVAEIKNKANPISDSNAIAQVGTISAGNDEEVGRMIADAMDKVGKEGVISLEEGKSMTTELEVTEGMRFDKGYISPYFATDTERMEAVLDEPYILLTDKKIGLVQDLVPVLEQIARTGKPLLIIAEDIEKEALATLVVNRLRGVLNVAAVKAPGFGDRRKAMLEDMAVLTNGQLITEDAGLKLENAKIEMLGTARRVTINKDTTTIVAEGNEVAVKARCEQIKKQMDETESTYDKEKLQERLAKLAGGVAVVKVGAATETEMKDKKLRLEDAINATKAAVEEGIVPGGGTTLAHLAPALEQWASSTLSGEELIGANIVAAALTAPLMRIAENAGVNGAVVAENVKAKSFNEGYNAANGEYVDMLAAGIVDPAKVTRSGLQNAASIAGMVLTTECIVADLPEKKEAAPAGGGMGGGDFDY

SEQ ID NO: 9468 - DNA, 1647 bp, Oceanicola granulosus HTCC2516
  CDS (1)..(1647): transl_table=11
atggctgctaaggacgtacgtttcgagaccgacgcccgcaaccggatgctcaagggcgtcaacatcctcgccgacgcggtgaaggtcacgctcggccccaagggccgcaacgtggtcatcgacaagagcttcggcgccccccgcatcaccaaggacggtgtgacggtcgccaaggagatcgaactcgaggacaagttcgagaacatgggcgcccagatggtgaaggaagtcgcttcccgcaccaacgacgaggccggtgacggcaccaccaccgcgaccgttctcgcccaggcgatcgtgcgcgagggcatgaaggccgtcgccgccggcatgaacccgatggacctcaagcgcggcatcgacctcgccacctccaaggtcgtcgcgcagatcaaggccgccgcccgcaccgtcgagaactccgacgaagtcgcccaggtcggcaccatctccgccaacggcgaagccgagatcggccgccagatcgccgacgcgatgcagaaggtcggcaacgagggtgtcatcaccgtcgaggagaacaagggcctcgagaccgagaccgacgtcgtcgagggcatgcagttcgaccgcggctacctcagcccctacttcgtcaccaacaccgagaagatggtcgccgagctcgacgactgcatgattctcctgcacgagaagaagctctcctcgctgcagccgatggtgccgctgctcgagtcggtcatccagtcccagaagccgctgctgatcatcgccgaggacgttgagggcgaagccctggccacgctcgtcgtgaacaagctgcgcggtggcctgaagatcgccgccgtcaaggccccgggcttcggcgaccgccgcaaggccatgctgcaggacatcgcgatcctgaccggcggccaggtgatctcggaagatctcggcatgaagctcgagaacgtgaccatggacatgctcggcaccgccaagcgcgtctcgatcaccaaggacgagaccacgatcgtcgacggtcacggcgacaaggccgagatcgaggcccgcgtgtcgcagatccgcggccagatcgaggagaccacctcggactacgaccgtgagaagctgcaggagcgtgtcgccaagctcgccggtggcgtcgccgtcatccgcgtcggcggcatgaccgaggtcgaggtgaaggagcgcaaggaccgcgtcgacgacgcgctcaacgcgacccgcgccgccgtccaggaaggcatcgtcgtcggcggtggtgtcgctctcgtccagggcgccaagtcgctcgagggcctcaccgccgagaacagcgaccagaacgccggcatcgccatcgtgcgccgcgcgctcgaggctccgctgcgccagatcgccgagaacgccggtgtcgacggctccgtcgtcgcaggcaagatccgcgagagcgacgacctgaagttcggcttcaacgcccagaccgaagagtacggcgacatgttcaagttcggcgtcatcgacccggccaaggtcgtgcgcaccgcgctcgaggatgcggcctccgtcgccggcctgctgatcacgaccgaagccatggtcgccgacaagccccagaaggaaggtgccgctgccggcgcccccgacatgggcggcatgggcggcatgggcggcatgatgtaa

SEQ ID NO: 9469 - protein, 548 aa, Oceanicola granulosus HTCC2516
MAAKDVRFETDARNRMLKGVNILADAVKVTLGPKGRNVVIDKSFGAPRITKDGVTVAKEIELEDKFENMGAQMVKEVASRTNDEAGDGTTTATVLAQAIVREGMKAVAAGMNPMDLKRGIDLATSKVVAQIKAAARTVENSDEVAQVGTISANGEAEIGRQIADAMQKVGNEGVITVEENKGLETETDVVEGMQFDRGYLSPYFVTNTEKMVAELDDCMILLHEKKLSSLQPMVPLLESVIQSQKPLLIIAEDVEGEALATLVVNKLRGGLKIAAVKAPGFGDRRKAMLQDIAILTGGQVISEDLGMKLENVTMDMLGTAKRVSITKDETTIVDGHGDKAEIEARVSQIRGQIEETTSDYDREKLQERVAKLAGGVAVIRVGGMTEVEVKERKDRVDDALNATRAAVQEGIVVGGGVALVQGAKSLEGLTAENSDQNAGIAIVRRALEAPLRQIAENAGVDGSVVAGKIRESDDLKFGFNAQTEEYGDMFKFGVIDPAKVVRTALEDAASVAGLLITTEAMVADKPQKEGAAAGAPDMGGMGGMGGMM

SEQ ID NO: 9470 - DNA, 1644 bp, Halothermothrix orenii H 168
  CDS (1)..(1644): transl_table=11
atggcaaaagaattaaaatttagtgaagatgctcgccgtgctctggaacgcggtgttgatactctggcaaatgctgttaaagtaactttaggtccaaaaggacgaaatgtagttcttgaaaagagctttggagctcctactatcaccaacgatggtgttagtattgcccgtgaaatagaacttgaaaatcactacgaaaacatgggggctcagactgtaaaagaggttgctaccaaaaccaatgatgttgccggtgatggtacaaccactgctacagtactggctcaggctattttcaaggaaggtttaaagaatgtggccgccggtgccaaccccatgatcctgaaaaggggtattgaaaaggccgttcagaagctggtagaagagattaaggaactaagcaaacctgttgaaggaaaagaagcagtttcccaggttgctgctatttctgccggtaatgatgaagaagtcggtaagcttattgctgaagctatggagaaagttggtcaggatggagttatctctgttgaagaatccaagagtatggggacttctttagatgtagttgaaggtatgcagttcgatagaggatatctctccccctatatggtaaccgatactgatgctatggaagcttcccttgaagatccctatatcctgatcactgacaagaagatatctaatatccaggaaatcttacccctgttagaaaaagtagcccagagtggtaaacctctcttaataattgctgaagatgttgaaggggaagccctggctactcttgttgtcaacaagattcgtggtacctttaactgtgttgctgttaaagcacctggctttggtgatcgtcgtaaggctatgttagaagacattgctattctgaccggtggtcaggtaatcactgaagacctgggtctcaagctcgaaaatgctgatattagtatgcttggtcgggcccacaaagtaacagtaaccaaagaggatactactattgtagaaggtgctggagatagcaaagaaattcagaatagaattaagcagatcaggactcaaattgaaaatactgattctgattttgacagggaaaaactgcaggaaagactggctaaactggccggtggtgtggctgtaattaaggttggtgctgctactgaaactgaattaaaagaaaagaaacaccgtattgaagatgctctctctgctaccagggccgctgtagaagaaggactggtagccggtggtggaaccacccttattgatgccattcctgcccttgatgaactgaaccttgaaggtgacgaagctaccggtgttgacattgttagaaaagcacttgaagccccggtacgtctcatagcagacaatgccggttatgaaggttcagtaattgttgagaaggttaagtctgaagataaaggtatcggtttcgatgcctataacggtgagtttgtaaatatgattgaatccggtattgtagacccggctaaggtaacccgttctgcccttcagaatgctgccagtgctgctgctatgttgctgactactgaatgcctggtggctgataaagaagaggataatgacagtaatggtaatgccggaatgcccggtggcggtatgcccggcggaatgggtggcatgatgtaa

SEQ ID NO: 9471 - protein, 547 aa, Halothermothrix orenii H 168
MAKELKFSEDARRALERGVDTLANAVKVTLGPKGRNVVLEKSFGAPTITNDGVSIAREIELENHYENMGAQTVKEVATKTNDVAGDGTTTATVLAQAIFKEGLKNVAAGANPMILKRGIEKAVQKLVEEIKELSKPVEGKEAVSQVAAISAGNDEEVGKLIAEAMEKVGQDGVISVEESKSMGTSLDVVEGMQFDRGYLSPYMVTDTDAMEASLEDPYILITDKKISNIQEILPLLEKVAQSGKPLLIIAEDVEGEALATLVVNKIRGTFNCVAVKAPGFGDRRKAMLEDIAILTGGQVITEDLGLKLENADISMLGRAHKVTVTKEDTTIVEGAGDSKEIQNRIKQIRTQIENTDSDFDREKLQERLAKLAGGVAVIKVGAATETELKEKKHRIEDALSATRAAVEEGLVAGGGTTLIDAIPALDELNLEGDEATGVDIVRKALEAPVRLIADNAGYEGSVIVEKVKSEDKGIGFDAYNGEFVNMIESGIVDPAKVTRSALQNAASAAAMLLTTECLVADKEEDNDSNGNAGMPGGGMPGGMGGMM

SEQ ID NO: 9472 - DNA, 1656 bp, Aurantimonas sp. SI85-9A1
  CDS (1)..(1656): transl_table=11
atggcagctaaagaagtaaagttcggccgcgacgcacgtgagcgcatgctgcgtggcgtcgacattcttgccgacgcagtcaaggtgaccctcggcccgaagggccgtaacgtcgtcatcgacaagtccttcggcgctccgcgcatcaccaaggacggtgtctcggtcgccaaggagatcgagctcgaggacaagttcgagaacatgggcgcccagatggtgcgcgaagtggcctcgaagaccaacgacaaggccggtgacggcacgaccaccgcgacggttctcgcccaggcgatcgtccgcgagggtgccaaggctgttgccgccggcatgaacccgatggacgtcaagcgcggcatcgacgcggccgtcctgaaggtcgtcgaggcgctcggcgttgccgcccgctcgatcgacacctcggacgaagtcgcccaggtcggcaccatctccgccaatggcgagaaggaaatcggcgagatgatcgcctcggccatgcagaaggtcggcaacgagggtgtcatcaccgtcgaagaagccaagaccgccgagaccgagctcgaagtcgtcgaaggcatgcagttcgaccgcggctacctgtcgccgtacttcgtgaccaacccggagaagatggtcgccgagctcgaggattgctacatcctcctgcacgagaagaagctctccaacctccaggcgctgctgccggtcctcgagtccgtcgtgcagtcctccaagccgctcctcatcatcgccgaggacgtcgagggcgaggccctggccacgctggtcgtcaacaagctgcgtggcggcctgaagatcgcggccgtcaaggcaccgggcttcggcgatcgccgcaaggccatgctcgaggacatcgctgtcctgacgggcggtacggtcatctccgaggacgtcggcatcaagctcgagaacgtcaccctcgacatgctcggccgcgccaagaaggtctcgatcaccaaggaaaacaccaccatcgtcgatggtgccggtgagaagacccagatcgaagcccgcgtcggccagatcaagggtcagatcgaggagaccacctcggactacgaccgcgagaagctgcaggagcgtctcgccaagctcgcaggcggcgtcgccgtcatccgcgtcggcggtgcgacggaagtcgaagtcaaggagaagaaggaccgcgtcgacgacgccctcaacgcgacccgtgcggctgtcgaagaaggcatcgtggccggtggtggcgtcgcgctgctgcgcgcttcgaacgccgtcaccatcaagggcatcaatgccgaccaggacgccggcatcgccatcgtccgcaaggcgcttcaggctccgatccgtcagatcgtccagaacgccggtgcggaaggctcgatcatcgtgggcaagatcctcgagaacgagtccctgtccttcggctacaacgccgcgacgggcgagtacggcgacatgatccagatgggcatcgtcgatccggtcaaggtcgttcgctcggctctccaggacgcggcatcggtcgccggcctgctggtcaccaccgaagccatgatctcggaggctccgaagaaggagtcggccggcggcggcggtggcatgccgggtggcatgggcggcatgggtggcatgggcggtatggacttctaa

SEQ ID NO: 9473 - protein, 551 aa, Aurantimonas sp. SI85-9A1
MAAKEVKFGRDARERMLRGVDILADAVKVTLGPKGRNVVIDKSFGAPRITKDGVSVAKEIELEDKFENMGAQMVREVASKTNDKAGDGTTTATVLAQAIVREGAKAVAAGMNPMDVKRGIDAAVLKVVEALGVAARSIDTSDEVAQVGTISANGEKEIGEMIASAMQKVGNEGVITVEEAKTAETELEVVEGMQFDRGYLSPYFVTNPEKMVAELEDCYILLHEKKLSNLQALLPVLESVVQSSKPLLIIAEDVEGEALATLVVNKLRGGLKIAAVKAPGFGDRRKAMLEDIAVLTGGTVISEDVGIKLENVTLDMLGRAKKVSITKENTTIVDGAGEKTQIEARVGQIKGQIEETTSDYDREKLQERLAKLAGGVAVIRVGGATEVEVKEKKDRVDDALNATRAAVEEGIVAGGGVALLRASNAVTIKGINADQDAGIAIVRKALQAPIRQIVQNAGAEGSIIVGKILENESLSFGYNAATGEYGDMIQMGIVDPVKVVRSALQDAASVAGLLVTTEAMISEAPKKESAGGGGGMPGGMGGMGGMGGMDF

SEQ ID NO: 9474 - DNA, 1632 bp, Psychroflexus torquis ATCC 700755
  CDS (1)..(1632): transl_table=11
atggcaaagaatataatttttgatatagaagcaagaaatggtgttaagcgaggtgtagatgctttagcaaacgccgtaaaagtgactttagggcctaaaggtcgtaacgtgattataggtaaatcatttggtgcaccaatggttaccaaagatggggtaagcgttgctaaagaaatagagcttgcagatcccttagaaaatatgggagcacaaatggttaaagaagtggcttccaaaaccaatgatttagctggtgacggtaccactacagcaactgttttagctcaggctattgttcatgaaggacttaaaaacgtagcttcaggagctaacccacttggacttaaaagaggaatagacaaggctgtagaagctgttgttgcagaattaacgaaacaagcaaaatctgttggagatacatcagaagaaattaagcaagtcgcttccatttcagcaaataacgatgaaaaaatcggtgaattaattgcagaagcttttggtaaagtaggtaaagaaggggtgatcactgttgaagaagccaaaggaactgaaacttacatggaagttgtagaaggtatgcagtttgatagaggttatctttctccatatttcgtcacagatagtgaaaaaatgactgttgatcttgagaatccatacattttgatcgtggataagaagattaactctatgaaggatttacttcctgtattggaaccagctgctcaaagtggtaaaccactattgattattgcagaagatatcgaaggtgaagccttagctacacttgttgtaaataaattgagaggttctttaaaaatagctgctgtaaaagcaccaggatttggtgatcgtagaaaagctatgctagaagatatcgcaattttaactggaggcactgttatttcagaagagcgtggatttacactagaaaacgctactctagatatgttgggtactgcagaaaatgtcactttagataaagacaatacaactatagtaaatggaggtggtgaaaaagaaaacatcactaaccgtgtgaatcaaattaaagctcaagtagaatctacaacaagcgattatgataaagagaaattacaagaacgtctagctaaattatctggcggaattggagttttatatgtaggagctgcttctgaagtagaaatgaaagagaagaaagaccgtgtggacgacgccttacatgctactcgtgcagcggtagaagaaggtatagttgctggtggtggcgttgccttcatcagagcgcttaaagcactctctaagcttaaaggtgatgatgccgatgagcaaacaggaatcaacattattgcaaaagcgattgaatctccaatgagaactatcgtagaaaatgcaggtggtgaaggctctgtagttatcaataaagtcttagaaggtgacctaggctacgatgctaaaaccaacacttatgtggatatgataaaagcaggtattatagatcctaagaaagtagcgagaattgcattggaaaatgcagcttcggttgcaggaatgattttaactactgaatgcgctcttgtagacataaaggaagacgataatggtggcggcgggatgccaccaatgggaggcggaatgccgggaatgatgtaa

SEQ ID NO: 9475 - protein, 543 aa, Psychroflexus torquis ATCC 700755
MAKNIIFDIEARNGVKRGVDALANAVKVTLGPKGRNVIIGKSFGAPMVTKDGVSVAKEIELADPLENMGAQMVKEVASKTNDLAGDGTTTATVLAQAIVHEGLKNVASGANPLGLKRGIDKAVEAVVAELTKQAKSVGDTSEEIKQVASISANNDEKIGELIAEAFGKVGKEGVITVEEAKGTETYMEVVEGMQFDRGYLSPYFVTDSEKMTVDLENPYILIVDKKINSMKDLLPVLEPAAQSGKPLLIIAEDIEGEALATLVVNKLRGSLKIAAVKAPGFGDRRKAMLEDIAILTGGTVISEERGFTLENATLDMLGTAENVTLDKDNTTIVNGGGEKENITNRVNQIKAQVESTTSDYDKEKLQERLAKLSGGIGVLYVGAASEVEMKEKKDRVDDALHATRAAVEEGIVAGGGVAFIRALKALSKLKGDDADEQTGINIIAKAIESPMRTIVENAGGEGSVVINKVLEGDLGYDAKTNTYVDMIKAGIIDPKKVARIALENAASVAGMILTTECALVDIKEDDNGGGGMPPMGGGMPGMM

SEQ ID NO: 9476 - DNA, 1632 bp, Candidatus Sulcia muelleri str. Hc (Homalodisca coagulata)
  CDS (1)..(1632): transl_table=11
atggcaaaaaatattcaatttgatattgaagctagagataaattaaaaaaaggagtagatgcattagctaatgctgttaaagtaactttaggaccaaaaggaagaaatgtcgttttacaaaaatcttttggaggcccacaagttactaaagatggtgtttcagtagctaaagaaatagaattagaagatcctatagaaaatcttggagctcaaatggtaaaagaagtagcttctaaaactaatgatatagcaggagatggaactactactgctacagtactagcacaagctatagttcgtgaaggattaaaaaatgtagctgctggagctaatcctatggatttaaaaagaggaatagataaagcagtagaagctgttgtaaatgatttaaaaaaacaatctagagaagtaggaggaagtaatgaaaaaattaagcaagtagcttcaatatctgctaataatgatgaagcaataggggaattaatatcagttgcgtttgacaaagtaggaaaagaaggtgtaattactgttgaagaagctaaaggaatagaaactactgtagatgttgttgaaggaatgcaatttgatcgtggatatcaatctccatattttgtaactaattctgataaaatgattacagaatttgataatccatatattttactttccgataaaaaaatttcttctatgaaagatctacttcctatccttgaacccgttgctcaatctggaaaacctttattaattatatctgaagaagttgaaggagaagcattagcaactcttgttgtaaataaaattagaggtgctttaaaagtagcagcagtaaaagctccaggttttggagatagaagaaaagctatgctagaagatatagctattctgactggaggaactgttatttctgaagaaacaggaagtaaattagaagatactaaattaagctttttaggaaaagcagaaagagtaactatagataaagataatactactattgtaaatggaaatggaaagaaatcagatatagaatcacgtgtaaatcaaataaaagctcaaatagaaaaaactacatctgactatgataaagaaaaacttcaagaaagattagctaaattagctggaggagttgccgttctatatgtaggtgcagcatctgaagtagaaatgaaagaaaaaaaagatcgtgtagatgatgctttacatgctacaagagcagccgttgaagaaggtatagttgctggaggaggagtagcattagttcgtgcaataaaatctttaaatggtcttaaagtagataatgtagatcaagatacaggtataaaaattgttaaacgttctttacaagaacctttacgtcaaatagttgctaatgctggtgaagaaggttcagtaatagttgctaaagttgctgaaggaaaaaatgaatttggttacgatgctaaattaggtgaatataaaaatatgatttctgaaggaataattgatccaacaaaagtaacacgtgttgcattagaaaatgcagcatcagtttctggaatgttattaactactgagtgcgtaattacagaaataaaaaaagaagaaccagctatgccacaaatgcctaatagtggtatgggaggaatgatgtaa

SEQ ID NO: 9477 - protein, 543 aa, Candidatus Sulcia muelleri str. Hc (Homalodisca coagulata)
MAKNIQFDIEARDKLKKGVDALANAVKVTLGPKGRNVVLQKSFGGPQVTKDGVSVAKEIELEDPIENLGAQMVKEVASKTNDIAGDGTTTATVLAQAIVREGLKNVAAGANPMDLKRGIDKAVEAVVNDLKKQSREVGGSNEKIKQVASISANNDEAIGELISVAFDKVGKEGVITVEEAKGIETTVDVVEGMQFDRGYQSPYFVTNSDKMITEFDNPYILLSDKKISSMKDLLPILEPVAQSGKPLLIISEEVEGEALATLVVNKIRGALKVAAVKAPGFGDRRKAMLEDIAILTGGTVISEETGSKLEDTKLSFLGKAERVTIDKDNTTIVNGNGKKSDIESRVNQIKAQIEKTTSDYDKEKLQERLAKLAGGVAVLYVGAASEVEMKEKKDRVDDALHATRAAVEEGIVAGGGVALVRAIKSLNGLKVDNVDQDTGIKIVKRSLQEPLRQIVANAGEEGSVIVAKVAEGKNEFGYDAKLGEYKNMISEGIIDPTKVTRVALENAASVSGMLLTTECVITEIKKEEPAMPQMPNSGMGGMM

SEQ ID NO: 9478 - DNA, 1653 bp, Fulvimarina pelagi HTCC2506
  CDS (1)..(1653): transl_table=11
atggcagctaaagaagtcaagttcggccgcgacgctcgcgagcgcatgctgcgcggcgtcgatattctcgccgatgcggtaaaggtcaccctcggtcccaagggccgcaacgtcgtcatcgacaagtccttcggcgctccgcgcatcaccaaggacggtgtctcggtcgccaaggaaatcgaactcgaggacaagttcgagaacatgggcgcgcagatggtgcgcgaagtcgcctccaagaccaatgacaaggctggcgacggcacgacaacggcgaccgttctcgctcaggccatcgtcaaggaaggcgcaaaggcggttgccgccggcatgaacccgatggacgtcaagcgcggcatcgatgcggccatcgccaaggtcgtcgaagcgctcggcgaggcagcccgctcgatcgacacctcggacgaagtcgcccaggtcggcacgatctcggcgaacggcgagaaggacgtcggcgagatgatcgccagcgccatgcagaaggtcggcaacgagggcgtcatcacggtcgaggaagccaagaccgccgagaccgagctcgaagtcgtcgaaggcatgcagttcgaccgtggttacctgtcgccatacttcgtcaccaacggcgagaagatggtcgccgagctggaagatgcctacatcctgcttcacgaaaagaagctctcgaaccttcaggcgatgctgccggttctggagtccgtcgtccagtcgtccaagcctttggtcatcatcggtgaagacgtcgaaggcgaagcgctcgcgaccctcgtcgtcaacaagctgcgcggcggcttgaagattgccgctgtcaaggcgcctggcttcggcgaccgccgcaaggcaatgctcgaagacatcgcaatcctcaccggcggcacggtcgtttcggaagacgtcggcatcaagctcgaaaacgtcaccctcgacatgcttggccgcgccaagaagatctcgatcacgaaggaaaacaccaccatcgtcgatggtgccggtgagaccgagcagatcaagtcgcgcgtcggccagatcaaggcgcagatcgaggagaccacctcggactacgaccgtgagaagctgcaggagcgcctcgcaaagctcgcgggcggcgtcgccgtcatccgcgtcggtggctcgaccgaagtcgaagtgaaggagaagaaggaccgcgtcgacgacgccctcaacgcgacccgtgcggccgtcgaggaaggcatcgtggccggtggcggtgtcgcgcttcttcgcgcttcgaacgccgtcgatcttaagggtgtcaacgccgatcaggacgcaggcatcgccatcgtccgcaaggcgcttcaggctccgctgcgccagatcgtgcagaacgcgggtgccgaaggctccatcgtcgtcggcaagatcctggagaacgagtcgctctccttcggctacaacgcccagaccggcgaatacggcgacatgatccagatgggcattgtcgatccggtcaaggtcgtccgctcggcccttcaggacgctggctccgttgccggccttctcgtcaccaccgaggcgatgatctcggaagcgccgaagaaggacaatggcggcggcggcatgcccgccggcggcatgggtggtatgggcggcatgggtggtatggacttctaa

SEQ ID NO: 9479 - protein, 550 aa, Fulvimarina pelagi HTCC2506
MAAKEVKFGRDARERMLRGVDILADAVKVTLGPKGRNVVIDKSFGAPRITKDGVSVAKEIELEDKFENMGAQMVREVASKTNDKAGDGTTTATVLAQAIVKEGAKAVAAGMNPMDVKRGIDAAIAKVVEALGEAARSIDTSDEVAQVGTISANGEKDVGEMIASAMQKVGNEGVITVEEAKTAETELEVVEGMQFDRGYLSPYFVTNGEKMVAELEDAYILLHEKKLSNLQAMLPVLESVVQSSKPLVIIGEDVEGEALATLVVNKLRGGLKIAAVKAPGFGDRRKAMLEDIAILTGGTVVSEDVGIKLENVTLDMLGRAKKISITKENTTIVDGAGETEQIKSRVGQIKAQIEETTSDYDREKLQERLAKLAGGVAVIRVGGSTEVEVKEKKDRVDDALNATRAAVEEGIVAGGGVALLRASNAVDLKGVNADQDAGIAIVRKALQAPLRQIVQNAGAEGSIVVGKILENESLSFGYNAQTGEYGDMIQMGIVDPVKVVRSALQDAGSVAGLLVTTEAMISEAPKKDNGGGGMPAGGMGGMGGMGGMDF

SEQ ID NO: 9480 - DNA, 1650 bp, Rhodobacterales bacterium HTCC2255
  CDS (1)..(1650): transl_table=11
atgccagcaaaagacgtaaaattcggcacagatgcacgtaatctgatgctagagggtgtaaacatccttgcagacgcagtaaaagtaactttgggaccaaaaggtcgtaatgttgttttagacaaatcatttggttcacctcgtataacaaaagatggcgtatcagtagctaaagagattgaactagaagataagttcatgaacatgggtgcacaaatggttaaggaagtagcttccaaaacaaatgacactgcaggagatggtacaacaactgctactgttctagctcaagcgattgttcgtgaaggcttaaagtcagttgctgctggaatgaatcctatggatttgaagcgcggtatagatactgcagttgcaacagtggttacttcaataagagaaatggctcgtgaagtaaaagatagtgctgaagttgcacaagttggaacgatttctgcaaatggcgaagccgcaattggtaaccaaattgctgatgcaatgcaaaaggttggtaatgaaggtgttataacagttgaagaaaataaaggtctggaaactgaaactgatgttgtagaaggcatgcagtttgatcgtggttacctatcaccatactttgtaacgaactctgacaagatgactgtagagcttgaagattgtttgatcttattacacgagaaaaaactatcatcactacagccaatggtaccattattagaaactgtaatccaatctggtaagccattgatgataattgctgaagatgttgaaggtgaagcattagcaactttagttgtaaataaacttcgcggtggattgaaaatttctgcagttaaagctccaggttttggtgatcgtcgaaaagcaatgttacaagacatcgccgttctaactggcggccaagtgatttctgaagatttaggaatgaaactagagtcagtaacaatggatatgctaggaacagcaaagaaagttgctataactaaagacgaaacaacaatcgttgatggtgccggtgaaaaagctgaaatccaagcacgtgttgcacaaattaaacaacaaatttctgaaacaacttcagattacgacaaagaaaaactacaagaacgtttagctaaattggctggtggtgttgctgttattcgtgttggtggtgctacagaaacagaagttaaagagcgtaaagatcgtgttgatgacgcattaaacgcaactcgtgcagctgttcaagaaggtgttgttgttggtggtggagttgcattagtacaagcagccaaagctctagcaaatgtaacaggtgaaaactctgatcaagaagctggtgtgggaattgttcgacgcgctttagaatctccattacgtcaaattgctgaaaatgctggtgttgatggcgcagttgttgcaggaaaagtacgtgaaagtgatgacgattcatttggatttaacgctcaaactgaagaatatggcgacatgtttggatttggtgtaattgatccagctaaagtaactcgtacagctttagaagatgctgcatcaatagctggcttattgatcacaactgaagctatggttgcagagcgtccagctcctgcaggtgctgctggtggtggtatgcctgatatgggcggcatgggcggcatgggcggcatgatgtaa

SEQ ID NO: 9481 - protein, 549 aa, Rhodobacterales bacterium HTCC2255
MPAKDVKFGTDARNLMLEGVNILADAVKVTLGPKGRNVVLDKSFGSPRITKDGVSVAKEIELEDKFMNMGAQMVKEVASKTNDTAGDGTTTATVLAQAIVREGLKSVAAGMNPMDLKRGIDTAVATVVTSIREMAREVKDSAEVAQVGTISANGEAAIGNQIADAMQKVGNEGVITVEENKGLETETDVVEGMQFDRGYLSPYFVTNSDKMTVELEDCLILLHEKKLSSLQPMVPLLETVIQSGKPLMIIAEDVEGEALATLVVNKLRGGLKISAVKAPGFGDRRKAMLQDIAVLTGGQVISEDLGMKLESVTMDMLGTAKKVAITKDETTIVDGAGEKAEIQARVAQIKQQISETTSDYDKEKLQERLAKLAGGVAVIRVGGATETEVKERKDRVDDALNATRAAVQEGVVVGGGVALVQAAKALANVTGENSDQEAGVGIVRRALESPLRQIAENAGVDGAVVAGKVRESDDDSFGFNAQTEEYGDMFGFGVIDPAKVTRTALEDAASIAGLLITTEAMVAERPAPAGAAGGGMPDMGGMGGMGGMM

SEQ ID NO: 9482 - DNA, 1641 bp, Mariprofundus ferrooxydans PV-1
  CDS (1)..(1641): transl_table=11
atggctaaagacattcaattcggtgaagacgctcgtgccaagatgatggtcggcgtcaacaaacttgctgatgcagtaaaagtaaccctcggtccgaagggccgtaacgtcgtgattgaaaaatcatggggtgcaccaaccatcaccaaggacggtgtatccgttgccaaagagatcgagctggaagacaagttcgagaatatgggcgcacagatggttaaagaagtctcttccaagactgcagatattgcaggtgacggcacaacaaccgctaccgttctggctcagtccattgccaaggaaggtgtgaaggctgtggctgccggcatgaacccgatggatctgaagcgcggtatcgacaaggctgtaacagctgttgtcgctgagctggctaacctctccaaggaagttcagaatcaggatgagatcgctcaggttggcaccatttctgccaatggcgatgccgagatcggcaagatcattgctgatgcgatggataaggtcggtaaagaaggcgttatcaccgttgaagaagccaagggtctggagacagagctggatgtggttgaaggcatgcagatcgaccgcggttatctctcaccttacttcgtgaccgacaccgagcgcatggaagccaatctggatcacccatatatcctgctgttcgagaagaagatctccaacatgcgcgagctgttgcctgtattggaagcggttgcccgtaccggcaagccactgctgattatcgctgaagatattgaaggcgaagcgctggcaacactggttgtgaacaaggttcgtggtgtggtcaatgtggctgctgtgaaggctcccggttttggcgatcgtcgcaaggcgatgctggaagatatggcgatcctgaccggtgccaaggtaatctctgaagacctgggtctgaagctggaaaatgtaaccctggaagatctgggtactgctgcagctgtgaagattgctaaagatacaacaactgttgttgatggcgccggcgaaaaagcggctattgaaggtcgtgttgcgctgatccgcaagcagattgaagacaccacttctgactacgacaaagagaagctgcaggagcgtctggccaagttggctggcggtgttgccgtaatcaaggtcggtgctgcaactgaaacagcaatgaaagagaagaaagatcgtgttgacgatgcactgcatgcaacacgtgctgctgttgaagagggtatcgttgccggtggcggcgtagcactgctgcgggcacgtaaggcacttgatagcgtcaagggtatcaatcatgatgaagataccggcgtgaatatcattcgtcgtgcactggaagagccgctgcgtcagattgttgccaatggcggcggtgaagcgtctgtggttgtgaacgaagtgtccaacaataaaggtcattacggttataacgcccagactgaagagtacggcgatctggtcaagatgggtgtgatcgatccgaccaaggtaacgcgttctgcactgcagtatgcagcctctattgccggtttgttgatcacgaccgaggcaatgattgccgatatccctaaacctgaagctgctgctggaggcgctccggacatgggtggcatgggcggcatgggcggcatgatgtaa

SEQ ID NO: 9483 - protein, 546 aa, Mariprofundus ferrooxydans PV-1
MAKDIQFGEDARAKMMVGVNKLADAVKVTLGPKGRNVVIEKSWGAPTITKDGVSVAKEIELEDKFENMGAQMVKEVSSKTADIAGDGTTTATVLAQSIAKEGVKAVAAGMNPMDLKRGIDKAVTAVVAELANLSKEVQNQDEIAQVGTISANGDAEIGKIIADAMDKVGKEGVITVEEAKGLETELDVVEGMQIDRGYLSPYFVTDTERMEANLDHPYILLFEKKISNMRELLPVLEAVARTGKPLLIIAEDIEGEALATLVVNKVRGVVNVAAVKAPGFGDRRKAMLEDMAILTGAKVISEDLGLKLENVTLEDLGTAAAVKIAKDTTTVVDGAGEKAAIEGRVALIRKQIEDTTSDYDKEKLQERLAKLAGGVAVIKVGAATETAMKEKKDRVDDALHATRAAVEEGIVAGGGVALLRARKALDSVKGINHDEDTGVNIIRRALEEPLRQIVANGGGEASVVVNEVSNNKGHYGYNAQTEEYGDLVKMGVIDPTKVTRSALQYAASIAGLLITTEAMIADIPKPEAAAGGAPDMGGMGGMGGMM

SEQ ID NO: 9484 - DNA, 1635 bp, Synechococcus sp. BL107
  CDS (1)..(1635): transl_table=11
atggctaagcgcattatttataacgagaacgcccgtcgtgctctcgaaaaaggcatcgatatccttgccgaatctgttgccgtcaccttgggtccaaaagggcgcaacgtggttcttgagaagaaatttggatctcctcagatcatcaacgatggtgtcaccatcgcgaaagagatcgagctggaagatcacatcgagaacactggcgttgctttgatccgtcaggccgcatccaaaaccaacgatgccgctggtgacggcaccacaacggctaccgtcctggcccacgccatggtgaaggccggtctccgcaacgtcgctgcaggtgcgaacgccatcaccctcaaaaaaggtattgataaggcgtccgatttcttggtcggcaagatcaaggacatggccaagcccattgctgacagcaatgccattgcccaggtcggcacgatttctgcaggcaatgacgaggaagtcggcaaaatgatcgccgatgccatggacaaagttggcaaggaaggggtgatttccctggaagaaggtaaatccatggagacagagctcgaagtcaccgagggaatgcgtttcgataagggatatatctccccttacttcgccaccgacaccgagcggatggaagctgtcctcgatgagccttacatccttctaacagacaagaaaatcggtcttgttcaagatctcgttcctgtgctcgagcaaattgcacgcaccggaaaacctcttctgatcattgctgaagacatcgaaaaagaagccctcgccacccttgtggtgaaccgtttgcgcggtgtgctgaatgtggcagcggtgaaggctcccggtttcggtgatcgccgtaaggccatgcttgaagacatggctgtgctgacgaatggtcagctgatcaccgaagacgctggtctgaaactcgagaacgccaagttggagatgttgggcacagcccgtcgcatcacgatcaacaaagacaccaccaccatcgttgccgaaggtaatgaggctgctgttggtgctcgttgcgagcagatcaaaaagcagatggacgaaaccgactccacctatgacaaagaaaagctgcaagagcgtctggccaaactggctggtggtgttgcggtcgtaaaagtgggtgcggcgactgaaaccgagatgaaggacaaaaagcttcgtctggaagatgccatcaatgccaccaaggcagccgtggaagaaggcatcgttccaggtggtggtaccaccttggctcacctggctcctgccctcgaagagtgggccaatggcaacctctccggcgaagagttgatcggtgccaatattgttgcggcagctctaacagccccactgatgcgcatcgctgaaaatgctggtgccaatggtgctgtggtcgctgaaaatgttaagtcccgctcaaacaacgagggctataacgctgccaatggcgactatgtcgacatgctggcggctggaatcgttgaccctgccaaggtaacgcgttctggtttgcagaatgctgcctcaattgctggcatggtgctcaccactgaatgcattgttgctgaccttcctgagaagaaagacgcagcacctgccggcggtggcatgggtggtggtgactttgattactag

SEQ ID NO: 9485 - protein, 544 aa, Synechococcus sp. BL107
MAKRIIYNENARRALEKGIDILAESVAVTLGPKGRNVVLEKKFGSPQIINDGVTIAKEIELEDHIENTGVALIRQAASKTNDAAGDGTTTATVLAHAMVKAGLRNVAAGANAITLKKGIDKASDFLVGKIKDMAKPIADSNAIAQVGTISAGNDEEVGKMIADAMDKVGKEGVISLEEGKSMETELEVTEGMRFDKGYISPYFATDTERMEAVLDEPYILLTDKKIGLVQDLVPVLEQIARTGKPLLIIAEDIEKEALATLVVNRLRGVLNVAAVKAPGFGDRRKAMLEDMAVLTNGQLITEDAGLKLENAKLEMLGTARRITINKDTTTIVAEGNEAAVGARCEQIKKQMDETDSTYDKEKLQERLAKLAGGVAVVKVGAATETEMKDKKLRLEDAINATKAAVEEGIVPGGGTTLAHLAPALEEWANGNLSGEELIGANIVAAALTAPLMRIAENAGANGAVVAENVKSRSNNEGYNAANGDYVDMLAAGIVDPAKVTRSGLQNAASIAGMVLTTECIVADLPEKKDAAPAGGGMGGGDFDY

SEQ ID NO: 9486 - DNA, 1635 bp, Synechococcus sp. RS9916
  CDS (1)..(1635): transl_table=11
atggccaagcgcatcatctacaacgagaacgcccgtcgcgctctcgagaaaggcatcgacatcctggcggagtccgttgctgtcaccctcggccctaaaggccgcaacgtggtgctggagaagaagttcggttctcctcagatcatcaatgacggcgtcaccatcgccaaggagatcgagctcgaggatcacatcgagaacaccggtgtggctctgatccgtcaggcagcttccaagaccaacgacgctgctggtgacggcaccaccaccgccaccgttctggcccacgccatggtgaaggcgggtctgcgcaacgtggcggccggcgctaacgcgatcacccttaagaagggcattgacaaggcctccgacttcctggtctccaagatcaaggagcacgccaagccgattgctgacagcaatgccatcgcccaggtgggcaccatctctgcaggcaacgacgaagaagtcggcaagatgatcgccgatgccatggacaaggttggcaaggaaggtgtgatttccctcgaagagggcaagtccatggagaccgagcttgaggtcaccgagggcatgcgcttcgacaagggctacatctccccctacttcgccaccgacaccgagcggatggaggctgttcttgacgagccctacatcctcctcaccgataagaagatcggtctggtgcaggacctggtgcctgtgctcgaacagatcgcccgcaccggcaagcctctgctgatcatcgctgaggacatcgagaaggaagccctcgccactttggtggtgaaccgtctgcgcggtgtcctcaacgtggctgctgtgaaggctcctggcttcggcgaccgtcgtaaggccatgctcgaagacatggctgtgctgaccaatggtcagctgatcaccgaggacgccggcctcaagctggagaacgccaagcttgaaatgctcggcaccgcccgccgcgtgaccatcaacaaggacaccaccaccatcgttgccgagggcaatgaggctgctgttgacgctcgctgtgagcagatcaagaagcagatggacgagaccgactccacctacgacaaggaaaagctccaggagcgcctggccaagctgtccggtggtgtggccgtggtgaaggtgggtgcagccaccgaaaccgagatgaaggacaagaagcttcgtctcgaagacgccatcaatgccaccaaggcagctgttgaagagggcatcgtccccggcggcggcaccaccctggcccacctggcacctgctcttgagcagtgggctgcaagcaacttgtcgggcgaagagctgatcggcgccaacattgtggcgaccgctctgaccgctcccctgatgcgcatcgccgagaacgccggcgtcaacggtgctgttgtggctgaaaacgtgaaggccaaggccttcaacgagggctacaacgccgccaatggtgagtacgtcgacatgctggccgccggcatcgtcgatcccgccaaggtgacccgctccggtctgcagaatgccgcttcgatcgctggcatggtgctgaccaccgagtgcatcgtcgctgacatgcccgagaagaaggaagctgctcctgccgctggcggcatgggtggcggcgacttcgattactga

SEQ ID NO: 9487 - protein, 544 aa, Synechococcus sp. RS9916
MAKRIIYNENARRALEKGIDILAESVAVTLGPKGRNVVLEKKFGSPQIINDGVTIAKEIELEDHIENTGVALIRQAASKTNDAAGDGTTTATVLAHAMVKAGLRNVAAGANAITLKKGIDKASDFLVSKIKEHAKPIADSNAIAQVGTISAGNDEEVGKMIADAMDKVGKEGVISLEEGKSMETELEVTEGMRFDKGYISPYFATDTERMEAVLDEPYILLTDKKIGLVQDLVPVLEQIARTGKPLLIIAEDIEKEALATLVVNRLRGVLNVAAVKAPGFGDRRKAMLEDMAVLTNGQLITEDAGLKLENAKLEMLGTARRVTINKDTTTIVAEGNEAAVDARCEQIKKQMDETDSTYDKEKLQERLAKLSGGVAVVKVGAATETEMKDKKLRLEDAINATKAAVEEGIVPGGGTTLAHLAPALEQWAASNLSGEELIGANIVATALTAPLMRIAENAGVNGAVVAENVKAKAFNEGYNAANGEYVDMLAAGIVDPAKVTRSGLQNAASIAGMVLTTECIVADMPEKKEAAPAAGGMGGGDFDY

SEQ ID NO: 9488 - DNA, 1644 bp, Comamonas testosteroni KF-1
  CDS (1)..(1644): transl_table=11
atggcagcaaaagacgtagttttcggtggtgaagcccgtgcacgcatggttgaaggcgtgaacatcctggctaacgcagtcaaggttaccctgggccccaagggtcgtaacgtggtgctggagcgctcgttcggtgcccctaccgtgaccaaggacggtgtgtccgtggccaaggaaatcgaactcaaggacaagctgcagaacatgggcgcccagctcgtgaaggaagtggcctccaagaccaacgatatcgctggtgacggcaccactaccgctaccgtgctggcccaagccattgtgcgcgaaggctccaagtacgtggccgccggcctgaaccccatggacctgaagcgcggcatcgacaaggctgtcgcagctctggtggaagagctgaagaagcaatccaaggccaccaccacttccaaggaaatcgctcaagttggctccatctccgccaactccgacgaatccgtgggcagcatcattgctgaagccatggacaaggtcggcaaggaaggcgtgatcacggttgaagaaggcaagtcgctggataacgaactcgacgtcgtcgaaggcatgcagttcgaccgcggttacctgtcgccctacttcatcaacaatcccgaaaagcaagccgctgttctggacaaccccttcgttctgctgttcgacaagaagatcagcaacatccgcgacctgctgcccacactggaagctgtggccaaggccggccgtcccctgctgatcattgccgaagacgtcgaaggcgaagccctggcgactctggtggtcaacaccatccgcggcatcctgaaggttgtggctgtgaaggcacctggtttcggcgaccgccgcaaggccatgctggaagacatcgccatcctgaccggcggcaaggtcatcgctgaagaagtgggcctgtcgctggacaaggtgaccctggaagacctgggccaagcccaacgcgtcgaaatcggcaaggaaaacaccaccatcatcgacggtgctggccaagctgctgagatcgaagcccgcgtcaagcaaatccgcgcccagatcgaagaagccacttccgactatgaccgtgaaaagctgcaagagcgcgtggccaagctggccggcggtgttgccgtgatcaaggttggcgctgccaccgaagtcgaaatgaaggaaaagaaggcccgcgtggaagacgccctgcacgctacccgcgctgcagtggaagaaggcatcgtggccggcggtggcgtggccctgctgcgcgccaagcaagccgttggcgccctggctaccggcaatgccgaacaagacgccggcatcaagctggttctgaaggccatcgaagcccctctgcgcgaaatcgtggccaacgccggtggcgagccctcggtggtcgtgaacgctgtgctgaacggtaacggcaactacggcttcaacgccgccaacgacagctacggcgacatgctggaaatgggcattctggaccccaccaaggtgactcgcactgctctgcagaacgccgcttccgtggcatctctgctgctgaccaccgagtgcatgatcgctgaagcccccaaggctgaaggtgctcctgccatgcccgacatgggtggcatgggcggcatgggcggcatgggcatgtaa

SEQ ID NO: 9489 - protein, 547 aa, Comamonas testosteroni KF-1
MAAKDVVFGGEARARMVEGVNILANAVKVTLGPKGRNVVLERSFGAPTVTKDGVSVAKEIELKDKLQNMGAQLVKEVASKTNDIAGDGTTTATVLAQAIVREGSKYVAAGLNPMDLKRGIDKAVAALVEELKKQSKATTTSKEIAQVGSISANSDESVGSIIAEAMDKVGKEGVITVEEGKSLDNELDVVEGMQFDRGYLSPYFINNPEKQAAVLDNPFVLLFDKKISNIRDLLPTLEAVAKAGRPLLIIAEDVEGEALATLVVNTIRGILKVVAVKAPGFGDRRKAMLEDIAILTGGKVIAEEVGLSLDKVTLEDLGQAQRVEIGKENTTIIDGAGQAAEIEARVKQIRAQIEEATSDYDREKLQERVAKLAGGVAVIKVGAATEVEMKEKKARVEDALHATRAAVEEGIVAGGGVALLRAKQAVGALATGNAEQDAGIKLVLKAIEAPLREIVANAGGEPSVVVNAVLNGNGNYGFNAANDSYGDMLEMGILDPTKVTRTALQNAASVASLLLTTECMIAEAPKAEGAPAMPDMGGMGGMGGMGM

SEQ ID NO: 9490 - DNA, 1650 bp, Alteromonadales bacterium TW-7
  CDS (1)..(1650): transl_table=11
atggcagctaaagaagtactttttgcaggtgacgcacgcgctaaaatgctaactggcgtaaacattctagcaaacgcagttaaagttacattaggccctaaaggccgtaacgttgtactagacaaatcgtttggctctccagtgatcactaaagatggtgtatctgtagcaaaagaaatcgaacttgaagacaagtttgaaaacatgggcgcgcaaatggttaaagaagttgcatctaaagcaaatgatgcagcaggcgatggtacaactaccgctacagtacttgcacaatctattgttaatgaaggccttaaagcagttgctgcaggcatgaacccaatggaccttaagcgcggtattgacaaagcaatcattgctgctgttgcagagcttaaggcgctttctgttccttgtgctgatactaaagctattgctcaagtaggtactatttcagctaactctgataaagaaattggcgacatcattgcagaagcaatggaaaaagtaggccgtaatacaggtgttattactgttgaagaaggtcaatcactagagaacgaactagatgttgtagaaggcatgcagtttgaccgtggttacctatctccttacttcattaacaacgctgaaaaaggcgcagtggaattagataacccatttattctacttgtagataaaaaagtatctaacattcgtgagctactacctacattagaagccgttgctaaagcaagcaagccactattaatcattgctgaagatcttgaaggcgaagcacttgcaacgcttgtagttaacaacatgcgcggcattgttaaggtatcagcggttaaagctcctggttttggcgaccgtcgtaaagcgatgttacaagatatcgccgtattaactggcggtactgttatttctgaagaaattggccttgagcttgaaaaagcaacagttgaagacctaggtacagctaagcgcgttgttatcactaaagacgatacaactatcatcgatggtgctggcgaagaagaaggcattaccggtcgtgtttctcaaattaaagcacaaattgaagaagcaacatcagactacgataaagaaaaactacaagagcgtatggctaaacttgccggcggtgttgcagtaattaaagtaggcgcagcaactgaaattgaaatgaaagagaaaaaagaccgtgttgaagatgcattacatgcaactcgtgcagcggttgaagaaggcgtagtaccgggtggcggtgttgctctagtacgtgcagctagcaagctagttgaactacttggcgataacgaagatcaaaaccacggtgttaaagttgcccttcgtgcgatggaagcacctcttcgtcaaatcgtaactaacgcgggtgacgaagcatctgttgttattaacgctgttaaaggtggcgaaggtaactacggttacaacgcagcaactggcgaatacaatgacatgattgaaatgggtatcctagatccaactaaagtaacgcgctctgcactacaatttgcagggtctattgcgggtctaatgataacaactgaagcaatggttgctgaaatccctaaagaagaagctgctggtgcccctgatatgggtggcatgggcggaatgggtggcatgggcggcatgatgtaa

SEQ ID NO: 9491 - protein, 549 aa, Alteromonadales bacterium TW-7
MAAKEVLFAGDARAKMLTGVNILANAVKVTLGPKGRNVVLDKSFGSPVITKDGVSVAKEIELEDKFENMGAQMVKEVASKANDAAGDGTTTATVLAQSIVNEGLKAVAAGMNPMDLKRGIDKAIIAAVAELKALSVPCADTKAIAQVGTISANSDKEIGDIIAEAMEKVGRNTGVITVEEGQSLENELDVVEGMQFDRGYLSPYFINNAEKGAVELDNPFILLVDKKVSNIRELLPTLEAVAKASKPLLIIAEDLEGEALATLVVNNMRGIVKVSAVKAPGFGDRRKAMLQDIAVLTGGTVISEEIGLELEKATVEDLGTAKRVVITKDDTTIIDGAGEEEGITGRVSQIKAQIEEATSDYDKEKLQERMAKLAGGVAVIKVGAATEIEMKEKKDRVEDALHATRAAVEEGVVPGGGVALVRAASKLVELLGDNEDQNHGVKVALRAMEAPLRQIVTNAGDEASVVINAVKGGEGNYGYNAATGEYNDMIEMGILDPTKVTRSALQFAGSIAGLMITTEAMVAEIPKEEAAGAPDMGGMGGMGGMGGMM

SEQ ID NO: 9492 - DNA, 1695 bp, Lyngbya sp. PCC 8106
  CDS (1)..(1695): transl_table=11
atggcaaaaattgttgcgtttaatgaagagtcaagacgggcgctcgaacagggtatcaacgccatcacagatgcagtgcgtgttaccctcggcccgaaaggtagaaatgtattattagagaagaaatttggtgcgcccgatattgtaaatgatgggattactgtaatcaaagaaattacaatctttgatcccttagaaaacacgggtgctagactcattcaagaagtcgcctctcaaaccaacgatgttgctggagatggaaccaccacggcagctattttaactcaagcaatgattgccgaaggcttaaaaaacgttgctgctggggctaaccctgtatccctacgtcgaggtattgaaaaaaccatcaaccgtttagttgacgaaatcgtagcggtggcgaaacccgtagaaggagatgcgatcgctcaagtggcgacagtatcagccggaaacgatccagaaattggtcagatgattgcccaagcgatggataaagtcaccaaagacggtgtaatcacggttgaagaatccaaatctttgacaaccgaactcgatgttgttgaagggatgcaatttgatcgcggttatctatcaccctattttgttaccgacaacgaacggatgatcgctgagtatgaaaatgctcgtattctgatcgttgataagaaaattagtgctattcaggatttagttaccgtcctcgaaaagatagcacgggaaggtcaacctctgctgattattgcagaagatgtcgaaggagaagccctggcgactctggttgttaacaaggccagaggggttttaaatgcagtcgccgtgaaagccccagggtttggcgaacgccgaaaagccatgctgcaagacatcgccattctcaccaatggtcaggtcatctctgaagaagtcggtttaagtttggatcttgttaccctagaaatgctgggaaccgccgacaaaattaccgttgaaaaagacaagatcattattgtcgcctcaggtaatacagccgatgtcgaagcccgcattgctcaactccgacgacaacgggaagaaaccgatttagagtatgatctcaataaactgcaagaacgaattgccaagctttcaggcggtgttgcagtgattaaagtcggggcggcgacagaaactgaattaaaatctcgtaaactgcgaattgaagacgctctcaacgcgacaaaagcggcagttgaagaaggaattgttcccggtggcggtacaacactcattcatttagcgaaaaaagttgaccaaattctcgatgaactggtcggagaagaaaagattggcggtaaaatcgttgccaaagctttagaagcccctctctgtcaaattgccaataatgccggggcagaaggagccgttatcgttgaaaaggttcgggaaaccgattttaacattggttataatgctctgacgggtgagtgtgaagacctgatcaaagcagggattattgatccggcgaaagttgttcgttcagcgctacaaaatgcaggttcaattgccggaatggtcttaacgactgaagctttagttgttgagaaacccgagaagaaatccgcagctcccgacatggatggcatgggcggcatgggcggcatgggcggcatgggcggcatgggcggcatgggtatgggcggcatgggcggcatgggcggcatgggtatgatgtaa

SEQ ID NO: 9493 - protein, 564 aa, Lyngbya sp. PCC 8106
MAKIVAFNEESRRALEQGINAITDAVRVTLGPKGRNVLLEKKFGAPDIVNDGITVIKEITIFDPLENTGARLIQEVASQTNDVAGDGTTTAAILTQAMIAEGLKNVAAGANPVSLRRGIEKTINRLVDEIVAVAKPVEGDAIAQVATVSAGNDPEIGQMIAQAMDKVTKDGVITVEESKSLTTELDVVEGMQFDRGYLSPYFVTDNERMIAEYENARILIVDKKISAIQDLVTVLEKIAREGQPLLIIAEDVEGEALATLVVNKARGVLNAVAVKAPGFGERRKAMLQDIAILTNGQVISEEVGLSLDLVTLEMLGTADKITVEKDKIIIVASGNTADVEARIAQLRRQREETDLEYDLNKLQERIAKLSGGVAVIKVGAATETELKSRKLRIEDALNATKAAVEEGIVPGGGTTLIHLAKKVDQILDELVGEEKIGGKIVAKALEAPLCQIANNAGAEGAVIVEKVRETDFNIGYNALTGECEDLIKAGIIDPAKVVRSALQNAGSIAGMVLTTEALVVEKPEKKSAAPDMDGMGGMGGMGGMGGMGGMGMGGMGGMGGMGMM

SEQ ID NO: 9494 - DNA, 1632 bp, Lyngbya sp. PCC 8106
  CDS (1)..(1632): transl_table=11
atggctaaacgtataatttacaacgaaaatgctcgtcgcgccctcgaacgcggcatggacatcctggctgaagccgttgcagtcaccctcgggccaaaaggtcggaatgtcgttcttgaaaagaaatttggtgcgccccaaatcgttaatgatggagtcaccattgccaaagaaattgaactagaagataacgtcgagaatactggcgtttccttaattcgtcaagccgcctctaaaaccaacgacgcagcaggcgacgggaccacaacagcaaccgttctcgcccatgcaatcgtcaaagaaggcttacgcaacgttgccgcaggcgctaaccccatcgaactaaaacggggtattgataaagcaactgctttcctcgtagacaagatcgccgaacacgctcgtccggttgaagattctaagtctattgctcaagtcggaaccatctctgctggaaacgacgaagaagtcggtcaaatgattgcttcagcaatggataaggtgggtaaagaaggagtcatctctcttgaagaagggaagtccatgaccaccgaactagaaatcaccgaagggatgcgctttgataaaggctacatctctccctacttcgcgaccgatactgagcggatggaagccgttcttgatgaaccttttatcttgctaacagacaagaaaattgctctggttcaagacttggttcctgttctcgaacaagttgcgcgttccggtcgccctctgctgattttagcggaggatatcgagaaagaagctttagcaactttagtcgttaaccgtttacggggtgtactgaacgttgccgcagttaaggctcctggatttggcgatcgccgtaaagccatgctcgaagatatcgctgttctcacgggcggtcaagtgatcaccgaagatgcaggtctaaagctcgacagtaccaagctggatatgctcggtaaagctcgccgcatcacaatcaccaaagacaatacaaccatcgttgcagaaggtaatgagtcttcggtgaaagcccgttgtgaacaacttcgtcgtcaaatggaagaaactgagtcttcctacgacaaagaaaaactgcaagaacgtttagccaaactcagtggcggtgtcgcagtaatcaaagttggtgcggcgactgaaactgaaatgaaagatcgtaaattgcgtttagaagatgcgattaacgcgactaaagccgcagttgaagaaggtatcgttcctggtggtggaactactctagctcacctgtctcctcaagtcgaacaatgggcaaagagtgatttgtctggtgaagctttaacaggagctttaattgtttctcgcgcgttgtctgctcccctgaagcggattgctgaaaatgcgggtgagaacggtgctgtgatcgcagaacgagtcaaagagaaagacttcaatgtgggttacaacgcagcaacaaacgagtttgtcgatatgtttgatgcaggtattgttgacccagcgaaagttactcgttcggctctgcaaaacgctgcttcaattgcgggtatggtcttaactactgaatgtattgtagttgacaaggctgatccgaaggataatgcacctgcgggcgctggaatgggcggcgatttcgattactaa

SEQ ID NO: 9495 - protein, 543 aa, Lyngbya sp. PCC 8106
MAKRIIYNENARRALERGMDILAEAVAVTLGPKGRNVVLEKKFGAPQIVNDGVTIAKEIELEDNVENTGVSLIRQAASKTNDAAGDGTTTATVLAHAIVKEGLRNVAAGANPIELKRGIDKATAFLVDKIAEHARPVEDSKSIAQVGTISAGNDEEVGQMIASAMDKVGKEGVISLEEGKSMTTELEITEGMRFDKGYISPYFATDTERMEAVLDEPFILLTDKKIALVQDLVPVLEQVARSGRPLLILAEDIEKEALATLVVNRLRGVLNVAAVKAPGFGDRRKAMLEDIAVLTGGQVITEDAGLKLDSTKLDMLGKARRITITKDNTTIVAEGNESSVKARCEQLRRQMEETESSYDKEKLQERLAKLSGGVAVIKVGAATETEMKDRKLRLEDAINATKAAVEEGIVPGGGTTLAHLSPQVEQWAKSDLSGEALTGALIVSRALSAPLKRIAENAGENGAVIAERVKEKDFNVGYNAATNEFVDMFDAGIVDPAKVTRSALQNAASIAGMVLTTECIVVDKADPKDNAPAGAGMGGDFDY

SEQ ID NO: 9496 - DNA, 1638 bp, Nodularia spumigena CCY 9414
  CDS (1)..(1638): transl_table=11
atggcaaaacgcattatttacaacgaaaacgcccgtcgcgccctggaacgaggcattgatatcttggctgaagccgtagctgttacccttggccctaaaggtcgtaacgtagtactagaaaagaaatttggcgcaccccaaatcgtgaatgacggtgtaaccatcgccaaagaaatcgaactagaagaccatattgaaaacactggcgtagctttgattcgtcaagctgcttccaagaccaatgacgctgctggcgatggtactacaactgccaccgttttggctcacgcgatggttaaggaaggcttacgcaacgttgctgctggcgctaatgcaatttctttgaagcgtggtattgataaagcttccgccttcttggtagagaaaattgctgaacacgctcgtccagtagaagattctaaatccattgctcaagttgctgcgatttcagctggtaacgacgaagaagtgggtcagatgattgcccaagcaatggacaaggtaggcaaggaaggcgtaatttccctagaagaagggaaatctatgaccaccgagctagaaataaccgaaggtatgcgctttgagaaaggctatatctctccttatttcgctaccgatgctgaacgcatggaaacagtctttgatgagccttacctgctaatcactgacaagaagattgcgttagtacaagacctcgtaccagttttagagcaagtagctcgctctggtcgtcctttggtgattatcgccgaagatattgaaaaagaagctttagcgactttggtagttaaccgcttgcgtggtgtactcaatgttgcggctgtgaaagctcctggttttggcgatcgccgtaaagcgatgctagaagatatcgccgttctaactggtggtacattggtaacagaagacgctggtctgaagctagaaaataccaagctagaaagcctgggtaaagctcgccgtgtcaccattaccaaggacacaaccacaattgttgctgaaggtaacgaagctcctgtaaaagctcgttgcgaacaaatccgtcgtcagatggaagaaaccgaatcttcttacgacaaagagaagctgcaagaacgtctggctaaactctctggtggtgtagctgtggtgaaagtgggtgcagccactgaaaccgaaatgaaagataagaagctacgcctagaagacgcgatcaacgccaccaaagctgctgtagaagaagggattgttcccggcggtggtacaactctagctcaccttgctcctgaattagaaacttgggcaaaagctaatctcaaagatgaagagttgattggtgctttgattgtcgttcgtgctttacctgcgcctctgaagcggattgctgaaaacgctggtcagaatggtgctgtaattgctgaacgtgtgaaagagaaagatttcaacatcggctacaacgctgcaaccaacgaattcgttgatttgttagaagctggtattgttgaccctgcgaaggtaactcgttctgcgctgcaaaacgctgcttctatcgctggtatggtgttgacaaccgaatgtatcatcgttgacaagcctgagcctaaagatgccgctcctgctggtggcggtggtatgggtggcggtgacttcgattactaa

SEQ ID NO: 9497 - protein, 545 aa, Nodularia spumigena CCY 9414
MAKRIIYNENARRALERGIDILAEAVAVTLGPKGRNVVLEKKFGAPQIVNDGVTIAKEIELEDHIENTGVALIRQAASKTNDAAGDGTTTATVLAHAMVKEGLRNVAAGANAISLKRGIDKASAFLVEKIAEHARPVEDSKSIAQVAAISAGNDEEVGQMIAQAMDKVGKEGVISLEEGKSMTTELEITEGMRFEKGYISPYFATDAERMETVFDEPYLLITDKKIALVQDLVPVLEQVARSGRPLVIIAEDIEKEALATLVVNRLRGVLNVAAVKAPGFGDRRKAMLEDIAVLTGGTLVTEDAGLKLENTKLESLGKARRVTITKDTTTIVAEGNEAPVKARCEQIRRQMEETESSYDKEKLQERLAKLSGGVAVVKVGAATETEMKDKKLRLEDAINATKAAVEEGIVPGGGTTLAHLAPELETWAKANLKDEELIGALIVVRALPAPLKRIAENAGQNGAVIAERVKEKDFNIGYNAATNEFVDLLEAGIVDPAKVTRSALQNAASIAGMVLTTECIIVDKPEPKDAAPAGGGGMGGGDFDY

SEQ ID NO: 9498 - DNA, 1704 bp, Nodularia spumigena CCY 9414
  CDS (1)..(1704): transl_table=11
atggaaccgctagagaaattaaacatggcaaaaattatttcctttgatgaagattcacggcgggctttagaacggggagtcaacgccctggctgatgctgtgaaaattactttgggaccaagaggtcgcaacgtccttttagaaaagaaatttggcgcacctcaaatcgttaacgatgggatcactgtcgcccaagaagtggaattagaagatcccttagaaaacactggtgcaagactaatccaggaagtcgcatccagaaccaaggacattgctggtgatggcaccactaccgctacagttttagcacaggcgctgattagagaaggtttaaagaacgtcgcagctggtactaaccccatcagcttgaagcgcggaatcgacaaaactattgaagctctggtcaaagaaattgccgagatggccaagcctgtagaaggcagtgcgatcgctcaagttgccactgtttcagctggtaatgatgaacaagtcggcgcgatgattgccgaagcaatggaaagagtcaccaaagacggtgtaatcactgttgaagaatccaaatctctcaccacagaactggaagtagtggaagggatgcagattgaccggggttatatttctccctacttcatcaccaataacgaccgccagatcgtcgagtttgaaaacgctcgcatcctgattactgacaaaaaaatcagcagcattcaggatttagttcccgtgttggaaaaagttgcccgtgttggtcaacccttgctgattattgctgaagatgtagaaggcgacgctttagcaactttggtagtcaacaaggcacggggtgtgctggctgtggctgcgattaaagcaccaggatttggcgatcgccgcaaagctttgttacaagacattgctattctcaccgatggacagatgatttctgaagaaatcggtttaagcctagacaccgctactttggaaatgctgggaacagcccgcaaaatcaccattgacaaagaaagcaccacaatcgtagctgctggtgaaaccaaaccagaagtacaaacccgaattgctcaaattcgtcagcaattagaagaaactgattctgactacgatcaagaaaaactccaagaacgcatcgccaagctagctggcggtgtcgcagttattaaagtgggtgcggccacagaaaccgaactcaaagaccgtaaactgcggattgaggacgcgctcaacgccactaaagctgctgtcgaagaaggcatagttcctggtggtggcacaaccttaatcaagttgattaccaaaatagacgcaatcaaagcccacctcagcgaagaagaaaaaattggcgctgatattgtcaaacgagccttagaagctcccttacgtcaaatagcagataatgctggtgacgaaggttccgtgattgtctctcaagtcaaagaaagcgctggcaatatcggttacaacgccgctactggaaaatttgaggatttgattgcagctggtatcatcgatcctgcgaaagtagtgcgttcagctttgcaaaatgccggttccattgctggtatggttattaccactgaagcgatcgtagtcgaaaaaccagagcctaaatctgcggctccagcccctgacatgggcggtatgggcggcatgggcggcatgggcggcatgggcggcatgggtggcatgggcggcatgggtatgttctaa

SEQ ID NO: 9499 - protein, 567 aa, Nodularia spumigena CCY 9414
MEPLEKLNMAKIISFDEDSRRALERGVNALADAVKITLGPRGRNVLLEKKFGAPQIVNDGITVAQEVELEDPLENTGARLIQEVASRTKDIAGDGTTTATVLAQALIREGLKNVAAGTNPISLKRGIDKTIEALVKEIAEMAKPVEGSAIAQVATVSAGNDEQVGAMIAEAMERVTKDGVITVEESKSLTTELEVVEGMQIDRGYISPYFITNNDRQIVEFENARILITDKKISSIQDLVPVLEKVARVGQPLLIIAEDVEGDALATLVVNKARGVLAVAAIKAPGFGDRRKALLQDIAILTDGQMISEEIGLSLDTATLEMLGTARKITIDKESTTIVAAGETKPEVQTRIAQIRQQLEETDSDYDQEKLQERIAKLAGGVAVIKVGAATETELKDRKLRIEDALNATKAAVEEGIVPGGGTTLIKLITKIDAIKAHLSEEEKIGADIVKRALEAPLRQIADNAGDEGSVIVSQVKESAGNIGYNAATGKFEDLIAAGIIDPAKVVRSALQNAGSIAGMVITTEAIVVEKPEPKSAAPAPDMGGMGGMGGMGGMGGMGGMGGMGMF

SEQ ID NO: 9500 - DNA, 1647 bp, Microscilla marina ATCC 23134
  CDS (1)..(1647): transl_table=11
atggctaaagagatattttttgatactgacgctcgtgataaattaaaaaaaggattggatactttggcaaatgccgtaaaagtaaccttgggtcctaaaggaagaaatgtaatcatcgacaaaaaatttggtgctccttccattaccaaagatggggtaagcgttgccaaagaaattgatttgaaagacgctattgagaacatgggggctcaattggtaaaagaagtagcttctaaaacagcagacactgctggtgacggtactactactgctactgtattggctcaagctattttctctgcgggtatcaaaaacgttgctgctggtgctaatccaatggatttgaaacgtggtattgacaaagcagtagacacgattgtagctgacttgaaaaaacagtctaacacaattggtgacaatgatataaaaaatgtagctactatttcggctaaccaagacgaaaccatcggtactatgattgccgaggcgatggaaaaagttggtaaagatggtgtaatcactgttgaagaagctaaaggtactgagactgaggtaaaagtagtagagggtatgcagtttgaccgcggttacctttctccttactttgtaaccgacactgaaaaaatggaagctgacttagagactccttatatcttgatctctgagaagaaagtttctaacatgaaagaattattgcctgttttggaagctgttgcacaaactggcagacctttgttgatcattgctgaagatgttgatggtgaagcattggctactttggtagtaaacaaaattcgtggttctttgaaaattgctgctgttaaagctcctggctttggcgatcgtcgtaaggctatgttgcaagacattgctatccttactggtggtacggtgatttctgaagagcaaggttacaaactagaaaacgctggtatcgatcacttgggtacttgcgaaaagatcatcgtagacaaagacaatactactattgtaaatggtaacggtgagactggtcgtattgaaggacgtgtaaacgagatcaaatctcaaatcgaaaacactacttctgactatgacaaagaaaagttgcaagagcgtttggctaaattatctggtggtgtagctatcttatacattggtgcagctaccgaagtagaaatgaaagaaaagaaagaccgtgtagatgatgcattgcacgctacccgtgctgcggtacaagaaggtactgtagctggtggtggtattgctttgatccgcgcgattgatgctttggacactgttaaatttagtaacgaagacgaagagactggtgttaatatcattcgcactgctttggagtctcctttacgtaccatcgtttctaacgctggtttagaaggtagtgtaattgtacacaaagtacgtgagggcaaaggttctttcggttacaatgcacgtagcggcaaatttgaagatttggtagctgctggggtaattgacccaactaaagttactcgtttagcacttgaaaatgctgcttctatctctggattattgcttactactgaggcagtaattgctgacgaaccagaagaagctggtgctgctggtggcggaatgcctgccggaatgccaggtggcatgggcggaatgggtggaatgatgtaa

SEQ ID NO: 9501 - protein, 548 aa, Microscilla marina ATCC 23134
MAKEIFFDTDARDKLKKGLDTLANAVKVTLGPKGRNVIIDKKFGAPSITKDGVSVAKEIDLKDAIENMGAQLVKEVASKTADTAGDGTTTATVLAQAIFSAGIKNVAAGANPMDLKRGIDKAVDTIVADLKKQSNTIGDNDIKNVATISANQDETIGTMIAEAMEKVGKDGVITVEEAKGTETEVKVVEGMQFDRGYLSPYFVTDTEKMEADLETPYILISEKKVSNMKELLPVLEAVAQTGRPLLIIAEDVDGEALATLVVNKIRGSLKIAAVKAPGFGDRRKAMLQDIAILTGGTVISEEQGYKLENAGIDHLGTCEKIIVDKDNTTIVNGNGETGRIEGRVNEIKSQIENTTSDYDKEKLQERLAKLSGGVAILYIGAATEVEMKEKKDRVDDALHATRAAVQEGTVAGGGIALIRAIDALDTVKFSNEDEETGVNIIRTALESPLRTIVSNAGLEGSVIVHKVREGKGSFGYNARSGKFEDLVAAGVIDPTKVTRLALENAASISGLLLTTEAVIADEPEEAGAAGGGMPAGMPGGMGGMGGMM

SEQ ID NO: 9502 - DNA, 1632 bp, Algoriphagus sp. PR1
  CDS (1)..(1632): transl_table=11
atgtctaaggaactatttttcgacacagatgctagagaccgcctgaaaaaaggtgttgacgctcttgccgatgcagtaaaagtaacattgggaccaaagggacgtaatgtgatccttgataaaaaattcggtgcacctactatcactaaagatggtgtttctgtagctaaagaaatcgaattagaagagcctatcgaaaacatgggagctcaacttgtaaaagaggtggcttccaaaactgcagacaatgcaggtgatggtactactactgctactgtcctagcacagtctatcttcaacgtaggtattaagaacgttgccgctggtgctaatccaatggatcttaaaagaggaatcgacaaagcagttactgctgttgtagcttctttaagagctaactcaaaagaaatctctacttctaaggaaatcgctcaagtagcgactgtttctgcaaacaatgacgaagaaatcggaaccatgatttctaacgccatggataaagtaggaaaagatggtgtaatcactgtagaagaagcaaaaggtactgaaactgaagttaaaactgtagaaggtatgcagtttgacagaggatacctttctccttacttcgtgactaacacagagaaaatggaagctgaattagagcagccatacatcttgatttacgacaagaagatttcttctatgaaggaattgcttcctgtacttgagccagtagctcagtctggaaaaccattggtaatcatctctgaagatgtggatggtgaagcattggctactttggtagtaaataaaatcagaggtgctctgaaagttgctgctgtgaaagctcctggtttcggtgacagaagaaaagctatgttggaagacatcgcgatccttactggcggaactgtaatctctgaagagagaggcttcaagctagagaacgctactactgacatgcttggtagagctgaaaaaatcaacattgacaaagacaatactactattgttaatggatctggtgatgctacagcaatcaaaggaagagtatctgaaatcaaagctcagatcgacaaaactacttctgactacgacagagaaaaacttcaagaaagacttgctaagctttctggcggtgtagctatcctttatatcggagctgcaactgaagtagaaatgaaagaaaagaaagaccgtgtagatgatgcacttcacgcaactagagctgccgttcaagaaggcgttgttgtaggtggtggtgttgcattggtcagagctagcgaagctttggttgatcttaaaggcctaaacgaagacgaggatactggtatcaacattatcagacaagcgatcgaatctccattgagaactatcgtattgaatgctggtggtgagccttctgtcgtgatcaacaagatcagagaaaacaaaggtaactacggttacaatgctcgtactgacaaatatgaagacttgttcaaagtgggtgtaattgacccaactaaagtaacaagactagcacttgaaaatgctgcttctatcgctgcattgctattgaccactgaatgtgtagtagcagacgtgaaagaagatgctccagctatgcctccaatgggtggcggcggaggaatgggcggaatgatgtaa

SEQ ID NO: 9503 - protein, 543 aa, Algoriphagus sp. PR1
MSKELFFDTDARDRLKKGVDALADAVKVTLGPKGRNVILDKKFGAPTITKDGVSVAKEIELEEPIENMGAQLVKEVASKTADNAGDGTTTATVLAQSIFNVGIKNVAAGANPMDLKRGIDKAVTAVVASLRANSKEISTSKEIAQVATVSANNDEEIGTMISNAMDKVGKDGVITVEEAKGTETEVKTVEGMQFDRGYLSPYFVTNTEKMEAELEQPYILIYDKKISSMKELLPVLEPVAQSGKPLVIISEDVDGEALATLVVNKIRGALKVAAVKAPGFGDRRKAMLEDIAILTGGTVISEERGFKLENATTDMLGRAEKINIDKDNTTIVNGSGDATAIKGRVSEIKAQIDKTTSDYDREKLQERLAKLSGGVAILYIGAATEVEMKEKKDRVDDALHATRAAVQEGVVVGGGVALVRASEALVDLKGLNEDEDTGINIIRQAIESPLRTIVLNAGGEPSVVINKIRENKGNYGYNARTDKYEDLFKVGVIDPTKVTRLALENAASIAALLLTTECVVADVKEDAPAMPPMGGGGGMGGMM

SEQ ID NO: 9504 - DNA, 1689 bp, Cyanothece sp. CCY 0110
  CDS (1)..(1689): transl_table=11
atggcaaaaatcgtatcatttagtgacgagtctagacgcgcattagaacaaggagtaaacgccttggctgacgcggttagaattaccctcggtcccaaaggccgaaatgtattattagaaaagaaatttggtgcgccccaaattgttaacgacggaatcaccgttgctaaagaaattgacttagaagatcccttagaaaatacaggggcaagattaatccaagaaattgcttctaaaactaaagaagtcgctggagacggtaccacaaccgctacagttattggtcaagcgttaatcaaagaagggctgaaaaacgtcattgcaggggctaaccctgtggccttacgccgtgggattgaaaaaaccatcaactttctcatcaaagagatcgaaactgtagccaaacctgtcgaaggagacgcgattgcccaagtcgccagtgtatctgctggtaatgaccaagaagtgggtaaaatgattgctttggccatggataaagtgaccaaagatggtgttattaccgtagaagaatcaaagtctctgagtaccgaattagatgtcgttgaagggatgcagatcgatcgcggttatgtctctccttatttcatcaccgatcaagaacggcaacaagtcgaatttgacgatgctttaatcttaatcaccgataaaaagattagtgcgatcgcggatttagttcctatcttagaaaacgttgctcgcgctggtaaacccctcttaatcatcgctgaagatgtagaaggggaagctttagccactttagtcgttaataaggctagaggggttttaaatgtggctgctatcaaagctccggctttcggagaaagacgcaaagcggttttacaagatattgccattttgactggtggtagcgttatttccgaagaagtgggcttaagcttagacacggtggacttagatatgttaggtcaagccaccaaaatcaatattgttaaagataacaccaccatcgtcgccaccactgacgatagaacaaaagctgcggtacaaaaacggattgaacagttacggaaacaagcagccgaaactgattccgactatgatagcgaaaagttacaagaacgcatcgctaaattagctggtggggtagcggttattaaagttggggctgctactgaaacggaattaaaggatcgtaaactccgtattgaagatgccctcaatgccaccaaagcagcagtagatgaagggatcgttcctggcggtggtacaactttaattcacttagcatctaaagtagctgactacaaaaaccaactaaccaatgctgaagaaaaagtagctgctgatctcgtagccaaggctttagaagcccccttacgtcaattagctaataatgctggtttagaaggttcggttattgttgaacgagtcagagaaacggactttaatgttggtttcaatgccatgactggcgagtttgaagacatgatcgcggccggtattattgaccctgctaaagtagttcgttctgccttacaaaatgctgcttctattgccggtatggtcttaaccacagaagccctagtggtagaaaaacccgaacccgaagcccctgctatgcctgacatgggcggtatgggtggcatgggcggcatgggtggcatgggtggtatgggtggtatgggcggtatgggtatgggcttctaa

SEQ ID NO: 9505 - protein, 562 aa, Cyanothece sp. CCY 0110
MAKIVSFSDESRRALEQGVNALADAVRITLGPKGRNVLLEKKFGAPQIVNDGITVAKEIDLEDPLENTGARLIQEIASKTKEVAGDGTTTATVIGQALIKEGLKNVIAGANPVALRRGIEKTINFLIKEIETVAKPVEGDAIAQVASVSAGNDQEVGKMIALAMDKVTKDGVITVEESKSLSTELDVVEGMQIDRGYVSPYFITDQERQQVEFDDALILITDKKISAIADLVPILENVARAGKPLLIIAEDVEGEALATLVVNKARGVLNVAAIKAPAFGERRKAVLQDIAILTGGSVISEEVGLSLDTVDLDMLGQATKINIVKDNTTIVATTDDRTKAAVQKRIEQLRKQAAETDSDYDSEKLQERIAKLAGGVAVIKVGAATETELKDRKLRIEDALNATKAAVDEGIVPGGGTTLIHLASKVADYKNQLTNAEEKVAADLVAKALEAPLRQLANNAGLEGSVIVERVRETDFNVGFNAMTGEFEDMIAAGIIDPAKVVRSALQNAASIAGMVLTTEALVVEKPEPEAPAMPDMGGMGGMGGMGGMGGMGGMGGMGMGF

SEQ ID NO: 9506 - DNA, 1623 bp, Cyanothece sp. CCY 0110
  CDS (1)..(1623): transl_table=11
atggctaaatctattgtttacaacgaagatgcacgtcgcgcattagaaagaggaatggacatcctcgccgagtctgtagctgttaccctcgggcctaaaggtcgtaacgttgtcctagaaaagaaatttggcgccccgcaaatcatcaatgacgggatcaccattgctaaagaaattgaattagaagatcatatcgaaaatactggcgtttccttgattcgtcaagcagcctcaaaaaccaacgatgtcgctggagacggaaccactaccgctactgttctcgctcacgccatcgttaaagaaggattacgtaacgttgctgctggtgcgaaccccatcgccctgaaaaaaggtatcgataaagcaactgagttcttagtcgaaaaaattgcagcacacgctcaacccatcgaagaatctaaagcgattgctcaagtcggagccatttctgccggaaatgatgaagaagtgggtaaaatgatcgctgaagccatggacaaagtgggcaaagaaggggttatttccttagaagaaggaaaatccatgttcactgaactggaaattaccgaagggatgcgcttcgataaagggtatatttctccttactttgtcaccgatcccgaacgcatggaagccgtatttgaagaaccctgcatcctcatcaccgacaaaaaaattaacctcgttcaagacttagttcctgttttagaacaagtcgcccgtcaaggtaaatctttagtgatcgtcgctgaagatattgaaaaagaagccttagcaaccctggttgttaaccgtttacggggtgtcttaaacgtggctgcagtgaaagcccctggatttggcgatcgccgtaagcaaatgttagaagatattgctaccttaactggtggtaccttaatcagcgaagatgctggtttgaagctagaaaataccaaaattgaaatgttaggatcagcccgtcgcatgattctgaccaaagataataccactatcgtcgccgaaggcaacgaagaagcggttaaatcccgttgtgatctcattcgtcgtcaaatcgaagattctgactcttcttatgacaaagagaagttacaagagcgtttagccaagttatctggtggtgtagcggttatcaaagttggtgctgctaccgaaaccgaaatgaaggatcgtaaacttcgtttagaagatgccatcaacgccacaaaagcagccgtagaagaagggatcgtccctggtggtggcacaaccctcgcccacctcacccctaacctagaagagtgggctaatggcaatctagctaacgaagagttaactggtgcgttaatcgttgcccgtgctttaaccgctcctttaaagcgcatcgctgaaaatgctggacaaaacggtgccgttgtcgctgaacgagttaaagaaaaagactttaacactggttatgatgctgcgactggtgaatttaccgatatgttagcagcaggtatcgttgaccctgcaaaagtaacccgttctggtttacaaaatgctgcctcgatcgcaggtatgatcttaaccactgaatgtattgtggtagataagcctgagaaagaaaaagctcctgctggtggcggtggggattttgattactaa

SEQ ID NO: 9507 - protein, 540 aa, Cyanothece sp. CCY 0110
MAKSIVYNEDARRALERGMDILAESVAVTLGPKGRNVVLEKKFGAPQIINDGITIAKEIELEDHIENTGVSLIRQAASKTNDVAGDGTTTATVLAHAIVKEGLRNVAAGANPIALKKGIDKATEFLVEKIAAHAQPIEESKAIAQVGAISAGNDEEVGKMIAEAMDKVGKEGVISLEEGKSMFTELEITEGMRFDKGYISPYFVTDPERMEAVFEEPCILITDKKINLVQDLVPVLEQVARQGKSLVIVAEDIEKEALATLVVNRLRGVLNVAAVKAPGFGDRRKQMLEDIATLTGGTLISEDAGLKLENTKIEMLGSARRMILTKDNTTIVAEGNEEAVKSRCDLIRRQIEDSDSSYDKEKLQERLAKLSGGVAVIKVGAATETEMKDRKLRLEDAINATKAAVEEGIVPGGGTTLAHLTPNLEEWANGNLANEELTGALIVARALTAPLKRIAENAGQNGAVVAERVKEKDFNTGYDAATGEFTDMLAAGIVDPAKVTRSGLQNAASIAGMILTTECIVVDKPEKEKAPAGGGGDFDY

SEQ ID NO: 9508 - DNA, 1644 bp, Sagittula stellata E-37
  CDS (1)..(1644): transl_table=11
atgtccgcaaaagacgtgaaattcaacaccgacgcccgcacgcgcatgctgaacggcgtcaacatcctcgccgacgccgtgaaggtgacgcttggcccgaaaggccggaacgtggttctggacaaatccttcggcgcgccgcgcatcaccaaggacggtgtgtccgtggcgaaggaaatcgaactggaagacaagttcgagaacatgggcgcgcagatggtgaaggaagtcgcttcccgcaccaacgacgaagccggtgacggcaccaccactgcgaccgttctggcacagtccatcgtccgtgaaggcatgaaggccgttgcggccggcatgaacccgatggatctgaagcgcggcatcgacatggcaaccgccaaggtcgtcgagcacatcaagaacgctgcccgcaccgtcgagaactccgacgaagtcgcacaggtcggcaccatctccgccaacggtgaagccgagatcggccgtcagatcgcagacgcgatgcagaaggtcggcaacgagggtgtcatcaccgtcgaagagaacaaaggcctcgaaaccgagaccgacgtcgtcgaaggcatgcagttcgaccgcggctacctgtcgccgtacttcgtgaccaacgccgacaagatgattgcagagctcgacgactgcatgatcctgctgcacgagaagaagctctcgtcgctgcagccgctcgtgccgctgctcgagcaggtgatccagtcgcagaagccgctgctgatcatcgcggaagacgtcgaaggcgaagcgctggcgaccctcgtggtcaacaagctgcgcggcggcctcaagatcgcagccgtcaaggcaccgggcttcggcgaccgccgcaaggccatgctgcaggacatcgcgatcctgaccggcggccaggtgatctcggaagatctcggcatgaagcttgagaatgtcaccatggacatgctcggcaccgccaagaccgtcaacatcaccaaggacgagacgaccatcgtcgacggccacggtgagaaggcagagatcgaagcgcgcgtttcccagatccgtacccagatcgaggaaaccacctccgactacgaccgtgagaagctgcaggaacgcgttgccaagctggcaggcggtgtggctgtcatccgcgtcggcggcatgaccgaagtcgaagtgaaagagcgcaaggaccgcgtggacgacgctctgaacgcaacccgcgcagccgtgcaggaaggcgttgtcgtcggtggcggcgtggcgctggtgcagggtgcgaaggctctggacggtctggaaggtcagaacgccgaccagaaccgcggcatctccatcgtgcgtatcgcactggaatcgccgctgcgtcagatcgcgcagaacgcgggtgtcgacgggtccgtcgtcgccggcaaggtgcgtgaatccaccgacctcaagttcggctacaacgcgcagaccgacgaatacggcgacatgttcaagttcggcgtcatcgacccggccaaagtcgtccgcaccgctctggaagatgcagcctcgatcgcaggcctgctgatcaccacggaagcgatggtcgcggacaagccgcagaaagaaggcgcaggcgccggcggtggcatgcccgacatgggcggcatgggcggcatgatgtaa

SEQ ID NO: 9509 - protein, 547 aa, Sagittula stellata E-37
MSAKDVKFNTDARTRMLNGVNILADAVKVTLGPKGRNVVLDKSFGAPRITKDGVSVAKEIELEDKFENMGAQMVKEVASRTNDEAGDGTTTATVLAQSIVREGMKAVAAGMNPMDLKRGIDMATAKVVEHIKNAARTVENSDEVAQVGTISANGEAEIGRQIADAMQKVGNEGVITVEENKGLETETDVVEGMQFDRGYLSPYFVTNADKMIAELDDCMILLHEKKLSSLQPLVPLLEQVIQSQKPLLIIAEDVEGEALATLVVNKLRGGLKIAAVKAPGFGDRRKAMLQDIAILTGGQVISEDLGMKLENVTMDMLGTAKTVNITKDETTIVDGHGEKAEIEARVSQIRTQIEETTSDYDREKLQERVAKLAGGVAVIRVGGMTEVEVKERKDRVDDALNATRAAVQEGVVVGGGVALVQGAKALDGLEGQNADQNRGISIVRIALESPLRQIAQNAGVDGSVVAGKVRESTDLKFGYNAQTDEYGDMFKFGVIDPAKVVRTALEDAASIAGLLITTEAMVADKPQKEGAGAGGGMPDMGGMGGMM

SEQ ID NO: 9510 - DNA, 1647 bp, Vibrionales bacterium SWAT-3
  CDS (1)..(1647): transl_table=11
atggctgctaaagacgttaaatttggtaacgacgcacgtattaaaatgctagaaggtgtaaacgttctggctgatgcagtaaaagtaacgctaggtcctaaaggccgtaatgttgttctagacaaatcatttggcgcaccaacgatcactaaagatggtgtttctgttgcacgtgaaattgagcttgaagacaagttccaaaacatgggcgcacaaatggttaaagaagtggcttcgcaagcgaacgatgctgcgggcgacggtacaacgacagcgacagttctagctcaagctatcatcactgaaggcctaaaagcggttgcagcaggcatgaacccaatggatcttaagcgcggtatcgacaaagcggtacttgctgctgttgaagagctaaaaggcctttctgttccatgtgctgatactaaagctatcgcacaagtaggtactatctctgcaaactctgacgcgacagtaggtaacatcattgctgaagcgatggaaaaagtaggtcgtgatggcgttattaccgttgaagaaggtcaggctctacaagacgagctagacgttgttgaaggtatgcagtttgaccgcggttacctatctccttacttcatcaacaaccaagaagcaggttctgttgatctagaaagcccgttcatccttcttatcgacaagaaagtttcaaacatccgtgaacttcttccgactctagaagctgttgctaaggcatctcgtccacttctcatcatcgctgaagatgtggaaggcgaagcgcttgcaactcttgttgtgaacaacatgcgcggcattgtgaaagttgcggctgttaaagctcctggtttcggtgaccgtcgtaaagcaatgcttcaagacatcgctatcctaactggcggtacggttatctctgaagagatcggtctagaccttgagaaagtaacgctagaagacctaggtcaagctaagcgcgtgactatcactaaagaaaactcaaccatcattgatggtgcgggtgaagaagcgatgatccaaggtcgcgtttctcaaatccgtcaacaaatcgaagatgcaacttcagactacgacaaagaaaaacttcaagagcgcgtagctaagttagctggcggtgttgccgtaatcaaagttggcgctgcgactgaagttgagatgaaagagaagaaagaccgcgtagaagatgcacttcacgcgactcgcgctgcagttgaagaaggtgtggttgctggtggtggtgttgcacttatccgtgctgcatctaaagtggctaacattgaaggcgacaacgaagagcaaaacgtaggtatccgcgttgctctacgtgcaatggaagcgcctatccgtcaaatcactaagaacgcaggtgacgaagagtctgttgttgctaacaacgttcgcgctggcgaaggtaactacggttacaacgctgcgactggcgaatacggcgacatgatcgctatgggtatcctagatccaactaaggttactcgcagcgcactacagttcgcagcatcagttgctggtcttatgatcacaacagaagcgatggtaacagacaagcctcaagaatctgctcctgcaatgcctgacatgggcggcatgggcggtatgggtggcatgggcggtatgatgtaa

SEQ ID NO: 9511 - protein, 548 aa, Vibrionales bacterium SWAT-3
MAAKDVKFGNDARIKMLEGVNVLADAVKVTLGPKGRNVVLDKSFGAPTITKDGVSVAREIELEDKFQNMGAQMVKEVASQANDAAGDGTTTATVLAQAIITEGLKAVAAGMNPMDLKRGIDKAVLAAVEELKGLSVPCADTKAIAQVGTISANSDATVGNIIAEAMEKVGRDGVITVEEGQALQDELDVVEGMQFDRGYLSPYFINNQEAGSVDLESPFILLIDKKVSNIRELLPTLEAVAKASRPLLIIAEDVEGEALATLVVNNMRGIVKVAAVKAPGFGDRRKAMLQDIAILTGGTVISEEIGLDLEKVTLEDLGQAKRVTITKENSTIIDGAGEEAMIQGRVSQIRQQIEDATSDYDKEKLQERVAKLAGGVAVIKVGAATEVEMKEKKDRVEDALHATRAAVEEGVVAGGGVALIRAASKVANIEGDNEEQNVGIRVALRAMEAPIRQITKNAGDEESVVANNVRAGEGNYGYNAATGEYGDMIAMGILDPTKVTRSALQFAASVAGLMITTEAMVTDKPQESAPAMPDMGGMGGMGGMGGMM

SEQ ID NO: 9512 - DNA, 1635 bp, Caminibacter mediatlanticus TB-2
  CDS (1)..(1635): transl_table=11
atggcaaaagaaatcgtatattcagacaaagcaagaaatgaattattagcaggtgttgaaaagcttgctgatgcagttagagttactatgggaccaaaaggtagaaatgtattacttcaaagaagctttggagctccacatattacaaaagatggtgtaagtgttgcaaaagaaattgaacttaaagatccagtagaaaatatgggagctcaacttgtaaaagaagttgcaagcaaaactgctgatgaagcaggtgatggtacaacaacagcaactgttttagcacatgcaatctttaaagaagggctaaaatacataacagctggtgcaaatccaattgcagtaaaaagaggaatggacgcagctacaaaagctattattgaagaacttaaaaaaatgagtaaacctgttgaaaacaaagaacaaattgcacaagttgcaacaatttctgcaaataacgacaaaaaaattggtgaattaattgcagaagctatggataaagttggaaaagatggtgttattactgttgaagaaggtaaatcacttgaagatgaacttgaagtagttgaaggtatgcaatttgatagaggatatttaagtccatactttgtaacaaatccagataaaatggtagctgagtatgaagatgcatacattttactatatgataaaaaaattagcaatatgaaagatttattaccattacttgaacaattagttcaacaaggtggaaataaaccattattaattattgcagaagatgtagatggtgaagcattagcaactcttgtagttaacaaattaagaggcgtattaaatgtagttgcggttaaagcgccaggatttggtgatagaagaaaagcaatgcttcaagatattgcaattttaacaggtggtcaagtaattagcgaagaacttggaagaacacttgaaagtgcgacattagctgatttaggacaagctggaagaattgtagtagataaagaaaatactacaattgtagatggtaaaggtgataaagcagctattgaagcaagaattaatcaaattaaaaaagaaattgaagaaacaacaagtgattatgatagagaaaaattacaagaaagacttgcaaaacttagtggtggtgtagcagtaattaaagttggtgctgcaactgaaactgaaatgaaagagaaaaaagatagagtagatgatgctttaagtgcaacaaaagcagcagtagaagaaggaattgtaattggtggtggtagtgcaattttaaaagctgctaaaaaagcagaagtagaatcagtagaccctgatgagcaaattggtattgatattataaaaagagctgtaaaagctccaattaaacaaattgcgagcaatgctggatatgaaccaggtgtagttgtaatgacagttgaaaatggagatgaaaatcttggatttaatgcagcaactggtgaatatgtggatatgtttgaagctggaattatagacccaacaaaagttgaaagaattgcacttcaaaatgcaacaagtgttggtggattacttttaacaacagaagcagcagtaacagaagaaccaaaagaagaaaaagcagcaccagcaatgccagatatgggaggaatgggaggaatgatgtaa

SEQ ID NO: 9513 - protein, 544 aa, Caminibacter mediatlanticus TB-2
MAKEIVYSDKARNELLAGVEKLADAVRVTMGPKGRNVLLQRSFGAPHITKDGVSVAKEIELKDPVENMGAQLVKEVASKTADEAGDGTTTATVLAHAIFKEGLKYITAGANPIAVKRGMDAATKAIIEELKKMSKPVENKEQIAQVATISANNDKKIGELIAEAMDKVGKDGVITVEEGKSLEDELEVVEGMQFDRGYLSPYFVTNPDKMVAEYEDAYILLYDKKISNMKDLLPLLEQLVQQGGNKPLLIIAEDVDGEALATLVVNKLRGVLNVVAVKAPGFGDRRKAMLQDIAILTGGQVISEELGRTLESATLADLGQAGRIVVDKENTTIVDGKGDKAAIEARINQIKKEIEETTSDYDREKLQERLAKLSGGVAVIKVGAATETEMKEKKDRVDDALSATKAAVEEGIVIGGGSAILKAAKKAEVESVDPDEQIGIDIIKRAVKAPIKQIASNAGYEPGVVVMTVENGDENLGFNAATGEYVDMFEAGIIDPTKVERIALQNATSVGGLLLTTEAAVTEEPKEEKAAPAMPDMGGMGGMM

SEQ ID NO: 9514 - DNA, 1641 bp, Pedobacter sp. BAL39
  CDS (1)..(1641): transl_table=11
atgtcaaaacaagtaaaatataacgttgaagctcgtgacgccctgaaaaaaggggtagatatccttgcgaatgctgtaaaagtaaccttaggtccaaaaggacgtaatgtcattattgacaagaaattcggttcaccttccattactaaagatggtgtgactgtagctaaagaaattgaactgaaagatccaattgaaaacatgggtgctcagatggtgaaagaagtggcttcaaaaactgctgacatcgccggcgacggaacaactactgcaaccgtattggctcaggcaattgttactgcaggaattaaaaacgttgctgctggtgcaaacccaatggatttgaaacgtggtatcgacaaagctgttgctgctattgttaaaaacctgaaagagcaatctcagactgttggtgaagacaacaacaaaatcaaacaggtagcttcaatctctgcaaacaatgatgaagtgatcggttctctgatcgctgaggcaatgggtaaagtaggtaaagatggcgtcatcactgttgaagaagcaaaaggtactgaaactgaagtaaaaacagtagaaggtatgcagtttgaccgtggttacctttctccttacttcgtaaccaacgcagacaaaatggaagcagagctggaaagcccttacatcctgatctacgacaaaaaaatcagcaacatgaaagaattgttgccagtattggaaaaacaagtacaaactggtaaaccactattgatcatcgctgaagaccttgatggtgaagctttggctacattggtagtgaacaaaatccgtggctcactgaaagttgttgctgtcaaagctccaggatttggtgaccgtagaaaagcaatgcttgaagacatcgctatcctgactggtggtactgttatttctgaagaaagaggttacaaattagaaaatgctgacctttcttacttaggtactgctgaaaaagtagttgttgataaagacaacacaacggtaatcaacggtgctggttcttctgaagacatcaaagcccgcgttaaccagatcaaagctcagatcgaaactactacatctgactacgataaagaaaagttacaggaacgtctggctaaacttgctggtggtgttgctgtgctttatgtaggtgctgcttctgaagtagaaatgaaagagaaaaaagaccgcgttgatgatgctttacatgctacacgtgctgctgttgaagaaggtatcgttgccggtggtggtgttgctttcatccgtgccattgaatcattagaaggtactaaaggagacaatgaagacgagactacaggtatccagatcgttaaacgtgccatcgaggagccgcttcgtcaaatctgccaaaacgcaggcatcgaaggttctatcgttgttcaaaaagtaaaagaaggtactggtgactttggttacaatgcccgtactgatgtatatgaaaacttaatcgctgctggtgtaatcgacccaactaaagtaagtcgtgtagcacttgaaaatgcagcctctatcgcagcaatgttgttaacaacagaatgtgtattggctgatgatcctgaagatgctcctgctggtgcaggtatgcctccaatgggcggcggtggcatgggcggcatgatgtaa

SEQ ID NO: 9515 - protein, 546 aa, Pedobacter sp. BAL39
MSKQVKYNVEARDALKKGVDILANAVKVTLGPKGRNVIIDKKFGSPSITKDGVTVAKEIELKDPIENMGAQMVKEVASKTADIAGDGTTTATVLAQAIVTAGIKNVAAGANPMDLKRGIDKAVAAIVKNLKEQSQTVGEDNNKIKQVASISANNDEVIGSLIAEAMGKVGKDGVITVEEAKGTETEVKTVEGMQFDRGYLSPYFVTNADKMEAELESPYILIYDKKISNMKELLPVLEKQVQTGKPLLIIAEDLDGEALATLVVNKIRGSLKVVAVKAPGFGDRRKAMLEDIAILTGGTVISEERGYKLENADLSYLGTAEKVVVDKDNTTVINGAGSSEDIKARVNQIKAQIETTTSDYDKEKLQERLAKLAGGVAVLYVGAASEVEMKEKKDRVDDALHATRAAVEEGIVAGGGVAFIRAIESLEGTKGDNEDETTGIQIVKRAIEEPLRQICQNAGIEGSIVVQKVKEGTGDFGYNARTDVYENLIAAGVIDPTKVSRVALENAASIAAMLLTTECVLADDPEDAPAGAGMPPMGGGGMGGMM

SEQ ID NO: 9516 - DNA, 1638 bp, Kordia algicida OT-1
  CDS (1)..(1638): transl_table=11
atggcaaaagatataaaatttgatattgaagcacgcgacggactcaaacgtggtgtggacgctttagcaaatgcagtaaaagtaacgttaggaccaaaaggaagaaacgtaatcattagcaaatcatttggtgcgccatctgtcacaaaagatggtgtttctgtagccaaagaaattgagctcgaaaatccattagaaaacatgggagcacaaatggtaaaagaagtggcttctagaacaaatgatcttgcaggagacggaacaacaacggctacagtattagcacaagcaatcgtaaaagaaggattgaaaaacgttgctgctggcgcaaatccgatggatttaaaaagaggaattgacaaggcggtaacagcaattgttgatgacttaaataagcaagctaaaaaagtaggtgattcttctgaaaaaataaaacaaattgcttctatttctgcaaacaacgacgaagttgtcggtgacttaatcgcgaaagcttttggaaaagttggaaaagaaggtgtgattacggttgaagaagcaaaaggaactgacacaaccgtagatgttgtagaaggaatgcagtttgatcgtggatacttatctccatactttgtaaccaactctgaaaaaatggaagcagaattggaaagtccctatatcttactattcgacaagaaaatatcttctatgaaagatttaatgccagtattggagcctgtagcacaaactggaaagccattattaatcattgcagaagatgttgacggagaagcattagctacgttggtagtaaacaaacttcgtggtgcattaaaaattgcagcggtaaaagctccaggatttggtgatcgtagaaaagcaatgttagaagacatcgctatcttaactggcggaacggtaatctcagaagaaagaggtttcacgctagaaaatgctacgattgacatgttgggaacagcagaaaaaatcacgattgacaaagacaatacaaccattgtaaatggcgctggtgacgctgaaatgattcaaacacgcgtgggacaaatcaaagcacaaattgaatctacaacttcagattacgacaaagaaaaattacaagaacgtctagcaaaattagctggtggagtagctgtattatatgttggagctgcttctgaagtagaaatgaaagagaaaaaagaccgagttgacgatgctttacacgccacaagagctgctgtagaagaaggaatcgttgctggtggtggtgttgcgctagttcgtgctaaaggtgttttagaaagtattacaactgataatcttgatgaagtaacaggaatcaaaattattgcgcgtgctattgaagaaccattgcgtaccattgtttcaaacgcaggtggcgaaggaagcgttgtcgtttcaaaagtaatggaaggcgaaaaagacttcggatacaatgcaaaaacagacgaatacgttgatatgttaaaagcaggaatcatcgatcctaaaaaagtaacacgtattgcactagaaaatgctgcttctgtatctggaatgatcttaactacagaatgtgcgttgatcgacatcaaagaggaagctcctgctggaggcggtatgccaccaatgggcggaggaatgcctggaatgatgtaa

SEQ ID NO: 9517 - protein, 545 aa, Kordia algicida OT-1
MAKDIKFDIEARDGLKRGVDALANAVKVTLGPKGRNVIISKSFGAPSVTKDGVSVAKEIELENPLENMGAQMVKEVASRTNDLAGDGTTTATVLAQAIVKEGLKNVAAGANPMDLKRGIDKAVTAIVDDLNKQAKKVGDSSEKIKQIASISANNDEVVGDLIAKAFGKVGKEGVITVEEAKGTDTTVDVVEGMQFDRGYLSPYFVTNSEKMEAELESPYILLFDKKISSMKDLMPVLEPVAQTGKPLLIIAEDVDGEALATLVVNKLRGALKIAAVKAPGFGDRRKAMLEDIAILTGGTVISEERGFTLENATIDMLGTAEKITIDKDNTTIVNGAGDAEMIQTRVGQIKAQIESTTSDYDKEKLQERLAKLAGGVAVLYVGAASEVEMKEKKDRVDDALHATRAAVEEGIVAGGGVALVRAKGVLESITTDNLDEVTGIKIIARAIEEPLRTIVSNAGGEGSVVVSKVMEGEKDFGYNAKTDEYVDMLKAGIIDPKKVTRIALENAASVSGMILTTECALIDIKEEAPAGGGMPPMGGGMPGMM

SEQ ID NO: 9518 - DNA, 1638 bp, Hydrogenivirga sp. 128-5-R1-1
  CDS (1)..(1638): transl_table=11
atggcagcaaagggaattatctatagtgaagaggcgagagctaaactcaagtctggtgttgacaagctcgcaaacgctgtcaaggttaccctcggtcccagaggtagggaggtaatcctcgggaagaactggggaactcccgtcgtgaccaaggacggtgtgaccgttgccaaagagattgagctcaaggacaactacgagaacataggagcccagctcgtcaaggaggttgcctccaagaccgcggacgtagccggtgacggaaccacaaccgccaccatactcgctcaggctatattccacgagggtctcaaggctatagccagcggtgctaaccccatggacgtcaagaggggtatagacaaggctgtcaagaaggtcgttgaggaggttaagaacctctccgtagaagtcaaaggaaggacggagatagagcaggttgccgccatatccgccaacaacgaccccgagataggaaagataatagcggacgccatggaggctgtcgggaaggacggagtcataaccgttgaagagtccaagtctgcagagaccacccttgagaccgttcagggtatgcagtttgacagaggatacctctctccctacttcgtaaccgaccctgacaagatgcagtgtgtccttgaagagccttacatactcatatacgagaagaagatatccaacataaaagacctgctacctgtccttgagcaggtggtaagggcaggcaagcctctcctcgtcatagctgaagacgttgagggtgaagcactcgctacgctcgtcgtaaaccacataaagggcgttcttaaagcctgtgccgttaaggctcccggattcggtcagaggaggaaggactacctccaggacatagccgtgctgaccggcggaaccgcgataatggaagacctcggaatcaagcttgagtccgtgacccttgacatgctcggaagggctgacaaggtggtagttgacaaggagaccaccaccatagttggtggtaaaggtaaagaagaggacataaaggcaaggatagagcagatcaagaagcagatacaggagactacctctgactacgacagggagaagctccaggaaaggctcgccaagctctccggcggtgttgccgtcataagggtcggagctgctaccgaggctgagctcaaggagaagaaggcaagggttgaggacgcagtccacgcaaccaaggcagcggttgaagagggaatagttcccggtggtggggtcgctctcgtgagagcttcagaagacctggacagcgtggatgtggacaacgaagaccagaggctcggcgttgagataatcaagaaagcctgcagaacacccctcaggcagatagcctacaacgctggatttgagggcttcgtagtccttgagaaggtgatagagctcggcaaggagaagggcaagagctggggattcaacgcagccaacggtgagtacgtggacatgatggaggctggagtgatagaccccaccaaggtcgtcaggacggcgatagagaatgcggcgtcggttgcaggaacgatgataaccgccgaggctgtcatagctgacctccccgaggacaagaagaaggacatgacacctaccgacatgcccgagcttgactaa

SEQ ID NO: 9519 - protein, 545 aa, Hydrogenivirga sp. 128-5-R1-1
MAAKGIIYSEEARAKLKSGVDKLANAVKVTLGPRGREVILGKNWGTPVVTKDGVTVAKEIELKDNYENIGAQLVKEVASKTADVAGDGTTTATILAQAIFHEGLKAIASGANPMDVKRGIDKAVKKVVEEVKNLSVEVKGRTEIEQVAAISANNDPEIGKIIADAMEAVGKDGVITVEESKSAETTLETVQGMQFDRGYLSPYFVTDPDKMQCVLEEPYILIYEKKISNIKDLLPVLEQVVRAGKPLLVIAEDVEGEALATLVVNHIKGVLKACAVKAPGFGQRRKDYLQDIAVLTGGTAIMEDLGIKLESVTLDMLGRADKVVVDKETTTIVGGKGKEEDIKARIEQIKKQIQETTSDYDREKLQERLAKLSGGVAVIRVGAATEAELKEKKARVEDAVHATKAAVEEGIVPGGGVALVRASEDLDSVDVDNEDQRLGVEIIKKACRTPLRQIAYNAGFEGFVVLEKVIELGKEKGKSWGFNAANGEYVDMMEAGVIDPTKVVRTAIENAASVAGTMITAEAVIADLPEDKKKDMTPTDMPELD

SEQ ID NO: 9520 - DNA, 1626 bp, Carnobacterium sp. AT7
  CDS (1)..(1626): transl_table=11
atggcaaaagatattaaattttctgaagacgcacgtgcatcaatgttgcgtggtgtagatattttggcagatattgttaaagtaacattaggacccaaaggaagaaacgttgttttagaaaaatcttacggctcaccattaattacaaatgatggcgttacgattgctaaagaaattgaactagaagatcattttgaaaatatgggagcacaattggtttcagaagtagcttctaaaaccaatgatattgctggagatggtacaacaacagcgactgttttaacacaagctatcgttcgcgaaggcttgaaaaacgtaacagctggagctaaccctgttggaatccgtcgcggtatcgaaatggcgacaaaagttgctgtagatgagttgcttgctatttctaaacaagttgattcaaaagaagcaattgctcaaattgcatctatttcttcaggaagcaatgaaacaggagaattagttgcagaagcaatggaacgcgttggaacagatggcgttattacaattgaagagtctaaaggaatcgaaacagaattaacagtagttgaaggaatgcaatttgatcgtgggtacctttctcaatatatggtaaccgataatgataaaatggaagctaacttagaaaatccatatatcttgattacagataaaaaaatctcaaatattcaagaaatccttccattattagaacaaattctgcaacaaggacgtccattgttgattattgctgatgatgttgatggggaagctcttcctacattagtcttaaacaaattgcgtggaacattcaatgttgtagctgttaaagctccaggatttggcgatcgtcgtaaatcgatgcttgaagatattgctatcttaactggcggaacagttattactgaagatcttggtctagaattgaaagatacagctatcgatcaattgggacatgcaagcaaagtcgttgtaacaaaagatgcgactactattgttgaaggtgctggttctgctgaatctatttcacaccgtgtagctttattaaaagctcaagcagctgaaacaacttctgaatttgacaaagaaaaattacaagaacgtttagctaaactttctggtggagttgccgttattaaagttggagctgcaactgaaacagaattaaaagaacgtaaattgcgtattgaagatgctttgaatgcagctcgtgcagctgttgaagaaggaattgtttccggtggtggaacagccttaatcaacgttcaacgcaaagtttcagaaattgaagcaacaggcgacgaagcaacaggggttaaaattgttattcgtgctcttgaagaaccggttcgccaaatcgtgacgaatgctggtcttgaaggttcagtaatcgttgaaaaactaaaaggcgttgacttaggcgtagggtacaatgcagctacggatgaatgggtaaatatgattgatgctggtatcattgatccaactaaagtaacacgctcagctttacaaaatgcagcaagtgttgcagccttattgttaacgactgaagctgttgttgctcaccaaccaaaacctgatgctccaatgggcggaatgggaatggatcctggaatgggcggcatgatgtaa

SEQ ID NO: 9521 - protein, 541 aa, Carnobacterium sp. AT7
MAKDIKFSEDARASMLRGVDILADIVKVTLGPKGRNVVLEKSYGSPLITNDGVTIAKEIELEDHFENMGAQLVSEVASKTNDIAGDGTTTATVLTQAIVREGLKNVTAGANPVGIRRGIEMATKVAVDELLAISKQVDSKEAIAQIASISSGSNETGELVAEAMERVGTDGVITIEESKGIETELTVVEGMQFDRGYLSQYMVTDNDKMEANLENPYILITDKKISNIQEILPLLEQILQQGRPLLIIADDVDGEALPTLVLNKLRGTFNVVAVKAPGFGDRRKSMLEDIAILTGGTVITEDLGLELKDTAIDQLGHASKVVVTKDATTIVEGAGSAESISHRVALLKAQAAETTSEFDKEKLQERLAKLSGGVAVIKVGAATETELKERKLRIEDALNAARAAVEEGIVSGGGTALINVQRKVSEIEATGDEATGVKIVIRALEEPVRQIVTNAGLEGSVIVEKLKGVDLGVGYNAATDEWVNMIDAGIIDPTKVTRSALQNAASVAALLLTTEAVVAHQPKPDAPMGGMGMDPGMGGMM

SEQ ID NO: 9522 - DNA, 1635 bp, Bacillus cereus AH820
  CDS (1)..(1635): transl_table=11
atggcaaaagatattaaatttagtgaagaagcacgtcgttcgatgcttcgcggtgtcgacactcttgcaaatgcagtaaaagtaacgcttggaccaaaaggtcgtaacgttgttcttgagaaaaaattcggttcaccacttattacaaatgacggtgtaacaatcgcaaaagaaattgaattagaagatgcattcgaaaacatgggtgcgaaattagtagcagaagttgctagcaaaacaaatgatgtagctggtgacggaacaacaactgcaactgtattagcacaagctatgattcgtgaaggtcttaaaaacgtaacagctggtgcgaacccaatgggtcttcgtaaaggtatcgaaaaagctgtagttgctgcagtagaagaattaaaaacgatttctaaaccaatcgaaggtaaatcttctatcgcacaagtagctgctatttctgctgctgacgaagaagtaggtcaattaatcgctgaagcaatggagcgcgttggtaacgacggcgttattactttagaagaatctaaaggtttcacaacagaattagacgtagtagaaggtatgcaatttgatcgtggatatgcatctccttacatgattactgattctgacaaaatggaagcagttcttgataacccatacatcttaatcactgacaaaaagatttctaacattcaagaaatcttaccagtattagagcaagtggtacaacaaggtaaaccgcttcttatcattgctgaagatgtagaaggcgaagcattagctacattagtagtgaacaaacttcgtggtacattcaatgtagtagctgttaaagctcctggatttggtgaccgtcgtaaagcaatgctagaagatatcgcaatcttaactggtggcgaagtaatcactgaagaattaggccgtgacttaaaatctgctacagttgaatctttaggacgcgctggtaaggttgttgtaacgaaagaaaacacaactgtagttgaaggtgtaggaagcacagaacaaatcgaagctcgcatcggtcaaatccgtgcgcaattagaagaaacaacttctgaattcgatcgtgaaaaattacaagagcgtcttgcaaaacttgcaggtggcgtagcagtaattaaagtaggtgcagcaactgaaactgagttgaaagagcgcaaacttcgcattgaagatgcacttaactcaactcgtgcagcagtagaagaaggtatcgttgcaggtggtggtacttcacttatgaacgtatacacaaaagtagcttctatcgtagctgaaggtgacgaagcaacaggtatcaacatcgtacttcgtgcactagaagagccagttcgtcaaatcgcaattaacgctggtctagaaggatctgtagttgtagagcgtctaaaaggcgaaaaagtaggcgttggtttcaacgcagctactggcgagtgggttaacatgcttgaaactggtatcgtagatccagctaaagtaactcgctctgcacttcaaaacgcagcatctgttgcagctatgttcttaacaactgaagctgtagtagctgacaaaccagaaccaaatgcaccagcaatgcctgacatgggcggcatgggcatgggcggtatgggcggaatgatgtaa

SEQ ID NO: 9523 - protein, 544 aa, Bacillus cereus AH820
MAKDIKFSEEARRSMLRGVDTLANAVKVTLGPKGRNVVLEKKFGSPLITNDGVTIAKEIELEDAFENMGAKLVAEVASKTNDVAGDGTTTATVLAQAMIREGLKNVTAGANPMGLRKGIEKAVVAAVEELKTISKPIEGKSSIAQVAAISAADEEVGQLIAEAMERVGNDGVITLEESKGFTTELDVVEGMQFDRGYASPYMITDSDKMEAVLDNPYILITDKKISNIQEILPVLEQVVQQGKPLLIIAEDVEGEALATLVVNKLRGTFNVVAVKAPGFGDRRKAMLEDIAILTGGEVITEELGRDLKSATVESLGRAGKVVVTKENTTVVEGVGSTEQIEARIGQIRAQLEETTSEFDREKLQERLAKLAGGVAVIKVGAATETELKERKLRIEDALNSTRAAVEEGIVAGGGTSLMNVYTKVASIVAEGDEATGINIVLRALEEPVRQIAINAGLEGSVVVERLKGEKVGVGFNAATGEWVNMLETGIVDPAKVTRSALQNAASVAAMFLTTEAVVADKPEPNAPAMPDMGGMGMGGMGGMM

SEQ ID NO: 9524 - DNA, 1644 bp, Rhizobium leguminosarum bv. trifolii WSM1325
  CDS (1)..(1644): transl_table=11
atggcatctaaagaaatcaagtttggccgcaccgcgcgcgaaaagatgctgcgcggcgtcgacattctcgccgatgcagtgaaggtcacgctcggcccgaagggccgtaacgtcatcatcgacaagtccttcggcgcgccgcgcatcaccaaggacggcgtttccgtcgccaaggaaatcgaactcgaagacaagttcgaaaacatgggcgcccagatggtccgcgaagttgcttcgaagaccaacgacatcgccggcgacggcaccacgacggctaccgttcttgcccaggcgatcgttcgcgaaggcaacaaggccgttgcagccggcatgaacccgatggacctgaagcgcggcatcgaccttgctgttgccgacgtcgtgaaggatctccaggccaaggccaagaagatctcgacttcggaagaagttgcacaggtcggcacgatttcggccaatggcgacaagcaggtcggtctcgacattgctgaagccatgcagaaggtcggcaacgaaggcgtcatcacggttgaagaagccaagaccgccgaaaccgaactcgaagtcgtcgaaggcatgcagttcgaccgcggctacctcagcccctacttcgtgaccaatccggaaaagatgatcgccgacctcgaagacgtcttcattctccttcacgagaagaagctctcgaacctgcagtcgatgctcccggttctcgaagccgtcgttcagaccggcaagccgctcctcatcgtcgctgaagacgtcgaaggcgaagccctcgctacgctcgtcgtcaacaagctgcgcggcggcctgaagattgctgccgtcaaggcacctggcttcggcgatcgccgcaaggccatgctcgaagacatcgccatcctgacgggcggcactgtcatctccgaagatctcggcatcaagctcgaatccgtcacgctcgacatgctcggccgtgccaagaaggtttcgatctccaaggaaaacaccacgatcgtcgacggttcgggcgctaagaccgacatcgaaggccgtgttgcccagatcaaggcccagatcgaagaaaccacctccgactacgaccgcgagaagctgcaggaacgtcttgccaagctcgctggcggcgttgccgtcatccgcgtcggcggctcgacggaagtcgaagtgaaggaaaagaaggaccgcatcgacgacgcgctcaacgcgacccgcgctgccgttcaggaaggtatcgtccccggcggcggtatcgctctgctccgctcctccacgaagatcaccgtcaagggtgcaaacgacgaccaggaagccggcatcaacatcgttcgccgcgccctgcagtcgctcgttcgtcagatcgctgaaaacgcaggcgacgaagcctcgatcgttgtcggcaaggtcctcgacaagaacgaagacaactacggctacaacgcccagacgtccgaatatggcgacatgatcgccatgggtatcgtcgacccgctcaaggtcgttcgcacggcgctgcagaacgctgcttctgtcgcatcgctgctgatcaccaccgaagccatgattgccgaactgccgaagaaagaatcggctggcggcggcatgccgggcggaatgggcggaatgggcggaatggacatgatgtga

SEQ ID NO: 9525 - protein, 547 aa, Rhizobium leguminosarum bv. trifolii WSM1325
MASKEIKFGRTAREKMLRGVDILADAVKVTLGPKGRNVIIDKSFGAPRITKDGVSVAKEIELEDKFENMGAQMVREVASKTNDIAGDGTTTATVLAQAIVREGNKAVAAGMNPMDLKRGIDLAVADVVKDLQAKAKKISTSEEVAQVGTISANGDKQVGLDIAEAMQKVGNEGVITVEEAKTAETELEVVEGMQFDRGYLSPYFVTNPEKMIADLEDVFILLHEKKLSNLQSMLPVLEAVVQTGKPLLIVAEDVEGEALATLVVNKLRGGLKIAAVKAPGFGDRRKAMLEDIAILTGGTVISEDLGIKLESVTLDMLGRAKKVSISKENTTIVDGSGAKTDIEGRVAQIKAQIEETTSDYDREKLQERLAKLAGGVAVIRVGGSTEVEVKEKKDRIDDALNATRAAVQEGIVPGGGIALLRSSTKITVKGANDDQEAGINIVRRALQSLVRQIAENAGDEASIVVGKVLDKNEDNYGYNAQTSEYGDMIAMGIVDPLKVVRTALQNAASVASLLITTEAMIAELPKKESAGGGMPGGMGGMGGMDMM

SEQ ID NO: 9526 - DNA, 1635 bp, Bacillus cereus B4264
  CDS (1)..(1635): transl_table=11
atggcaaaagatattaaatttagtgaagaagcacgtcgttcgatgcttcgcggtgtcgacactcttgcaaacgcagtaaaagttacgcttggaccaaaaggtcgtaacgttgtacttgagaaaaaatttggttcaccacttattacaaatgatggtgtaacaatcgcaaaagaaatcgaattagaagatgcattcgaaaacatgggtgcgaaattagtagcagaagttgctagcaaaacaaatgacgtagctggtgacggaacaacaactgcaactgtattagcgcaagctatgattcgtgaaggtcttaaaaacgtaacagctggtgctaacccaatgggtcttcgtaaaggtatcgaaaaagctgttactgctgcaattgaagaattaaaaacgatttctaaaccaatcgaaggcaaatcttctatcgcacaagtagctgctatttctgcagctgacgaagaagtaggtcaattaatcgctgaagcaatggagcgcgttggtaacgacggcgttattactttagaagagtctaaaggattcacaacagaattagacgtagtagaaggtatgcaatttgatcgtggatatgcatctccttacatgattactgattctgacaaaatggaagcagttcttgataacccatacatcttaatcactgacaaaaagatttctaacattcaagaaatcttaccagtattagagcaagtggtacaacaaggtaaaccacttcttatcattgctgaagatgttgaaggcgaagctttagctacattagtagtgaacaaacttcgtggtacattcaacgtagtagctgttaaagctcctggatttggtgaccgtcgtaaagcaatgctagaagatatcgcaatcttaacaggtggcgaagtaatcactgaagaattaggtcgtgacttaaaatctgctacagttgaatctttaggacgcgctggtaaagttgttgttacaaaagaaaacacaactgtagttgaaggtgtaggaagcacagaacaaatcgaagctcgcatcggtcaaatccgtgcgcaattagaagaaacaacttctgaattcgatcgtgaaaaattacaagagcgtcttgctaaactagcaggtggcgtagcagtaattaaagtaggtgcagcaactgaaactgagttaaaagagcgcaaacttcgcattgaagatgcacttaactcaactcgtgcagcagtagaagaaggtatcgttgcaggtggtggtacttcacttatgaacgtatacacaaaagtagcttctatcgtagctgaaggcgacgaagcaacaggtatcaacatcgtacttcgcgcactagaagagccagttcgtcaaatcgcaatcaacgctggtctagaaggatctgtagttgtagagcgtctaaaaggcgaaaaagtaggcgttggtttcaacgcagctactggcgaatgggttaacatgcttgagtctggtatcgtagatccagctaaagtaactcgttctgcacttcaaaacgcagcatctgttgcagctatgttcttaacaactgaagctgtagttgctgacaagccagaaccaaatgcaccagcaatgcctgacatgggcggcatgggcatgggcggtatgggcggaatgatgtaa

SEQ ID NO: 9527 - protein, 544 aa, Bacillus cereus B4264
MAKDIKFSEEARRSMLRGVDTLANAVKVTLGPKGRNVVLEKKFGSPLITNDGVTIAKEIELEDAFENMGAKLVAEVASKTNDVAGDGTTTATVLAQAMIREGLKNVTAGANPMGLRKGIEKAVTAAIEELKTISKPIEGKSSIAQVAAISAADEEVGQLIAEAMERVGNDGVITLEESKGFTTELDVVEGMQFDRGYASPYMITDSDKMEAVLDNPYILITDKKISNIQEILPVLEQVVQQGKPLLIIAEDVEGEALATLVVNKLRGTFNVVAVKAPGFGDRRKAMLEDIAILTGGEVITEELGRDLKSATVESLGRAGKVVVTKENTTVVEGVGSTEQIEARIGQIRAQLEETTSEFDREKLQERLAKLAGGVAVIKVGAATETELKERKLRIEDALNSTRAAVEEGIVAGGGTSLMNVYTKVASIVAEGDEATGINIVLRALEEPVRQIAINAGLEGSVVVERLKGEKVGVGFNAATGEWVNMLESGIVDPAKVTRSALQNAASVAAMFLTTEAVVADKPEPNAPAMPDMGGMGMGGMGGMM

SEQ ID NO: 9528 - DNA, 1632 bp, Clostridium botulinum C str. Eklund
  CDS (1)..(1632): transl_table=11
atggctaagagtattttatttggtgaagaatcaagacgtgctatgcaagcaggcgtagataaattagcaaatgcagttaaagtaacattaggaccaaaaggaagaaatgttgttttagataaaaagtttggttcaccacttataactaatgatggtgtaactatagcaaaagaaatagaacttgaagatatttatgaaaacatgggagctcaacttgttaaagaagttgcaactaagactaatgatgtagctggagatggaacaacaactgctacattacttgctcaagcaatcataagagaaggattaaaaaacgtaacagcaggtgctaacccaatgcttataagaaaaggtattaaagtggctgtagatattgctgttgaacaaattaaaaaatcatcaaaacaagttgatggaaaagaagatatagctagagttgctgcaatatcagctgctgatcctgaaataggaaaattaatagcagatgctatggaaaaagtgggcaacgaaggggttatcactgtagaagaatcaaatacaatggctacagaacttgaagttgttgaaggaatgcaatttgatagaggatatttaagtccttacatggtaacagatgcagaaaaaatggaagctgcactagaaaatccatatatacttttaactgataaaaagataagtaatatacaagaaatacttccaatacttgaacaaatagttcaacaaggaaagaaattattaattattgcagaagatatagaaggagaagcattagctactttagttgttaataaattaagaggaacatttacttgtgtagctgttaaagcccctggatttggtgatagaagaaaagaaatgcttagagatatcgctatattaactggtggagaagttataagtgaagaagtaggaagagaattaaaagatgtaactttagatatgcttggaactgctgaaagtgttaaaataagcaaagaaaatactacaatagttaatggaaaaggaaataaagaagctattgtagatagagttgctcaaataagaagacaaatagaagaaacatcttcagaatttgataaagaaaaacttcaagaaagattagcaaaacttgctggtggagttgctgttgttaaagttggagcagctactgaaacagaattaaaagaaagaaagttaagaatagaagatgctttagcagctacaaaagcagctgtagaagaaggtatagttgcaggtggtggtacagcatacctaagagctataaaagaagttgaaaaattaactgataataattcagaagttagacttggaatagctattataaaaagagctcttgaagaaccggtaagacaaatagctaataatgctggacttgaaggatcagtaataatagataaaattaaaaatagtgaagatggaataggttttgatgctttagaaggtgaatatacaaacatgatgcaaaaaggaattgttgatccagctaaagttacaagatctgcacttcaaaatgctgcatcagttgcatcaacattcttaacaacagaatgcgttgtagcagaaataccagaaaaaaatccaatgccagcagcaccaggaatgggcggcatgggaatggacggaatgtattaa

SEQ ID NO: 9529 - protein, 543 aa, Clostridium botulinum C str. Eklund
MAKSILFGEESRRAMQAGVDKLANAVKVTLGPKGRNVVLDKKFGSPLITNDGVTIAKEIELEDIYENMGAQLVKEVATKTNDVAGDGTTTATLLAQAIIREGLKNVTAGANPMLIRKGIKVAVDIAVEQIKKSSKQVDGKEDIARVAAISAADPEIGKLIADAMEKVGNEGVITVEESNTMATELEVVEGMQFDRGYLSPYMVTDAEKMEAALENPYILLTDKKISNIQEILPILEQIVQQGKKLLIIAEDIEGEALATLVVNKLRGTFTCVAVKAPGFGDRRKEMLRDIAILTGGEVISEEVGRELKDVTLDMLGTAESVKISKENTTIVNGKGNKEAIVDRVAQIRRQIEETSSEFDKEKLQERLAKLAGGVAVVKVGAATETELKERKLRIEDALAATKAAVEEGIVAGGGTAYLRAIKEVEKLTDNNSEVRLGIAIIKRALEEPVRQIANNAGLEGSVIIDKIKNSEDGIGFDALEGEYTNMMQKGIVDPAKVTRSALQNAASVASTFLTTECVVAEIPEKNPMPAAPGMGGMGMDGMY

SEQ ID NO: 9530 - DNA, 1647 bp, Escherichia albertii TW07627
  CDS (1)..(1647): transl_table=11
atggcagctaaagacgtaaaattcggtaacgacgctcgtgtgaaaatgctgcgcggcgtaaacgtactggcagatgcagtgaaagttaccctcggtccgaaaggccgtaacgtagttctggataaatctttcggtgcaccgaccatcaccaaagatggtgtttctgttgctcgtgaaatcgaactggaagacaagttcgaaaacatgggtgcgcagatggtgaaagaggttgcctctaaagcgaacgacgctgcgggcgacggtactaccactgcaaccgtactggctcaggctatcatcactgaaggtctgaaagctgttgctgcgggcatgaacccgatggacctgaaacgtggtatcgataaagctgtttccgctgcagttgaagaactgaaagcgctgtctgtaccgtgctctgactctaaagcgattgctcaggttggtactatctccgctaactccgacgaaaccgtaggtaaactgatcgccgaagcgatggacaaagtcggtaaagaaggtgttatcaccgttgaagacggtaccggtctgcaagacgaactggacgtggttgaaggtatgcagtttgaccgcggctacctgtctccttacttcatcaacaagccggaaactggcgctgttgaactggaaagcccgttcatcctgctggctgacaagaaaatctccaacatccgcgaaatgctgccggttctggaagctgttgcaaaagcaggcaaaccgctgctgatcatcgctgaagatgttgaaggcgaagcgctggcaactctggttgttaacaccatgcgcggcatcgtgaaagtggctgcggttaaagcaccgggcttcggcgatcgtcgtaaagctatgctgcaggatatcgcaactctgactggtggtaccgtaatctctgaagagatcggtatggagctggaaaaagcaaccctggaagacctgggtcaggctaaacgcgttgtgatcaacaaagacaccaccactatcatcgatggtgtgggtgaagaagctgcaatccagggccgtgttgctcagatccgtcagcagattgaagaagcaacttctgactacgaccgtgaaaaactgcaggagcgcgtagcgaaactggcaggcggtgttgcagttatcaaagtaggtgctgctaccgaagttgaaatgaaagagaaaaaagcgcgcgttgaagatgccctgcacgcgacccgtgctgcggtagaagaaggcgtggttgctggtggtggtgttgcgctgattcgcgtcgcgtctaaactggctgacctgcgtggtcacaacgaagaccagaacgtgggtatcaaagttgcactgcgtgcgatggaagctccgctgcgccagatcgtactgaactgcggcgaagaaccgtctgttgttgctaacactgttaaaggtggcgacggcaactacggttacaacgcagcaaccgaagaatatggcaacatgatcgacatgggtatcctggatccaaccaaagtaactcgttctgctctgcagtacgcagcttctgtggctggcctgatgatcaccaccgagtgcatggttaccgacctgccgaaaaacgatgcagctgacttaggcgctgctggcggtatgggcggcatgggtggtatgggcggcatgatgtaa

SEQ ID NO: 9531 - protein, 548 aa, Escherichia albertii TW07627
MAAKDVKFGNDARVKMLRGVNVLADAVKVTLGPKGRNVVLDKSFGAPTITKDGVSVAREIELEDKFENMGAQMVKEVASKANDAAGDGTTTATVLAQAIITEGLKAVAAGMNPMDLKRGIDKAVSAAVEELKALSVPCSDSKAIAQVGTISANSDETVGKLIAEAMDKVGKEGVITVEDGTGLQDELDVVEGMQFDRGYLSPYFINKPETGAVELESPFILLADKKISNIREMLPVLEAVAKAGKPLLIIAEDVEGEALATLVVNTMRGIVKVAAVKAPGFGDRRKAMLQDIATLTGGTVISEEIGMELEKATLEDLGQAKRVVINKDTTTIIDGVGEEAAIQGRVAQIRQQIEEATSDYDREKLQERVAKLAGGVAVIKVGAATEVEMKEKKARVEDALHATRAAVEEGVVAGGGVALIRVASKLADLRGHNEDQNVGIKVALRAMEAPLRQIVLNCGEEPSVVANTVKGGDGNYGYNAATEEYGNMIDMGILDPTKVTRSALQYAASVAGLMITTECMVTDLPKNDAADLGAAGGMGGMGGMGGMM

SEQ ID NO: 9532 - DNA, 1620 bp, Geobacillus sp. WCH70
  CDS (1)..(1620): transl_table=11
atggcaaaagaaattaaattcagcgaagaagctcgtcgtgcgatgttacgtggtgtggacaaattagctgatgcggtaaaagtaacgttaggtccaaaaggccgtaacgtcgtattagagaaaaaattcggttctccattaattacgaatgacggtgtaacgatcgcgaaagaaatcgaattagaagatccatttgaaaacatgggtgcgaagcttgttgctgaagttgcaagcaaaacaaacgatgttgctggggacggtacaacaacggcaacagttttagcgcaagcaatgatccgcgaaggattgaaaaacgttacagctggcgctaacccaatgggcatccgtaaaggtattgaaaaagcggtcgctgtggcagtagaagaattaaaagcaatctccaaaccaatcaaaggaaaagaatcgattgctcaagttgcggctatctctgcagctgacgaagaagttggccaattaatcgcagaagcaatggaacgcgttggtaacgacggtgttatcacattagaagaatcaaaaggcttcacaacagaattagatgttgtggaaggtatgcaatttgaccgtggttatgtatctccatacatgatcacagatacagaaaaaatggaagcagtgcttgaaaatccatatatcttaatcacagacaaaaaaatctctaacatccaagacatcttgcctatcttagaacaagtagttcaacaaggcaaaccattattaatcatcgcagaagatgtcgaaggcgaagcacttgcgacattagtagtgaacaaacttcgcggtacattcactgccgtagcagttaaagctcctggcttcggtgatcgtcgtaaagcaatgcttgaagacatcgcaatcttaactggcggtgaagttatctccgaagaactaggacgtgacttaaaatctacaacaatcgcatcacttggccgcgcttcgaaagtagtcgtaacaaaagaaaatacaacaattgtagatggcgctggcgactctgaacgcattaaagctcgcatcaaccaaattcgtgcgcaattagaagaaacaacttctgaattcgatcgtgaaaaattgcaagaacgtctagcaaaattagctggcggcgtagcggtaatcaaagttggtgcagctacagaaacagaattgaaagaacgcaaattacgcatcgaagacgcgctcaactctactcgtgccgctgtggaagaaggtatcgtagccggcggtggtacagcattaatgaacgtatacaataaagttgctgcgattgaagcagaaggcgatgaagcaactggtgtgaaaatcgttcttcgcgcaattgaagagccagttcgccaaatcgcgcaaaacgctggtttggaaggctctgtcattgttgaacgcttaaaaacagaaaaacctggcatcggcttcaacgcggctactggtgaatgggtagacatgattgaagctggtatcgtagacccaacgaaagtaactcgttccgcacttcaaaacgcagcttctgttgccgctatgttcttaacaacagaagcagttgtcgctgacaaaccagaagaaaacaaaggcggcaacccaggcatgcctgacatgggcggaatgatgtaa

SEQ ID NO: 9533 - protein, 539 aa, Geobacillus sp. WCH70
MAKEIKFSEEARRAMLRGVDKLADAVKVTLGPKGRNVVLEKKFGSPLITNDGVTIAKEIELEDPFENMGAKLVAEVASKTNDVAGDGTTTATVLAQAMIREGLKNVTAGANPMGIRKGIEKAVAVAVEELKAISKPIKGKESIAQVAAISAADEEVGQLIAEAMERVGNDGVITLEESKGFTTELDVVEGMQFDRGYVSPYMITDTEKMEAVLENPYILITDKKISNIQDILPILEQVVQQGKPLLIIAEDVEGEALATLVVNKLRGTFTAVAVKAPGFGDRRKAMLEDIAILTGGEVISEELGRDLKSTTIASLGRASKVVVTKENTTIVDGAGDSERIKARINQIRAQLEETTSEFDREKLQERLAKLAGGVAVIKVGAATETELKERKLRIEDALNSTRAAVEEGIVAGGGTALMNVYNKVAAIEAEGDEATGVKIVLRAIEEPVRQIAQNAGLEGSVIVERLKTEKPGIGFNAATGEWVDMIEAGIVDPTKVTRSALQNAASVAAMFLTTEAVVADKPEENKGGNPGMPDMGGMM

SEQ ID NO: 9534 - DNA, 1626 bp, Cyanothece sp. PCC 8801
  CDS (1)..(1626): transl_table=11
atggctaaatctattgtctataacgaagatgcacgtcgcgccctagagaaagggatggacattctggctgaagcagtggccgttaccctcggtcccaaaggtcgtaacgtcgtactagagaaaaaatttggcgcaccccaaattattaacgatgggatcaccattgctaaagaaattgaactagaagatcatatcgagaatactggggtagctttgatccgtcaagctgcctctaaaacgaacgatgtcgctggagatggaactaccaccgctaccgttctggcccatgctattgttaaagaaggattacgaaacgtagcggcgggagctaaccccatttccctcaaacgaggcatagacaaagccaccgaatttttagtggaaaaaattgctgcttacgctaaacccgttgaagactccaaagcgatcgctcaagtgggagccatctctgcggggaatgatgacgaagtgggtcaaatgatcgctaatgccatggacaaagtgggcaaagaaggggttatttcccttgaagaaggtaagtccatgacgaccgaattggaaattaccgaagggatgcgctttgataaaggctacatttctccctactttgtcaccgacaccgaacggatggaatgtgtcttagacgatcctgccattctcttaaccgataagaaaattaccctagttcaagacttagtacccgttctcgaacaagttgcccgtcaaggcaaacctttagttatcattgctgaagatatcgaaaaagaagccctcgctaccttagtggtgaaccgtctgcggggtgttctgaccgttgctgcggttaaagcccctggttttggcgatcgccgtaaggctatgcttgaagatatcgccgttctcacgggtggtcaggtgatcagcgaagatgcgggtctgaagttggaaaataccaagattgaaatgctcggtactgcccgccgtatcaccttaaccaaagacaataccaccattgtggctgaaggacacgacgctgccgttaaaagccgttgtgaactgatccgccgtcaaatggaagatactgagtcttcctacgacaaggaaaaactccaagaacgcttagcgaaattgtctggtggggtcgctgttatcaaagtaggggctgctactgagacggaaatgaaagatcgcaagctacgcctcgaagatgccatcaacgcgacaaaagctgccgttgaagaggggatcgttccggggggtggtactaccttagctcacttggctcctcaattggaagcctgggctaatagtaccctcagcaatgaagagttgaccggtgctcttattgtatcgcgcgctttgacggctcctctcaaacgtattgccgaaaatgcgggacaaaacggtgcggttatcgctgaacgggtgaaggaaaaagactttaacgttggttacgatgctgctactggagagtttgccgatatgttcgaggtgggagtcgttgaccccgctaaagtgacccgttctggactgcaaaatgcggcttctattgcaggaatgatcctcactactgaatgtattgttgtggataagcctgagaaagacaaacccgcggccggtggtggcggtggagattttgactactaa

SEQ ID NO: 9535 - protein, 541 aa, Cyanothece sp. PCC 8801
MAKSIVYNEDARRALEKGMDILAEAVAVTLGPKGRNVVLEKKFGAPQIINDGITIAKEIELEDHIENTGVALIRQAASKTNDVAGDGTTTATVLAHAIVKEGLRNVAAGANPISLKRGIDKATEFLVEKIAAYAKPVEDSKAIAQVGAISAGNDDEVGQMIANAMDKVGKEGVISLEEGKSMTTELEITEGMRFDKGYISPYFVTDTERMECVLDDPAILLTDKKITLVQDLVPVLEQVARQGKPLVIIAEDIEKEALATLVVNRLRGVLTVAAVKAPGFGDRRKAMLEDIAVLTGGQVISEDAGLKLENTKIEMLGTARRITLTKDNTTIVAEGHDAAVKSRCELIRRQMEDTESSYDKEKLQERLAKLSGGVAVIKVGAATETEMKDRKLRLEDAINATKAAVEEGIVPGGGTTLAHLAPQLEAWANSTLSNEELTGALIVSRALTAPLKRIAENAGQNGAVIAERVKEKDFNVGYDAATGEFADMFEVGVVDPAKVTRSGLQNAASIAGMILTTECIVVDKPEKDKPAAGGGGGDFDY

SEQ ID NO: 9536 - DNA, 1629 bp, Cyanothece sp. PCC 7424
  CDS (1)..(1629): transl_table=11
atggctaaatctatcatttacaacgacgaagcacgccgcgctctcgaaagaggaatggatatcctcgctgaatctgtagccgttacccttgggcctaaaggacgtaacgtagtattagaaaagaaatttggtgccccgcaaatcatcaacgacgggatcaccattgccaaagaaattgaattagaagatcacattgagaataccggcgtttccttgattcgtcaagccgcttctaagaccaatgacgtagctggagacggaacaaccactgcaaccgtcctcgctcacgcaatggttaaagaagggttacgtaacgttgctgctggtgctaaccccatttctatcaaacgtgggatcgataaagcaattgaatatttagtcgctaaaattgctgaacacgccaaacctgtagaagattctaaagcgatctctcaagtcggtgcaatttctgccggtaacgacgaagaagtcggtaacatgatcgctgaggcgatggataaagtcggtaaagaaggggttatttctcttgaagaagggaaatcaatgactaccgaactggaaatcaccgaagggatgcgctttgacaagggttatatctctccctactttgtcaccgatacagagcgcatggagtgcgttttcgatgatcccgctatcctgctcaccgataagaaaattgccctcgttcaagatttagttcctgttttagaacaggttgctcgtgctggcaaaccgttattaatcctcgctgaagatatcgaaaaagaagctctcgctactttagtggttaaccgtctgcgcggtgtcttaaatgttgctgcggttaaagcgcctggttttggcgatcgccgtaagcaaatgttagaagatattgcggttctaactggtggtcaagtgattagcgaagatgcagggttaaaattagaaaatactaagctagaaatgcttggttcagcccgtcgtatcaccatcaccaaagataacaccaccattgttgctgaaggtaatgaagctgcggttaaagctcgttgtgagcaaattcgccgccaaatcgaagaaactgagtcttcttacgataaagaaaaattacaagaacgtctcgctaagttgtccggtggggttgcagtaatcaaagtgggtgctgctaccgaaaccgaaatgaaagaccgcaaactccgtttagaagacgcaatcaacgctactaaggcggcggttgaagaagggattgttcccggtggtggcacaactctagctcatttaacccctgtcctcgaagagtgggctaaaggtaacctcaagaatgaagagttaaccggtgctttaattgtatctcgtgctttgactgctcccttaaagcggattgctgaaaatgccggtcaaaacggcgctgttgtcgctgaacgggtgaaagagaaagagtttagcgtcggttatgatgcggctaacgatacctttactgatatgttggcagcaggtattgttgaccccgctaaagtaactcgttctgctttacaaaatgccgcttctatcgcaggaatggtgttaacaactgagtgtattgttgttgataagcctgagaaagaaaaatctcctgctggtgctggtgctggtggcgattttgattactaa

SEQ ID NO: 9537 - protein, 542 aa, Cyanothece sp. PCC 7424
MAKSIIYNDEARRALERGMDILAESVAVTLGPKGRNVVLEKKFGAPQIINDGITIAKEIELEDHIENTGVSLIRQAASKTNDVAGDGTTTATVLAHAMVKEGLRNVAAGANPISIKRGIDKAIEYLVAKIAEHAKPVEDSKAISQVGAISAGNDEEVGNMIAEAMDKVGKEGVISLEEGKSMTTELEITEGMRFDKGYISPYFVTDTERMECVFDDPAILLTDKKIALVQDLVPVLEQVARAGKPLLILAEDIEKEALATLVVNRLRGVLNVAAVKAPGFGDRRKQMLEDIAVLTGGQVISEDAGLKLENTKLEMLGSARRITITKDNTTIVAEGNEAAVKARCEQIRRQIEETESSYDKEKLQERLAKLSGGVAVIKVGAATETEMKDRKLRLEDAINATKAAVEEGIVPGGGTTLAHLTPVLEEWAKGNLKNEELTGALIVSRALTAPLKRIAENAGQNGAVVAERVKEKEFSVGYDAANDTFTDMLAAGIVDPAKVTRSALQNAASIAGMVLTTECIVVDKPEKEKSPAGAGAGGDFDY

SEQ ID NO: 9538 - DNA, 1635 bp, Bacillus cereus NVH0597-99
  CDS (1)..(1635): transl_table=11
atggcaaaagatattaaatttagtgaagaagcacgtcgttcgatgcttcgcggtgtcgacactcttgcaaatgcagtaaaagtaacgcttggaccaaaaggtcgtaacgttgttcttgagaaaaaattcggttcaccacttattacaaatgacggtgtaacaatcgcaaaagaaattgaattagaagatgcattcgaaaacatgggtgcgaaattagtagcagaagttgctagtaaaacaaatgatgtagctggtgacggaacaacaactgcaactgtattagcacaagctatgattcgtgaaggtcttaaaaacgtaacggctggtgcgaatccaatgggtcttcgtaaaggtatcgaaaaagctgttactgctgcaatcgaagaattaaaaacgatttctaaaccaatcgaaggtaaatcttcaatcgcacaagtagctgcgatttctgcggctgacgaagaagtaggtcaattaatcgctgaagcaatggagcgcgttggtaacgacggcgttattactttagaagaatctaaaggtttcacaacagaattagacgtagtagaaggtatgcaatttgatcgtggatatgcatctccttacatgattactgattctgacaaaatggaagcggttcttgataacccatacatcttaatcactgacaaaaagatttctaacattcaagaaatcttaccagtattagagcaagtggtacaacaaggtaaaccacttcttatcattgctgaagatgtagaaggcgaagcattagctacattagtagtgaacaaacttcgtggtacattcaatgtagtagctgttaaagctcctggatttggtgaccgtcgtaaagcaatgctagaagatatcgcaatcttaactggtggcgaagtaatcactgaagaattaggccgtgacttaaaatctgctacagttgaatctttaggacgcgctggtaaagttgttgtaacgaaagaaaacacaactgtagttgaaggtgtaggaagcacagaacaaatcgaagctcgcatcggtcaaatccgtgcgcaattagaagaaacaacttctgaattcgatcgtgaaaaattacaagagcgtcttgcaaaacttgcaggtggcgtagcagtaattaaagtaggtgcagcaactgaaactgagttaaaagagcgtaaacttcgcattgaagatgcacttaactcaactcgtgcagcagtagaagaaggtatcgttgcaggtggtggtacttcacttatgaacgtatacacaaaagtagcttctatcgtagctgaaggcgacgaagcaacaggtatcaacatcgtacttcgtgcactagaagagccagttcgtcaaatcgcaatcaacgctggtctagaaggatctgtagttgtagagcgtctaaaaggcgaaaaagtaggcgttggtttcaatgcagctactggcgagtgggttaacatgcttgaaactggtatcgtagatccagctaaagtaactcgctctgcacttcaaaacgcagcatctgttgcagctatgttcttaacaactgaagctgtagtagctgacaaaccagaaccaaatgcaccagcaatgcctgacatgggcggcatgggcatgggcggtatgggcggaatgatgtaa

SEQ ID NO: 9539 - protein, 544 aa, Bacillus cereus NVH0597-99
MAKDIKFSEEARRSMLRGVDTLANAVKVTLGPKGRNVVLEKKFGSPLITNDGVTIAKEIELEDAFENMGAKLVAEVASKTNDVAGDGTTTATVLAQAMIREGLKNVTAGANPMGLRKGIEKAVTAAIEELKTISKPIEGKSSIAQVAAISAADEEVGQLIAEAMERVGNDGVITLEESKGFTTELDVVEGMQFDRGYASPYMITDSDKMEAVLDNPYILITDKKISNIQEILPVLEQVVQQGKPLLIIAEDVEGEALATLVVNKLRGTFNVVAVKAPGFGDRRKAMLEDIAILTGGEVITEELGRDLKSATVESLGRAGKVVVTKENTTVVEGVGSTEQIEARIGQIRAQLEETTSEFDREKLQERLAKLAGGVAVIKVGAATETELKERKLRIEDALNSTRAAVEEGIVAGGGTSLMNVYTKVASIVAEGDEATGINIVLRALEEPVRQIAINAGLEGSVVVERLKGEKVGVGFNAATGEWVNMLETGIVDPAKVTRSALQNAASVAAMFLTTEAVVADKPEPNAPAMPDMGGMGMGGMGGMM

SEQ ID NO: 9540 - DNA, 1635 bp, Chthoniobacter flavus Ellin428
  CDS (1)..(1635): transl_table=11
atggcagctaaacaactccaattcgacgaagccgctcgccaggctcttctccgcggtgtcgagaaactcgcgaaagcggtcaaggcgaccctcgggccagccggacgcaacgtcatcctcgacaagaaattcggcagcccgaccatcaccaaggacggcgtgaccgtcgccaaggaaatcgagctcgacgatccctatgaaaacatgggcgcccagctcgtccgcgaagtcgccagcaagaccagcgacatggcgggtgacggcaccaccaccgcgaccgtgctcgctgaagccatctacaaggaaggcctcaagaacgtgaccgccggcgcgaacccgatgtcgctccagcgcggcatcaacaaggccgtcgaagccctcgtcaacgagatctcccgcatctccaagaaggtcaaggatcgcaccgagatcgcccaggtcgccaccgtctccgccaactgggacaccaccatcggcgagatcatcgctgacgcgatggacaaggtcggcaaggacggcaccatcaccgtcgaagaagccaagtcgatcgagaccaccctcgacgtcgtcgaaggcatgcagttcgacaagggctacatctcgccctacttcgtgaccaacgccgagtcgctcgaagtgatcctcgacaatccctacatcctcatccacgagaagaagatcagctccctcaaggacctgctccccgtgctcgagaagaccgccaagaccggcaagcccctcctcatcatcgctgaggacgtggaaggcgaagcgctcgcgaccctcgtcgtgaacaagctccgcggcaccatccaggtcgccgccgtcaaggccccgggcttcggcgatcgccgcaaggccatcctcgaagacatcgccatcctcaccggtggccgtctgctcagcgaagacctcggcatcaagctcgagaacatcacgctggaagacctcggcaaggccaagcgcatcaccatcgacaaggaaaacaccaccatcgtcgaaggcagcggcaagaacacggacatccagggccgcgttggccagatccgccgccagatcgaagagaccaccagcgactacgatcgtgagaagctccaggagcgcctcgcgaagctcgccggcggcgtggccgtcatcaatgtcggcgccgcgaccgagactgagctcaaggaaaagaaggcccgcgtcgaagacgcccttcacgcgacccgtgcggccgtggaagaaggcatcgtccccggcggcggcgtcgctctgatccgcgcccagaaggccctcgaagccgtgaagctcgaaggtgacgaagcgatcggtctcgccatcatcaagcgcgcgatcgaagcgcccctccgccagctcgccgacaacgcgggccaggaaggcgccctcatcgtcagcgaagtcaagaagcgcaagggcaacgaaggttacaatgtcgcgaccggcgaatacaccgacctgatcaaggccggggtcgtcgatcccgccaaggtgacccgcagcgcgctccagcacgcggcctccatctccggcctgctcctgaccaccgaagcggtgatcaccgagctccccgagaaggaaaagccggctggcggcgacgcccacggccacggcccgggcggcatggactactaa

SEQ ID NO: 9541 - protein, 544 aa, Chthoniobacter flavus Ellin428
MAAKQLQFDEAARQALLRGVEKLAKAVKATLGPAGRNVILDKKFGSPTITKDGVTVAKEIELDDPYENMGAQLVREVASKTSDMAGDGTTTATVLAEAIYKEGLKNVTAGANPMSLQRGINKAVEALVNEISRISKKVKDRTEIAQVATVSANWDTTIGEIIADAMDKVGKDGTITVEEAKSIETTLDVVEGMQFDKGYISPYFVTNAESLEVILDNPYILIHEKKISSLKDLLPVLEKTAKTGKPLLIIAEDVEGEALATLVVNKLRGTIQVAAVKAPGFGDRRKAILEDIAILTGGRLLSEDLGIKLENITLEDLGKAKRITIDKENTTIVEGSGKNTDIQGRVGQIRRQIEETTSDYDREKLQERLAKLAGGVAVINVGAATETELKEKKARVEDALHATRAAVEEGIVPGGGVALIRAQKALEAVKLEGDEAIGLAIIKRAIEAPLRQLADNAGQEGALIVSEVKKRKGNEGYNVATGEYTDLIKAGVVDPAKVTRSALQHAASISGLLLTTEAVITELPEKEKPAGGDAHGHGPGGMDY

SEQ ID NO: 9542 - DNA, 1668 bp, Cyanothece sp. PCC 8802
  CDS (1)..(1668): transl_table=11
atggcaaaaatagtttccttcagtgatgaatcaagacggtccttagagcaaggcgttaatgctttggccaatgcggttcgtattaccctcggtccaaaaggccgcaatgtcttactcgaaaagaaatttggagccccccaaatcgttaacgatgggatcaccgtcgccaaagaaattgaactcgaagatcccttagaaaacactggggctagactcattcaagagatcgcctctaaaaccaaagaagtcgccggagatggaaccaccaccgccaccgtgatcggtcaagccctcattcgggaaggattaaaaaacgtcattgccggagccaatcctgtagccttacgacgaggtattgaaaaaaccgtcgcgtatttagtcgaagaaattgcctcggtttctcaaccggtcgctggtgatgccattgcccaagtcgctaccgtttcctcaggaaatgacgaagaagtgggcaaaatgatcgccctagccatggataaagtgaccactgatggggtgatcaccgtcgaagaatcaaaatccctcaccaccgaattagacgtagtagaagggatgcaaatcgatcgcggctatctatccccctacttcatcagtgatcccgaacgacaactggtggaatttgaaaagccctatattctgattaccgacaaaaaaattagcgcgatcgccgatttagttcccgttctcgaaaacgtagcgcgttctggcagtcccctactgatcattgctgaagacgtagaaggagaagccctcgctaccctggtggtgaacaaagccagaggggtcttaaacgtcgcagcaattaaagcccctgcctttggcgaacgacgcaaagctgtgttacaagatattgccatccttacgggagggagcgtcatttccgaagaagtcgggctgaccttagatgcagtatccgttgatatgctcggacaagccgataaaatcactattgagaaagacaatactaccattgtcgccaccggagacagcaaaaccaaaggggcgatcgaaaaacgggtcgcccaactacgcaaacaactcgaagaaaccgactcagagtacgataaagaaaaactcaccgaacgcattgctaaattagcgggtggggtcgccgtgattaaagtgggagcagccacggaaaccgaactcaaggatcgtaagctgcgcattgaagatgctcttaatgccactaaagcggccatcgaagaaggcatcgtccccggtggtggaaccacgttaattcacttggccaaaaaggtacttgagtttaagcaaagcttaaccaaccctgaagaacaggtcgcggccgatatcgttgctaaagccttagaagctcctttgcgccaattggctgacaatgcaggggttgaaggctctgtgatcatcgaccgtgtgcgtaacacagactttaatgtgggctacaatgccatgtcaggggaatttgaggatatgatcgcggcgggcatcattgatccggctaaagtggttcgttgtgctgtgcaaaatgcagcctcgattgccggaatggtcttaaccacagaagctctcgtcgttgaaaaacctgaacccgcggctccccctccccctgatatgggcggtatgggcggtatgggtggtatgggcggcatgggcggcatgggcatgatgtag

SEQ ID NO: 9543 - protein, 555 aa, Cyanothece sp. PCC 8802
MAKIVSFSDESRRSLEQGVNALANAVRITLGPKGRNVLLEKKFGAPQIVNDGITVAKEIELEDPLENTGARLIQEIASKTKEVAGDGTTTATVIGQALIREGLKNVIAGANPVALRRGIEKTVAYLVEEIASVSQPVAGDAIAQVATVSSGNDEEVGKMIALAMDKVTTDGVITVEESKSLTTELDVVEGMQIDRGYLSPYFISDPERQLVEFEKPYILITDKKISAIADLVPVLENVARSGSPLLIIAEDVEGEALATLVVNKARGVLNVAAIKAPAFGERRKAVLQDIAILTGGSVISEEVGLTLDAVSVDMLGQADKITIEKDNTTIVATGDSKTKGAIEKRVAQLRKQLEETDSEYDKEKLTERIAKLAGGVAVIKVGAATETELKDRKLRIEDALNATKAAIEEGIVPGGGTTLIHLAKKVLEFKQSLTNPEEQVAADIVAKALEAPLRQLADNAGVEGSVIIDRVRNTDFNVGYNAMSGEFEDMIAAGIIDPAKVVRCAVQNAASIAGMVLTTEALVVEKPEPAAPPPPDMGGMGGMGGMGGMGGMGMM

SEQ ID NO: 9544 - DNA, 1632 bp, Cyanothece sp. PCC 7822
  CDS (1)..(1632): transl_table=11
atggctaaatctatcatttacaacgacgaagcacgccgcgcactagaacgaggaatggatatcctcgctgaatctgtagccgttactctcggtccaaaaggacgtaacgtagtattagaaaagaaatttggtgccccgcagattgttaacgacgggatcaccattgctaaagaaattgaattagaagatcacattgagaataccggcgtttctttaattcgtcaagccgcttctaaaaccaatgatgtcgctggagacgggaccaccaccgctaccgtactcgctcacgcaatggttaaagaagggttacgcaacgttgctgctggtgctaaccccatttctatcaagcgtgggatcgacaaagcgaccgagtatttagtcggcaagattgcagaacacgctaaaccggttgaagactccaaagcgatctctcaagtgggtgccatctctgcgggtaacgatgaagaagtcggcagcatgatcgctcaagcgatggataaagtcggtaaggaaggggttatctccctcgaagaagggaagtccatgacgaccgaactcgaaattaccgaagggatgcgctttgataagggttatatctctccctacttcgtgactgatacagagcgcatggagtgcgttttcgatgaccccgccatcctgctcaccgataagaaaatcgcgctagtacaagatttagtgcctgtattagaacaggttgctcgtgctggcaaaccgttattaattctcgctgaagatatcgaaaaagaagcgcttgctactctagtcgttaaccgtctgcgcggtgtattaaatgtcgctgcggttaaagcaccgggttttggcgatcgccgtaagcaaatgctcgaagatatcgcggttctgactggtggtcaagtgatcagcgaagatgctggactcaagctagaaaataccaagcttgatatgctcggtaaagctcgccgtattaccatcaccaaagataacaccaccattgttgctgaaggtaacgaagcgggtgttaaagcgcgttgcgaacaaattcgccgtcaaatcgaagaaaccgagtcttcttacgacaaagaaaaattacaagaacgtcttgctaagttatccggtggggttgcagtcattaaagtgggtgctgctaccgaaaccgaaatgaaagaccgcaaactccgcttagaagacgcgatcaacgcaactaaagcggctgtggaagaagggatcgttcctggtggcggtactaccttagctcatttaactcctaccctcgaagagtgggcaaaagctaacctcaagactgaagagttaaccggtgcgctaattgttgctcgtgcgttaacggctcccttaaagcgtattgctgaaaatgccggacaaaatggtgctgttgtcgctgaacgggtaaaagagaaggaattcaacgtcggttataatgccgctaatgataccttcaccaatatgctagaagcgggtatcgttgaccctgctaaggtaactcgttctgctctgcaaaatgcggcttctattgcaggtatggttctcaccactgagtgtattgtggttgacaaacctgaaaaagaaaaatctgctgcgggtgctggcgctggcggcggtgattttgattactaa

SEQ ID NO: 9545 - protein, 543 aa, Cyanothece sp. PCC 7822
MAKSIIYNDEARRALERGMDILAESVAVTLGPKGRNVVLEKKFGAPQIVNDGITIAKEIELEDHIENTGVSLIRQAASKTNDVAGDGTTTATVLAHAMVKEGLRNVAAGANPISIKRGIDKATEYLVGKIAEHAKPVEDSKAISQVGAISAGNDEEVGSMIAQAMDKVGKEGVISLEEGKSMTTELEITEGMRFDKGYISPYFVTDTERMECVFDDPAILLTDKKIALVQDLVPVLEQVARAGKPLLILAEDIEKEALATLVVNRLRGVLNVAAVKAPGFGDRRKQMLEDIAVLTGGQVISEDAGLKLENTKLDMLGKARRITITKDNTTIVAEGNEAGVKARCEQIRRQIEETESSYDKEKLQERLAKLSGGVAVIKVGAATETEMKDRKLRLEDAINATKAAVEEGIVPGGGTTLAHLTPTLEEWAKANLKTEELTGALIVARALTAPLKRIAENAGQNGAVVAERVKEKEFNVGYNAANDTFTNMLEAGIVDPAKVTRSALQNAASIAGMVLTTECIVVDKPEKEKSAAGAGAGGGDFDY

SEQ ID NO: 9546 - DNA, 1677 bp, Arthrospira maxima CS-328
  CDS (1)..(1677): transl_table=11
atggcgaaaatcgtagcctttgacgaagaatcacggcgagcgatcgagcggggagtcaacgccctagcagacgcagttcgtgttaccctcggtccaagaggtcgcaatgtactgatagagaaaaaatttggcgtaccggatattgtcagtgatggaattaccgtagccaaagcgatcgaattaggagatcccctagaaaatacaggcgcgcggttaattcaagaagtagcagcgaaaaccaatgatgtggctggagatggtactaccacagcagcagttttggctcaagccatgatacaggaaggcttgaagaatgtggcggcgggtgcgaaccccgtggctttgcggcggggaattgataaaaccgttcagtatctggtcaaagaaattgaatccttagctaaacccgtcgaaggaagtgcgatcgaacaggtagccacagtttccgccgggaatgataaggaagtgggagagatgatcgccctagccatggacaaagtgaccaaagacggagtaatcaccgttgaggagtccaagtccctaaccaccgaattagaagttgtggaagggatgcaaatcgatcgcggttatatttccccctacttcatcaccgatagcgaacggatgacagtagagttagacaatgctcgtgtcctgatcaccgataaaaaaatcagtgccattcaggatattgtttccgtcctggaaaaagtcgcccgttctggtcaacccctgctcattatagccgaagacatcgacggggaagccctagccaccttagttgtcaacaaagcccggggtgtgttgaatgtagccgctattaaagcccctggtttcggcgaacgtcggaaagccatgctccaagatattgccattcttaccgggggtcagttgatttccgaagaaattggcttaaacttggaaacagccaccgtagagatgctaggaacagccactaaagtcacaattaacaaggactccaccaccattgtttctggttccggtcatcaaggtgagatccaacagcgggtcgaacaattgcgtaagcaactggcagaaactgattccgaatatgatcaggaaaaactgcaagaacgtattgctaagttagctggcggtgtggcggtcattaaagttggtgcggctaccgaaactgaactgaaatcccgtaaacttcgtattgaagatgctctgaatgccactaaagctgctgtggatgagggaattgttcccggtggcggtacaaccttaattcacttggtcaaaaaggtagagcaactggctgcaactttcagcatagaagaggaaaagctgggagctaaaattgtggcacgagctttggaagcacctctgcgtcaaattgctaataattcaggggttgagggttctgtaattgttgaacaagtccgtaacagtgactctaatattggttacaatgctttaacgggtaactttgaagacttgattgtggcaggaattttagacccagccaaggtggttcgctcttccctgcaaaatgctggctcaattgcgggaatggtgattaccactgaggttctcgtggttgagaagcctgagcctaaaccagcaatgccagatatggacggcatgggtggtatgggtggtatgggtggtatgggtggcatgggtggtatgggtggcatgggaatgatgtaa

SEQ ID NO: 9547 - protein, 558 aa, Arthrospira maxima CS-328
MAKIVAFDEESRRAIERGVNALADAVRVTLGPRGRNVLIEKKFGVPDIVSDGITVAKAIELGDPLENTGARLIQEVAAKTNDVAGDGTTTAAVLAQAMIQEGLKNVAAGANPVALRRGIDKTVQYLVKEIESLAKPVEGSAIEQVATVSAGNDKEVGEMIALAMDKVTKDGVITVEESKSLTTELEVVEGMQIDRGYISPYFITDSERMTVELDNARVLITDKKISAIQDIVSVLEKVARSGQPLLIIAEDIDGEALATLVVNKARGVLNVAAIKAPGFGERRKAMLQDIAILTGGQLISEEIGLNLETATVEMLGTATKVTINKDSTTIVSGSGHQGEIQQRVEQLRKQLAETDSEYDQEKLQERIAKLAGGVAVIKVGAATETELKSRKLRIEDALNATKAAVDEGIVPGGGTTLIHLVKKVEQLAATFSIEEEKLGAKIVARALEAPLRQIANNSGVEGSVIVEQVRNSDSNIGYNALTGNFEDLIVAGILDPAKVVRSSLQNAGSIAGMVITTEVLVVEKPEPKPAMPDMDGMGGMGGMGGMGGMGGMGGMGMM

SEQ ID NO: 9548 - DNA, 1638 bp, Arthrospira maxima CS-328
  CDS (1)..(1638): transl_table=11
atggcaaaacgtattatatacaacgaaaatgctcgtcgcgccctcgaacgtggtatggacatcttggctgagtccgtagccgttactctcggacccaaaggccgtaacgtagtcctagaaaagaaatttggcgcaccccaaatcgttaacgacggggtgacgatcgccaaagaaatcgaactcgaagataacattgagaatactggtgtagccctaattcgtcaagcggcttctaaaaccaatgatgcggcgggagatggaaccaccactgcaacggttctagctcatgccatggttaaagaaggactgcggaacgtagcagccggagctaaccccattgaactgaaacggggaattgataaggcgacagctttcttggtagacagaattgctgaacacgctcgccctgtggaagattctaaagcgatcgctcaagttggtaccatctctgctggtaacgacgaagaagttggtcagatgatcgctgaagccatggacaaagtgggtaaagagggtgtgatttccctcgaagaaggtaagtccatgactaccgaactggaaatcaccgaaggtatgcgctttgataagggctatatctccccttacttcgctaccgataccgagcgcatggaagctatcctcgatgagccttatatcctgctcaccgataagaaaattaccttggttcaggatttagttccggttctcgaacaagtagcgcgcgctagtcgtcctctgttaattattgctgaggatatcgaaaaagaagctctggctaccctggtggttaaccgcctgcggggtgtgctgaatgtggctgctgttaaggctcctggttttggcgatcgccgcaaagccatgttagaagatattgcagttctcaccggtggtcaagtcatcactgaggatgctggtctgaaactggaaagcaccaagattgatatgcttggtaaagctcgccgcatcaccatcaccaaagacaacaccaccattgtcgctgaaggtaacgaagctggtgttaaagctcgttgtgagcagctacgccgtcaaatggaagaaaccgagtcttcctatgacaaagagaaactacaagagcgtctcgctaaattggctggtggcgtagcagttatcaaagttggtgctgctactgaaaccgaaatgaaggatcgcaaactgcgcctggaagatgccatcaacgccaccaaagctgctgttgaggaaggaattgttcccggcggtggtacaactctcgctcacttggctccccaggtcgaagagtgggcaagtagcaatcaattgactggtgaggctctcactggtgctatgattgtggctcgcgctctgttgtctcccctgaaacggatcgctgaaaatgccggcgaaaatggcgctgtggttgctgaacgggtgaaagaaaaatcctttgatgtgggctacaatgcagctaatggcgaatatgtcaatatgttcgaggctggtattgttgaccccgctaaagtgactcgttctgctctccaaaatgccgcttctatcgctggcatggtgttaactaccgagtgtatcgtcgctgacaagccagaacccaaagacaacgcggctcccgcaggcgctggcatgggtggcgacttcgactactaa

SEQ ID NO: 9549 - protein, 545 aa, Arthrospira maxima CS-328
MAKRIIYNENARRALERGMDILAESVAVTLGPKGRNVVLEKKFGAPQIVNDGVTIAKEIELEDNIENTGVALIRQAASKTNDAAGDGTTTATVLAHAMVKEGLRNVAAGANPIELKRGIDKATAFLVDRIAEHARPVEDSKAIAQVGTISAGNDEEVGQMIAEAMDKVGKEGVISLEEGKSMTTELEITEGMRFDKGYISPYFATDTERMEAILDEPYILLTDKKITLVQDLVPVLEQVARASRPLLIIAEDIEKEALATLVVNRLRGVLNVAAVKAPGFGDRRKAMLEDIAVLTGGQVITEDAGLKLESTKIDMLGKARRITITKDNTTIVAEGNEAGVKARCEQLRRQMEETESSYDKEKLQERLAKLAGGVAVIKVGAATETEMKDRKLRLEDAINATKAAVEEGIVPGGGTTLAHLAPQVEEWASSNQLTGEALTGAMIVARALLSPLKRIAENAGENGAVVAERVKEKSFDVGYNAANGEYVNMFEAGIVDPAKVTRSALQNAASIAGMVLTTECIVADKPEPKDNAAPAGAGMGGDFDY

SEQ ID NO: 9550 - DNA, 1617 bp, Fusobacterium mortiferum ATCC 9817
  CDS (1)..(1617): transl_table=11
atggcaaaaattttaaaatttgatgaggaagctagaaaaaaacttgaaataggagtaaatactttagcagatgcagtaaaggtaacattaggacctagaggaagaaatgttgtattagaaaaaagttatggttcaccacttatcacaaatgatggtgtatctattgcaaaagagatagagttagaagatccatttgaaaatatgggagctcaacttataaaagaggtagctacaaaggctaatgacgtagcaggagatggaactactactgctacaatacttgctcaagctattgtaaaagaaggattaaaaatggtaagtgctggagctaatcctatgtttatcaaaaaaggtatagaaaaagcaactaaagaggtaattaatcatcttaaagctagagctaaaaaaatagagtcaaatgaagagatagctcaagttgcttcaatttctgcaggagatgaagagataggaaaacttatagctcaagctatggaaaaagttggagaaacaggggtaattactgttgaagaagcaaaatctttagaaactactttagaagtagtagagggaatgcaatttgacaaaggatatgtatctccatatatggtaacagattctgaaagaatggtagctgaactagataacccatttattctaataactgataagaaaatttcaaatatgaaagatattttacctatactagagcaaacagtacaaacttcaagacctatgttaattatagctgatgaattagagggagaggcactaactacattagtaataaataaattgagaggaactttaaatgttgtagctgtaaaagctccagcttttggagatagaagaaaagctatgttagaagatatagctattcttacaggtggagaagtaatttcagaagagaaaggtatgagattagaagaaacatcaattccacaacttggaagtgctaaaaaagtaaaagttactaaagatgctactatcatagtagatggaatgggagaagctgaaattataaaaggaagagtaactgctattaaaaatcaaatagctgaaacaacttcagattatgataaagagaaattacaagaaagacttgctaaactttctggtggagttgcagtaataaaagttggagctgctactgaaacagagatgaaagataaaaaacttagaatagaagatgctctaaatgctacaagagcaggagtagaagagggaatagtttctggtggaggaactatacttgtagagattgctaaggatatggatagctttaagcttgaaggagaagagggaataggagtagagatagttaaaaaagctcttacagctccccttagacagatagctgaaaatgctggagtagatggtgcagtagtacttgaaaaagtgaaagatatgccagaaggatatggatttaatgctgcttctgaaaaatatgtaaatatgatagaagaaggaatactagatcctgtaaaagtaactaggtcagctattcaaaatgcagcatctgtttctgctttaattctaactacagaggttttagtagctagtaaaaaagaacctaaacaaccagagatgaattctggtatgatgcctggaatgatgtaa

SEQ ID NO: 9551 - protein, 538 aa, Fusobacterium mortiferum ATCC 9817
MAKILKFDEEARKKLEIGVNTLADAVKVTLGPRGRNVVLEKSYGSPLITNDGVSIAKEIELEDPFENMGAQLIKEVATKANDVAGDGTTTATILAQAIVKEGLKMVSAGANPMFIKKGIEKATKEVINHLKARAKKIESNEEIAQVASISAGDEEIGKLIAQAMEKVGETGVITVEEAKSLETTLEVVEGMQFDKGYVSPYMVTDSERMVAELDNPFILITDKKISNMKDILPILEQTVQTSRPMLIIADELEGEALTTLVINKLRGTLNVVAVKAPAFGDRRKAMLEDIAILTGGEVISEEKGMRLEETSIPQLGSAKKVKVTKDATIIVDGMGEAEIIKGRVTAIKNQIAETTSDYDKEKLQERLAKLSGGVAVIKVGAATETEMKDKKLRIEDALNATRAGVEEGIVSGGGTILVEIAKDMDSFKLEGEEGIGVEIVKKALTAPLRQIAENAGVDGAVVLEKVKDMPEGYGFNAASEKYVNMIEEGILDPVKVTRSAIQNAASVSALILTTEVLVASKKEPKQPEMNSGMMPGMM

SEQ ID NO: 9552 - DNA, 1647 bp, Oxalobacter formigenes OXCC13
  CDS (1)..(1647): transl_table=11
atgtcagctaaagaagtcgtattcggcgatagcggccgtaacaaaatggttgaaggcgtcaatattctggcagacgccgtcaaggtcacactgggccctaaaggcagaaacgttgttctggaacgcacctggggcgccccgaccatcaccaaggatggcgtttccgttgccaaggaaatcgaactgaaagacaagctcatgaacatgggcgcacagatggtcaaggaagtcgcttccaaaaccagtgacaacgcaggtgacggtaccacgaccgctaccgttctggcacaggccatcgttcgcgaaggtatgaaatacgttgctgcaggtatgaatccaatggatctgaaacgcggcatcgacaaggctgttgaagccaccatcgaagaactgaaaaaaatcgccaaaccttgcaccaccagcaaggaaatcgcacaggtcggttccatttccgccaacagcgaccactccatcggtgaacgtatcgccgaagctatggaaaaagtcggcaaggaaggcgtcattaccattgaagacggcaaatccctgaatgacgaactggatatcgtcgaaggtatgcaattcgaccgtggttatctgtctccttacttcatcaacaatgcagaaaaacagactgtcacgatggacaatccttacattctgctttgcgaaaagaaaatctccaatatccgcgatctgctgccggttctggaacaagtcgccaaagccagccgtccgctgctgatcatcgctgaagacatcgaaggtgaagctctggctacgctggttgtcaacaatatccgcggtatcctgaaaacctgcgcagtcaaggctcccggtttcggtgaccgtcgcaaggccatgctggaagacatcgctatcctgacgggtggacaggttattgcagaagaagtcggcctgactctggaaaacgtcacactggaacaactcggccaggcaaaacgcattgaagtcaacaaggaaaacaccaccattatcgatggtgccggtcaggctgatgcgatcgaagcccgtgtcaaacaggttcgcgtccagatggaagaagccacttccgactacgacaaggaaaaactgcaggaacgtattgccaaactggctggcggtgttgccgtcatcaaggtcggtgccgctaccgaagttgaaatgaaagaaaagaaagcacgtgttgaagatgcattgcacgcaacccgcgctgccgttgaagaaggtattgtccctggcggcggtgttgccctgctgcgcgcccgtgccaacgccaaggtcaaggctgacaatgccgaccagcaggcaggtatcaacatcgttatgcgttccgttgaagaaccactgcgcatgatcgttcacaatgccggcgaagaagcttccgtcgtagtcaacaaagttatggaaggttccggaaacttcggctacaacgcagccaacggcacctatggcgacatggtcgaaatgggtgttgtcgatccggccaaggttacccgttccgcactgcagaatgccgcttccatcgccggattgatgctgaccacggattgcatggtctatgacatccctgaagaaaaaccggcacctgatatgggtggcatgggcggtatgggtggaatgggaggcatgggcggaatgatgtaa

SEQ ID NO: 9553 - protein, 548 aa, Oxalobacter formigenes OXCC13
MSAKEVVFGDSGRNKMVEGVNILADAVKVTLGPKGRNVVLERTWGAPTITKDGVSVAKEIELKDKLMNMGAQMVKEVASKTSDNAGDGTTTATVLAQAIVREGMKYVAAGMNPMDLKRGIDKAVEATIEELKKIAKPCTTSKEIAQVGSISANSDHSIGERIAEAMEKVGKEGVITIEDGKSLNDELDIVEGMQFDRGYLSPYFINNAEKQTVTMDNPYILLCEKKISNIRDLLPVLEQVAKASRPLLIIAEDIEGEALATLVVNNIRGILKTCAVKAPGFGDRRKAMLEDIAILTGGQVIAEEVGLTLENVTLEQLGQAKRIEVNKENTTIIDGAGQADAIEARVKQVRVQMEEATSDYDKEKLQERIAKLAGGVAVIKVGAATEVEMKEKKARVEDALHATRAAVEEGIVPGGGVALLRARANAKVKADNADQQAGINIVMRSVEEPLRMIVHNAGEEASVVVNKVMEGSGNFGYNAANGTYGDMVEMGVVDPAKVTRSALQNAASIAGLMLTTDCMVYDIPEEKPAPDMGGMGGMGGMGGMGGMM

SEQ ID NO: 9554 - DNA, 1641 bp, Helicobacter winghamensis ATCC BAA-430
  CDS (1)..(1641): transl_table=11
atggcaagtaaagagattaatttttcagatagcgcgagaaatcgtttatatgaaggtgtgaaacaactcagtgatgcagttaaggtaacaatgggaccacgcggacgcaatgtgttgattcaaaaaagttttggtgcgccaagtataacaaaagatggcgtttctgtggcaaaagagattgaactagcagatcctattgcaaatatgggtgcacaacttgttaaagaagttgctagcaaaacagcagacgcagcaggcgatggaacaacgacagcaaccgttcttgcatatagcatttttaaagagggcttaagaaacattacagcgggtgcaaatcctgtacaagttaaacgcggtatggataaggcagcagaagcaattacagaagagcttaaaaagatttctaaaccagttagcggtaaaaaagaaatcgcacaagttgctacaatctctgcaaattctgattccaaagttggtgagttaatcgctgaggctatggaaaaagttggaaaggatggcgtgatcaccgttgaagaagcaaagggaatcaacgatgaattaagtgttgttgagggaatgcaatttgatagaggatatttaagtccttattttgtaacaaatagtgataaaatggaaacagaattagaaaatccatacattttattaacagataaaaaaatcactacaatgaaagatattttaccacttttggaatccacaatgaaaagtggcaagcctctattgattatcgctgaagacattgaaggagaagcactaacaactttagttgtaaataaattgcgtggtgtgttaaatatcgcagcagttaaagctccgggatttggcgatagaagaaaagaaatgctaaaagacattgcaactttaacaggtggcgaagtgattagcgaagagcttggaaaaactcttgaagcagcaagcattgaagatttagggcaagcagctagggttgtaattgataaagataatacaacaattgtagatggtgcaggtagcaaagatgcggttaatgcgagagttgggcaaattaaaacacaaattgaagcaacaacaagtgattacgacagagagaaacttcaagaaagactagctaaacttagtggcggtgtagctgttatcaaagttggtgcagcaagtgaagttgaaatgaaagagaaaaaagatagagtagatgacgcattaagcgcaacaaaagcagctgttgaagaaggaattattatcggtggtggtgcagcattagtgcgtgcagcagcaaaggtaaatctaagtttagaaggcgatgaaaaaatcggctatgaaattattaaacgcgcaatctctgctccgcttaagcaaatcgcaagcaatgcaggatttgatgatggtgtagttgtaaataatgtagaaaaagattctaatgcaaacaatggatttgatgcagcaagtgggaattatgtggatatgtttgaagcaggaattattgatccactaaaagttgcaagaattgcattgcaaaatgctgtgtctgtttcaagcctgcttttaaccacagaagcaacagtgcacgaaatcaaagaagacaagccagctatgcctgatatgggcggtatgggtggaatgggcggtatgggtggaatgatgtaa

SEQ ID NO: 9555 - protein, 546 aa, Helicobacter winghamensis ATCC BAA-430
MASKEINFSDSARNRLYEGVKQLSDAVKVTMGPRGRNVLIQKSFGAPSITKDGVSVAKEIELADPIANMGAQLVKEVASKTADAAGDGTTTATVLAYSIFKEGLRNITAGANPVQVKRGMDKAAEAITEELKKISKPVSGKKEIAQVATISANSDSKVGELIAEAMEKVGKDGVITVEEAKGINDELSVVEGMQFDRGYLSPYFVTNSDKMETELENPYILLTDKKITTMKDILPLLESTMKSGKPLLIIAEDIEGEALTTLVVNKLRGVLNIAAVKAPGFGDRRKEMLKDIATLTGGEVISEELGKTLEAASIEDLGQAARVVIDKDNTTIVDGAGSKDAVNARVGQIKTQIEATTSDYDREKLQERLAKLSGGVAVIKVGAASEVEMKEKKDRVDDALSATKAAVEEGIIIGGGAALVRAAAKVNLSLEGDEKIGYEIIKRAISAPLKQIASNAGFDDGVVVNNVEKDSNANNGFDAASGNYVDMFEAGIIDPLKVARIALQNAVSVSSLLLTTEATVHEIKEDKPAMPDMGGMGGMGGMGGMM

SEQ ID NO: 9556 - DNA, 1731 bp, Lucilia cuprina
  CDS (1)..(1731)
atgttccgtttgccagtttcgcttgctcgctcctccattagccgccagttggccatgcgcggctatgccaaggatgtgcgtttcggacccgaggtgcgcgccatgatgctccagggcgtcgatgtgctggccgatgctgtggcagtgaccatgggccccaagggtcgcaatgtgatcattgagcagtcgtggggctcgcccaaaatcaccaaggacggcgtcactgtggccaagtccattgagctgaaggacaagttccagaacatcggtgccaagctggtccaggatgtggccaacaataccaacgaggaggccggtgatggcaccaccacggccaccgttctggctcgcgccattgccaaggagggcttcgagaagatctccaagggcgccaatcccgtcgagattcgtcgcggtgtcatgctggccgttgagaccgtcaaggacaacctgaagaccatgtcgcgccccgttagcacgcccgaggagatcgcccaggtggccaccatctcggccaacggtgatcaggccatcggcaatctcatcagcgaggccatgaagaaggtgggacgcgatggcgtcatcaccgtcaaggatggcaagaccctcaccgatgagctggaggttatcgagggcatgaagttcgatcgcggctacatctcgccgtacttcatcaactcctcgaagggcgccaaggtggagttccaagatgccctcctcctgctgtccgagaagaagatctcatcggtgcagagcatcattcccgctctggagctggccaatgcgcagcgcaagccgctggtcatcattgccgaggatatcgatggtgaggccctgagcaccctggtggtgaaccgcctcaagatcggccttcaggtggctgccgtcaaggccctcggcttcggcgacaaccgcaagagcaccctcaccgatatggccatcgcctccggcggcattgtcgtcggcgatgatgctgatctcgtcaagctggaggacgtcaaggttagcgatttgggccaggtcggcgaggtggtgatcaccaaggacgacaccctgctgctgaagggcaagggcaagaaggacgatgtgctccgtcgcgccaatcagatcaaggaccagatcgaggacaccacctccgagtacgagaaggagaagctgcaggagcgtctggcccgcttggcctccggcgttgccctgctgcgcgttggcggctccagcgaggtggaggtcaacgagaagaaggatcgcgtccacgatgccctgaacgccacccgtgctgccgtcgaagagggaatcgttcccggaggcggcaccgctctgctccgttgcattgagaagctcgagggtgtcgagaccaccaacgaggatcagaaactcggcgtggagattgtgcgtcgtgccctgcgcatgccatgcatgacgattgccaagaacgccggcgttgatggcgccatggtggtggccaaggtggagacccaggccggtgactacggctacgatgcgctgaagggcgaatacggcaacctgatcgagaagggcatcatcgatcccaccaaggtggtgcgcaccgccatcacagacgcctccggtgtggcctcactgctgaccaccgccgaggctgtcgtcaccgagatccccaaggaggatggcgctcctgccatgcccggcatgggtggtatggggcggcatgggaggcatgggcggcatgggtggcatgatgtaagcgactga

SEQ ID NO: 9557 - protein, 576 aa, Lucilia cuprina
MFRLPVSLARSSISRQLAMRGYAKDVRFGPEVRAMMLQGVDVLADAVAVTMGPKGRNVIIEQSWGSPKITKDGVTVAKSIELKDKFQNIGAKLVQDVANNTNEEAGDGTTTATVLARAIAKEGFEKISKGANPVEIRRGVMLAVETVKDNLKTMSRPVSTPEEIAQVATISANGDQAIGNLISEAMKKVGRDGVITVKDGKTLTDELEVIEGMKFDRGYISPYFINSSKGAKVEFQDALLLLSEKKISSVQSIIPALELANAQRKPLVIIAEDIDGEALSTLVVNRLKIGLQVAAVKALGFGDNRKSTLTDMAIASGGIVVGDDADLVKLEDVKVSDLGQVGEVVITKDDTLLLKGKGKKDDVLRRANQIKDQIEDTTSEYEKEKLQERLARLASGVALLRVGGSSEVEVNEKKDRVHDALNATRAAVEEGIVPGGGTALLRCIEKLEGVETTNEDQKLGVEIVRRALRMPCMTIAKNAGVDGAMVVAKVETQAGDYGYDALKGEYGNLIEKGIIDPTKVVRTAITDASGVASLLTTAEAVVTEIPKEDGAPAMPGMGGMGRHGRHGRHGWHDVSD

SEQ ID NO: 9558 - DNA, 1731 bp, Vitis vinifera
  CDS (1)..(1731)
  misc_feature (934)..(934): m is a or c
  misc_feature (1376)..(1376): s is g or c
atggcttccgccaatgctatctccacagcgtcaattatccgctctcccaaacaggagagcttcagaaggagggtgaaccaacaacaagggccgaaatttaattacaggccatcaaacaatcggtttgtggttcgtgcctccgctaaggaaattgcatttgaccaaagttcaagggcggcgcttcaggctggcattgataagcttgcagatgccgtggggcttactcttggtcctagaggaaggaatgttgtcctggatgaattcgggagccccaaggtggtgaatgatggggtaacaattgcccgagctattgagctagctgatgctatggaaaacgctggtgcagctctcattagagaggttgcaagtaaaaccaatgactctgctggtgatggcacaacaactgcctctgttcttgcccgagaaataatcaaactgggcctgttgagtgttacctctggtgcaaatccagtctccataaagaagggaattgacaaaacagtacatgagttagtgaaggagctggagaagaaagcccgacctgttgaaggcggtgacgatatcaaagctgttgcttctatatctgcgggaaacgatgagttcattgggtccatgatcgcagatgcaattaataaggttgggcctgatggtgttttgtccattgagtcatcatcctcttttgaaacaactgttgatgtcgaagaaggaatggagattgacagaggatatatctccccacagtttgttacaaaccctgagaaactgattgctgaatttgagaatgcaagagtgttggtcactgatcagaagatcacaacgataaaggacataattcccctgctagagaagaccactcagctgagatctcctctgcttatagttgctgaggatgtcactggagaagctttggctactcttgttgtgaacaagctcmggggaatacttaatgttgctgccatcaaagcccctggttttggtgagaggagaaaggctctccttcaagatattgctattatgacaggagctgagtttcaggccaatgatctgggtttgcttattgagaatacctcagttgagcagcttggtttggcaaggaaggtgaccattaccaaggactcaaccaccatcattgctgatgctgcatcaaaggatgagatacaggctaggattgctcagataaaaaaagagttggctgagacagattccgtttatgatacagaaaaactggctgagagaattgccaaattgttcaggtgggaaacagagcttgaggaccgtaagcttcgtattgaggatgctaagaatgcaacttttgctgccatagaggaagggatagtgcctggtggtggtgctgcattcgttcacctgtcaacttstgtccctgcaattaaggacaagctcgaagatgcagatgaacgtcttggtgctgacattgtgcagaaggcactggtggcaccagcatcattgatagcccacaatgctggagttgaaggagaggtggttgtagagaagataaaggcttgtgaatgggcagtcgggtacaatgcaatgacagacaaatacgaaaacctggtggaggctggagtcattgaccctgccaaggttgccagatgtgctttgcagaacgcagcatcggttgcaggaatggtcctgaccacacaagccattgttgtggaaaaggccaagccaaaggcacctgtggctgctcccccacaaggtcttaccatatga

SEQ ID NO: 9559 - protein, 576 aa, Vitis vinifera
  misc_feature (459)..(459): The Xaa at location 459 stands for Cys, or Ser.
MASANAISTASIIRSPKQESFRRRVNQQQGPKFNYRPSNNRFVVRASAKEIAFDQSSRAALQAGIDKLADAVGLTLGPRGRNVVLDEFGSPKVVNDGVTIARAIELADAMENAGAALIREVASKTNDSAGDGTTTASVLAREIIKLGLLSVTSGANPVSIKKGIDKTVHELVKELEKKARPVEGGDDIKAVASISAGNDEFIGSMIADAINKVGPDGVLSIESSSSFETTVDVEEGMEIDRGYISPQFVTNPEKLIAEFENARVLVTDQKITTIKDIIPLLEKTTQLRSPLLIVAEDVTGEALATLVVNKLRGILNVAAIKAPGFGERRKALLQDIAIMTGAEFQANDLGLLIENTSVEQLGLARKVTITKDSTTIIADAASKDEIQARIAQIKKELAETDSVYDTEKLAERIAKLFRWETELEDRKLRIEDAKNATFAAIEEGIVPGGGAAFVHLSTXVPAIKDKLEDADERLGADIVQKALVAPASLIAHNAGVEGEVVVEKIKACEWAVGYNAMTDKYENLVEAGVIDPAKVARCALQNAASVAGMVLTTQAIVVEKAKPKAPVAAPPQGLTI

SEQ ID NO: 9560 - DNA, 1800 bp, Vitis vinifera
  CDS (1)..(1800)
atgcgaggaggcagccgttggggttggaggcgccggcgaagccttggtcggaggagaggtgttcgagggcgtggacgacgtcgtagatattggattgcgtgcgaccggaggaggcggcccgtgaggaggcggatttggcgagggtttggagatagagtgtgtttgcgggtcagagctggccccaagaggatatcttttgacagagaatgtagggagggcttacaagctgggatagataagcttgctgatgctgtttctcttaccttaggacccaaaggacgtaatgtgattctttctgaggccggaacattaaaagtgatcaatgatggggtgacaattgctcgggctatagagctttcggatgcaattgaaaacgcaggagcaacgcttatgcaagaggttgcaagtaagacaaatgatgtggcaggtgatggtactacgactgctatcattttggctcgggaaatgatcaagtctggtttgttggtggtcgcttttggagctaacccaattggtttgaagaaaggaatggataagactgtgagagaattggtcaaggttttgaagaagaaaagctttcctgtaaaagggagggatgatataagagctgtggcctcaatttctgctggaaatgatgacttcgttgggaatttaattgctgaagctatagataaaattggccctgatggagtaatctccattgaatcatcctcatcgtctgaaacctctgttataattgaagaaggaatgaagatcgacaaaggttatatgtcaccccactttatcacaaaccaggacaaatctattgtggagttcgagaatgctaaagttcttgtaactgatcaaaagatttcaaccatcaaaggaatagttcctttactggaaaagactacccaactgagtgtcccactgctaatcattgctgaggacatctcaagtcaagtacttgaaacactggttgtgaacaaaatgcaaggaataattaatgttgctgtggtcaaatgtccaggatttggagaaggaaagaaagctttattgcaagatatagcccttttgacaggtgctgatttcctctctggagatttgggactgactcttgacagtgcaacgtcagatcagcttggcattgcaagaaaagtaaccataacaagcaattcaacaacctttgttgctgatccttcaactaaacctgaaatacaggcaagaattttgcagataaagaaagatctcgctgaaactgatagttcgtatctttcaaggaagctctctgaaaggattgctaaactctctggtggtgtggccataatcaaggtaggagcacatacagagacggaactcgaagatcggaaactcagaattgaggatgcaaagaatgcaacgtttgctgccatggatgaaggtatagtacctggtggtggggctacctatattcatctggaagaacagatacccatcataaagcactccatggaagatccggacgagcagattggtgctgacattgtggcaaaggcacttgctgcaccagccaaagcaattgcaactaatgcaggagttgatggagctgttgtcatagagaagatccggacttgtgactggagaacagggtatgatgcaatgacgggtagataccaagatcttctcaatgctggagtggttgatccctgtcgggtctcaaggtgtgcccttcaaaatgcagtatctgttgctggcattgttctaacaacccaagctgtattggtggagaaaacaaagccgcccaagtcagcagttcctcgtctccctggaataactccttaa

SEQ ID NO: 9561 - protein, 599 aa, Vitis vinifera
MRGGSRWGWRRRRSLGRRRGVRGRGRRRRYWIACDRRRRPVRRRIWRGFGDRVCLRVRAGPKRISFDRECREGLQAGIDKLADAVSLTLGPKGRNVILSEAGTLKVINDGVTIARAIELSDAIENAGATLMQEVASKTNDVAGDGTTTAIILAREMIKSGLLVVAFGANPIGLKKGMDKTVRELVKVLKKKSFPVKGRDDIRAVASISAGNDDFVGNLIAEAIDKIGPDGVISIESSSSSETSVIIEEGMKIDKGYMSPHFITNQDKSIVEFENAKVLVTDQKISTIKGIVPLLEKTTQLSVPLLIIAEDISSQVLETLVVNKMQGIINVAVVKCPGFGEGKKALLQDIALLTGADFLSGDLGLTLDSATSDQLGIARKVTITSNSTTFVADPSTKPEIQARILQIKKDLAETDSSYLSRKLSERIAKLSGGVAIIKVGAHTETELEDRKLRIEDAKNATFAAMDEGIVPGGGATYIHLEEQIPIIKHSMEDPDEQIGADIVAKALAAPAKAIATNAGVDGAVVIEKIRTCDWRTGYDAMTGRYQDLLNAGVVDPCRVSRCALQNAVSVAGIVLTTQAVLVEKTKPPKSAVPRLPGITP

SEQ ID NO: 9562 - DNA, 1905 bp, Vitis vinifera
  CDS (1)..(1905)
atggcatcatcttttgccaccatgtcttctattgggtatttcacatcgtccagcagtcatacaatggataagaagtttctgggttcttccagaagattgtcttcatttgcttccatatctgcgaattcttttgaaggcaggaaacagagtatggttttgcagaagagatgttctccaaaggttagggcaatggccaaggagttgtatttcaacaaggatggctctgctattaagaagcttcaaacgggtgttaataagcttgctgatctagtgggggttactcttggtccaaaagggaggaatgttgttctggagagcaagtatgggtccccgaaaattgttaatgatggtgttactgtggcaagagaggtagagttggaggaccctgttgagaacataggtgctaggttggtgagacaagctgcttcaaaaaccaatgatttggctggtgatgggacaactacttctgttgttctggctcaaggcttgattactgaaggtgttaaggtggtagcagctggtgccaaccctgttcaaatcactaggggtattgagaacaccactaaagctctggtggctgagctgaagttgatgtcaaaggaggttgaagacagtgaactagcagatgtggctgcagttagtgcaggaaacaactatgaagtaggatatatgatagctgaagctatgggtcaagttggcagaaagggtgttgtgactctcgaagaaggaaaaagtgctgagaacaacttgtatgttgtggaaggaatgcagtttgatcgtggttatatctctccttacttcgtcacagacagtgagaaaatggctgttgaatatgaaaattgcaagctgcttttggttgacaaaaagatcacaaatgcaagggatctcattaatgttttggaagatgccatcaaagggggatatccaatcttgataattgcggaagatattgagcaggaagctcttgcaactcttgttgtgaataagctcaggggggcattaaagattgctgcactgaaagctcctggatttggagagcgcaaaagccaatatcttgatgatattgctatcctcactggaggaaccgtgattagagaggaggttgggttatcattggacaaagctgaaaaggaggtcttggggcatgctgctaaagtggtgctcaccaaggatacaactacaattgttggtgatggcagtacacaggaagcagtaaataagcgagttgcgcagatcagaaaccttgttgaggcagcagatcaggactatgaaaaagagaagcttaatgaaagaattgcaaaactttcaggtggtgttgctgtcattcaggtcggagcacaaactgaaacagaacttaaagaaaagaaattgagagtggaggatgcccttaatgcaacaaaggcagccgttgaggaaggtattgtggttggtggcgggtgcacattgttgcgtctagcagcaaaagttgatgctatcaaagacactcttgatagtgatgagcaaaaggttggagcagatattgttaagagggcactaagctacccaatgaagttaatcgccaagaatgcaggggtcaacggaagtgttgtgatcgaaaaggtgttgtccagtgacaatccaaaatatggttacaatgctgcaactggaaaatacgaggatttgatggctgctggtataattgatcccacgaaagtggtgagatgttgtttggagcatgcagcttcggttgcaagaaccttcctcacatctgatgctgtggtggttgacatcaaggagcctgaacccattcctgctggaaatccaatggataattcaggtttttgtaattctaatatcagtttttctgctagtctttttaaatttttctgtttaattggttcattcaatgtatgctgttgtctgtaa

SEQ ID NO: 9563 - protein, 634 aa, Vitis vinifera
MASSFATMSSIGYFTSSSSHTMDKKFLGSSRRLSSFASISANSFEGRKQSMVLQKRCSPKVRAMAKELYFNKDGSAIKKLQTGVNKLADLVGVTLGPKGRNVVLESKYGSPKIVNDGVTVAREVELEDPVENIGARLVRQAASKTNDLAGDGTTTSVVLAQGLITEGVKVVAAGANPVQITRGIENTTKALVAELKLMSKEVEDSELADVAAVSAGNNYEVGYMIAEAMGQVGRKGVVTLEEGKSAENNLYVVEGMQFDRGYISPYFVTDSEKMAVEYENCKLLLVDKKITNARDLINVLEDAIKGGYPILIIAEDIEQEALATLVVNKLRGALKIAALKAPGFGERKSQYLDDIAILTGGTVIREEVGLSLDKAEKEVLGHAAKVVLTKDTTTIVGDGSTQEAVNKRVAQIRNLVEAADQDYEKEKLNERIAKLSGGVAVIQVGAQTETELKEKKLRVEDALNATKAAVEEGIVVGGGCTLLRLAAKVDAIKDTLDSDEQKVGADIVKRALSYPMKLIAKNAGVNGSVVIEKVLSSDNPKYGYNAATGKYEDLMAAGIIDPTKVVRCCLEHAASVARTFLTSDAVVVDIKEPEPIPAGNPMDNSGFCNSNISFSASLFKFFCLIGSFNVCCCL

SEQ ID NO: 9564 - DNA, 1851 bp, Vitis vinifera
  CDS (1)..(1851)
atggtgtctgcactttctttctccaatttaacactgcccagaagatcattttcaactacagcgtggaacccaagagccatggccaaggagctttacttcaaccatgatggttcagccacaaagaaacttcaggcaggggtggacatggtggcggaactggttggtgtgactttaggaccaaaaggaaggaatgttgtgttgcagaacaagtatgggcctcccaagattgttaacgatggcgagactgtgctcaaagagattgagctggaggatccattggagaatgttggggtgaaattggttagacaagctggcgcaaaaacgaatcaccttgctggtgatggttccactacatctgttatacttgcacgaggtctaattgctgagggtgtgaaggtaattgcagcaggaatgaaccccattcaaatttctcgtgggattgagaagactgcaatggcccttgtttctgaactcaaattgatgtcgagagaggttgaggatcatgagcttgcacatgttgctgcagttagtgctgggaatgattatacagtgggcaacatgatttctgatgctattcgacaggtaggaaggaggggtgtgatcacaattgagaaagggaaatgtgctgaaaatagtctgcagattgtagaaggaatgcaattcgatcgtggatacttgtccccttactttgttactgatcgacaaaagatgatggtggagttccatgattgcaagttacttttggtcgacaaaaaaatcacgaacccgaaggagatgtttaaaatattggacaatgcagttaaggagaagtatccaattgtgatagttgcagagggcattgagcaagaagctctggctccggtaattagaaacaaactcaggggtgtgctgaaggcagctgctattaaggctcctgcctttggtgagcggaagagccactacttagatgaccttgctatcttgactggaggcactgtaattagcgatgagatgggattgaccctggaaaaggctggcaaggaggtcttgggcactgctactaaggtggtcataactaaggattctacgttaatagttacagatgggagcactcaaccagctgttgagaagagggtttctcagattcgggggcttgttgagaacactgaagaaaatttccaaaagaagatactgaatgaaagaatagcaaggttatcaggaggaattgctattcttcaggtcggagctcaaacacaagttgagctgaaagataaacaattgaggattgaagatgctgtgaatgcaactaaggcagctattgaggaaggtgttgtagttggtggtggctgtagccttttgcgactatctttaaaagtggatggcatcaaagaacttttggacaatgaagagcagaaaattggagctgagatcttcaaaagagctttgacctatcctgcaagactgattgccaaaaatgcaggtgttaatgacagtgttgtaatagagaaggttttatctaatgatgattttcgatatggttataatgctgcaatagactgttatgaggatttgatggctgctggaattatggatccatcaaaggtggttagatgttgtctagagcatgctgcttcggttgccaaaacctttttgacatcagacgctgttgttgttgacattaaggaattagacctcattccaaggagaaaaccgatgccaccaatgtcaccaatgccaccagtatcaccattgccatccccaggtaactcagccatttcaaggagaaaaccaatgccacggatgccactattaccaccactgccaacctcaggtaaatcaagcttttcaatacaagtaccaacttgccaataa

SEQ ID NO: 9565 - protein, 616 aa, Vitis vinifera
MVSALSFSNLTLPRRSFSTTAWNPRAMAKELYFNHDGSATKKLQAGVDMVAELVGVTLGPKGRNVVLQNKYGPPKIVNDGETVLKEIELEDPLENVGVKLVRQAGAKTNHLAGDGSTTSVILARGLIAEGVKVIAAGMNPIQISRGIEKTAMALVSELKLMSREVEDHELAHVAAVSAGNDYTVGNMISDAIRQVGRRGVITIEKGKCAENSLQIVEGMQFDRGYLSPYFVTDRQKMMVEFHDCKLLLVDKKITNPKEMFKILDNAVKEKYPIVIVAEGIEQEALAPVIRNKLRGVLKAAAIKAPAFGERKSHYLDDLAILTGGTVISDEMGLTLEKAGKEVLGTATKVVITKDSTLIVTDGSTQPAVEKRVSQIRGLVENTEENFQKKILNERIARLSGGIAILQVGAQTQVELKDKQLRIEDAVNATKAAIEEGVVVGGGCSLLRLSLKVDGIKELLDNEEQKIGAEIFKRALTYPARLIAKNAGVNDSVVIEKVLSNDDFRYGYNAAIDCYEDLMAAGIMDPSKVVRCCLEHAASVAKTFLTSDAVVVDIKELDLIPRRKPMPPMSPMPPVSPLPSPGNSAISRRKPMPRMPLLPPLPTSGKSSFSIQVPTCQ

SEQ ID NO: 9566 - DNA, 1692 bp, Microcystis aeruginosa PCC 7806
  CDS (1)..(1692): transl_table=11
atgtccaaaatcattgccttcaaagatgaatcccgtcgcgccctagaaagaggtgtcaacgccttggccgatgcggtaaaaatcaccctcggtccgaaaggacgcaatgtcttgttagaaaagaaatacggcgccccccagatcgttaatgacggcatcaccgtcgccaaagaaatcgaattgtccgatcccctcgaaaacaccggggcgagattaattcaggaagtagcggcaaaaaccaaagatttagcgggagatggcaccactaccgccaccatcatcgcccaggctttaattaaagaaggtctgaaaaacgttaccgccggggccaatcccgtcgctttaagacgcggactggacaaaaccatcgcctatctggtggaagaaatcgccgccgtcgctaaaccgatcgctggagatgcgatcgctcaagtggccaccgtttcttccggcaacgatgaagaagtgggaaaaatgatcgccgccgccatggaaaaagtcaccaccgatggcgtaatcaccgtggaagaatcgaaatccttaaccaccgaattagaagtagtggaagggatgcagatcgatcgcggttatatctctccctatttcatcaccgatcaagaaagacagatcgtcgagtacgacaaccccctgatcctgattaccgataaaaaaattagtgcgatcgctgaattagtccccgtcctcgaagccgttgctcgtcaaggtcgtcccctattaattatcgccgaagatgtggacggcgaagccttagccactctagtggtcaacaaggcccggggtgtcttaaatgtcgtcgccatcaaagcccccagttttggggaacgtcgcaaggcggttttacaagatatcgccatcctcaccggcggtcgtctgatttccgaagaagtgggcttaagtcttgacacggttagcctcgatctgctagggcaagcggcaaaaattaccctagaaaaagacaatacaattattgtcgcctccggggacagccgcaataaggccgatgtgcagaaacgtctcgcccaactgaaaaaacagttagaagaaaccgattctgaattcgataaggaaaaattacaggaacgcatcgctaaattagccggcggtgtggccgtgattaaagtcggggcagccacagaaaccgaactcaaggatcgcaaactccgcatcgaagatgccctcaatgccaccaaagccgccgtggaagaaggtatcgtcccgggcggtggtacaaccttgattcatctggcttctaaggtgaaggctttcaaagcttctttgactaacgatgaggaaaaagtcgccgccgatatcgtcgccaaagccctagaagcacccctgcgtcagttagctaataacgccggtgtggaaggggatgtgatcgtggaaggtgtgcgcgataccgcttttagcgttggttacaatgtcctcaccggcaagtacgaagacttaatcgccgccggaattatcgatccggctaaagtggtacggtcagccgttcaaaacgccgcttctatcgccggcatggtcctaacgaccgaagcccttgtggtcgaaaaacccgttaaagaagccgcagcccccgatatgggcggcatgggcggcatgggcggcatgggtggcatgggtggcatgggtggcatgggcggcatgggcggcatgggcatgatgtaa

SEQ ID NO: 9567 - protein, 563 aa, Microcystis aeruginosa PCC 7806
MSKIIAFKDESRRALERGVNALADAVKITLGPKGRNVLLEKKYGAPQIVNDGITVAKEIELSDPLENTGARLIQEVAAKTKDLAGDGTTTATIIAQALIKEGLKNVTAGANPVALRRGLDKTIAYLVEEIAAVAKPIAGDAIAQVATVSSGNDEEVGKMIAAAMEKVTTDGVITVEESKSLTTELEVVEGMQIDRGYISPYFITDQERQIVEYDNPLILITDKKISAIAELVPVLEAVARQGRPLLIIAEDVDGEALATLVVNKARGVLNVVAIKAPSFGERRKAVLQDIAILTGGRLISEEVGLSLDTVSLDLLGQAAKITLEKDNTIIVASGDSRNKADVQKRLAQLKKQLEETDSEFDKEKLQERIAKLAGGVAVIKVGAATETELKDRKLRIEDALNATKAAVEEGIVPGGGTTLIHLASKVKAFKASLTNDEEKVAADIVAKALEAPLRQLANNAGVEGDVIVEGVRDTAFSVGYNVLTGKYEDLIAAGIIDPAKVVRSAVQNAASIAGMVLTTEALVVEKPVKEAAAPDMGGMGGMGGMGGMGGMGGMGGMGGMGMM

SEQ ID NO: 9568 - DNA, 1626 bp, Microcystis aeruginosa PCC 7806
  CDS (1)..(1626): transl_table=11
atggctaaatctattatctacaacgaagatgctcgtcgcgccctagaaaaaggcatggatctgctggccgaagcggtagccgtcacccttggacccaaaggtcgtaacgtcgtcctcgaaaagaaatttggcgcaccccaaatcgtcaatgatggcatcaccatcgctaaagaaatcgaactggaagaccatatcgagaacaccggtgtggctttaattcgccaagccgcctcaaaaaccaacgatgtagcgggtgatggtacaactaccgccaccgttctcgcccacgctatcgttaaagaaggtttacgcaacgtcgccgccggtgctaacccgatttctctgaaaaaagggatcgataaagctgccgatttcctcgtcagtcaaatcgccaaacacgcgaaacccgtagaagattccaaagcgatcgcacaagtgggcgctatctctgccggtaacgatgatgaagtaggtcaaatgatcgcctcggccatggataaagtgggtaaagaaggcgtaatttccctagaagaagggaaatcgatgaccaccgaactagaaatcaccgaagggatgcgttttgacaaaggttatatctctccctactttgtcaccgacaccgaacgcatggaatgcgtttttgaagatcccgctattctgattaccgacaaaaaaatcggtttagtacaggatttggttcccattctcgaacaagtggcccgtcaaggtaaacccctagtaattatcgccgaagacattgaaaaagaagctttggcaaccctagtggttaaccgtctgcgcggtgttcttaacgtcactgcggtgaaagctcccggatttggcgatcgcagaaaagcgatgttagaagatatcgccgtcttaaccggtggtcaagtaatcagcgaagatgcgggtttaaaactggaaaccaccaaaattgatagcttaggtacggcccgccgtatcaccatgaacaaagatactaccaccatcgtcgccgaaggcaacgacgtggcagtgaaaacccgttgtgagcaaattcgccgtcaaatcgaggaaaccgattcttcctacgataaggaaaaactgcaagaacgtctggctaaattagccgggggtgtggcagtgattaaagtcggtgccgctaccgaaacggaaatgaaagaccgcaaattgcgcctagaagacgcaattaacgccactaaagcagccgtagaagaaggtatcgtccccgggggtggtactactttagctcacctggctccccaattggaaacttgggctaaagaaaccctacaccatgaagaattaaccggcgctttaatcgtttctcgcgccattgctgctcccttaaaacggatcgctgaaaatgccggccaaaacggtgcagttattgccgaacgggtgaaagaaaagccctttaatgtcggttataatgccgctaccggtgagttctccgatatgtttgaggcgggtatcgttgaccccgcgaaagtgactcgttctgccctacaaaatgccgcttctatcgccggtatggttttaactaccgagtgtattgtggtggataaacccgaaaaagaaaaagccgctgctccaggcggcggtggagatttcgactattag

SEQ ID NO: 9569 - protein, 541 aa, Microcystis aeruginosa PCC 7806
MAKSIIYNEDARRALEKGMDLLAEAVAVTLGPKGRNVVLEKKFGAPQIVNDGITIAKEIELEDHIENTGVALIRQAASKTNDVAGDGTTTATVLAHAIVKEGLRNVAAGANPISLKKGIDKAADFLVSQIAKHAKPVEDSKAIAQVGAISAGNDDEVGQMIASAMDKVGKEGVISLEEGKSMTTELEITEGMRFDKGYISPYFVTDTERMECVFEDPAILITDKKIGLVQDLVPILEQVARQGKPLVIIAEDIEKEALATLVVNRLRGVLNVTAVKAPGFGDRRKAMLEDIAVLTGGQVISEDAGLKLETTKIDSLGTARRITMNKDTTTIVAEGNDVAVKTRCEQIRRQIEETDSSYDKEKLQERLAKLAGGVAVIKVGAATETEMKDRKLRLEDAINATKAAVEEGIVPGGGTTLAHLAPQLETWAKETLHHEELTGALIVSRAIAAPLKRIAENAGQNGAVIAERVKEKPFNVGYNAATGEFSDMFEAGIVDPAKVTRSALQNAASIAGMVLTTECIVVDKPEKEKAAAPGGGGDFDY

SEQ ID NO: 9570 - DNA, 1635 bp, Nostoc commune
  CDS (1)..(1635): transl_table=11
atggcaaagcgcattatctacaacgaaaacgcccgtcgcgccttggaacgaggcattgacatcctggctgaggctgtagctgttacccttggccccaaaggtcgtaacgtagtcctagaaaagaaatttggcgcaccgcaaattgttaatgacggtgtaacgatcgctaaagaaatcgaattagaagaccatattgaaaacactggtgtagctctgattcgtcaagctgcttctaagaccaatgatgctgcgggcgatggtactaccactgctaccgttttagctcatgcgatcgtcaaagaagggttgcggaacgttgcagctggtgctaacgcaatttccctgaagcgcggtattgataaagctactggcttcctcgtagaaaaaattgctgaacacgcccgtccagtggaagattccaaagccattgcccaagttggtgcgatctcggctggtaatgacgaagaagttggtcagatgattgcccaagcaatggacaaggtgggcaaggaaggcgtaatttccctagaagaagggaaatctatgttcaccgagttggaaatcaccgaagggatgcgctttgacaaaggctacatctctccttatttcgctaccgaccctgagcggatggaagcggtttttgatgagcctttcatactgctgaccgataagaaaatcgctttggtacaagaccttgtaccagtgttagagcaagtagctcgtgctggtcgtcctttggtgattatcgccgaagatattgaaaaagaagctttggcaaccttggtagtaaaccgtttgcgcggtgtactcaacgtggctgctgttaaggctcctggctttggcgatcgccgcaaagcactactagaagacatcgctgttttaactggtggtcaactaattaccgaagatgctggtctgaagctagataacaccaagctggatagcctgggtaaagctcgccggatcaccatcaccaaggacagcaccacaattgttgccgaaggtaacgaagttgctgttaaggctcgtgtagaacagattcgtcgtcaaatcgatgaaaccgaatcttcttacgacaaagagaaattacaagagcgtcttgctaaactctctggtggtgttgctgtagtgaaagtgggtgcagcgaccgaaaccgaaatgaaagacaagaagttgcgcctagaagacgctatcaacgctaccaaagctgctgtggaagaaggtattgttcctggcggtggtacaactctggctcaccttgctcctgaattggaagtttgggcaaagagcaatcttaaggatgaagagttgattggtgcgttgattgtcgttcgcgccttacctgcacctctgaagcggattgctgaaaacgctggtcagaatggtgctgttattgctgaacgcgtgaaagagaaagacttcaacgttggctacaacgctgcgacaaacgaattcgtcgatttgttagaggctggtattgttgaccctgctaaagtgactcgttctgctctgcaaaacgctgcttctatcgctggtatggtgttgacaaccgaatgtattatagttgacaagcctgagcctaaggatagcgctcctgctggcgctggtgctggcggcggcgacttcgattactaa

SEQ ID NO: 9571 - protein, 544 aa, Nostoc commune
MAKRIIYNENARRALERGIDILAEAVAVTLGPKGRNVVLEKKFGAPQIVNDGVTIAKEIELEDHIENTGVALIRQAASKTNDAAGDGTTTATVLAHAIVKEGLRNVAAGANAISLKRGIDKATGFLVEKIAEHARPVEDSKAIAQVGAISAGNDEEVGQMIAQAMDKVGKEGVISLEEGKSMFTELEITEGMRFDKGYISPYFATDPERMEAVFDEPFILLTDKKIALVQDLVPVLEQVARAGRPLVIIAEDIEKEALATLVVNRLRGVLNVAAVKAPGFGDRRKALLEDIAVLTGGQLITEDAGLKLDNTKLDSLGKARRITITKDSTTIVAEGNEVAVKARVEQIRRQIDETESSYDKEKLQERLAKLSGGVAVVKVGAATETEMKDKKLRLEDAINATKAAVEEGIVPGGGTTLAHLAPELEVWAKSNLKDEELIGALIVVRALPAPLKRIAENAGQNGAVIAERVKEKDFNVGYNAATNEFVDLLEAGIVDPAKVTRSALQNAASIAGMVLTTECIIVDKPEPKDSAPAGAGAGGGDFDY

SEQ ID NO: 9572 - DNA, 2426 bp, Picea sitchensis
  CDS (189)..(2042)
ccgaaggaccccgggctaccttatcttcttgtttcatctgcagctccctttctccttgtgcactacagactccaataacgaccgttctgtctaggaatcgagatcgattcccattaacgaagctcaagtttccagtggggtgggacgatccatctatactggtgcttgtgtattaaggttaagagaagatggcctctgctttgggcagtatgacagcagttgccacgtgtgcctcattgggcaacattggaaaggagaagaagttgggtgcagtgtctgacagttatggtgtcagacaattgtcttctctttctgctttttcacccatttcctttaatcgcttaagcagaaggcagactatgagattacgcaatagagagcaggtagttaatacaagagctatggcaaaggagttgtacttcaacaaagatggttcagcgacaaaaaaactgcaggcaggtgtgaacaagcttgctgatctcgttggagtcacccttggaccgaagggcagaaatgttgttttggagagcaagtatggttctccgaaaatagttaatgatggcgtgacagtagcgaaggaggttgaattagaggacccagttgaaaatattggggccaagttggtaagacaagctgcggcaaagacaaatgatttagctggcgacggaaccaccacatctgtcgtgcttgcgcaaggtttaataggtgaaggtgtaaaggttgttgcagcaggagcaaatcccattcaaattactaggggcattgaaaagacagtaaaggcccttgtttcggaactcaaaagtttttcaaaggaggttgaagacagtgaattggcagatgttgctgcagtgagtgctgggaataactatgaaataggaaacatgatagcagaggctatgagtaaagttggaaggaaaggtgttgtgacacttgaagagggaaaaagtgcagaaaataatctgtatgttgtagagggaatgcaatttgatcgtggatatatttctccatactttgtgacagatagtgagaagatgtccgtggagtatgagaattgcaagctgctgttggttgataagaagatcacaaatgcaagagacatgatcacagtattagaagatgccattcgtgggggctatccgattttgatcattgctgaggacattgaacaagaagccctagctactcttgttgtcaacaagcttcggggtgcattgaaggttgctgctttgaaagctcctggatttggagagcggaaaagccaatacttggatgatattgccatattgactggaggcactgtcatcagagatgaagtcggtttgcaacttgataaagttggaagtgaagttctgggtactgctgccaaggtagtacttaccaaggattcaacaacaattgtaggtgatgggagcactcaggaagctgtaaataaaagggtggctcaaattagaagcttgattgaggttgcagaacaagactatgaaaaagagaaattgaatgaaagaattgccaagctttctggtggagttgcagttattcaggtgggagcgcaaacagagacagagttgaaggaaaagaagttaagagtagaggatgccttaaatgcaacaaaggcagctgttgaggaaggcattgttgttggtggtgggtgtgctctattgaggcttgcttcaaaggttgatgctatcagagatacacttgaaaatgatgagcagaaggttggtgcaggcattgttaaacgagctttgagttacccattgaaattgattgcgaagaacgctggagtgaatggaagtgttgtggtggaaaaggttctttccagtgatgatcccaaatatggttacaatgctgctacaggcaaatatgaagatttgatggcggctggaataattgatccaactaaggtggttaggtgttgcttggagcatgcagcatccgttgcgaagaccttcctgacatcagatgtcgttgtagttgacatcaaggaacctgaacctgctgcttcaccaaaccccatggataactcaggttatgggtactagatacaaatatggccaataaaccgaagaaatcaaattcatgtttttgtttggagcccttattgtagggggtgttttatttgcacattgatttatgtacattgcaaacatgataggaactatctttcagccaaaagagctgaaactcggcatttttagaagagatgggtagagtatggttcccagcatttctttggcaagtgcttttctacacgcatggaaatatcaaagttatgatacctggtgtgaattgcatttccaaatatggaatgtggttctattggttttgctccttggtctctttgcgcgtgccactgaatagttttatttggtttatgatcatagatatggtatgtggttctattggttttaaaaaaaaaaaaaaaa

SEQ ID NO: 9573 - protein, 617 aa, Picea sitchensis
MASALGSMTAVATCASLGNIGKEKKLGAVSDSYGVRQLSSLSAFSPISFNRLSRRQTMRLRNREQVVNTRAMAKELYFNKDGSATKKLQAGVNKLADLVGVTLGPKGRNVVLESKYGSPKIVNDGVTVAKEVELEDPVENIGAKLVRQAAAKTNDLAGDGTTTSVVLAQGLIGEGVKVVAAGANPIQITRGIEKTVKALVSELKSFSKEVEDSELADVAAVSAGNNYEIGNMIAEAMSKVGRKGVVTLEEGKSAENNLYVVEGMQFDRGYISPYFVTDSEKMSVEYENCKLLLVDKKITNARDMITVLEDAIRGGYPILIIAEDIEQEALATLVVNKLRGALKVAALKAPGFGERKSQYLDDIAILTGGTVIRDEVGLQLDKVGSEVLGTAAKVVLTKDSTTIVGDGSTQEAVNKRVAQIRSLIEVAEQDYEKEKLNERIAKLSGGVAVIQVGAQTETELKEKKLRVEDALNATKAAVEEGIVVGGGCALLRLASKVDAIRDTLENDEQKVGAGIVKRALSYPLKLIAKNAGVNGSVVVEKVLSSDDPKYGYNAATGKYEDLMAAGIIDPTKVVRCCLEHAASVAKTFLTSDVVVVDIKEPEPAASPNPMDNSGYGY

SEQ ID NO: 9574 - DNA, 1695 bp, Strongyloides ratti
  CDS (1)..(1695)
atgcttcgtcttgctgctcataatttttctaaatctattatcagatcatatgctaaagatcttaaatttggagctgatggaagaaaagccatgcttgttggagtagatcttttagctgacgctgtatctgttacaatgggaccaaaaggaagaaatgttattattgaacaaagttttggtggaccaaaaattacaaaagacggtgttaccgttgctaaggctattgatctcgaagataaatatcaaaatatgggtgcaaaattggttcaagatgttgcagataaggctaacgaacaagctggtgacggaacaacttgcgctactgttcttgccagagctattgctaaagaaggatttgaaaatattagccgtggtgctaatccaattgaagttagaaaaggtgtcatgtcatccgttgaagctattgttgaagagttaaagaagatgtcaaagcaagttacaactccagaagaaattgctcaagttgctactatttctgctaatggagataaagatatcggaaaattgatatctgaagctatgaaaaaagttggaaataaaggtgtcattaccgttaaggatggaaaaactcttgacgatgaattagaaattattgaaggaatgaaatttgaccgtggatatatttctccatatttcatgaatacttccaagggtggaaaatgtttctttgaaaaatgtttagtccttctttctgagaaaaaaatttcccaagttcaagatattgttccagctcttgaattagcaaataaatatcgtcaaccacttattattattgctgaagatgtcgatggtgaagctcttacaaccctcgttcttaacagattaaaggttggtcttcaagtttgtgctgtaaaagctcctggttttggagacaaccgcaaaaacacattgaaagatattgccattgctacaggagctaaagtctttggagatgaatctaatttacacaaacttgaagatattcaagcaggtgactttggtgaagttgctgaagttacagttacaaaagatgatactcttatgcttaatggaaaaggtgatgctgaacaagttgagaagagaattcaacaaattgaatttgagattgaacaatctacttctgagtatgaaaaagaaaaacttaatgaacgtttagctaaattatcaaaaggtgttgctgtccttaaaattggaggtgcttctgaagttgaagttagtgaaaagagagatcgtgtcacagatgcactctgtgcaacacgtgctgctgtagaagaaggaatcgtaccaggaggtggtgttgctcttcttcgtgctgtcaaagttcttgataacatcaaagtcggtaattctgaccaagaattgggagttagaattgtccaaaaagccgttcgtcaaccaatttctaccattattaagaatgctggacttgaaccagctagtatcgttgaaaaagtttatgcaaatgaatcagtcagtttcggttacgatgctttgaatgataagtttgttgatatgatccaaactggtattattgatccaaccaaagttgtccgtacatcacttcaagacgctgctggtgttgcttcacttttagccactactgaatgtgttgttacagaagttccaaaagaaactccagcacctccaatgggtggtatgggaggtatgggcggaatgggtggtggaatgttctaa

SEQ ID NO: 9575 - protein, 564 aa, Strongyloides ratti
MLRLAAHNFSKSIIRSYAKDLKFGADGRKAMLVGVDLLADAVSVTMGPKGRNVIIEQSFGGPKITKDGVTVAKAIDLEDKYQNMGAKLVQDVADKANEQAGDGTTCATVLARAIAKEGFENISRGANPIEVRKGVMSSVEAIVEELKKMSKQVTTPEEIAQVATISANGDKDIGKLISEAMKKVGNKGVITVKDGKTLDDELEIIEGMKFDRGYISPYFMNTSKGGKCFFEKCLVLLSEKKISQVQDIVPALELANKYRQPLIIIAEDVDGEALTTLVLNRLKVGLQVCAVKAPGFGDNRKNTLKDIAIATGAKVFGDESNLHKLEDIQAGDFGEVAEVTVTKDDTLMLNGKGDAEQVEKRIQQIEFEIEQSTSEYEKEKLNERLAKLSKGVAVLKIGGASEVEVSEKRDRVTDALCATRAAVEEGIVPGGGVALLRAVKVLDNIKVGNSDQELGVRIVQKAVRQPISTIIKNAGLEPASIVEKVYANESVSFGYDALNDKFVDMIQTGIIDPTKVVRTSLQDAAGVASLLATTECVVTEVPKETPAPPMGGMGGMGGMGGGMF

SEQ ID NO: 9576 - DNA, 1635 bp, Vibrio anguillarum
  CDS (1)..(1635): transl_table=11
atggctgctaaagacgttaaatttggtaacgatgcacgtattaaaatgctagaaggcgttaatattctagccgatgcagtaaaagtcacccttggccctaaaggccgtaacgttgtgatagataaatcgtttggttcacctattatcaccaaagatggtgtcactgttgcgcgtgaaattgaactggaagacaaattccagaacatgggtgcacaaatggtgaaagaagttgcttctcaagctaacgatgcagcgggtgacggaacgacaaccgcaacggtattagcgcaagcgatcatcactgaaggcttgaaagctgtagcagcgggtatgaacccaatggatcttaagcgtggcatcgacaaagctgtcgtggcggcggttgaagcgttgaaagagctttcagtaccttgttcagacactaaagcgattgcgcaagtgggtactatttctgcgaactcggattcaagcgtgggtaacatcattgctgaagcgatggaaaaagtgggccgagatggcgttatcactgttgaagaaggtcaagcactgcaagatgaactcgatgtagtggaaggtatgcagtttgatcgtggttacctatctccttacttcattaataaccaagaagcgggcagtgttgatctagatagcccattcatcctattggttgataagaaaatttctaacattcgcgaactgcttcctgcacttgaagcggtagcaaaagcttctcgtccactactgattgtggcggaagatgttgaaggtgaagcattggcgacgctggttgtgaacaacatgcgtggcattgtaaaagttgctgccgtgaaagcacctggttttggtgatcgccgtaaagcgatgctacaagacattgctaccctaacgggcggtactgtgatttctgaagagatcggtcttgagcttgaaaaagtgaccttggaagatctaggccaagcgaagcgcatctctatcactaaagaaaacaccaccatcattgatggtgcaggtgaagagcaagccattaaaggtcgcgttgcacaaattcgtcaacaaattgaagacgcaacttcagattacgacaaagaaaaactacaagagcgcgtggccaaactggcaggtggcgttgcagtgatcaaagtcggtgcaaccactgaagttgaaatgaaagagaagaaagatcgcgtagaagatgcactgcatgcaactcgcgcagccgttgaagaaggcgtggttgcgggtggtggtgttgcactgatccgtgcggctgctaaagttgcgggccttgaaggtgacaacgaagagcaaaacgtaggtattcgtgttgcactacgtgcgatggaagcaccaattcgtcaaatcgtgaaaaacgcgggcgaagaggattctgttgtggctaacaatgttcgcgctggtgaaggtaactatggttacaacgctgcgacgggtgaatatggcgatatgatcgacatgggtattttggatccaaccaaagtgactcgtagtgcgctacagttcgcagcttcagtcgcgggccttatgatcaccacagaagctatggtgactgagctaccgaagaaagaagcggcaatgcctgatatgggcggcatgggcggtatgggagggatgatgtaa

SEQ ID NO: 9577 - protein, 544 aa, Vibrio anguillarum
MAAKDVKFGNDARIKMLEGVNILADAVKVTLGPKGRNVVIDKSFGSPIITKDGVTVAREIELEDKFQNMGAQMVKEVASQANDAAGDGTTTATVLAQAIITEGLKAVAAGMNPMDLKRGIDKAVVAAVEALKELSVPCSDTKAIAQVGTISANSDSSVGNIIAEAMEKVGRDGVITVEEGQALQDELDVVEGMQFDRGYLSPYFINNQEAGSVDLDSPFILLVDKKISNIRELLPALEAVAKASRPLLIVAEDVEGEALATLVVNNMRGIVKVAAVKAPGFGDRRKAMLQDIATLTGGTVISEEIGLELEKVTLEDLGQAKRISITKENTTIIDGAGEEQAIKGRVAQIRQQIEDATSDYDKEKLQERVAKLAGGVAVIKVGATTEVEMKEKKDRVEDALHATRAAVEEGVVAGGGVALIRAAAKVAGLEGDNEEQNVGIRVALRAMEAPIRQIVKNAGEEDSVVANNVRAGEGNYGYNAATGEYGDMIDMGILDPTKVTRSALQFAASVAGLMITTEAMVTELPKKEAAMPDMGGMGGMGGMM

SEQ ID NO: 9578 - DNA, 1767 bp, Penicillium chrysogenum (strain ATCC 28089 / DSM 1075 / Wisconsin 54-1255)
  CDS (1)..(1767)
atgcagcgcgctctctctacccggacctcagtcctgtcggccgcttccaagcgtgcccctttctctcgctcgactctgaacctccagcagcagcgttttgctcacaaggagatcaagttcggcgttgaagctcgtgccagccttctcaagggtgttgacactctggctaaggctgtcacttccacactcggtcccaagggccgcaatgtgctgatcgactccccctacggctcccccaagatcaccaaggacggtgtaagtgtcgccaaggccatccagcttcaggacaagttcgagaacctcggtgcccgccttatccaggatgttgcctccaagaccaacgaggtcgctggtgacggtaccactaccgccactgtcctctcccgcgccatcttctccgagaccgtcaagaacgttgccgctggctgcaaccctatggatctgcgccgcggtatccaggctgccgtcgaggccgctgttgaataccttcaggctaactcccgccctatcaccaccggcgaggagatcgcccaggtagccaccatctccgccaatggtgacacccacgttggcaagctcatctccaccgccatggagcgtgttggcaaggagggtgttatcaccgtgaaggagggtaagaccctggaggatgagctcgaggtcaccgagggtatgcgcttcgaccgtggctacacctccccctacttcatcaccgaccccaagtcccagaaggtcgagttcgagaagcccctcatcctgctctccgagaagaagatctccgccgtccaagatattctccccgcccttgaggcatccaccaccctccgccgccctctggtcatcattgccgaggacattgagggagaggctctcgccgtctgcattctgaacaagctccgtggccagctccaggtcgccgccgtcaaggcccccggcttcggtgacaaccgcaagagcatcctcggtgatcttgctgtccttaccaacggtaccgtcttcaccgatgagctcgacatcaagcttgagaagctcacccctgagatgctcggctccactggtgccatcaccatcaccaaggaggacaccattatcctcaacggcgagggcagcaaggacaacatctctcagcgctgcgagcagatccgcggtgtcatggccgaccccaccacctccgagtacgagaaggagaagctgcaggagcgtctcgcgaagctgtccggtggtgttgccgtcatcaaggttggcggtgcctccgaggttgaggtcggtgagaagaaggaccgtgttgtggacgcgctcaacgccactcgcgctgccgttgaggagggtatcctccccggtggtggtaccgctctgcttaaggcctctgccaacggccttgctggcgtcaagcccgccaacttcgatcagcagctcggtgtcagcatcgtcaagagcgccatctgccgccctgcccgcaccattgttgagaacgccggactcgagggctccgtcattgtcggcaagctgaccgacgagtacgccaaggacttcaaccgcggatacgacagtgccaccagccaatatgttgacatgattgccgccggtatcgtcgaccccctgaaggttgtccgcaccgctctggttgatgccagcggtgtcgcctccctcctcggtactactgaggtcgctattgtcgatgctcctgaggagaagggccctcccgctcccggtggtggcatgggtggcatgggtggtatgggcggtatgggcggcggcatgttctaa

SEQ ID NO: 9579 - protein, 588 aa, Penicillium chrysogenum (strain ATCC 28089 / DSM 1075 / Wisconsin 54-1255)
MQRALSTRTSVLSAASKRAPFSRSTLNLQQQRFAHKEIKFGVEARASLLKGVDTLAKAVTSTLGPKGRNVLIDSPYGSPKITKDGVSVAKAIQLQDKFENLGARLIQDVASKTNEVAGDGTTTATVLSRAIFSETVKNVAAGCNPMDLRRGIQAAVEAAVEYLQANSRPITTGEEIAQVATISANGDTHVGKLISTAMERVGKEGVITVKEGKTLEDELEVTEGMRFDRGYTSPYFITDPKSQKVEFEKPLILLSEKKISAVQDILPALEASTTLRRPLVIIAEDIEGEALAVCILNKLRGQLQVAAVKAPGFGDNRKSILGDLAVLTNGTVFTDELDIKLEKLTPEMLGSTGAITITKEDTIILNGEGSKDNISQRCEQIRGVMADPTTSEYEKEKLQERLAKLSGGVAVIKVGGASEVEVGEKKDRVVDALNATRAAVEEGILPGGGTALLKASANGLAGVKPANFDQQLGVSIVKSAICRPARTIVENAGLEGSVIVGKLTDEYAKDFNRGYDSATSQYVDMIAAGIVDPLKVVRTALVDASGVASLLGTTEVAIVDAPEEKGPPAPGGGMGGMGGMGGMGGGMF

SEQ ID NO: 9580 - DNA, 1818 bp, Zea mays; identical to SEQ ID NO: 8846
  CDS (1)..(1818)

SEQ ID NO: 9581 - protein, 605 aa, Zea mays
MASAFGTASTCGIKHAPAGVALAAPMKHLSLVSPSLVSLPRKMRPRRKYNFRVNAAKELHFNKDGSAIRKMQNGVNKLADLVGVTLGPKGRNVVLESKYGSPKIVNDGVTVAKEVELEDPVENIGAKLVRQAAAKTNDLAGDGTTTSVVLAQGMITEGVKVVAAGANPVQITRGIEKTAKALVSELQKMSKEVEDSELADVAAVSAGNNYEIGNMITEAMKKVGRQGVVTLEEGKSAENNLYSVEGMQFDRGYISPYFVTDSEKMTVEYENCKLLLVDKKINNARDLITILEDAIRSGYPILIVAEDIEQEALATLVVNRLRGALKIAAIKAPGFGERKSQYLDDIATLTGGTVIREEVGLSLDKADNAVLGTAAKVVVTKDSTTIVGDGTTQEEVNKRVTQIKNQIEATEQEYEREKLNERIAKLSGGVAVIQVGAQTETELKEKKLRVEDALNATKAAVEEGIVVGGGCTLLRLASKFDAIIETLENDEQKVGAEIVRKSLSYPLKLIAKNAGVNGSVVTEKVLANENFRYGYNAATGEYEDLMAAGIIDPTKVVRCCLEHAASVAKTFITSDAVVVDAKVAEQAPSSPANPMAMGGGSGFGF

SEQ ID NO: 9582 - DNA, 1674 bp, Desulfovibrio salexigens DSM 2638
  CDS (1)..(1674): transl_table=11
atggctaaacagattcttttcgacgccaaagctcgtgaaaaactgaaactcggcgtagacaagctcgccaatgctgtaaaagtaaccctcggacccaaaggccgtaacgttgttatggacaaatccttcggctccccggtcatcaccaaagacggtgtttccgtagctaaggaaatcgaactggaagacaagttcgaaaacatgggcgcacagatggttaaggaagttgcttccaaaacctccgacatcgcaggtgatggtaccactactgctaccatccttgctcaggctgttttcaccgaaggtgttaaactcgttgcagccggccgtaaccccatggctatcaagcgcggtatcgataaagctgttgaagcaatcatcgatcacctcgaaacccttgcaaagcccacccgcgaccagaaagaaatcgctcaggtcggtaccatctccgcaaacaacgatgtaaccattggtaacatcattgccgaagccatgaacaaggtcggcaaagaaggcgttatcaccgttgaagaagcaaaaggcctcgacaccactcttgatgttgttgaaggtatgcagttcgaccgcggttacctctccccctatttcgtatccaacgcagaaaaaatgatctgcgaaatggatgagcccctgatcctgatcagcgaaaagaaagtaaccagcatgaaagaactcctgcccgttctcgagcaggttgctaaaatgggcaagcccctggttatcatcgctgaagacatcgaaggtgaagctctggctaccctcgtagttaacaaactgcgcggcaccctcaatgttgttgctgttaaggctcccggtttcggtgatcgccgcaaagcaatgctcgcagacatcgcagccctcaccggcggagcagttgtttccgacgacatcggtctcaacctcgaagctgttacccttgatcacctcggttccgcaaaacgcgttgtaatcgacaaggaaaacaccaccatcgtagacggtgcaggcgaaggcgaaatgatcaaagcccgtatcggccagatccgcaacgaaatcgaactctccacttccgactacgaccgtgaaaaacttcaggaacgcctcgccaagatcgttggcggtgtagcagttatcaacgttggtgctgcaactgaaactgaaatgaaagaaaagaaagcacgcgtggaagatgcactcaacgctacccgcgctgctgttgaagaaggtatcgttcccggtggtggtactgcacttatccgctgcatccctgctctggaaaacgtaacctcctccgacgatgacgaatccgcaggtatcgacatcatccgtcgcgctatcgaagagcctctccgccagatcgctggcaacgcaggcctcgaaggttccatcgttgttgagaaagtaaaagaagcaaaagacggtaacggtttcaacgctgctatcggcgaatacgaagacctgatcaaggccggtgttatcgaccccaaaaaagttacccgtatcgctatccagaacgcagcttccgttgcaggcctcctgctgaccaccgaatgcgctatcgctgaaaagcctgaaaaggctgcagacatgcctgctggtatgcccggcggtatgcccggcatgggcggcatgggtggcatgggcggtatgggtggcatgggcggcatgtactaa

SEQ ID NO: 9583 - protein, 557 aa, Desulfovibrio salexigens DSM 2638
MAKQILFDAKAREKLKLGVDKLANAVKVTLGPKGRNVVMDKSFGSPVITKDGVSVAKEIELEDKFENMGAQMVKEVASKTSDIAGDGTTTATILAQAVFTEGVKLVAAGRNPMAIKRGIDKAVEAIIDHLETLAKPTRDQKEIAQVGTISANNDVTIGNIIAEAMNKVGKEGVITVEEAKGLDTTLDVVEGMQFDRGYLSPYFVSNAEKMICEMDEPLILISEKKVTSMKELLPVLEQVAKMGKPLVIIAEDIEGEALATLVVNKLRGTLNVVAVKAPGFGDRRKAMLADIAALTGGAVVSDDIGLNLEAVTLDHLGSAKRVVIDKENTTIVDGAGEGEMIKARIGQIRNEIELSTSDYDREKLQERLAKIVGGVAVINVGAATETEMKEKKARVEDALNATRAAVEEGIVPGGGTALIRCIPALENVTSSDDDESAGIDIIRRAIEEPLRQIAGNAGLEGSIVVEKVKEAKDGNGFNAAIGEYEDLIKAGVIDPKKVTRIAIQNAASVAGLLLTTECAIAEKPEKAADMPAGMPGGMPGMGGMGGMGGMGGMGGMY

SEQ ID NO: 9584 - DNA, 1719 bp, Ixodes scapularis
  CDS (1)..(1719)
atgcatcgtcttccaagtgccctgcgcagtacagctggccgtagcgtaagccacgctttacggcgccactatgccaaggacatcaggtttggggcagacgtcagggccctcatgctgcaaggggtggatgtgctggccgacgcagtggccgtcaccatgggaccaaagggccgcaatgtgatcctagagcagtcgtggggctctcccaagatcaccaaggacggcgtgacggtggccaagggcatagagctcaaggacaagttccaaaacattggggccaagttggtgcaggatgtggccaacaacaccaatgaggaggccggcgacggcaccacaaccgccactgtcctggccagggccatcgcccgggagggctttgagaagatctccaagggtgccaaccccatcgagatccgcaagggggtcatgatggctgtggagactgtggtggagcacctcaagaagatctccaagccggttaccacaccggaggagattgcccaggtggccactatttcggctaacggggacaccagcattgggggcctcatctcggacgccatgaagcgggtgggccgggacggtgttatcacggtcaaggacggcaagaccctcagcgacgagttggaggttatcgagggcatgaagttcgaccggggctacatctctccctacttcatcaacaccagcaaaggggcaaaggtggagttccaggatgctctgctgcttttcagcgagaagaagatctccaacgtgcagacactgattccggccctggagttggccaacacccagcgcaggccgctggtgatcatcgccgaggacgttgacggggaggccctcagcacgctggtgctgaaccggctgaaggtggggctgcaggtggcagcagtcaaggcgcccggctttggggacaaccgcaaggcgacgctgcaggacatggccattgcttcggggggcctggtcttcggggacgaggcaaacttggtgaagctggaggacgtccaaattggggacctgggccaggtgggcgaggtggtcatcaccaaggatgacaccctgctgctcaagggcaaggggaacaaggaggacattgatcggagggtggcccagatccgagacgagattgacctaagcaactcggagtacgagaaggagaagcttggagagcggctggcacgcctggccagcggtgtggccctgctcaaggtgggcggctcgagcgaggtggaggtcaacgagaagaaggaccgggtcaacgacgccctcaacgccacgcgggcggccgtcgaggagggcattgtgcccgggggtggcactgctctgctgcgctgcatcccggctctggacgccgtgtctggggacaacgaggaccagaagaccggtgtggccattgtcaagaaggccctcaagatgccctgcatgcagattgccatgaatgctggcgtggatgccgctgtggtggtgcagaaggtggtcgaaggcagcgacgacttcggctacgacgcactgcgcaacacctacgtcaacatgatttcggctggcatcatcgaccctaccaaggtggtgaagactgcgctcctagatgcgtccggagtggcttccctgctgacgactgccgaggccgtggtggtggagcttcccaaggaggagaaggatgccatgggtggcatgggagggatggggggtatgggcggcatggggggcatgggcatgtga

SEQ ID NO: 9585 - protein, 572 aa, Ixodes scapularis
MHRLPSALRSTAGRSVSHALRRHYAKDIRFGADVRALMLQGVDVLADAVAVTMGPKGRNVILEQSWGSPKITKDGVTVAKGIELKDKFQNIGAKLVQDVANNTNEEAGDGTTTATVLARAIAREGFEKISKGANPIEIRKGVMMAVETVVEHLKKISKPVTTPEEIAQVATISANGDTSIGGLISDAMKRVGRDGVITVKDGKTLSDELEVIEGMKFDRGYISPYFINTSKGAKVEFQDALLLFSEKKISNVQTLIPALELANTQRRPLVIIAEDVDGEALSTLVLNRLKVGLQVAAVKAPGFGDNRKATLQDMAIASGGLVFGDEANLVKLEDVQIGDLGQVGEVVITKDDTLLLKGKGNKEDIDRRVAQIRDEIDLSNSEYEKEKLGERLARLASGVALLKVGGSSEVEVNEKKDRVNDALNATRAAVEEGIVPGGGTALLRCIPALDAVSGDNEDQKTGVAIVKKALKMPCMQIAMNAGVDAAVVVQKVVEGSDDFGYDALRNTYVNMISAGIIDPTKVVKTALLDASGVASLLTTAEAVVVELPKEEKDAMGGMGGMGGMGGMGGMGM

SEQ ID NO: 9586 - DNA, 1617 bp, Geobacillus sp. Y412MC61
  CDS (1)..(1617): transl_table=11
atggcaaaacaaatcaagttcagcgaagaagcgcgccgtgcgatgttgcgcggggtggacaaacttgcagacgcagtgaaagtcacattaggtccgaaaggccgcaacgtcgtattggagaaaaaattcggttcgccgctcatcacgaatgacggggtaacaatcgcgaaagaaatcgaactcgaagatccgtttgaaaacatgggcgcgaaacttgtcgctgaagtcgccagcaaaacgaacgacatcgctggggacggtacaacaaccgctacggtattggctcaagcgatgatccgtgaaggcttgaaaaacgtggctgctggtgccaatccgatgggcatccgtcgcgggattgaaaaagcggttgctgttgctgttgaagaattaaaagccatctccaaaccgatcaaagggaaagagtcgatcgcccaagtggctgcgatttcggctgctgacgaagaagttggtcaattgatcgctgaagcgatggaacgtgtcggcaatgacggcgtcatcacgcttgaagaatcgaaaggcttcacgacggaactcgacgttgtcgaggggatgcaattcgaccgcggttacgtttcgccgtacatgattacggatacggaaaaaatggaagcggttctcgaaaatccgtacatcttgattacggacaagaaagtatcgagcatccaagaattgttgccgatcttagaacaagtggtccaacaaggccgtccgctcttgatcattgcggaagatgttgaaggcgaagcattggcgacgcttgttgtcaacaaactgcgcggcacgttcaatgcagttgccgtcaaagcgcctggcttcggtgaccgccgcaaagcgatgctcgaagacatcgcgattttgacaggcggcgaggtgatctcggaagagcttggccgtgaattgaaatcgacaacgatcgcttcgctcggccgtgcgtcgaaagttgtcgttacgaaagaaacgacgacgatcgtcgaaggcgctggcgattcggagcgcatcaaagcgcgcatcaaccaaatccgtgcgcagcttgaagaaacgacgtccgaattcgaccgcgaaaaactgcaagaacgcttagcgaaattggctggcggcgtagcggtcatcaaagttggggcggcaacagaaacagaattgaaagaacgcaaactgcgcatcgaagacgcgctcaactcgactcgtgcggctgttgaagaaggcattgtcgccggcggtggcacggctctcatgaacatctacaacaaagtcgctgccatcgaagcggaaggcgatgaagcaaccggcgtgaaaatcgtattgcgcgcgatcgaagaaccggttcgtcaaatcgcgcaaaacgctggtctggaaggctcgatcatcgttgagcgcctgaaaaacgaaaaaccgggcatcggcttcaatgcggcaacaggtgaatgggtcgacatgatcgaagctggtatcgttgacccgacgaaagtcactcgttcggcgctgcaaaacgctgcatctgtcgccgcaatggtcttgacgacagaagcggtcgttgccgacaaaccggaagaaaacaaaggcaacaacaacatgccggatatgggcggcatgatgtaa

SEQ ID NO: 9587 - protein, 538 aa, Geobacillus sp. Y412MC61
MAKQIKFSEEARRAMLRGVDKLADAVKVTLGPKGRNVVLEKKFGSPLITNDGVTIAKEIELEDPFENMGAKLVAEVASKTNDIAGDGTTTATVLAQAMIREGLKNVAAGANPMGIRRGIEKAVAVAVEELKAISKPIKGKESIAQVAAISAADEEVGQLIAEAMERVGNDGVITLEESKGFTTELDVVEGMQFDRGYVSPYMITDTEKMEAVLENPYILITDKKVSSIQELLPILEQVVQQGRPLLIIAEDVEGEALATLVVNKLRGTFNAVAVKAPGFGDRRKAMLEDIAILTGGEVISEELGRELKSTTIASLGRASKVVVTKETTTIVEGAGDSERIKARINQIRAQLEETTSEFDREKLQERLAKLAGGVAVIKVGAATETELKERKLRIEDALNSTRAAVEEGIVAGGGTALMNIYNKVAAIEAEGDEATGVKIVLRAIEEPVRQIAQNAGLEGSIIVERLKNEKPGIGFNAATGEWVDMIEAGIVDPTKVTRSALQNAASVAAMVLTTEAVVADKPEENKGNNNMPDMGGMM

SEQ ID NO: 9588 - DNA, 1746 bp, Oryza sativa subsp. indica
  CDS (1)..(1746)
atgtaccgggcggcggcggcggcggcgtcgtcgatttcgaggtcctcgtcggcgctgcggaagcagctgtcgcgcggcggttgcggggagcagcggctgtgggcgcgggggtatgcggcgaaggaggtggcgttcggcgtcggagcccgggccgccttgctgcagggcgtgaacgacctcgccgacgccgtcaaggtcaccatgggccccaaggggcgcaatgtgattatcgagagatcccatagagctcccaaagtcacaaaggatggagtcacggttgcaaaaagcattgagtttgaggacagtgctaagaatgttggtgcaaacctggtgaagcaagttgctgaagctactaataaggtcgcaggagatggtaccacttgtgcaactgtacttacacaggctattcttacggaaggctgcaaggctgtggcagcaggggtcaatgttatggacttacgtaatggcataaacaaggccataagttctatcactacacacctcaaaagtaaagcatggattatcaactcctcagaagaaataaatcaggtagcaactatttctgcaaatggagaaaaggaaataggagatttgatatcaaaggcgatggaaaaggttggaaaggatggagttattactattactgatggcaagacattagacaatgagcttgaagcggtacagggaatgaaactttccagaggctacatatctccttactttgtgactgatcagaagactcagaagtgtgagatggaaaatcctcttattctaattcatgacaagaaaatctcaacgatgaattcacttcttccagttttagaaatgtctatcaagaatcgtaggcctcttctcatcattgctgaggatgttgagggagaagctctatcaatgcttgttctgaacaagcatcgtgctggattaaagatatgtgctgtcaaagctcctggatttggtgaaaacagaagagccaatctggatgacgtggctgtgttgacaggaggagaggttgtcagcgaggaccaaggtcttgatcttggtaaagtcgaactacaaatgcttggcactgctaaaaaggttactgtatcccttgatgatactatcattctagatggtggaggcgacaaacagcagatagaggagaggtgtcaacagcttagagaatcaatggacaaaagcactgctgtatttgacaaagaaaaggctcaagaacgtctatcaaagttatctggtggtgttgctgtcctcaagattgggggaactagtgaagttgaagttggtgagaaaaaagatagggtaacagacgctttacatgcagcaagggctgctgtggaggagggcattgtaccaggtggtggagttgcccttctgtatgccaccaaggagcttgacaagattatcacagcaaatgaggatgaaaagattggagttcaaattatcaagaatgctttgaaggctcctttgatgactatagctgcaaatgctggcattgatggtggtgtggtcattgggaagctaattgaacaagataatcttaatatgggctatgatgcagcaagaggggagtatgttgacatgattaaggctgggatcatcgaccctgtgaaagtcatccgaacagcgctacaagatgcatcaagtgtttctttgctgatgacaacgacagaggcagctgttgctgagcccccagcagcaaaggccagaatggccagtcggatgccgcagatgagcgggatggatttttga

SEQ ID NO: 9589 - protein, 581 aa, Oryza sativa subsp. indica
MYRAAAAAASSISRSSSALRKQLSRGGCGEQRLWARGYAAKEVAFGVGARAALLQGVNDLADAVKVTMGPKGRNVIIERSHRAPKVTKDGVTVAKSIEFEDSAKNVGANLVKQVAEATNKVAGDGTTCATVLTQAILTEGCKAVAAGVNVMDLRNGINKAISSITTHLKSKAWIINSSEEINQVATISANGEKEIGDLISKAMEKVGKDGVITITDGKTLDNELEAVQGMKLSRGYISPYFVTDQKTQKCEMENPLILIHDKKISTMNSLLPVLEMSIKNRRPLLIIAEDVEGEALSMLVLNKHRAGLKICAVKAPGFGENRRANLDDVAVLTGGEVVSEDQGLDLGKVELQMLGTAKKVTVSLDDTIILDGGGDKQQIEERCQQLRESMDKSTAVFDKEKAQERLSKLSGGVAVLKIGGTSEVEVGEKKDRVTDALHAARAAVEEGIVPGGGVALLYATKELDKIITANEDEKIGVQIIKNALKAPLMTIAANAGIDGGVVIGKLIEQDNLNMGYDAARGEYVDMIKAGIIDPVKVIRTALQDASSVSLLMTTTEAAVAEPPAAKARMASRMPQMSGMDF

SEQ ID NO: 9590 - DNA, 1767 bp, Oryza sativa subsp. indica
  CDS (1)..(1767)
atgtcgaggatggcggcgccgccgccgccgctctccggcaccggcaagccgcccacactccccttctccctcaagaagccgccgcccatgccggtgtacaaggacctgcacttcaaccgcgacctctccgccaccaagaagctgcaggccggcgtggacctggtggcacggctggtcggggtgacgctggggcccaaggggaggaacgtggtgctgagcaacaagtacggccctcccaagatcgtcaacgatggggagacggtcctcaaggagattgaattggaggacccgttggaaaatcttggagtgaagctggtcagacaggctggtgcgaggacgaacgatgttgctggtgatggttgtaccacttccataatccttgctcaaggcctcatcgctgaaggaatgaaggtgcttgcagctggaattaatcctgtccagattgcgcggggcattgagaagactgcttctgctttggtgtctgaactcagattgatgtcccgggagatagaagaccatgaaattgcacatgtggctgcagttagtgcaggagatgattatgctgttggaaatatgatttctgatgcttttaaaagagtaggcaggaaaggcatggtgaggattgaaaatggaaggggcacggaaaatggtctagagattgtggaaggaatgcaatttgaacgtggttacctctcaccgtactttgtgactgattgtacaaatatgtccgcggagtttactgactgtaagatattgttggttgacaagaaaattactgatgcaagtgagattataaggatattggatagtgctgtcaaagaagattatccattgttgatagttgccgaggatgtggaagaaaaagcaatggctgatttgataaaaaataagctaaaagggacaattaaagtggctgcaatcaaggccccttcctttggggaacaaatgactcaatgtttggatgacattgccatcatgacaggaggtacactagtgcgtgaagacatgggatatacactagaaaaggcagggaaagaggttctaggttctgcttctaaggttgtagtcgggaaagactcaacactaattgttaccaatggaagcacccagcatgtgattgagaaaagggttgctcagataaagggccaaattgagaactcaagtgagaggtaccagaagaagatattgggtgagagaatagcaaggttatgtggtggaattgcaatcattcaggtcggtgctcaaacaatcattgagatgaaagacaagaagctcagaattgaagatgcccttaatgcaacaaaggcagctattgaggaaggagttgtgataggtggtggatgtagcctattaagattatccatgaagattgatagaattaaggaatcattggataatatggagcagaagattggtgctgacatcttcaaacaggctttgagttaccctactgcattgattgcaaacaatgctggggtgaacggcagcttcgtcatagaaaaggtgttattaaatgaggacagtagatatggctacaatgctgccaagaaccgctatgaggacttaatggccgctggaatattagatccatcaaaggttgtgagatgttgcatagaacatgctgctgtggtcgccaagtcttttctcacatctgacgtggtgattgttgaggcgaaagaaggcaaaccagttcgcataaggcccccgatgcctcctaaaagtttgatacccccaatgcctgcttctgcttcaggaattcgagtgtag

SEQ ID NO: 9591 - protein, 588 aa, Oryza sativa subsp. indica
MSRMAAPPPPLSGTGKPPTLPFSLKKPPPMPVYKDLHFNRDLSATKKLQAGVDLVARLVGVTLGPKGRNVVLSNKYGPPKIVNDGETVLKEIELEDPLENLGVKLVRQAGARTNDVAGDGCTTSIILAQGLIAEGMKVLAAGINPVQIARGIEKTASALVSELRLMSREIEDHEIAHVAAVSAGDDYAVGNMISDAFKRVGRKGMVRIENGRGTENGLEIVEGMQFERGYLSPYFVTDCTNMSAEFTDCKILLVDKKITDASEIIRILDSAVKEDYPLLIVAEDVEEKAMADLIKNKLKGTIKVAAIKAPSFGEQMTQCLDDIAIMTGGTLVREDMGYTLEKAGKEVLGSASKVVVGKDSTLIVTNGSTQHVIEKRVAQIKGQIENSSERYQKKILGERIARLCGGIAIIQVGAQTIIEMKDKKLRIEDALNATKAAIEEGVVIGGGCSLLRLSMKIDRIKESLDNMEQKIGADIFKQALSYPTALIANNAGVNGSFVIEKVLLNEDSRYGYNAAKNRYEDLMAAGILDPSKVVRCCIEHAAVVAKSFLTSDVVIVEAKEGKPVRIRPPMPPKSLIPPMPASASGIRV

SEQ ID NO: 9592 - DNA, 1695 bp, Tigriopus japonicus
  CDS (1)..(1695)
atgggcggagctagtgcgttgagcgtgcgaggctacgctaaagacgttcgattcggcagcgaagttcgcaaagagatgttggtgggcgtggacattttggccgatgccgtgtccgttactatgggacccaagggtcgcaatgtgatcatcgaatcttcttggggttcgcccaaaatcaccaaggacggtgtgaccgtggccaaaggcatcgaattggccgataagttccagaacattggcgccaaactcgtgcaagatgtggccaacaacaccaatgagcaagccggtgatgggaccaccacggccaccgttttggctcgagccattgccaaaatgggctttgacagtgtcacgcacggcgccaaccccgtggaaatccgtcgaggtctcttggccgccgtggaaagagtcaaccaacagctcaaagatatgtccaagcacgtgacgacccctgaggaagtgtaccaagtggccacgatctcggccaatggcgacaccaccgtgggcaaactcatttccgatgccatgcaaaaagtgggcaaagaaggcgtgctcaccgtcaaagacggaaagacccttcacgacgagatggaagtcattgagggcatgaagttcgatcgcggatacatctcgccctacctcatcaacaccactaaaggtgctaaagtggaatacaacgatgcattggtcttgttctctgagaagaagatcagctcgattcaatccatcatccccgcccttgaattggccaatcagtcaaagcgtcccttgattattgtggccgaagatatcgacggtgaagctctcacagccctcgtggtcaatcgtctcaagatcggtcttcaagtggccgctgtcaaggctcctggttttggagataaccgcaaaaacacccttcaagacatggccatcgcttctggaggtgtggttttcgggtctgaaggtaccgatctcaaattggaggatatccaagcccatgattttggtcaagtgggtgaggtgtccatcaccaaggatgacaccctcttcttgaagggcaaaggtcgtgaagatgagattgccaagcgcgttcagcagctcaaggatcagattgaggactcgagttcggaatatgagaaggagaagatgcaagaacgaatggccagattgagttctggtgtggctgtgctcaagattggaggctccagtgaggtggagatgaatgagaagaaagatcgggtcaatgatgctctgtgtgccacaagagcggccattgaggaaggaattgttcctggaggtggaaccgcccttatccgatgcatcgccagcttggatgatgtcaaagccaccaatgacgaccagaagaaaggcgtggatattgtacgatacgccctgactcgaccttgttatcagattgccaagaatgccggtgtcgacgcctccgtcatcgtcaacaaagtcatggaggccaaggatctcaacacaggctacaatgccgccgaaaacaccttcgtgaacatgatcgaagccggtattgtggaccctactaaggtggttcgttctgccttaaccgatgctgccggtgtggcctctcttctgaccacagccgaagctgtcatcaccgagatcaaggaagacgcacccgctggtggaggtggtatgggtggaggcatgggtggaatgggcggtatgggaggcatgggaggaatgatgtaa

SEQ ID NO: 9593 - protein, 564 aa, Tigriopus japonicus
MGGASALSVRGYAKDVRFGSEVRKEMLVGVDILADAVSVTMGPKGRNVIIESSWGSPKITKDGVTVAKGIELADKFQNIGAKLVQDVANNTNEQAGDGTTTATVLARAIAKMGFDSVTHGANPVEIRRGLLAAVERVNQQLKDMSKHVTTPEEVYQVATISANGDTTVGKLISDAMQKVGKEGVLTVKDGKTLHDEMEVIEGMKFDRGYISPYLINTTKGAKVEYNDALVLFSEKKISSIQSIIPALELANQSKRPLIIVAEDIDGEALTALVVNRLKIGLQVAAVKAPGFGDNRKNTLQDMAIASGGVVFGSEGTDLKLEDIQAHDFGQVGEVSITKDDTLFLKGKGREDEIAKRVQQLKDQIEDSSSEYEKEKMQERMARLSSGVAVLKIGGSSEVEMNEKKDRVNDALCATRAAIEEGIVPGGGTALIRCIASLDDVKATNDDQKKGVDIVRYALTRPCYQIAKNAGVDASVIVNKVMEAKDLNTGYNAAENTFVNMIEAGIVDPTKVVRSALTDAAGVASLLTTAEAVITEIKEDAPAGGGGMGGGMGGMGGMGGMGGMM

SEQ ID NO: 9594 - DNA, 1716 bp, Biomphalaria glabrata
  CDS (1)..(1716)
atgttgagggtggccagtgtgttccgttcttcagctacaaggcaattggttcctatgctttgtcggcattatgccaaggatattaaatttggatctgatgctagagcacttatgctgcaaggtgtagatcttcttgctgatgctgttgcagtaacaatgggcccaaagggtcgaaatgtgattttggaacaaagctggggtagtcctaaaattacaaaagatggtgtcactgttgcaaaaggcattgatcttaaggacaaatttcaaaatattggtgccaaactggtgcaagatgtggctaacaatacaaatgaagaagctggagatggaacgacttctgccacagttcttgcaagatcaatagcaaaggaaggttttgaaagaattagcaggggagctaatcctgttgaaattagaagaggcgtaatgttggcggttgatgctgttgttgaacatttgaaaaaaatgtctcgtcaagttacaactccagaagaaatagctcaggttgccactatatctgctaatggggataaatctataggagaactcatatcaagtgccatgaagaaagttggaagggatggagtcataactgttaaggatggtaaaacacttaaagatgaactggagacaatagaaggaatgaagtttgatagaggatatatttctccatacttcatgaacacagctaaaggtgcaaagtgtgagtttcaagatgctcttgtactgttgagtgagaaaaaaatttccagcatacaatccattattccagctttagaattagcaaatcaggccaggaagccccttctcattgttgctgaagatgttgatggagaggctttaagtactttagttttaaatagaataaaagtaggtttgcaagtttgtgctgttaaagctccaggatttggtgataatagaaaaaatacattaatagatatggctattgccactggtggagtggtatttggtgatgaaggtaacttgtataaattagaggatattcaaatgcaagattttggtaatgttggtgaagtaacagtgaccaaagatgatacattattaatgaaaggaaaaggaaacaaagctgatattgaaaagcgcattgcccaaattaaagatgaaattgaaattagcacatcagaatatgaaaaagaaaaatttggtgaacgtttggctaaattatcaaatggtgttgctgtattaaagataggtgggacaagtgaggttgaagtgaatgaaaagaaagacagaattaatgatgctttaaatgcaactagagcagctgttgaggaaggtattgttccaggtggtggcactgctttactacgatgcatttcagttttggacagtgttaagacagaaaatgaggatcagattactggagtgaacataataagaaaagctcttcgtgttcctgcattaaccatagcccaaaatgctggtgtagatgcacatgtagtagttgaaaaagtcctgaattccagcggtgatattggttatgatgcattaaataatgaatatgtaaatctcattgagcaaggaataatagatccaactaaagttgtgagaacagcacttgttgatgctgcaggagtagcttcactattgacaacagctgaagcagttgtggttgatctgccaaaagaggagaaagaagctggcatgggaggcatgggaatgggaggtatgggtggaatgggaggcatgatgtaa

SEQ ID NO: 9595 - protein, 571 aa, Biomphalaria glabrata
MLRVASVFRSSATRQLVPMLCRHYAKDIKFGSDARALMLQGVDLLADAVAVTMGPKGRNVILEQSWGSPKITKDGVTVAKGIDLKDKFQNIGAKLVQDVANNTNEEAGDGTTSATVLARSIAKEGFERISRGANPVEIRRGVMLAVDAVVEHLKKMSRQVTTPEEIAQVATISANGDKSIGELISSAMKKVGRDGVITVKDGKTLKDELETIEGMKFDRGYISPYFMNTAKGAKCEFQDALVLLSEKKISSIQSIIPALELANQARKPLLIVAEDVDGEALSTLVLNRIKVGLQVCAVKAPGFGDNRKNTLIDMAIATGGVVFGDEGNLYKLEDIQMQDFGNVGEVTVTKDDTLLMKGKGNKADIEKRIAQIKDEIEISTSEYEKEKFGERLAKLSNGVAVLKIGGTSEVEVNEKKDRINDALNATRAAVEEGIVPGGGTALLRCISVLDSVKTENEDQITGVNIIRKALRVPALTIAQNAGVDAHVVVEKVLNSSGDIGYDALNNEYVNLIEQGIIDPTKVVRTALVDAAGVASLLTTAEAVVVDLPKEEKEAGMGGMGMGGMGGMGGMM

SEQ ID NO: 9596 - DNA, 1779 bp, Ricinus communis
  CDS (1)..(1779)
atggcaacaccctcgccaactccaatctctgcaatatctttcactaaccaaacttttcccaaaagggtctcttcaccttcttcttctatgttatatctcaaagccatgtccaaagatatttactttaaccatgatggttctgctacgaagaaacttctggcaggggtaggtatggtggcagagttagttggagtaactttaggtcctaaaggaaggaatgtggtgttagaaaataagtatggacctcctaagattgttaatgacggagaaactgttctcaagcagattgagttggaggatcctttggagaatgttggagtgaaactggtgagacaagctggcgcaaaaacaaacgaccttgctggagatggttccacaacgtctgtagttctggctcatggtttaatagctgagggtgtgaaggtgattgcagctggcatgaatcctgtccaagttgctcgtgggatcgagagaacctcaaaagcccttgtttctgaactcaaattgatgtctagagaggttgaggatgatgagattgcggctgttgctgcagttagtgctgggaatgattatgctgtgggaaaaatgatatctgatgctcttcgggaagtgggaaagagaggtgtagtcacaattgataaaggagagtatattgacaacaatctacaaattgtaaaagggatgcaatttgatcgtggatatttgtctccttacttcgttactgatcgacggaaaatgacagtagagttccacaattgcaagttacttctggtggacaaaaaaataacaaatccaaaggagatgtttaaaatattagacaatgcggttaaagagaagtaccccattgtggtagttgcggagggcattgagcaggaagctttggctccagttattaggaacaaactcaggggtgcactgaaggcagctgctataaaggctcctgcctttggtgagcgcaagggccactatttagatgacattgctatcttgacaggagccactgtaatcagagatgagatggggctgactctggaaaaggttggcaaggaggttttaggctctgccaccaaagttgtgataacaaaggattctacacttatagttactgacgggagcactcaagcagctgttcagaagagggtttctcagatccgcggtcttgctgagaatactgaagaaaattttcaaaagaaaatactgaatgaaaggatagcaagattatctggaggaattgccattctgcaggtaggagcacaaacgcaagttgagttaaaggataaacaactgcggattgaagatgctttaaatgcaacaaaggcagcaattgaggaaggcgtggtaattggtggtgggtgtagccttctgaggctatccactaaagttgatgctattaaagaacttttggacaacgaagaacaaaagattggagctgagatcttcaaacgagctttgagttatcctacgagactgatagccaagaatgcaggagtaaatggcaacattgtcataaaccagattctatcaaatgatgatccaagatatggatataatgctgcaagagacagatatgaggatttgataagtgcaggaattatagatccaacaaaggtagttagatgttgtttggagaatgctgcatcagtagcgaaaacatttattacttctgatgcagttgtagtcaaaattaaggtaccacaaccactaccaataagaaaaccaatgccaaagaaaccaagtattgcaccaatgggcttgcagttggggcgacagactttgtaa

SEQ ID NO: 9597 - protein, 592 aa, Ricinus communis
MATPSPTPISAISFTNQTFPKRVSSPSSSMLYLKAMSKDIYFNHDGSATKKLLAGVGMVAELVGVTLGPKGRNVVLENKYGPPKIVNDGETVLKQIELEDPLENVGVKLVRQAGAKTNDLAGDGSTTSVVLAHGLIAEGVKVIAAGMNPVQVARGIERTSKALVSELKLMSREVEDDEIAAVAAVSAGNDYAVGKMISDALREVGKRGVVTIDKGEYIDNNLQIVKGMQFDRGYLSPYFVTDRRKMTVEFHNCKLLLVDKKITNPKEMFKILDNAVKEKYPIVVVAEGIEQEALAPVIRNKLRGALKAAAIKAPAFGERKGHYLDDIAILTGATVIRDEMGLTLEKVGKEVLGSATKVVITKDSTLIVTDGSTQAAVQKRVSQIRGLAENTEENFQKKILNERIARLSGGIAILQVGAQTQVELKDKQLRIEDALNATKAAIEEGVVIGGGCSLLRLSTKVDAIKELLDNEEQKIGAEIFKRALSYPTRLIAKNAGVNGNIVINQILSNDDPRYGYNAARDRYEDLISAGIIDPTKVVRCCLENAASVAKTFITSDAVVVKIKVPQPLPIRKPMPKKPSIAPMGLQLGRQTL

SEQ ID NO: 9598 - DNA, 1725 bp, Ricinus communis
  CDS (1)..(1725)
atgtatcgtttcgcctctagccttgcttctaaagctcggatcgctaggaatagcacccatcagattggaagtagactgagctggagcagaaactatgctgccaaagatatcaaatttggggtggaagctagggctttaatgcttaagggtgttgaagagcttgcagaagctgtgaaagtcacaatgggtcctaaggggcgcaatgtggttattgaacaaagctttggtgcccccaaagtgacaaaggatggtgtgactgttgcgaagagcattgaattcaaagataaaatcaagaatattggtgctagccttgtgaagcaggttgctaatgcaactaatgatgttgcaggcgatgggaccacttgtgctacagttcttactcgagctatattcacagaaggatgcaagtcagttgcagcaggaatgaatgcaatggacctaagacgtggtataagcatggctgttgatgctgttgttactaacttgaagagcagggcgcgaatgatcagcacatctgaagaaattgcacaagttggtacaatatctgcaaatggggagagagaaattggtgagttaattgcgaaggccatggagaaggttggcaaagagggagttatcacaatccaagatgggaagacattatataatgagttggaagttgttgagggaatgaagttggacaggggttacatatccccttatttcatcacgaatcagaaaaaccaaaaatgtgaattggacgatcctctcattttgatccatgagaaaaagatctcaagcataaatgctgtggtgaaagtattggagttggctttgaagagacaaaggcccttgttgataattgccgaagatgtggaaagtgaagcgctggcaacccttattctaaacaagcttcgtgctggaattaaggtatgtgccataaaagctcctggatttggagagaaccgaaaggctggactccaggatcttgctgtcctcacagggggtcaggtcataactgaagaacttggcctcaatcttgagaaggttgatttggatatgcttggcagttgcaaaaaggttacagtgtcaaaagatgataccgttgttcttgatggtgctggagagaagaaggacattgaggaaagatgcgaacagataagatctacaatagaattaagcacttctgactatgacaaagagaagttgcaagaaagattggcaaagctttctggtggtgttgctgtacttaagattggtggagctagtgaagctgaagttggtgaaaagaaagatagggtcacagatgctctaaatgcaacaaaggcagctgtagaagagggtatcgtaccaggtggtggtgttgctcttctttatgccacaaaagagttggaaaagttgcagactgccaactttgaccaaaagattggtgtccaaatcattcaaaatgctctgaagactccagtacatacaattgcaagtaatgcaggagttgagggagctgtcgttgttggcaagttattggagcaggacaattacgatcttggctatgatgctgctaaaggtgaatatgtggatatggtgaaagcagggatcattgacccactgaaagtgattagaactgctttggttgatgccgcaagtgtatcatcattgatgacaacaactgaagctgttgtatctgaacttccaaaggatgagagtgctgctccagcaatgcctcctggcatgggcatggattactga

SEQ ID NO: 9599 - protein, 574 aa, Ricinus communis
MYRFASSLASKARIARNSTHQIGSRLSWSRNYAAKDIKFGVEARALMLKGVEELAEAVKVTMGPKGRNVVIEQSFGAPKVTKDGVTVAKSIEFKDKIKNIGASLVKQVANATNDVAGDGTTCATVLTRAIFTEGCKSVAAGMNAMDLRRGISMAVDAVVTNLKSRARMISTSEEIAQVGTISANGEREIGELIAKAMEKVGKEGVITIQDGKTLYNELEVVEGMKLDRGYISPYFITNQKNQKCELDDPLILIHEKKISSINAVVKVLELALKRQRPLLIIAEDVESEALATLILNKLRAGIKVCAIKAPGFGENRKAGLQDLAVLTGGQVITEELGLNLEKVDLDMLGSCKKVTVSKDDTVVLDGAGEKKDIEERCEQIRSTIELSTSDYDKEKLQERLAKLSGGVAVLKIGGASEAEVGEKKDRVTDALNATKAAVEEGIVPGGGVALLYATKELEKLQTANFDQKIGVQIIQNALKTPVHTIASNAGVEGAVVVGKLLEQDNYDLGYDAAKGEYVDMVKAGIIDPLKVIRTALVDAASVSSLMTTTEAVVSELPKDESAAPAMPPGMGMDY

SEQ ID NO: 9600 - DNA, 1728 bp, Ricinus communis
  CDS (1)..(1728)
atgtatcgttttgtctctggactcgcatctaaagccagattggctaagaacagtacccagcaggtgggtagtagattggcttggagcagaagttatgcagctaaagatataaaatttggcgttgaagctcgcgccttgatgcttaaaggtgttgaggatcttgctgatgctgttaaagtgacaatgggccctaaagggcggaatgtagttttggagcaaagttggggagcccctaaagtgacaaaagatggtgttacagtagccaagagcattgaattccaagacagagtgaagaatgttggtgctagcctcgtgaagcaggtcgcaaatgctacaaatgatgtggcaggcgatggaacaacgtgtgcaacagtcctcactcgtgcaattttagttgaaggatgcaagtctgtggcagctggaatgaatgccatggatctaagacgtgggatttcaatggcagttgatactgttatcactaacttgaagagcagaacaaggatgataagcacatctgaagaaatagcacaggttggaacaatatcagcaaatggagaaagagagattggtgagctcatagccaaggcaatggagaaagttggaaaagagggtgtcattactatttctgatggaaaaacattgtacaatgagctagaggttgtcgagggaatgaagctggacagaggctacatatccccttattttgtcaccaatacaaaaaaccaaaaatgtgaactagaagatcccctaattttaattcatgagaagaagatctcaaatctaaatgctgtagtcaaggttttagaattagctttgaagaagcaaagacctttgctgattgttgctgaagatgttgaaagtgaagcactagcaactctcattctaaacaagcttcgtgctggaatcaaggtctgtgccataaaagcaccagggtttggagaaaataggaaggccagtatgcaagaccttgccgttctcactggtggtcaggttataactgaggagcttggtatgaaccttgaaaaggtgggagcagaggcatttggctcatgcaaaaaggttacagtatccaaggatgacacaattattcttgatggatttggtgataagaaagccttggaagaaagatgtgagcagttgaggtcttcaatcgaattgagcacttctgattatgacaaggaaaaattgcaagagcggcttgcgaagctttctggtggtgttgcagttctgaagattggtggggctagtgaagcagaagttagtgaaaagaaagacagagttactgatgctctgaatgccaccaaggcggctgtggaggaaggaattgtacctggtggtggggttgcacttctttatgcatctaaagatttggacaagttgcatactgcaaactttgaccagaagattggtgtccagattatccagaatgctcttaagatgccggtacacactattgctgcaaatgcaggagtagagggggcagttgttgttggcaagctattagagcaggataatcctgatcttggatacgatgcagctaaaggggaatacgtggatatggtaaagtcaggaattattgatccactgaaagtcattagaacagccttggtagatgccgcaagtgtctcttcattgatgactacaactgaggccattgtgacggaactacccaaggacgagaaggaacccaccgccatggccggtggtggtggtggcatgggctattaa

SEQ ID NO: 9601 - protein, 575 aa, Ricinus communis
MYRFVSGLASKARLAKNSTQQVGSRLAWSRSYAAKDIKFGVEARALMLKGVEDLADAVKVTMGPKGRNVVLEQSWGAPKVTKDGVTVAKSIEFQDRVKNVGASLVKQVANATNDVAGDGTTCATVLTRAILVEGCKSVAAGMNAMDLRRGISMAVDTVITNLKSRTRMISTSEEIAQVGTISANGEREIGELIAKAMEKVGKEGVITISDGKTLYNELEVVEGMKLDRGYISPYFVTNTKNQKCELEDPLILIHEKKISNLNAVVKVLELALKKQRPLLIVAEDVESEALATLILNKLRAGIKVCAIKAPGFGENRKASMQDLAVLTGGQVITEELGMNLEKVGAEAFGSCKKVTVSKDDTIILDGFGDKKALEERCEQLRSSIELSTSDYDKEKLQERLAKLSGGVAVLKIGGASEAEVSEKKDRVTDALNATKAAVEEGIVPGGGVALLYASKDLDKLHTANFDQKIGVQIIQNALKMPVHTIAANAGVEGAVVVGKLLEQDNPDLGYDAAKGEYVDMVKSGIIDPLKVIRTALVDAASVSSLMTTTEAIVTELPKDEKEPTAMAGGGGGMGY

SEQ ID NO: 9602 - DNA, 1818 bp, Ricinus communis
  CDS (1)..(1818)
atggcgtcaacctttactgctatgtcttcggttgggtccttagttgctcctaatgtggataagaaattcgcctctacttcaaataggttgtcatcttttgcctcaatttctggaagtgcatttggtaggaggcaaaatgtagttctacgtagatcgcgatctcccaagatttgtgccatggcgaaggatttgcatttcaacaaggatggatcagcaattaaaaagttgcaaactggtgtaaacaaacttgcagatctagttggggttacccttggacctaaaggccgaaatgttgttcttgagagcaagtatggctccccaaaaattgttaatgatggtgtgactgtcgctaaagaggttgaattggaggatccagttgagaatattggtgcgaagttggtaagacaggcagccgccaagacaaatgacttggctggtgatggcaccacaacatctgttgttcttgctcaaggccttatagctgaaggtgtcaaggttgttgctgctggtgccaaccctgtattgattactaggggtattgagaagacctcaaaggctctagtgactgaacttaagtctatgtctaaagaggttgaagacagtgagcttgcagatgtagcagctgttagtgcaggaaacaactatgaagttgggaatatgatagctgaagctatgagtagagtgggtcgaaagggcgttgtgacacttgaagagggaaaaagtgcggagaacagcctctatgttgtcgagggaatgcaatttgatcgtggttatatctcaccttattttgtgactgacagtgaaaaaatggcagttgaatatgagaactgcaagttgcttcttgttgacaaaaaaataacaaatgcaagagatctcattaacattctggaagatgcaattagaggtggataccctattttggtaattgctgaagacattgagcaggaggctctagcaacacttgttgtgaataagcttaggggtgctttgaagattgctgctcttaaagctcctggttttggagagcgcaaaagccagtatcttgatgacattgctattttaactggaggaactgttgtcagagaggaggtagggctttcattggacaaagttggcaaggagatcctaggcaatgcatctaaagtggttctcaccaaggatactactacaattgtgggtgatggaagcactcaagaggcggtaactaaaagagttgcacaaattagaaatctcattgaggctgctgagcaagactatgagaaggaaaaactcaatgagagaattgcaaaactgtcaggtggtgttgctgtgatacaggttggagcacaaactgagacagagcttaaagaaaagaagttgagagttgaagatgctctcaatgcaacaaaggcagctgtggaagaaggtattgtagttggtggtggatgcaccctactgaggcttgcatcaaaggtggatgccattaaggatagccttgacaatgatgaagaaaaggttggagcggatattgtgaagagagctcttagctatccactcaagctgattgccaagaatgcgggagtaaatggaagtgtggtcagtgagaaggtgctctctagtgacaatccaaggtttggatacaatgccgcaactgggaactatgaagatctaatggctgctgggatcattgatccaactaaggtggttagatgttgcctggagcatgcatcatctgtagcgaagactttcttgatgtctgactgtgtagttgtggaaatcaaggagcctgaagcagtgcctgcaggcaatcccatggacaattcaggatacggatactaa

SEQ ID NO: 9603 - protein, 605 aa, Ricinus communis
MASTFTAMSSVGSLVAPNVDKKFASTSNRLSSFASISGSAFGRRQNVVLRRSRSPKICAMAKDLHFNKDGSAIKKLQTGVNKLADLVGVTLGPKGRNVVLESKYGSPKIVNDGVTVAKEVELEDPVENIGAKLVRQAAAKTNDLAGDGTTTSVVLAQGLIAEGVKVVAAGANPVLITRGIEKTSKALVTELKSMSKEVEDSELADVAAVSAGNNYEVGNMIAEAMSRVGRKGVVTLEEGKSAENSLYVVEGMQFDRGYISPYFVTDSEKMAVEYENCKLLLVDKKITNARDLINILEDAIRGGYPILVIAEDIEQEALATLVVNKLRGALKIAALKAPGFGERKSQYLDDIAILTGGTVVREEVGLSLDKVGKEILGNASKVVLTKDTTTIVGDGSTQEAVTKRVAQIRNLIEAAEQDYEKEKLNERIAKLSGGVAVIQVGAQTETELKEKKLRVEDALNATKAAVEEGIVVGGGCTLLRLASKVDAIKDSLDNDEEKVGADIVKRALSYPLKLIAKNAGVNGSVVSEKVLSSDNPRFGYNAATGNYEDLMAAGIIDPTKVVRCCLEHASSVAKTFLMSDCVVVEIKEPEAVPAGNPMDNSGYGY

SEQ ID NO: 9604 - DNA, 1722 bp, Ricinus communis
  CDS (1)..(1722)
atgtatagaatagcttcaagattagcttcatcctttggctcctccccttcgaagaaactggtttatggtcagcttatatgcagcagaagttatgtggctaaagatatcagttttggggttggggctcgtgcagctatgttgcagggaatcaatgaggttgcagaagctgtcaaagttacaatgggaccaaagggtcgcaatgttataatcgagaaaagtcatgggggtcccaaggtgacaaaggatggtgtcactgttgccaaaagcatcaagttcaaagaaaatgctaagaatattggtgcagaccttgtaaagcaggttgcaaatgctacaaataccgcagcaggagatggtacaacatgtgcaactgtcctgacccaggcaatactcacagagggttgcaagtctgttgctgctggtgttaatgttatggatttgcgaactggtattaatatggctattgatgctgtcgtttctgacttgaaaaagagcgcactaatgataagcacaccagaagaaatcacacaggtagccaccatctctgcaaatggtgaacgtgagattggagacctgatagcaagagcaatggaaaaagttgggaaggaaggagtcatcactgttgctgatgggaatactttggaaaatgagttggaagtagtggaaggaatgaaacttgccagaggttatatatctccttattttattactgatcagaagacccagaaatgtgaacttgaaaacccttttatcctcatttatgagaagaaaatttcagacatgaattcacttgtaagaatattggaactggcagtaaataaaaacagatcacttctagttgtggctgaggatgtggagagtgaatctctagctatgcttattctcaacaagcatcatgctggagttaaggtttgtgccattaaagctcctggttttggggaaaacagaaaagcaaatttggatgacctcgccattcttaccggtggagaggttatcagtgatgatcgtggtttgacattggacaaagtccaaattgaaatgcttggtactgctaagaaggttactgtttctcttgatgacacaatagttcttcatggtggtggggataagaaactgattgaagaaagatgtgaggagctgaggacagccatggataagagtactgccatgtttgacaaggaaaaagctcaggaacgactgtcaaaactgtctggtggagttgctgtattcaaggttgggggggttagtgaggcagaagtgggagagagaaaagatagggtaacagatgctttaaatgctaccagagcggctgtggaagagggaattgtgccaggtggtggtgttgcccttttgtatgccacaaaagccttagacgatcttcaagctcaaaatgaagaccagaaaagaggcatcgaaataattcagaatgctctcaaggcacctacgtctacaatagtatcaaacgctggatttaatgcgcctgtggttcttggcaaattgttggagcaagatgatcataatttgggttatgatgctgctaaaggtgagtttgttaacatggtccaggctggaatcatagatccccttaaagttatcaggacagcgctggtagatgctgccagtgtttcattgctattgacgacgacagaagcagctgtcatagataacccaaatgagaaaaaaccgccaagccgtatgccagacatggatgccatggactattag

SEQ ID NO: 9605 - protein, 573 aa, Ricinus communis
MYRIASRLASSFGSSPSKKLVYGQLICSRSYVAKDISFGVGARAAMLQGINEVAEAVKVTMGPKGRNVIIEKSHGGPKVTKDGVTVAKSIKFKENAKNIGADLVKQVANATNTAAGDGTTCATVLTQAILTEGCKSVAAGVNVMDLRTGINMAIDAVVSDLKKSALMISTPEEITQVATISANGEREIGDLIARAMEKVGKEGVITVADGNTLENELEVVEGMKLARGYISPYFITDQKTQKCELENPFILIYEKKISDMNSLVRILELAVNKNRSLLVVAEDVESESLAMLILNKHHAGVKVCAIKAPGFGENRKANLDDLAILTGGEVISDDRGLTLDKVQIEMLGTAKKVTVSLDDTIVLHGGGDKKLIEERCEELRTAMDKSTAMFDKEKAQERLSKLSGGVAVFKVGGVSEAEVGERKDRVTDALNATRAAVEEGIVPGGGVALLYATKALDDLQAQNEDQKRGIEIIQNALKAPTSTIVSNAGFNAPVVLGKLLEQDDHNLGYDAAKGEFVNMVQAGIIDPLKVIRTALVDAASVSLLLTTTEAAVIDNPNEKKPPSRMPDMDAMDY

SEQ ID NO: 9606 - DNA, 1671 bp, Ricinus communis
  CDS (1)..(1671)
atgtttaatggaaagaaaaggatagtaagtaaattggtagtaaaagcagggcccaaaaggatttgctttgacaaagaatgcagagaagctttgcaatctggaattgataagctagctgacgctgtttctgtcaccttaggacctagaggacgtaatgttgttctttctgattctaagacattaaaagtagtgaacgatggtgttacaatagctcgagccatagagctttcagatacaatggagaatgctggagcaatgctaatccaagaggttgcaaataaaatgaatgatttggctggtgatggtactacaactgcaatcattttggctcgtgcaatgatcaaaatgggcctgttagcagttgcttttggggccaaccctgtttctttaaggaaaggattagatatgactataaaagaattagttgaagtcttgaaggagaaaagtgtttcagtgacaggaagggataacataaaagcggttgcttccatctctgctgggaatgatgaatttgttgggaacttaattgcggagactattgacaagattggcaatgatggagtaatctcaattgaatcatcttcgacctctgaaacttatgtgatcatagaagaaggaatgaagattgataagggctacatgtctccccagttcataacaaaccaggaaaaatctctggtagagtttaacaatgccagggtactagtaactgatcaacggattgcaactgtcaaagaaatcgtccctttgttggaaaagactatgcaattgagtgtcccactgttaatctttgctgaggatatgtcaaagcaggtactggaaacactagtggtgaacaaaatgcaaggtttattgaatgttgctgttgtcaaatgccctggatttggagagggaaagaaggctttattgcaagacattgcccttatgacaggtgccgattttctttctggagattttggtctgactctcatgggcgcaacctcagatcaacttggcattgcacagaaagttaccataacaagtaactcaacaaccatagttgctgactcttctaccaaagccgaaattcaagctagaattcttcagatgaagaaggaccttgctgaaacagataataaatacttgtcaagaaagctctcagaaagaattgccaaattgtctggtggcgtggctctaatcaaggtaggagcgcatacagaaacagaacttgaagataggaaactcaggattgaggatgcaaagaatgcaacttatgctgccatggatgaagggatagtacctggtggtggtgctgcatatgtacatctctcagagcagatttccaccatacaggattcaatggaagatgaaaatgagcagattggtgctgacattgtggcaaaggcacttcttgtacctgcaaaaacaattgcaactaatgctggggttgatggagcagttgttgtggagaaaataagatcttcagactggagaatcggtttcaatgcaatgactggtgaatacgaagatcttttggacgcaggggtggtagatccttgtagggtttcacgatgtgcacttcagagtgctgcatcaattgctggactagttctaacaactcaagctatattggtggaaagaacaaagaagcctaagcccgctgttcctcatgttcctggaataacaccatag

SEQ ID NO: 9607 - protein, 556 aa, Ricinus communis
MFNGKKRIVSKLVVKAGPKRICFDKECREALQSGIDKLADAVSVTLGPRGRNVVLSDSKTLKVVNDGVTIARAIELSDTMENAGAMLIQEVANKMNDLAGDGTTTAIILARAMIKMGLLAVAFGANPVSLRKGLDMTIKELVEVLKEKSVSVTGRDNIKAVASISAGNDEFVGNLIAETIDKIGNDGVISIESSSTSETYVIIEEGMKIDKGYMSPQFITNQEKSLVEFNNARVLVTDQRIATVKEIVPLLEKTMQLSVPLLIFAEDMSKQVLETLVVNKMQGLLNVAVVKCPGFGEGKKALLQDIALMTGADFLSGDFGLTLMGATSDQLGIAQKVTITSNSTTIVADSSTKAEIQARILQMKKDLAETDNKYLSRKLSERIAKLSGGVALIKVGAHTETELEDRKLRIEDAKNATYAAMDEGIVPGGGAAYVHLSEQISTIQDSMEDENEQIGADIVAKALLVPAKTIATNAGVDGAVVVEKIRSSDWRIGFNAMTGEYEDLLDAGVVDPCRVSRCALQSAASIAGLVLTTQAILVERTKKPKPAVPHVPGITP

SEQ ID NO: 9608 - DNA, 1701 bp, Candida dubliniensis (strain CD36 / CBS 7987 / NCPF 3949 / NRRL Y-17841)
  CDS (1)..(1701): transl_table=12
atgttgagagttaattctaaatcatcaattaaaacatttgttcgtcatttatctcataaagaacttaaatttggcgttgaaggtagagctgccttattaaaaggggtcaacactttagctgatgctgtttctgttacattaggtccaaaaggtcgtaatgttttaattgaacaacaatttggtgctcctaaaatcaccaaagatggggttactgttgccaaagccattactttggaagataaatttgaagatttaggagctaaattattacaagaagttgcttctaaaaccaatgaaagtgctggtgatggtactacatcggccacggttttgggtagatcaattttcactgaatcagttaagaatgttgccgctggttgtaatcctatggatttaagaagaggttctcaagctgctgtagaagctgttattgaatttttacaaaaaaacaaaaaggaaattactacttctgaagaaattgctcaagttgccaccatttctgctaatggtgataaacatattggtgatttattagctaatgccatggaaaaagttggtaaagaaggggttatcactgttaaagaaggtaaaactttagaagatgaattagaagttactgaaggtatgaaatttgatcgtggattcatttccccatattttattaccaatactaaaactggtaaagttgaatttgaaaacccattgattttgttatcagaaaagaaaatttctagtattcaagacattttaccatctttggaactttccaatcaaactagaagaccattattaatcattgctgaagatgttgatggtgaagctttggctgcttgtattttgaacaaattaagaggtcaagttcaagtttgtgctgttaaagctccaggttttggtgacaatagaaaaaacactttgggtgatattgccattttaagtggtggtactgttttcactgaagaattggatattaaaccagaaaatgccactattgaacaattgggttctgctggtgccgttactattactaaagaagatactgtgttattaaacggtgaaggatctaaagaaaatttacaagctagatgtgaacaaattagaacagttattgctgatgttcataccactgaatatgaaaaggaaaaattacaagaaagattggctaaattatctggtggggttgctgttattaaagttggtggttcttctgaagttgaagttggtgaaaagaaagatcgttatgaagatgctcttaatgccactagagctgctgttgaagaaggtattttaccaggtggtggtactgctttaattaaagccaccaagattttggatgaagttaaagaaaaagccgttaattttgatcaaaaattaggagttgataccattagagctgccattaccaaaccagctaaaagaatcattgaaaatgctggtgaagaaggttcagttattgttggtaagatttacgatgatccagaatttaacagaggttatgattctcaaaaaggtgaattcaccgatatgattgctgctggtattattgatccatttaaagttgtcaagaatggattagtcgatgcttctggtgttgcttcattattggctactactgaatgtgccattgttgatgctccacaaccaaagggtcaaccagctgctccaccagctccaggtatgggaggtatgccaggtatgttttaa

SEQ ID NO: 9609 - protein, 566 aa, Candida dubliniensis (strain CD36 / CBS 7987 / NCPF 3949 / NRRL Y-17841)
MLRVNSKSSIKTFVRHLSHKELKFGVEGRAALLKGVNTLADAVSVTLGPKGRNVLIEQQFGAPKITKDGVTVAKAITLEDKFEDLGAKLLQEVASKTNESAGDGTTSATVLGRSIFTESVKNVAAGCNPMDLRRGSQAAVEAVIEFLQKNKKEITTSEEIAQVATISANGDKHIGDLLANAMEKVGKEGVITVKEGKTLEDELEVTEGMKFDRGFISPYFITNTKTGKVEFENPLILLSEKKISSIQDILPSLELSNQTRRPLLIIAEDVDGEALAACILNKLRGQVQVCAVKAPGFGDNRKNTLGDIAILSGGTVFTEELDIKPENATIEQLGSAGAVTITKEDTVLLNGEGSKENLQARCEQIRTVIADVHTTEYEKEKLQERLAKLSGGVAVIKVGGSSEVEVGEKKDRYEDALNATRAAVEEGILPGGGTALIKATKILDEVKEKAVNFDQKLGVDTIRAAITKPAKRIIENAGEEGSVIVGKIYDDPEFNRGYDSQKGEFTDMIAAGIIDPFKVVKNGLVDASGVASLLATTECAIVDAPQPKGQPAAPPAPGMGGMPGMF

SEQ ID NO: 9610 - DNA, 1731 bp, 'Nostoc azollae' 0708
  CDS (1)..(1731): transl_table=11
atggaagcgttagaaaaattaaacatggcgaaaattattgcatttgatgaagaatctcggcgggctttagaaaagggtattaacgctctgtccaacgcagtgaaaatcaccttggggccaaaaggtcgtaacgtcctgttagaaaaaaaatttggtatccctcaaattgtcaacgatggtatcaccgtcgccaaggagattgaattagaagatcctttagaaaatattggcgcaagattgatccaagaagtggtatccaaaactaaggatgtggctggagatggtactacaactgcgacagttttagcacaagccttggtacgagaaggactcaaaaacgtagcggcaggtacaaaccccattgcattaaagcggggtatagataaaacggttgaggcactgatagctgaaattgcccaagtagccaagccagtagaaggtagtgctatcgctcaagtagctactgtttccgctggtaacgatgaagaagtcggcaatatgctggcacaagcaatggaaaaagtcaccaaagatggtgtgatcaccgttgaagaatccaaatccctgaccaccgaattagaagtagtcgaagggatgcagattgaccggggttacatttctccctatttcatcaccaataacgaccggatgacggtggaatttgaaaacgcccgcatcctaattacagacaaaaaaatcaccgccattcaggatttagtacctgtactggaaaaagttgcccctttaggtcagcctttgttaattattgctgaagatttagaaggtgatgctttagcaaccttagtacttaacaaagcacggggcgttttagccgttgcagccattaaagcccctggttttggcgaacgtcgcaaagccttattacaagatattgccattctcaccgatggccagatgatttctgaagaaatcggcttgagcttggatacagctactgtggaaatgttgggtacagcccggaaagtcaccattgacaaagaaagtaccaccattgtctctggcacttctaccaaactagaagtacagaagcgaatcgcccaaattcgcaaacagttgcaagaaacagattccgactacgattctcaaaaactccaagaacgcattgccaaactggctggtggtgtagcagtaattaaagtgggagcagctacagaaaccgaactcaaagaccgtaaactgcgcattgaagatgctctcaacgctaccaaagcggcagtagaagaaggtattgttcctggtggtggtacaaccttaattcacctggctacaaaaatagatgcaattaaaaatagcctcaacgctgaagaaaaaattggcgctgagattgtgcaaagagcattagaagaacctttaaagcaaattgcagacaatgctggtgctgaaggttccgtcattgtttgtagagttaaagaaaccgatattaacatcggttacaacgctgctactggagaattcgaagacttaatcgccgcaggtattatcgaccctgctaaagttgtccgttctgcattacaaaacgccgcttctatcgcgggtatggttttaaccaccgaagcgatcgttgttgaaaagcctgaaaagaaagctgctgctcctgaccctggtatgagtggtatgggtggtatgggtggtatgagtggtatgggtggtatgggtggtatgggtggtatgggtggtatgggtggtatgggtggtatgggtatgttctaa

SEQ ID NO: 9611 - protein, 576 aa, 'Nostoc azollae' 0708
MEALEKLNMAKIIAFDEESRRALEKGINALSNAVKITLGPKGRNVLLEKKFGIPQIVNDGITVAKEIELEDPLENIGARLIQEVVSKTKDVAGDGTTTATVLAQALVREGLKNVAAGTNPIALKRGIDKTVEALIAEIAQVAKPVEGSAIAQVATVSAGNDEEVGNMLAQAMEKVTKDGVITVEESKSLTTELEVVEGMQIDRGYISPYFITNNDRMTVEFENARILITDKKITAIQDLVPVLEKVAPLGQPLLIIAEDLEGDALATLVLNKARGVLAVAAIKAPGFGERRKALLQDIAILTDGQMISEEIGLSLDTATVEMLGTARKVTIDKESTTIVSGTSTKLEVQKRIAQIRKQLQETDSDYDSQKLQERIAKLAGGVAVIKVGAATETELKDRKLRIEDALNATKAAVEEGIVPGGGTTLIHLATKIDAIKNSLNAEEKIGAEIVQRALEEPLKQIADNAGAEGSVIVCRVKETDINIGYNAATGEFEDLIAAGIIDPAKVVRSALQNAASIAGMVLTTEAIVVEKPEKKAAAPDPGMSGMGGMGGMSGMGGMGGMGGMGGMGGMGGMGMF

SEQ ID NO: 9612 - DNA, 1632 bp, 'Nostoc azollae' 0708
  CDS (1)..(1632): transl_table=11
atggcaaagcgcattatttacaacgaaaacgcccgtcgcgcccttgagcgtggtattgatattctggctgaagctgttgctgtcacccttggaccaaaaggtcgtaacgtagttctagagaaaaaatttggcgcaccacaaatcgttaatgatggtgtaactattgctaaagaaattgaattagaagaccatattgaaaacactggcgtggctttaattcgtcaagctgcttctaaaactaacgatgctgctggtgatggtacaaccaccgctaccgttttagctcacgccattgttaaagaaggcttgcggaacgtggctgctggtgctaatgcaattctgttgaagcgcggtattgataaagctactgctttcttagttgaaaaaattgctgaacacgctcgtcctgtagaagattctaaagcgatcgcacaagttgcggcaatttctgctggtaacgacgaagaagttggtagcatgattgctcaagctatggacaaggtgggtaaagaaggcgtaatttccctggaagaagggaagtctatgaccaccgaactcgaagtcactgaagggatgcgctttgataaagggtatatctctccttactttgcaactgatgcagagcggatggaaaccgtgtttgatgagccttacattttgttaaccgacaagaaaatcgctttagtacaagatttagtacctgtacttgagcaagtagctcgttccggtcgtcctttggtgattatcgctgaagatatcgaaaaagaagctttggctactttggtagttaaccgtttgcgcggtgtactcaacgttgcggctgttaaagctcctggttttggcgatcgccgtaaggctatgctagaagatatcgctgtcttaactggtggtcaactcatcactgaagacgctggtttgaagctagatactaccaagctggatagcctgggtaaagctcgccgcatcactatcaccaaagacaacaccacaattgttgctgaaggtaacgatgttgcagttaaggctcgttgcgaacaaatccgccatctgatggaagaaacagaatcttcctacgacaaggaaaaactccaagagcgtttggctaaattgtcaggtggtgtagctgtagttaaagttggtgcagctaccgaaaccgaaatgaaggacaagaaactacgcttggaagacgctatcaacgctaccaaggctgctgtagaagaaggtattgttcccggtggtggtacaaccttggctcaccttacaccccagttagaaacttgggctaacagcaacctcaagaatgaagagttaactggtgctttaatcgttgctcgtgctttacctgctcctctgaagaggatagcagaaaacgctggtcaaaacggcgctgtaattgcagaaagagtaaaagagaaagatttcaacattggtttcaacgcttccaccaacgaatttgttgatatgttggctgctggtattgttgatcccgcaaaggtaactcgttctgcactgcaaaacgcagcttctatcgctggtatggtgttgacaaccgaatgtattgttgttgacaagccagaacctaaagatgctgctcctgctgctggtgctggtggtggagattttgattactaa

SEQ ID NO: 9613 - protein, 543 aa, 'Nostoc azollae' 0708
MAKRIIYNENARRALERGIDILAEAVAVTLGPKGRNVVLEKKFGAPQIVNDGVTIAKEIELEDHIENTGVALIRQAASKTNDAAGDGTTTATVLAHAIVKEGLRNVAAGANAILLKRGIDKATAFLVEKIAEHARPVEDSKAIAQVAAISAGNDEEVGSMIAQAMDKVGKEGVISLEEGKSMTTELEVTEGMRFDKGYISPYFATDAERMETVFDEPYILLTDKKIALVQDLVPVLEQVARSGRPLVIIAEDIEKEALATLVVNRLRGVLNVAAVKAPGFGDRRKAMLEDIAVLTGGQLITEDAGLKLDTTKLDSLGKARRITITKDNTTIVAEGNDVAVKARCEQIRHLMEETESSYDKEKLQERLAKLSGGVAVVKVGAATETEMKDKKLRLEDAINATKAAVEEGIVPGGGTTLAHLTPQLETWANSNLKNEELTGALIVARALPAPLKRIAENAGQNGAVIAERVKEKDFNIGFNASTNEFVDMLAAGIVDPAKVTRSALQNAASIAGMVLTTECIVVDKPEPKDAAPAAGAGGGDFDY

SEQ ID NO: 9614 - DNA, 1710 bp, Dicyema japonicum
  CDS (1)..(1710)
atgttttgtcattttgtcaatttaaataaaaaagtcagcacaatctctgcaaccagatatctctcaaaagaaattaggtttggggaggatgctagaaattccatcatgaagggaattgacattttggcaaatgcagttgcagttacaatgggtcctaagggtcgaaatgtgattattgaacaaagttggggtgctcccaaaataactaaagatggagtcactgtcgcaaaatctatcgacttgaaagataaatatgaatcgattggagctaagttggtccaaaatgttgcggagaaagcgaatctggaagccggtgacggcacaactgctgcgacagtcctagcacgtggtatcgctaggatgggcctcaaatatattgacagtggttccaatcctattgagataagaaaaggtgttatgctggcagtgaatgctgttgtagagggaattcagaaaaagtcaacaatattgaagacagagcaggaaataatccaagtagccacaatctcagccaatggggacgctaaaatcggaagtctaataaacgaagccatgaataaagtgggaaagaatggagtgataactgttaaagacgggaagactttgaatgatgagcttgaacatattgaggggatgaaatttgatagagggtatgtctcaccatattttatgaattcatctaagggttccaaatgtgagtttcaggattgtatgattttgctgtccgaaaagaagatttcaaatgctcagcaaattatcccagccttggagttgtgcaattcacagagaaagcctcttttgattattgctgaggatattgatggagaggctttgactgctcttgtcttgaatcgggttgaaggtgggattacaggtatgtgctgtgaagtctcctggtttcgtgataatcggaagaatatgatgttggatattgctgtgtctaccggtggaactcttctcggagacgacaatgactttaataaagtggaagatgtaaaatttgaacagttgggaagagttggagaggttgttgtcactaaggatgattgtctccttttgaggggaaaggggaatgccgatgatattgagaggagagttaatggcattaaggatgaaattgaagactcaaattcagaatatgagcaagagaagttaaaagagagattggccaagttaactatgggagtatccatcattaaagttggtggaagcaacgaacttgaagttggagagaaaaaggatcgttataatgatgcacttaatgccacaaaggcagctgtggaggaaggagttctccctggtggtggagtgtctcttataagagtttcctcagtgttgaatacattaaaaccggataatcaagatcaggcatatggaattgaaattataagaaattcattggatatccctgctcttacgatagcgtcaaatgctggtgtgaaagctaaggaaatcgtaaaaaaattgaaggagaacaatgagtggacatacggatatgatgcccagcgtgatgtcttcaccaatatgtttgacgctggaattcttgatcctacaaaggttgtaaggacaagtttgcttgatgctgctggcttagcttcaatgctttcaactgcagaggctgttgttgttgatttgccgaaagacgataaagaggatgcttctggtggaatgggaggatcaatgggaatgccaggcatgggtggatattaa

SEQ ID NO: 9615 - protein, 569 aa, Dicyema japonicum
MFCHFVNLNKKVSTISATRYLSKEIRFGEDARNSIMKGIDILANAVAVTMGPKGRNVIIEQSWGAPKITKDGVTVAKSIDLKDKYESIGAKLVQNVAEKANLEAGDGTTAATVLARGIARMGLKYIDSGSNPIEIRKGVMLAVNAVVEGIQKKSTILKTEQEIIQVATISANGDAKIGSLINEAMNKVGKNGVITVKDGKTLNDELEHIEGMKFDRGYVSPYFMNSSKGSKCEFQDCMILLSEKKISNAQQIIPALELCNSQRKPLLIIAEDIDGEALTALVLNRVEGGITGMCCEVSWFRDNRKNMMLDIAVSTGGTLLGDDNDFNKVEDVKFEQLGRVGEVVVTKDDCLLLRGKGNADDIERRVNGIKDEIEDSNSEYEQEKLKERLAKLTMGVSIIKVGGSNELEVGEKKDRYNDALNATKAAVEEGVLPGGGVSLIRVSSVLNTLKPDNQDQAYGIEIIRNSLDIPALTIASNAGVKAKEIVKKLKENNEWTYGYDAQRDVFTNMFDAGILDPTKVVRTSLLDAAGLASMLSTAEAVVVDLPKDDKEDASGGMGGSMGMPGMGGY

SEQ ID NO: 9616 - DNA, 1644 bp, Eikenella corrodens ATCC 23834
  CDS (1)..(1644): transl_table=11
atggcagcaaaagatgtacagtttggcaatgaagtccgccagaagatggtaaacggcgtaaacgttttgtccaacgccgtgaaagtaaccctcggcccgaaaggccgcaatgtggtgctcgaccgttctttcggcggcccgcacatcaccaaagacggcgtgaccgtggccaaagaaatcgaactgaaagacaagtttgaaaacatgggcgcgcagatggtgaaagaagttgcctccaaaaccaacgacgtagccggcgacggtaccaccaccgctactgtgttggcacaagccatcgtggccgaaggcatgaaatacgttaccgcaggcatgaacccgaccgacctgaaacgcggtatcgacaaagccgtttccgctctggtaaaagagttgcagaatattgccaagcccgtgccggagaaatctaaggaaatcgcccaagtggcctctatttctgctaactccgacgaatccatcggcaacatcatcgctcaagctatgaacgaagtgggcaaagaaggcgtgatcaccgtagaagacggcaaatcgctggaaaacgaagtggaagtcgtgaaaggtatgcagttcgaccgcggctacctctccccctatttcgtcaacaacccagaaaaacaactggccgaactagacagcccgtttgttctgctgtttgacaaaaaaatcagcaatatccgcgatctgctgcccgtgttggagcaagtagccaaaaccagccgcccgctgttgattattgctgaagacgtggaaggcgaagccttggccacgctggtagtgaacaatattcgcggcatcctgaaaactgtggccgtgaaagctcctggcttcggcgaccgccgcaaagccatgttgcaagacatcgccatcctcaccggcggcactgtaatcgccgaagaagtgggcttgtctttggaaaaagccacactggaagatttgggccaggccaaacgcatcgaagtgggcaaagaaaacaccaccatcatcgatggtttgggcgacaaatccgccgtagaagcccgcgtggccgaaatccgcacccagattgaaactgccaccagcgagtacgataaggaaaaactgcaagagcgcgtggccaaactggccggcggtgtggctgtaatcaaagtgggcgcagccaccgaagtggaaatgaaagagaagaaagaccgtgtggatgacgcgctgcacgccacccgtgccgctgtagaagaaggcgtggtagccggcggcggcgtagccctactgcgtgcccgctctgccctgagcaaagtagaaactgccaatgccgaccaagaagccggcgtgcaaatcgtattgcgtgcggtggagtctccgctgcgccaaatcgtggccaacgccggcggcgagccaagcgtggtggtgaacaaagtgctggaaggcaacggcaacttcggctacaacgccggcaacgacagctacggcgacatgctggaaatgggcgtaatcgatccggccaaagttacccgcttcgcgctgcaaaacgccgcttccatcgccggcctgatgctgactaccgaatgcatggtagccgacattccggaagacaaacccgccgttcccgacatgggcggaatgggaggcatgggcggaatgggcatgatgtaa

SEQ ID NO: 9617 - protein, 547 aa, Eikenella corrodens ATCC 23834
MAAKDVQFGNEVRQKMVNGVNVLSNAVKVTLGPKGRNVVLDRSFGGPHITKDGVTVAKEIELKDKFENMGAQMVKEVASKTNDVAGDGTTTATVLAQAIVAEGMKYVTAGMNPTDLKRGIDKAVSALVKELQNIAKPVPEKSKEIAQVASISANSDESIGNIIAQAMNEVGKEGVITVEDGKSLENEVEVVKGMQFDRGYLSPYFVNNPEKQLAELDSPFVLLFDKKISNIRDLLPVLEQVAKTSRPLLIIAEDVEGEALATLVVNNIRGILKTVAVKAPGFGDRRKAMLQDIAILTGGTVIAEEVGLSLEKATLEDLGQAKRIEVGKENTTIIDGLGDKSAVEARVAEIRTQIETATSEYDKEKLQERVAKLAGGVAVIKVGAATEVEMKEKKDRVDDALHATRAAVEEGVVAGGGVALLRARSALSKVETANADQEAGVQIVLRAVESPLRQIVANAGGEPSVVVNKVLEGNGNFGYNAGNDSYGDMLEMGVIDPAKVTRFALQNAASIAGLMLTTECMVADIPEDKPAVPDMGGMGGMGGMGMM

SEQ ID NO: 9618 - DNA, 1635 bp, Neisseria lactamica ATCC 23970
  CDS (1)..(1635): transl_table=11
atggcagcaaaagacgtacagttcggcaatgaagtccgccaaaaaatggtaaacggcgtgaacattctggcaaacgccgtgcgcgtaaccttgggccccaaaggccgcaacgtggtggttgaccgcgctttcggcggcccgcacatcaccaaagacggcgttaccgtcgccaaagaaatcgaactgaaagacaagtttgaaaatatgggcgcgcaaatggtgaaagaagtcgcatccaaaaccaacgacgtagcgggcgacggtacgactaccgccaccgtattggcgcaatccatcgttgccgaaggtatgaaatacgtgaccgccggtatgaacccgaccgacctgaaacgcggtatcgacaaagccgtcgccgctttggttgacgagctgaaaaacatcgccaaaccttgcgacacttccaaagaaatcgcccaagtcggctcgatttccgccaactctgacgaacaagtcggcgcgattatcgccgaagcgatggaaaaagtcggcaaagaaggcgtgattaccgttgaagacggcaaatctttggaaaacgagctggacgtggttgaaggtatgcagttcgaccgcggctacctgtccccttacttcatcaacgacgctgaaaaacaaatcgctgctttggacagcccgtttgttttgctgttcgacaagaaaatcagcaacatccgcgacttgctgcctgttttggaacaagtggcaaaagccagccgtccgctgttgattatcgctgaagacgtagaaggcgaagccttggcgactttggtggtgaacaacatccgcggcattctgaaaaccgttgccgttaaagccccgggcttcggcgaccgccgcaaagcgatgctgcaagacatcgccatcctgaccggcggcacagtgatttccgaagaagtcggcctgtctttggaaaaagccactttggaagacttgggtcaggccaaacgcatcgaaatcggtaaagaaaacaccaccatcatcgacggcttcggcgaggcagcccaaatcgaagcgcgtgttgccgaaatccgccaacaaatcgaaaccgcaaccagcgattacgacaaagaaaaactgcaagagcgcgttgccaagctggcaggcggcgtggcagtcatcaaagtcggtgctgctaccgaagtcgaaatgaaagagaaaaaagaccgcgtggaagacgcgctgcacgctacccgcgcagccgttgaagaaggcgtggttgcaggcggcggcgtagccctgttgcgcgcccgtgccgctttggaaaacctgcacaccggcaatgccgaccaagacgcaggcgtacaaatcgtattgcgcgccgttgagtctccgctgcgccaaatcgttgccaacgcaggcggcgaacctagcgtggttgtgaacaaagtgttggaaggcaaaggcaactacggttacaacgctggcagcggcgagtacggcgatatgatcgaaatgggcgtactcgaccccgccaaagtaacccgctccgcgctgcaacacgccgcgtctatcgccggcctgatgctgacgaccgactgtatgattgccgaaatccctgaagacaaaccggctatgcccgatatgggcggcatgggcggtatgggcggcatgatgtaa

SEQ ID NO: 9619 - protein, 544 aa, Neisseria lactamica ATCC 23970
MAAKDVQFGNEVRQKMVNGVNILANAVRVTLGPKGRNVVVDRAFGGPHITKDGVTVAKEIELKDKFENMGAQMVKEVASKTNDVAGDGTTTATVLAQSIVAEGMKYVTAGMNPTDLKRGIDKAVAALVDELKNIAKPCDTSKEIAQVGSISANSDEQVGAIIAEAMEKVGKEGVITVEDGKSLENELDVVEGMQFDRGYLSPYFINDAEKQIAALDSPFVLLFDKKISNIRDLLPVLEQVAKASRPLLIIAEDVEGEALATLVVNNIRGILKTVAVKAPGFGDRRKAMLQDIAILTGGTVISEEVGLSLEKATLEDLGQAKRIEIGKENTTIIDGFGEAAQIEARVAEIRQQIETATSDYDKEKLQERVAKLAGGVAVIKVGAATEVEMKEKKDRVEDALHATRAAVEEGVVAGGGVALLRARAALENLHTGNADQDAGVQIVLRAVESPLRQIVANAGGEPSVVVNKVLEGKGNYGYNAGSGEYGDMIEMGVLDPAKVTRSALQHAASIAGLMLTTDCMIAEIPEDKPAMPDMGGMGGMGGMM

SEQ ID NO: 9620 - DNA, 1743 bp, Zea mays
  CDS (1)..(1743)
atgtaccgggcggcggctgtcatctcgaggtcctcatcagcactgcggaggcagctcgcgcggggcgtggccggggagctgccgcgtctgttggcgcgagggtatgcggccacggcgaaggaggtgtccttcggcgttggcgcccgcgccgccatgctgcagggcgtcaacgacctcgccgacgccgtcaaggtcaccatgggccccaaggggcgcactgtgatcatcgaggggtcccataaaggtcccaaggtcacgaaggacggggtcactgttgcaaaaagcgtggagttcgaggatagcgcgaagaatgttggggcgaatctggtgaagcaagttgctgatgctacgaacaaagctgcaggggatggtaccacctgtgcaactgtgcttacacaggcaattcttactgaaggatgcaaggccgtggcagccggtgtcaacgttatggacttgcggaatggtataaacaaggcaataaatgctatcactgctcacctcaaaagtaaagcgtggaagattaattctccagaagaaattaaccaggtagcaaccatttctgcaaacggtgaaaaggaaattggagatctaatatcaaaagctatggaaaaagttggaaaggatggagtcattactattgttgatggcaaaacattggacaatgagcttgaagcagtacagggaatgaagctgtccagaggatacatatctccttactttgtgactgatcaaaagactcagaaatgtgagatggagaaccctcttattcttatccatgacaagaaaatctcaaacatggattctctccttccagcattagaaatttctatcaagaatcgcaagcctcttctcattgttgctgaggatgttgaaggagatgctctgtcaatgcttgtactgaacaagcatcgtgctggactcaaggtatgtgctgtcaaagctcctggatttggtgaaaatagaaggcacaatctagatgacatggctgtgatgactggaggagaggttattagcgaggaacgcggtcttgatcttggcaaagttcaattacaaatgcttggcactgctaaaaaggtaactgtatcccttgatgatactatcatcctagatggtggaggtgacaaacagcagatagatgagaggtgccaacagcttagagaatcaattgacacaagcactgctgtattcgacaaagaaaaggcccaagagcgtttatctaagttatctggaggtgttgctgtactcaagattggtggagctagtgaagctgaagttggtgagaaaaaagatagggtgacagatgctctaaatgctgcaagggctgctgtggaggagggcattgtgccaggtggtggagttgcccttctttatgccaccaaggagcttgacaagattagcacagcaaacgaggacgaaaagattggagttcaaattatcaagaattctttgaaggctcccttgatgaccatagctgcaaatgctggcattgatggagctatagtcatagggaagctgattgaacaagaggacctcagtttgggctatgatgcagcaaaaggggagtacgtagacatgatcaaggccggcatcatcgatcccgtgaaggtgatccgcaccgcacttcaagacgctgcaagtgtttccctgctgatggcaaccacggaggccgctgtctccgagctcccggcaaccaagtccagaatagccagccgtatgccgcagatgagcgggatggacttctga

SEQ ID NO: 9621 - protein, 580 aa, Zea mays
MYRAAAVISRSSSALRRQLARGVAGELPRLLARGYAATAKEVSFGVGARAAMLQGVNDLADAVKVTMGPKGRTVIIEGSHKGPKVTKDGVTVAKSVEFEDSAKNVGANLVKQVADATNKAAGDGTTCATVLTQAILTEGCKAVAAGVNVMDLRNGINKAINAITAHLKSKAWKINSPEEINQVATISANGEKEIGDLISKAMEKVGKDGVITIVDGKTLDNELEAVQGMKLSRGYISPYFVTDQKTQKCEMENPLILIHDKKISNMDSLLPALEISIKNRKPLLIVAEDVEGDALSMLVLNKHRAGLKVCAVKAPGFGENRRHNLDDMAVMTGGEVISEERGLDLGKVQLQMLGTAKKVTVSLDDTIILDGGGDKQQIDERCQQLRESIDTSTAVFDKEKAQERLSKLSGGVAVLKIGGASEAEVGEKKDRVTDALNAARAAVEEGIVPGGGVALLYATKELDKISTANEDEKIGVQIIKNSLKAPLMTIAANAGIDGAIVIGKLIEQEDLSLGYDAAKGEYVDMIKAGIIDPVKVIRTALQDAASVSLLMATTEAAVSELPATKSRIASRMPQMSGMDF

SEQ ID NO: 9622 - DNA, 2474 bp, Strongyloides ratti
  CDS (780)..(2474)
ttagttagtgagtttggcgatgagatctgactcacgatagatgaaatattctgtatcatccataacaactttatttccaccatactctggcaacataacacgatctccaacactaactgataaaggtataagtttaccatcctcagtacgaagtcctggaccagcagcaacaacagtaccttcaagaacctttccttgggctttctctggaatgtaaatacctcctttagattttacttcagcagcagcttttttgatcataacacgatcaaaaagtggttgaacatttttaagagctgatgactaaaaagaaatataattttatatagaaataaaataacctacacatctacgaacagcggaaagaagcatatttaccaaaattacaagaacctgcaattagttaaaaaataatttaaaattaaaataatctctaagttatatggacgagccgcagattaccatcataacttaaaagtcattctagaacattctgcaacaagatcgtctctactatcgttgtaggagcaatttattaatttgtagattttttttaaagaaatttcgcgaaaattcctatattaatatttcgcaatagtgcagcaagaaatgtttattctattccaatttattttaatttaaagtatatctttaatactttcgttataaaaattagttttcagtttttaaaaattataatttttttgaaaattttttcaattaaaagtttgtttaatatttaaatttttaggaatatattaacagtacaactttaaaaaatgcttcgtcttgctgctcataatttttctaaatctattatcagatcatatgctaaagatcttaaatttggagctgatggaagaaaggccatgcttgttggagtagatcttttagctgacgctgtatctgttacaatgggaccaaaaggaagaaatgttattattgaacaaagttttggtggaccaaaaattacaaaagacggtgttaccgttgctaaggctattgatctcgaagataaatatcaaaatatgggtgcaaaattggttcaagatgttgcagataaggctaacgaacaagctggtgacggaacaacttgcgctactgttcttgccagagctattgctaaagaaggatttgaaagtattagccgtggtgctaatccaattgaagttagaaaaggtgtcatgtcatccgttgaagctattgttgaagagttaaagaagatgtcaaagcaagttacaactccagaagaaattgctcaagttgctactatttctgctaatggagataaagatatcggaaaattgatatctgaagctatgaaaaaagttggaaataaaggtgtcattaccgttaaggatggaaaaactcttgacgatgaattagaaattattgaaggaatgaaatttgaccgtggatatatttctccatatttcatgaatacttccaagggtggaaaatgtttctttgaaaaatgtttagtccttctttctgagaaaaaaatttcccaagttcaagatattgttccagctcttgaattagcaaataaatatcgtcaaccacttattattattgctgaagatgtcgatggtgaagctcttacaaccctcgttcttaacagattaaaggttggtcttcaagtttgtgctgtaaaagctcctggttttggagacaaccgcaaaaacacattgaaagatattgccattgctacaggagctaaagtctttggagatgaatctaatttacacaaacttgaagatattcaagcaggtgactttggtgaagttgctgaagttacagttacaaaagatgatactcttatgcttaatggaaaaggtgatgctgaacaagttgagaagagaattcaacaaattgaatttgagattgaacaatctacttctgagtatgaaaaagaaaaacttaatgaacgtttagctaaattatcaaaaggtgttgctgtccttaaaattggaggtgcttctgaagttgaagttagtgaaaagagagatcgtgtcacagatgcgctctgtgcaacacgtgctgctgtagaagaaggaatcgtaccaggaggtggtgttgctcttcttcgtgctgtcaaagttcttgataacatcaaagtcggtaattctgaccaagaattgggagttagaattgtccaaaaagccgttcgtcaaccaatttctaccattattaagaatgctggacttgaaccagctagtatcgttgaaaaagtttatgcaaatgaatcagtcagtttcggttacgatgctttgaatgataagtttgttgatatgatccaaactggtattattgatccaaccaaagttgtccgtacatcacttcaagacgctgctggtgttgcttcacttttagccactactgaatgtgttgttacagaagttccaaaagaaactccagcacctccaatgggtggtatgggaggtatgggcggaatgggtggtggaatgttctaa

SEQ ID NO: 9623 - protein, 564 aa, Strongyloides ratti
MLRLAAHNFSKSIIRSYAKDLKFGADGRKAMLVGVDLLADAVSVTMGPKGRNVIIEQSFGGPKITKDGVTVAKAIDLEDKYQNMGAKLVQDVADKANEQAGDGTTCATVLARAIAKEGFESISRGANPIEVRKGVMSSVEAIVEELKKMSKQVTTPEEIAQVATISANGDKDIGKLISEAMKKVGNKGVITVKDGKTLDDELEIIEGMKFDRGYISPYFMNTSKGGKCFFEKCLVLLSEKKISQVQDIVPALELANKYRQPLIIIAEDVDGEALTTLVLNRLKVGLQVCAVKAPGFGDNRKNTLKDIAIATGAKVFGDESNLHKLEDIQAGDFGEVAEVTVTKDDTLMLNGKGDAEQVEKRIQQIEFEIEQSTSEYEKEKLNERLAKLSKGVAVLKIGGASEVEVSEKRDRVTDALCATRAAVEEGIVPGGGVALLRAVKVLDNIKVGNSDQELGVRIVQKAVRQPISTIIKNAGLEPASIVEKVYANESVSFGYDALNDKFVDMIQTGIIDPTKVVRTSLQDAAGVASLLATTECVVTEVPKETPAPPMGGMGGMGGMGGGMF

SEQ ID NO: 9624 - DNA, 2305 bp, Litopenaeus vannamei
  CDS (92)..(1828)
tcaacgcagagtacgcagggattctagacgccgtgagaccgcctgagagatctgtcgagtgtctctctcacactgaaaccttcccacaaaaatgcatcgcgcagcctccttattgcgaactcccgtcgcacgccaggccacgaggcactacctggcgagacactatgccaaggacgtcaagtttggcaccgaggtccgggcgctgatgctgcagggcgtcgacgtactcaccgacgccgtggcagtgaccatgggccccaagggtcgaaatgtaatcatcgagcagagctggggcagtcccaagatcaccaaggatggggttacagttgcgaaggctgttgaactgaaggacaagtcccagaacattggagccaagttggtccaagatgttgccaacaacaccaacgaagaggctggtgatggtaccaccacagccacagtcctggctcgcactattgcaaaggaaggttttgacaggattagcaaaggtgctaaccctgtggagatcaggcgtggagttatgttggctgtggatgccattgttgctcatctgaagactctgtcaaagcccgtgaccactcctgctgagattgctcaggttgcaaccatctctgctaatggagacattgaagttggcagtcttatctccgcagccatggagaaggttggccgtgagggtgtcatcacggtcaaggatggcaagaccttgaaggatgagttggaggtcattgaaggtatgaagttcgatcgtggttatatctctccgtacttcatcaactccagcaagggagctaaggttgaatatcaaggctgcctggttctgctctcagagaagaaaatttcttctatccagtccattatcccagtgctagaactggccaatgcccagaggaagcctcttttgatcattgctgaggacattgttggagaagccttgagcacacttgtggttaaccgtttgaagattggcctccaggttgctgctgtaaaagctccaggctttggggataaccgcaagaacacacttcatgatattgccattgcaactggtgctgttgtcttcaatgatgaagcaagcatggtgaagattgaagatgttcaggtccatgaccttggccaagtcggagaagtgcagatcacaaaggatgatacacttctgctgaagggcaagggtaattctagtgatatccagcgtcgtgtagatcaaatcaaggaccagattgccgatagttcctccgagtatgagaaggaaaaaatgcaggagcgtatggctcgcctggcctcgggtgtggcagtggtgaaggttggaggttcttctgaggttgaggtgaacgagaagaaggatcgtgtaaatgatgctttgtgtgcaacaagagctgcggttgaagagggcatagttccaggtggaggagttgccttgattcgatgccttcctgccttggatactatcactccaagcaatgaagaccagaaggttggcattgaaattgtccgcaaggctatccagactccatgccacaccattgccagcaatgccggtgttaatgcatcagttattgtcaacaaggtcatggaagcgtctggagatgttggatatgatgctgctacaggaacctttgtcaaccttgtcgaagcaggaatcattgatcccaccaaggttgttcgcacagccctaaccgatgctgcaggagtggcttccctcctcaccacagccgagagtgttattacagagatccccaaggaagaaccggctggtatgggcggcatgggtggtatgggaggcatgggtggtatgggcggaatgggaggcatgggcggcatgatgtaaagcttctcatggataggctaggaagaaactctttaatttgtaaacttaacatttttttatgtacaaagttactttgtttcgacaagaggtacaaaaagtacatagatgccacagaactatgtctagtttacaagaaaagaaatatgtgggaggaaatcttcagtgtatttgaagtaacccaaggacagtctcaatgaggaaagggacatgcaaaacatgaagtttgcacaagtcaaaggaattgttaaccattccaaagaagtacctcggcatccagaatgtggtccattaatttcatcttaatcatcttcatcttgaatgtattgaagggtatatgtgcttcaccttagtgtaaatgttgaatgtttgtacaaagtgtagataagagaatgtgtagataattttgttataagggaagatttgttatttccctaaatgaaatgagatttcgaaaaaaaaaaaaaaaaaaaaaaaaaa

SEQ ID NO: 9625 - protein, 578 aa, Litopenaeus vannamei
MHRAASLLRTPVARQATRHYLARHYAKDVKFGTEVRALMLQGVDVLTDAVAVTMGPKGRNVIIEQSWGSPKITKDGVTVAKAVELKDKSQNIGAKLVQDVANNTNEEAGDGTTTATVLARTIAKEGFDRISKGANPVEIRRGVMLAVDAIVAHLKTLSKPVTTPAEIAQVATISANGDIEVGSLISAAMEKVGREGVITVKDGKTLKDELEVIEGMKFDRGYISPYFINSSKGAKVEYQGCLVLLSEKKISSIQSIIPVLELANAQRKPLLIIAEDIVGEALSTLVVNRLKIGLQVAAVKAPGFGDNRKNTLHDIAIATGAVVFNDEASMVKIEDVQVHDLGQVGEVQITKDDTLLLKGKGNSSDIQRRVDQIKDQIADSSSEYEKEKMQERMARLASGVAVVKVGGSSEVEVNEKKDRVNDALCATRAAVEEGIVPGGGVALIRCLPALDTITPSNEDQKVGIEIVRKAIQTPCHTIASNAGVNASVIVNKVMEASGDVGYDAATGTFVNLVEAGIIDPTKVVRTALTDAAGVASLLTTAESVITEIPKEEPAGMGGMGGMGGMGGMGGMGGMGGMM

SEQ ID NO: 9626 - DNA, 1740 bp, Zea mays
  CDS (1)..(1740)
atggcctcgacgttcggtgccacttctacagttggccttatggctgctccaacggggaagaatgtgcgccttcagaggagggctaacttcagagtaaaagcggctaaggagctgtacttcaacaaggatgggtcagctatcaagaagctccagactggagtcaataagcttgcagacctagttggagttacactcggaccgaagggaaggaatgtcgttttggagagcaagtacggctctcccaagattgttaacgatggcgttacagttgcaagagaggttgagctggaggaccctgtggaaaacattggagctaaattggtcaggcaagctgcagctaagaccaacgatcttgctggagatgggacaaccacctctgtggtccttgctcaggggctgattgctgagggtgttaaggtcgtagcagctggtgctaatcctgttcagattactcgtggtattgagaaaacagctaaagcactagttgaagaactacggaagttgtctaaggaggttgaagatagtgagcttgcagatgttgctgcagttagtgctggcaacaactatgaaattggtaacatgatagcagaggccatgagcaaggtcggtcggaagggcgttgtcacccttgaagaggggaagagttctgagaactttctctatgttgtggagggaatgcaatttgaccgtggttacatctctccgtactttgtaacagacagtgagaaaatgactgcagagtacgagaactgcaagctgcttttggttgataagaaaatcaccaatgcaagggatcttatcaacgttttggaagaagccatcagaggtgcatacccaatcctgataattgcagaggatattgagcaggaggctcttgctacccttgtcgtcaacaagctcagaggatcactgaagatcgctgccatcaaagcccctggttttggagagcgcaagactcagtacttggatgatattgccatccttactggagcaactgtaatcagagatgaagttgggctatcacttgacaaggcagacaaatcagttcttggaacagctgcaaaggttgtccttacgaaagagtcgacaacaattgttggtgatggcagcacccaggaagaagttactaagagggttgcacagattaaaaatctcattgaggcagcagaacaagaatacgaaaaggaaaagctcaatgagaggatagcgaagcttgctggtggtgttgctgtcattcaggtgggagcacaaacagaaactgaactaaaagagaagaagttgagagttgaggatgccctaaatgcaactaaggctgccgttgaggaaggtattgttgttggtggagggtgcactcttttgcggcttgcagctaaagtcgacgccatcaaggatacactggagaacgacgagcagaaggttggagctgaaatagtaaggagggccctgagctacccacttaaattgattgctaaaaacgccggtgtcaatggcagtgttgtcactgagaaggtcctttctaatgataacttcaagtatggttacaatgctgctactggacagtacgaggacctgatggctgctggtatcattgaccccaccaaggtggtgagatgctgcttggagcacgccgcgtcggtggccaagaccttcctgacatcagatgttgtggtcgtcgatatcaaggagccggaggctgcacctgtcgcaaacccgatggacaactctggctatggatactga

SEQ ID NO: 9627 - protein, 579 aa, Zea mays
MASTFGATSTVGLMAAPTGKNVRLQRRANFRVKAAKELYFNKDGSAIKKLQTGVNKLADLVGVTLGPKGRNVVLESKYGSPKIVNDGVTVAREVELEDPVENIGAKLVRQAAAKTNDLAGDGTTTSVVLAQGLIAEGVKVVAAGANPVQITRGIEKTAKALVEELRKLSKEVEDSELADVAAVSAGNNYEIGNMIAEAMSKVGRKGVVTLEEGKSSENFLYVVEGMQFDRGYISPYFVTDSEKMTAEYENCKLLLVDKKITNARDLINVLEEAIRGAYPILIIAEDIEQEALATLVVNKLRGSLKIAAIKAPGFGERKTQYLDDIAILTGATVIRDEVGLSLDKADKSVLGTAAKVVLTKESTTIVGDGSTQEEVTKRVAQIKNLIEAAEQEYEKEKLNERIAKLAGGVAVIQVGAQTETELKEKKLRVEDALNATKAAVEEGIVVGGGCTLLRLAAKVDAIKDTLENDEQKVGAEIVRRALSYPLKLIAKNAGVNGSVVTEKVLSNDNFKYGYNAATGQYEDLMAAGIIDPTKVVRCCLEHAASVAKTFLTSDVVVVDIKEPEAAPVANPMDNSGYGY

SEQ ID NO: 9628 - DNA, 2732 bp, Zea mays
  CDS (518)..(2320)
gatcgacacacgcagccgcgacctgacccgaccctcccgaggccgccagccttatcctctccgcctcccgccgtcccccgcgacccatccgcaagcgcgaggtgagtccgcagcccgtgctcccgcgctccttcctcgcctccccctctaattagaggctcctccgcgctctcggcaggggtttagctgccgtggtctgaggattgggtgagtgtggaactggatgccagcgccgcacagctccagttcggtggccggtgggtgtgggtcttgggtttcggggcgaggtggtttgggttcgtccgtgtagatagcgtatagagagtggtggcgagtgggtttggtcatctgctgcgttagtgagtgtccttttcctctccatttgcaccagagctagcgtatgtccgaccgtagcaggtgttcaattgttcggtaaaaaaaatgtgctttccatttgcatcagagatagcgttactcccttttgcttgagagatggttaggaggctggctatggattatgtgtctgcttcgatcgttttctcatgctaatgtgactcctgccgcacatgcagtagaagacatggcctcgacgttcggtgccacttctacagttggccttatggctgctccaacggggaagaatgtgcgccttcagaggagggctaacttcagagtaaaagcggctaaggagctgtacttcaacaaggatgggtcagctatcaagaagctccagactggagtcaataagcttgcagacctagttggagttacactcggaccgaagggaaggaatgtcgttttggagagcaagtacggctctcccaagattgttaacgatggcgttacagttgcaagagaggttgagctggaggaccctgtggaaaacattggagctaaattggtcaggcaagctgcagctaagaccaacgatcttgctggagatgggacaaccacctctgtggtccttgctcaggggctgattgctgagggtgttaaggtcgtggcagctggtgctaatcctgttcagattactcgtggtattgagaaaacagctaaagcactagttgaagaactaaggaagttgtctaaggaggttgaagatagtgagcttgcagatgttgctgcagttagtgctggcaacaactatgaaattggtaacatgatagcagaggccatgagcaaggtcggtcggaagggcgttgtcacccttgaagaggggaagagttctgagaactttctctatgttgtggagggaatgcaatttgaccgtggttacatctctccgtactttgtaacagacagtgagaaaatgactgcagagtacgagaactgcaagctgcttttggttgataagaaaatcaccaacgcaagggatcttatcaacgttttggaagaagccatcagaggtgcatacccaatcctgataattgcagaggatattgagcaggaggctcttgctacccttgtcgtcaacaagctcagaggatcactgaagatcgctgccatcaaagcccctggttttggagagcgcaagactcagtacttggatgatattgccatccttactggagcaactgtaatcagagatgaagttgggctgtcacttgacaaggccgacaaatcagttcttggaacagctgcaaaggttgtccttacgaaagagtcgacaacaattgttggtgatggcagcacccaggaagaagttactaagagggttgcacagattaaaaatctcattgaggcagcagaacaagaatatgaaaaggaaaagctcaatgagaggatagcgaagcttgctggcggtgttgctgtcattcaggtgggagcacaaacagaaactgaactaaaagagaagaagttgagagttgaggatgccctaaatgcaactaaggctgccgttgaggaaggtattgttgttggtggagggtgcactcttttgcggcttgcagctaaagtcgacgccatcaaggatacactggagaacgacgagcagaaggttggagctgaaatagtaaggagggccctgagctacccacttaaattgattgctaaaaacgccggtgtcaatggcagtgttgtcactgagaaggtcctttctaatgataacttcaagtatggttacaatgctgctactggacagtacgaggacctgatggctgctggtatcattgaccccaccaaggtggtgagatgctgcttggagcacgccgcgtcggtggccaagaccttcctgacatcagatgttgtggtcgtcgatatcaaggagccggaggctgcacctgtcgcaaacccgatggacaactctggctatggatactgatgagatgctatggccatgccccatgggacgaaggtgatcaccatattaattttttggtaggcgaggagtcgggtcgaggtagctttttagacgaccgaaaggcgaaaataagttgaggatctgcatcccaaatttgtgatgtaaactgagacagaacagcagccaaatgaagcagagatttgctgaaagattctgtaactggttgcagctaatgttgaatgcagtttgcacacgaccaattcaaatggctccggcaacgtcagattatgctgcgtcgaaactgatttgaaactgatacaccggagcggtctcctctctgggagcgatccatatttttgtgtactttctgatttgatgaacgactccatctgtttgtttctagaagataatgtatttgagggcgtctgttttt

SEQ ID NO: 9629 - protein, 600 aa, Zea mays
MCLLRSFSHANVTPAAHAVEDMASTFGATSTVGLMAAPTGKNVRLQRRANFRVKAAKELYFNKDGSAIKKLQTGVNKLADLVGVTLGPKGRNVVLESKYGSPKIVNDGVTVAREVELEDPVENIGAKLVRQAAAKTNDLAGDGTTTSVVLAQGLIAEGVKVVAAGANPVQITRGIEKTAKALVEELRKLSKEVEDSELADVAAVSAGNNYEIGNMIAEAMSKVGRKGVVTLEEGKSSENFLYVVEGMQFDRGYISPYFVTDSEKMTAEYENCKLLLVDKKITNARDLINVLEEAIRGAYPILIIAEDIEQEALATLVVNKLRGSLKIAAIKAPGFGERKTQYLDDIAILTGATVIRDEVGLSLDKADKSVLGTAAKVVLTKESTTIVGDGSTQEEVTKRVAQIKNLIEAAEQEYEKEKLNERIAKLAGGVAVIQVGAQTETELKEKKLRVEDALNATKAAVEEGIVVGGGCTLLRLAAKVDAIKDTLENDEQKVGAEIVRRALSYPLKLIAKNAGVNGSVVTEKVLSNDNFKYGYNAATGQYEDLMAAGIIDPTKVVRCCLEHAASVAKTFLTSDVVVVDIKEPEAAPVANPMDNSGYGY

SEQ ID NO: 9630 - DNA, 1626 bp, Chryseobacterium gleum ATCC 35910
  CDS (1)..(1626): transl_table=11
atggcaaaagaaataaaattcgatattgaatcaagagacgcgctaaagagaggggtagatgcattggctaatgcagtaaaagtaactttaggtcctaaagggagaaacgtagtgatcgaaaaatctttcggtgctccacacgtaactaaggacggtgtttctgtagcaaaagaaatcgaacttgaagataaggtagaaaacatgggagctcagatggtaaaagaagtagcttccaaaaccaatgatattgcaggagacggtactactaccgctactgtattggcacaggctatcgtaagagaaggtcttaagaacgtagctgccggtgctaacccgatggatcttaaaagagggatcgacaaagcggtaactgctgttgttgaaaaccttaaatctcaatctcaggaggttggagattcttcagaaaaaatcaagcaggttgcttctatctctgctaacaacgatgataccatcggttctttaatcgctgaagcgttcgggaaagttggtaaagaaggagtaatcactgtagaagaggctaaaggtactgatacaacggtagacgttgtagaaggtatgcagttcgacagaggataccagtcaccttatttcgtgacaaaccctgagaaaatgttagctgaacttgaaagcccatatatccttttagtagagaagaaaatctcttccatgaaagaattgttaccggttcttgagccaattgcacaaggtggtaagtctctattaattatctctgaagaagttgaaggtgaagctttagctactttggtagtaaacaaactaagaggttcccttaaaattgctgctgtaaaagctcctggattcggagacagaagaaaagcaatgttagaagatatcgcgatccttacaggtggacaggtgatttctgaagagcaaggtttcactatggaaaacatctctttggatatgcttggaactgctgagaaagtaacgatcgacaaagacaacacaacggttgtaaacggaggtggtgacgaagctaaaatcaaaggaagagtagctcagatcaaagctcagatggaaactacaacttctgattacgacagagaaaaacttcaggaaagactggctaagttagctggaggtgttgctgtactttatgtaggagctgcttctgaagtggaaatgaaagagaaaaaagacagagtagatgatgccctacacgctacaagagcggctgtagaagaaggtatcgttgcaggtggtggtgttgctttagtaagagcaatttcttcacttgacaatctttcaggatctaacgctgatgaaactacagggatcaaaatcgttaagagagctatcgaggagccattaagacaaatcgttgccaacgcagggggtgaaggttctgtaatcgttgctaaagtagcagaaggaaacggagacttcggatacaatgcgaaaactgacgagtacgttcacatgcttgaagcaggaatcattgacccaactaaagtaacaagagttgcccttgaaaacgcagcttctgtatctggaatgcttttaacaactgaatgtgtaatcactgaagtgaagagcgctgaaccagctatgccaatgggtggtggaatgccaggaatgatgtaa

SEQ ID NO: 9631 - protein, 541 aa, Chryseobacterium gleum ATCC 35910
MAKEIKFDIESRDALKRGVDALANAVKVTLGPKGRNVVIEKSFGAPHVTKDGVSVAKEIELEDKVENMGAQMVKEVASKTNDIAGDGTTTATVLAQAIVREGLKNVAAGANPMDLKRGIDKAVTAVVENLKSQSQEVGDSSEKIKQVASISANNDDTIGSLIAEAFGKVGKEGVITVEEAKGTDTTVDVVEGMQFDRGYQSPYFVTNPEKMLAELESPYILLVEKKISSMKELLPVLEPIAQGGKSLLIISEEVEGEALATLVVNKLRGSLKIAAVKAPGFGDRRKAMLEDIAILTGGQVISEEQGFTMENISLDMLGTAEKVTIDKDNTTVVNGGGDEAKIKGRVAQIKAQMETTTSDYDREKLQERLAKLAGGVAVLYVGAASEVEMKEKKDRVDDALHATRAAVEEGIVAGGGVALVRAISSLDNLSGSNADETTGIKIVKRAIEEPLRQIVANAGGEGSVIVAKVAEGNGDFGYNAKTDEYVHMLEAGIIDPTKVTRVALENAASVSGMLLTTECVITEVKSAEPAMPMGGGMPGMM

SEQ ID NO: 9632 - DNA, 1785 bp, Micromonas sp. RCC299
  CDS (1)..(1785)
atggctatgatgatgtctgctctcaacaccaaggttgctgtgaggccggcggcgctcccccgccagatgggctccaagctccaggccgcctccgccttccccgctcgccgcgcccgcgtctccaccgtgatcaaggcggccaagcagctctacttcaacgcccaggacggcaccgcgctcaagaagatgcagaagggcgtggacaagctcgcgcacgtcgtcggcgtgaccctcggacccaagggccgcaacgtcgtcctcgagtccaagtacggctcccccaagatcgtcaacgacggtgtcaccgtcgccaaggaggttgacctcgaggatcccgtcgagaacgtcggcgcgcgcctcgtccgccaggctgcgcagaagaccaacgacctcgcgggtgacggcaccaccaccgccaccgtgctctccgcggcgatgatcaccgagggcatgaagatcgtcatggccggtaccaaccccgtgcagctcacccgcggcatggagaccaccgtcgccaagctcgtcggtgtcctcaagggcctctccaaggaggttgccgacgaggagctcgccaacgtcgcggctgtctccgccggcggcaacatggaggtgggcatgatgatctccgacgccatggccaaggtgggccgcaagggcgtcatcaccctcgaggaggccaagtccgtggacaacaacctcatcgtcgtcgagggtatgcagttcgaccgcggctacatctccccctactttgtcaccgactcggagcgcatgacgtgcgactacgacaactgcaagctcctcctcgtcgacaagaagatcaagtccgcgcgcgacatgatcaccatcctcgaggaggcgatcaagtccggcttccccctcctcgtcatcgccgaggacatcgagcaggaggccctcgccaccctcgtggtgaacaagctccgcggcgcgctgaagatttgcgcgctcaaggctcccggctttggcgagcgcaagtcccagtacctcgaggacatcgccatcctcaccggcgccaccgtcgtcaaggatgagctcggcctctccctcgacaaggttggccctgaggttctcggcaacgccgcgcgcgttgagctcggcaaggagtcctgcaccatcgtcggcgacggctccaccgagctcgaggttgccgcgcgcgtgaagcagatcaaccgcctctgcgaggctgccgaggctgagtacgagaaggagaagctcaacgagcgtgcggcccgcctctccggcggtgttgccatcatccagtgcggcgcccagaccgagaccgagctcaaggagaagaagctccgcgttgaggatgccctgaacgccaccaaggctgccgtcgaggagggcatcgtcattggcggcggctgcacccttctcaagctcgccgcggctgtcgacgacatcaagaaggagctccccaacgacgagcagaagctcggcgccgacatcatccagcgcgcgctcaagtaccccatgcgcctcatcgcggccaacgcgggtgacaacggctccgtcgtcgtcgagcgcgtcaccgcctccaaggatgccaactttggctacaacgccgccaccggcgagttccaggacctcatggtcaacggcatcatcgaccccaccaaggtgatccgctgcgccctcgagaactcctgctccgtcgccaagatcttcctcacctccgacgtggtggtgtgcgagatccccgagaatgagcccatgattgccggcggcgccggcgccatggacaactccggctacggcatgtaa

SEQ ID NO: 9633 - protein, 594 aa, Micromonas sp. RCC299
MAMMMSALNTKVAVRPAALPRQMGSKLQAASAFPARRARVSTVIKAAKQLYFNAQDGTALKKMQKGVDKLAHVVGVTLGPKGRNVVLESKYGSPKIVNDGVTVAKEVDLEDPVENVGARLVRQAAQKTNDLAGDGTTTATVLSAAMITEGMKIVMAGTNPVQLTRGMETTVAKLVGVLKGLSKEVADEELANVAAVSAGGNMEVGMMISDAMAKVGRKGVITLEEAKSVDNNLIVVEGMQFDRGYISPYFVTDSERMTCDYDNCKLLLVDKKIKSARDMITILEEAIKSGFPLLVIAEDIEQEALATLVVNKLRGALKICALKAPGFGERKSQYLEDIAILTGATVVKDELGLSLDKVGPEVLGNAARVELGKESCTIVGDGSTELEVAARVKQINRLCEAAEAEYEKEKLNERAARLSGGVAIIQCGAQTETELKEKKLRVEDALNATKAAVEEGIVIGGGCTLLKLAAAVDDIKKELPNDEQKLGADIIQRALKYPMRLIAANAGDNGSVVVERVTASKDANFGYNAATGEFQDLMVNGIIDPTKVIRCALENSCSVAKIFLTSDVVVCEIPENEPMIAGGAGAMDNSGYGM

SEQ ID NO: 9634 - DNA, 1719 bp, Pteromalus puparum
  CDS (1)..(1719)
atgttcagactaccaacagttctccgcagcgctgctctgcgtcagatgcagctccagtcgcgcagctatgccaaagatgttcgctttggagctgaagtgcgggcactcatgctccaaggagtagatgtattggctgatgctgttgctgtcaccatgggccccaagggacgcaatgtcattttggagcagagctggggaagccccaagatcaccaaggatggtgttactgtagccaagggtgtggagctgaaggacaagttccagaacattggagccaaattggtgcaagacgttgccaacaacaccaatgaagaagctggagatggaacaaccactgccactgttctggctagagccattgccaaggaaggctttgaaaagatcagcaagggtgccaatcctgttgagatcaggcgtggtgtaatgatggctgttgacaaagtcaaggaagaactcaaggctttgagcaagcctgttacaacaccggaagaaattgcacaggttgcaactatttctgctaatggcgacacagcaattggcaaccttatttctgatgcaatgaagaaagttggaaaggagggagtcattactgttaaagatggcaagactttaatcgatgaattggaagttatcgagggaatgaagtttgaccgtggatatatctcgccttacttcatcaactcttccaagggagctaaagtagaattccaagatgctctgatcctgttcagcgagaaaaagatttcatctgttcagagcatcatccctgctttggaactagccaactcccaacgcaaaccacttgtcattgttgccgaagacattgatggtgaagctctttcaaccttggttgtcaaccgtttgaaaatcggattgcaagtagctgctgtcaaggctccaggttttggagacaacaggaaagctaccctgcaagatatggcaatcgctactggcggtattgttttcggagatgacgctaacttgatcaaaatcgaagacgttcagcctagtgacttgggacaagttggagaagtgctcatcacgaaggacgacacattgcttctgaaaggcaaaggaaagaagaccgacatcgacagaagagccgagcaactcagggatcagatcgaaaatacgacgtctgactatgaaaaggagaaattgcaagagcgattggctaggcttgcatctggagtagcagttcttagggtaggaggaagcagcgaggttgaagtcaacgagaagaaagaccgagtccacgatgcactcaatgctactcgcgctgccgttgaagaaggcattgttcccggaggtggtactgctctcctgaggtgcgctccatccctgaaatctctgcatcccgcaaatgaggatcagaagacaggtatcaacatcgtagctaatgctctgcgcatgccatgcctgcagattgcccagaacgctggagttgacggcagtgtcgttgtcgccaaagtttctgagggcaaacttggttatgacgctatgaacaacgagtatgtagatatgatcgagaagggtattatcgacccgacgaaagtcgtccgcactgctctgactgatgccgctggagttgcctcactcctaacgactgccgaagcggtggttactgagctgccaaaggatgacccaccaatgccaggtggtggtatgggtggaatgggcggcatgggaggaatgggtggcatgggcggtatgatgtaa

SEQ ID NO: 9635 - protein, 572 aa, Pteromalus puparum
MFRLPTVLRSAALRQMQLQSRSYAKDVRFGAEVRALMLQGVDVLADAVAVTMGPKGRNVILEQSWGSPKITKDGVTVAKGVELKDKFQNIGAKLVQDVANNTNEEAGDGTTTATVLARAIAKEGFEKISKGANPVEIRRGVMMAVDKVKEELKALSKPVTTPEEIAQVATISANGDTAIGNLISDAMKKVGKEGVITVKDGKTLIDELEVIEGMKFDRGYISPYFINSSKGAKVEFQDALILFSEKKISSVQSIIPALELANSQRKPLVIVAEDIDGEALSTLVVNRLKIGLQVAAVKAPGFGDNRKATLQDMAIATGGIVFGDDANLIKIEDVQPSDLGQVGEVLITKDDTLLLKGKGKKTDIDRRAEQLRDQIENTTSDYEKEKLQERLARLASGVAVLRVGGSSEVEVNEKKDRVHDALNATRAAVEEGIVPGGGTALLRCAPSLKSLHPANEDQKTGINIVANALRMPCLQIAQNAGVDGSVVVAKVSEGKLGYDAMNNEYVDMIEKGIIDPTKVVRTALTDAAGVASLLTTAEAVVTELPKDDPPMPGGGMGGMGGMGGMGGMGGMM

SEQ ID NO: 9636 - DNA, 1746 bp, Culicoides variipennis
  CDS (1)..(1746)
atgttgcgtttagttggcaaaaaagtgattcttcgttcaccggctaccaaatttgctctggcacaacgtgctggttatgcaaaagatgttagattcggtcctgaggttcgtgccctcatgcttcaaggtgtaaatattctggccgatgcagttgccgtcacaatgggacccaaaggtcgtaatgtcattctcgaacaatcctggggatcaccaaagattacaaaggacggtgtaactgttgccaagggcattgaattgaaagataaattccagaatatcggtgccaaattggtgcaagatgttgccaataatacaaatgaagaggctggagatggaacaacaacagctacagttcttgcacgtgcaattgccaaagaaggtttcgagaaaatttcaaaaggtgcaaatccaattgaaattcgtcgtggtgtgatgttagctgttgatgcagttaaagaacatttaaagacattatccaagaatgttacaacacccgaagaaattgctcaagttgcaacaatttcagctaatggtgataaggcaattggtcaattgatctctgacgcaatgaaacgcgttggaaaagaaggtgtaatcacagttaaggatggaaaaactttaactgacgaattacaagttattgaaggtatgaaattcgatcgtggttacatctcaccatatttcatcaattcctcgaaaggagcaaaagttgaattccaagacgctcttcttttattctccgaaactaaaatctcatctgtacaatcaatcatcccagcacttgaacttgccaacactcaacgaaaacctctcgttatcattgctgaagatattgatggtgaagctttaagtacattagtcgttaatcgtttgaaaatcggtcttcaagttgccgctgtaaaagcacctggtttcggtgacaatcgtaaatcaacaatggccgatatggcaattgctactggtggcattgtctttggagatgaagctaatttagttaaaatcgaagatgttcaactctcagatttgggtaaagttggagaagttgttatcacaaaagacgacacattactcttgaaaggaaaaggaacaaaggaacacattgatcgtcgtgccgaacaaattcgtgatcaaattaaagaaacaacaagtcaatatgaaaaagaaaaattacaagaacgtcttgctagattaagtgctggtgttgcattactccgtattggtggatcatctgaagttgaagtcaatgaaaagaaagatcgtgttactgatgcattaaatgccacacgagctgctgttgaagaaggtatcgttcctggaggtggtactgccttgttgcgttgcattccaacattgaaaggtctcaagggagagaatgaggatcaaaagacaggtattgaaattgttatgagagcacttcgaatgccatgcatgacaattgcaaagaatgccggagtagatggaagtgttgttgttgctaaagtcgaagaaaatcagggagaatatggatatgatgccatgaacaatgaatatgttaacatgattgaaaagggaattattgatccaacaaaggtcgttcgtactgccttgacagatgcctcaggtgttgcctcattattgaccactgctgaagctgttgttacagaaatgccaaaggatgacaaagaagttggcatgccaggtatgggtggcatgggaggcatgggtggaatgggaggaatgggcggtatgaatgtaaactgttcttaa

SEQ ID NO: 9637 - protein, 581 aa, Culicoides variipennis
MLRLVGKKVILRSPATKFALAQRAGYAKDVRFGPEVRALMLQGVNILADAVAVTMGPKGRNVILEQSWGSPKITKDGVTVAKGIELKDKFQNIGAKLVQDVANNTNEEAGDGTTTATVLARAIAKEGFEKISKGANPIEIRRGVMLAVDAVKEHLKTLSKNVTTPEEIAQVATISANGDKAIGQLISDAMKRVGKEGVITVKDGKTLTDELQVIEGMKFDRGYISPYFINSSKGAKVEFQDALLLFSETKISSVQSIIPALELANTQRKPLVIIAEDIDGEALSTLVVNRLKIGLQVAAVKAPGFGDNRKSTMADMAIATGGIVFGDEANLVKIEDVQLSDLGKVGEVVITKDDTLLLKGKGTKEHIDRRAEQIRDQIKETTSQYEKEKLQERLARLSAGVALLRIGGSSEVEVNEKKDRVTDALNATRAAVEEGIVPGGGTALLRCIPTLKGLKGENEDQKTGIEIVMRALRMPCMTIAKNAGVDGSVVVAKVEENQGEYGYDAMNNEYVNMIEKGIIDPTKVVRTALTDASGVASLLTTAEAVVTEMPKDDKEVGMPGMGGMGGMGGMGGMGGMNVNCS

SEQ ID NO: 9638 - DNA, 1647 bp, Lawsonia intracellularis
  CDS (1)..(1647): transl_table=11
atggcttctaaagaaatcctttttgatgctaaagcccgtgaaaaactttcacgaggtgtagataaacttgcaaatgctgttaaagtaacacttggacctaaaggccgtaatgtcgttattgaaaagtcttttggttccccagttattacaaaagatggtgtatctgttgcaaaagaaattgaacttgaagataagtttgaaaatatgggcgctcaaatggttaaagaagtagctcccaaaactagcgatattgctggtgatggaactacaacagcaacagtccttgcacaagctatttatcgtgaaggtgtaaaacttgtagcagctggtcgtaatcctatggccattaaacgtggcatagataaagctgttgttgctgttactaaagaactaagcgacattacaaagcctactcgtgaccaaaaagaaatagctcaagttggaaccatttctgcaaactctgatacaacaataggtaatatcatagctgaagctatggctaaagttggaaaaggaggtgttatcacagttgaggaagctaaaggtcttgaaactacattagatgtggttgaaggaatgaagtttgaccgtggctacctctctccatactttgtaactaatcctgagaaaatggtttgtgaacttgataacccttatatcctttgtaatgagaaaaagattactagcatgaaagacatgctaccaatcttagaacaagttgctaaagtaaaccgtccactccttattattgctgaagacgtagaaggtgaagcacttgcaacacttgtagtcaataagctccgtggagcactccaagttgtagccgtaaaagctcctggttttggtgaacgccgtaaagctatgcttgaagatattgctatccttactggaggagaagcaatatttgaagatcgtggtataaagcttgaaaatgtaagcttgtcttctttaggaacagctaaacgtgtagttattgacaaagaaaatactactatcgttgatggtgctggaaaatcagaagatattaaagctcgagttaaacaaattcgtgcacaaattgaagaaacaagctcagattatgatcgtgaaaaacttcaagaacgtcttgcaaaacttgttggtggagtagctgttatccatgttggagctgctactgaaactgaaatgaaagagaagaaggatcgtgtagaagatgctctaaatgcaacaagagctgcggttgaagaaggtattgtccctggtggtggtactgcttttgtccgctccattaaagtccttgatgatattaaacctgctgatgatgatgaacttgctggacttaatatcatccgtcgttctcttgaagagcctttacgtcaaattgctgcaaatgctggctatgaaggttctattgttgtagaaaaagttcgtgaaccaaaagatggttttggatttaatgctgcatcaggagaatatgaagaccttattaaagctggtgtcattgatcctaaaaaagttacacgtattgcattacaaaatgcagcatcagtagcctccttacttctaactacagaatgcgctattgctgaaaaaccagaacctaaaaaagatatgcctatgcctggcggtggtatgggtggtatgggtggtatggacggtatgtactag

SEQ ID NO: 9639 - protein, 548 aa, Lawsonia intracellularis
MASKEILFDAKAREKLSRGVDKLANAVKVTLGPKGRNVVIEKSFGSPVITKDGVSVAKEIELEDKFENMGAQMVKEVAPKTSDIAGDGTTTATVLAQAIYREGVKLVAAGRNPMAIKRGIDKAVVAVTKELSDITKPTRDQKEIAQVGTISANSDTTIGNIIAEAMAKVGKGGVITVEEAKGLETTLDVVEGMKFDRGYLSPYFVTNPEKMVCELDNPYILCNEKKITSMKDMLPILEQVAKVNRPLLIIAEDVEGEALATLVVNKLRGALQVVAVKAPGFGERRKAMLEDIAILTGGEAIFEDRGIKLENVSLSSLGTAKRVVIDKENTTIVDGAGKSEDIKARVKQIRAQIEETSSDYDREKLQERLAKLVGGVAVIHVGAATETEMKEKKDRVEDALNATRAAVEEGIVPGGGTAFVRSIKVLDDIKPADDDELAGLNIIRRSLEEPLRQIAANAGYEGSIVVEKVREPKDGFGFNAASGEYEDLIKAGVIDPKKVTRIALQNAASVASLLLTTECAIAEKPEPKKDMPMPGGGMGGMGGMDGMY

SEQ ID NO: 9640 - DNA, 1743 bp, Plectus acuminatus
  CDS (1)..(1743)
atgcttcgaacaactccagccttgttccgttcgctgtctcgacagttgccgctactttcttctgctcaatctcaccgtggctacgccaaggacctcagatttggagccgagggcagaaaatcgatgctcgtcggtgttgatttgctggcagatgctgtcgctgttacaatgggacccaagggtcgcaacgtgatcattgaacagtcatggggaagcccgaaaatcactaaagatggtgtcactgtcgctaaagcggtcgatctcaaggacaagtttcaaaatctcggagccaagctagtgcaggatgtagccaacaagacgaatgaagtagccggagacggaacgacgtgcgcgacagtgctcgcccgagcgatcgccaaggagggtttcgataacatcagcaagggcgccaacccggtcgaagtacggcgaggggtgatgctcgccgtcgacactgtggtcgccgagctgaagaagatgtcccggcccgtgacaacgccggaagccattgcccaggtggcgaccatctcggccaacggagatacggtcatcggcaatctcatctccgaagcgatgaagaaggtgggtaacagaggcgtgatcacggtcaaggatggaaagacgctgacagatgagcttgaaactgtggaaggcatgaagttcgatcgtggctatatttcgccctacttcatcaactcgagcaagggcgccaaggtcgagtacgaaaaggcactcttccttctcagcgagaagaaaatcagtcaagtccaggatgttgtgcccgctttggaattggccaacaagtaccgcaaaccgctcgtcattattgccgaggacgtggacggcgaagctctgacgacgctcgtgctcaacaggctcaaggtcggtctacaagtggcggcagtaaaggcgccaggcttcggcgacaaccgcaagaacacactgcgcgacattgctgcgatgactggcgcagcggtgttcggcgacgaggcgaacatgatcaagctcgaagatgtgcagatccaggacttgggcgaagcggaagagatcaccatcaccaaggatgacacgctcatcttgcgcggcaagggtaactccgcagacgtggaaaagcgcatggagcagatcctcgacgaagttgaacattccacttcggactacgagaaggagaagctgaacgagcgcctcgccaagctcagcaagggcgtcgccgtcctcaaggttggcggtggcagcgaagtggaggtgaacgagaagaaggaccgtgtaacggacgcgttgaacgcgactcgctgcgccgtcgaagaaggcatcgttcccggcggcggcgtcgccttcctgcgcacaattgcctccctgaaagcgctcaaaccggccaacgacgatcagctgaaaggtattaaaatcgttgagaaggcgttgcgcatgccaatcacaacgatcgtgtcgaacgcgggtgtcgaaccgtacgcggtggtggagcaggtgctgcagaacaaggagatcaattatggctatgacgcgatgaacggcgagttcgtcaacatgatcgaaaagggaatcgtcgatcccaccaaggtgattcgaacggcgctgcaagatgcggctggtgtggcttcattgttggcgacgaccgagtgcgtgatcaccgaacagccgaagaaagacacagccacagccggaatgggcggcatgggtggtggaatgggtggcatgggcggtggaatgggtggcatgttctaa

SEQ ID NO: 9641 - protein, 580 aa, Plectus acuminatus
MLRTTPALFRSLSRQLPLLSSAQSHRGYAKDLRFGAEGRKSMLVGVDLLADAVAVTMGPKGRNVIIEQSWGSPKITKDGVTVAKAVDLKDKFQNLGAKLVQDVANKTNEVAGDGTTCATVLARAIAKEGFDNISKGANPVEVRRGVMLAVDTVVAELKKMSRPVTTPEAIAQVATISANGDTVIGNLISEAMKKVGNRGVITVKDGKTLTDELETVEGMKFDRGYISPYFINSSKGAKVEYEKALFLLSEKKISQVQDVVPALELANKYRKPLVIIAEDVDGEALTTLVLNRLKVGLQVAAVKAPGFGDNRKNTLRDIAAMTGAAVFGDEANMIKLEDVQIQDLGEAEEITITKDDTLILRGKGNSADVEKRMEQILDEVEHSTSDYEKEKLNERLAKLSKGVAVLKVGGGSEVEVNEKKDRVTDALNATRCAVEEGIVPGGGVAFLRTIASLKALKPANDDQLKGIKIVEKALRMPITTIVSNAGVEPYAVVEQVLQNKEINYGYDAMNGEFVNMIEKGIVDPTKVIRTALQDAAGVASLLATTECVITEQPKKDTATAGMGGMGGGMGGMGGGMGGMF

SEQ ID NO: 9642 - DNA, 1800 bp, Solanum tuberosum
  CDS (1)..(1800)
atggcatctacttttgctggtatgtcctcagcaggtcccttggctgctcccagcacttcctcaaacaagctttcctctgttgctaatatatcttccacctctttcgggagcaaaagaaatgttgcactaagaaagtcacgcaggccgacaattttggctgcagctaaagagttacacttcaacaaggatgggtcagctatcaagaagctacagaatggtgtgaacaaacttgctgatctagttggagttactcttggcccaaaaggcaggaatgttgtccttgagagcaagtatggtgctccaaaaattgttaatgatggagttactgtggccagagaggttgaattagaggatccagtagaaaacattggtgcgaaactagtgagacaagctgctgccaaaaccaatgacctggctggggatgggactacaacatctgtcgtgctagctcagggcctaattgctgaaggtgttaaggtggttgcagctggtgcaaaccctgtcctaatcaccagaggaattgagaagacagcaaaagcattagtagctgagttgaagaatatgtcaaaagaggtggaagacagtgaactagcagatgtggctgcagtaagtgctgggaacaatttggaagtagggagtatgattgctgaagccatgagcaaggttggaaggaaaggtgttgtgacactagaggagggtaaaagtgctgaaaacagtctgcgtgtggttgaaggaatgcaatttgaccgtggttacgtctctccttactttgttaccgacagtgagaaaatgtcagttgaatatgagaactgtaagttgctactggttgataaaaagataacaaatgcaagagatcttgttaatgtcctggaagatgctatcagaaatggttacccaattttaattattgccgaagatattgagcaagaagctttggcgactcttgttgtcaataagcttagaggtgccttaaaggtcgctgcacttaaagctcctggttttggtgagcgaaaaagccagtatcttgatgacatagcaacccttactggaggcactgttattagggaggaacttggccttaccttggacaaggctgacaaggaagttctaggtcatgctgctaaagtagtgctgactaaggatgccactacaattgttggtgatggtagtactcaggaagcagtcaacaaacgtgttgctcagattaaaaacctgatagaggctgcagatcaagattatgaaaaggaaaagctaaatgaaagaattgctaagttatcaggaggtgtggctgtcatacaggttggagctcaaactgaaactgaattgaaggagaagaaacttagagtggaagatgctctcaatgcaacaaaggcggctgttgaggaaggtattgttgttggaggagggtgcacgctcctcagacttgctgcaaaagttgatgcaataaagggaacccttgcaaatgatgaggagaaggttggagctgatattgtcaaaagagcattgagctaccctttgaaattaattgctaaaaatgctggcgttaatggaagtgttgtcagtgagaaggtgctgtcaagtgatgatcccaaatttggatataatgctgcaactggcaactatgaagacttaatggctgctggcatcattgatccaacaaaggtggtgaggtgttgtctagaacacgctgcatctgtggctaagacattcttgatgtcagattgcgtggtggttgagatcaaggagcccgaagcagcagttgctggcaacccaatggacaactcaggatacggttactag

SEQ ID NO: 9643 - protein, 599 aa, Solanum tuberosum
MASTFAGMSSAGPLAAPSTSSNKLSSVANISSTSFGSKRNVALRKSRRPTILAAAKELHFNKDGSAIKKLQNGVNKLADLVGVTLGPKGRNVVLESKYGAPKIVNDGVTVAREVELEDPVENIGAKLVRQAAAKTNDLAGDGTTTSVVLAQGLIAEGVKVVAAGANPVLITRGIEKTAKALVAELKNMSKEVEDSELADVAAVSAGNNLEVGSMIAEAMSKVGRKGVVTLEEGKSAENSLRVVEGMQFDRGYVSPYFVTDSEKMSVEYENCKLLLVDKKITNARDLVNVLEDAIRNGYPILIIAEDIEQEALATLVVNKLRGALKVAALKAPGFGERKSQYLDDIATLTGGTVIREELGLTLDKADKEVLGHAAKVVLTKDATTIVGDGSTQEAVNKRVAQIKNLIEAADQDYEKEKLNERIAKLSGGVAVIQVGAQTETELKEKKLRVEDALNATKAAVEEGIVVGGGCTLLRLAAKVDAIKGTLANDEEKVGADIVKRALSYPLKLIAKNAGVNGSVVSEKVLSSDDPKFGYNAATGNYEDLMAAGIIDPTKVVRCCLEHAASVAKTFLMSDCVVVEIKEPEAAVAGNPMDNSGYGY

SEQ ID NO: 9644 - DNA, 1866 bp, Ostreococcus tauri
  CDS (1)..(1866)
atgaacgcgttgtccacgagcgccaacgcctcgaccttcgccgccagagcgcgtgcgagcgacgaaggatgtcacgagtggacgcgtagaggattgtttcagaaggacgagagactgacaagtgaggggtgtggattgataatcgcaggtaagatcacggtgaacgttcgtcgaacgtcggtccgacgcgcgcccttgtgcgtgacggcggcggcgaagaacctgtacttcaacaagaatgacggcgttgcgctgaagaagatgcaaaagggcgtggacaagctcgcgtctgtcgttggcgtcacgctcggcccgaagggtcgtaacgtcgtcctcgagtccaagtatggctcaccaaagattgttaacgacggtgtgaccgtggccaaggaggtcgagctcgaagatcctgttgagaacgtcggcgccaagctcgtgcgccaagcgtctcaaaagactaacgaccaagccggcgacggcacaaccacggcgaccgttctctccgcggccatgatcacggagggcatgaagatcgtcatggccggtaccaacccggtccagctcacgcgcggtatggaaaagaccacgcaaaagctcgtccaacacctcaagacgctctccaaggacgtggctgacgacgagcttgccaaggtcgcctccatctccgccggtggcaacatggaaatcggtgagatgatcgctgccgccatggccaaggttggccgtaagggtgtcatctccctcgaagaagcgcgctccgtcgacaacaacctcatcgttgtcgaaggtatgcagttcgatcgtggttacatctccccgtatttcgtcaccgacccggagcgcatgacgtgtgtgtacgatcagtgcaagcttttgatcgtcgacaagaagatcagcaccgcccgcgacatgatcggcatcctcgaagccgcgatccaacaaggcttcccgcttatgatcatcgccgaggacatcgaacaagaagctctcgcgacgctcgtcgtgaacaagctgcgcggttcgctcaagatcaccgccatcaaggcgccgggtttcggcgagcgcaagagccagtacctcgaagacatcgccatccttaccggcggtaccgtcgtcaaggaagagcttggcttgagcctcgacaagtgtggcgttgaagtgctcggcagcgccgcgcgcatcgagctcggcaaggaatcgtgcaccatcgtcggatctggcgacaccgccgccgaggtcagtgctcgtgtcaagcaaatcaaccgcctcttggagtccacggaagcggattacgagaaagagaagctccgtgagcgtgcggctcgcctctccgggggcgttgccatcgttcaagtcggcgcccagacggagacagaactcaaggagaagaaacttcgtgttgaggatgccctcaatgcgaccaaggctgccgtcgaagaaggcattgtgattggtggtggctgcaccttcttgaagcttgcggcggcggttgatggcatcaaggaaactttggacaacgatgagcagaaggtcggcgctgacatcatcaagcgcgccttgtcctatccgatccgccttgtcgcccacaatgccggtgtgaatggctctgtcacatgcgagcgcgtcatgagctctgcggatccaaacttcggcttcaacgcggccactggccagttcgaggacctcatggagtctggtgttcttgacccgacgaaagtcatccgttgttccctcgaaaacgcgtgctccgtcgcgaagattttccttacgtccgacgtggtggtgtgcgaaattccggaggatgaagacgctgccgctgctgctgcggccggcagcgcgatggacaactcgggctacccgcaatag

SEQ ID NO: 9645 - protein, 621 aa, Ostreococcus tauri
MNALSTSANASTFAARARASDEGCHEWTRRGLFQKDERLTSEGCGLIIAGKITVNVRRTSVRRAPLCVTAAAKNLYFNKNDGVALKKMQKGVDKLASVVGVTLGPKGRNVVLESKYGSPKIVNDGVTVAKEVELEDPVENVGAKLVRQASQKTNDQAGDGTTTATVLSAAMITEGMKIVMAGTNPVQLTRGMEKTTQKLVQHLKTLSKDVADDELAKVASISAGGNMEIGEMIAAAMAKVGRKGVISLEEARSVDNNLIVVEGMQFDRGYISPYFVTDPERMTCVYDQCKLLIVDKKISTARDMIGILEAAIQQGFPLMIIAEDIEQEALATLVVNKLRGSLKITAIKAPGFGERKSQYLEDIAILTGGTVVKEELGLSLDKCGVEVLGSAARIELGKESCTIVGSGDTAAEVSARVKQINRLLESTEADYEKEKLRERAARLSGGVAIVQVGAQTETELKEKKLRVEDALNATKAAVEEGIVIGGGCTFLKLAAAVDGIKETLDNDEQKVGADIIKRALSYPIRLVAHNAGVNGSVTCERVMSSADPNFGFNAATGQFEDLMESGVLDPTKVIRCSLENACSVAKIFLTSDVVVCEIPEDEDAAAAAAAGSAMDNSGYPQ

SEQ ID NO: 9646 - DNA, 1773 bp, Glomus intraradices
  CDS (1)..(1773)
atgcagcgcgtctcacaatttttcaataaagctcctcatataactatttctccttccctatctatggtatctagaaactctaaaagaccgtttctatcgcgattttatgctactcacaaagaccttaaatttggagttgaaggacgtgctccattactaaaaggtgttgatattttagctaaggcggtagctgttacacttggtcccaagggacgtaatgtgttgattgaacaaccatatggtagccctaagatcacaaaggacggtgtcactgtagctaaaagtatatcacttaaagacaaattcgaaaaccttggtgcaaggttagttcaagacgttgccaacaaaactaatgaaatggcaggagatggtaccacaaccgctacgattctcacgcgagcaatttttgtagaaggtgtaaaaaatgttgccgctggctgtaacccgatggatctacgtcgcggagttcaaatggcggttgattccattgtcgaatttctacgagagaaaagtcgtgttataactacaagcgaagagatagctcaggttgctacgatctcggccaatggcgatacgcatgttggtaaattaatagctaatgccatggaaaaagtcgggaaggaaggcgtcatcacagtaaaagaaggaaagacaatcgaagatgagttagaaataaccggaagaatgcgttttgatcgtggatatatatcaccatattttatcactgaagctaaaactcaaaaagttgaatttgaaaagcctttaattctactctccgagaaaaaaatttcagttttgcaagatattttaccggcattagaaacttcatctacacaacgcagaccgcttttaattatatctgaagatattgatggtgaagctttggccgcttgtatcttgaataaattacgtggcaatattcaagtggccgctgtaaaagctcccggctttggtgataatagaaaatctatcttaggtgatttagctatattaacaggtggaacagttttctcagatgagttagatatcaagcttgagcgtgctactcctgatcttttcggttcaaccggttccgttactattaccaaggaagacaccatccttcttaacggtgatggttccaaagactttataaatcaacgttgtgaacaaatccgtgcagcaattaatgatgcgtctgtttctgattatgagaaagaaaaattacaagaacgccttgctaaattgtcgggcggcgtagctgttatcaaagtaggtggatcttctgaactcgaagttggcgaaaagaaagatcggtttgttgatgctttaaatgctacacgagctgcggttgaggaaggcactgttccagggggaggcgttgcccttttgaaatctattaaatgtcttgataatttgtcacccgccaattttgatcaaaaattaggtataggcatagttaaatcagcacttcaaaagccagcaaaaactattgtggataatgctggtgaagaaggtgccgttattgttggcaaaatcctagataatcatgtggatgattttaattatggatatgatgctgctaagggcgagtatggcgatcttgtttcacgtggtattgtagatccattgaaagttgtgagaacagcactcgttgatgcttcaggtgttgctagtttattaacaacgacggaatgcatgattaccgaagctccagaggaaaataagggagccgctggcggaatgggacgtatgggtggaatgggtggaatgggtgatatgggtatgatgtaa

SEQ ID NO: 9647 - protein, 590 aa, Glomus intraradices
MQRVSQFFNKAPHITISPSLSMVSRNSKRPFLSRFYATHKDLKFGVEGRAPLLKGVDILAKAVAVTLGPKGRNVLIEQPYGSPKITKDGVTVAKSISLKDKFENLGARLVQDVANKTNEMAGDGTTTATILTRAIFVEGVKNVAAGCNPMDLRRGVQMAVDSIVEFLREKSRVITTSEEIAQVATISANGDTHVGKLIANAMEKVGKEGVITVKEGKTIEDELEITGRMRFDRGYISPYFITEAKTQKVEFEKPLILLSEKKISVLQDILPALETSSTQRRPLLIISEDIDGEALAACILNKLRGNIQVAAVKAPGFGDNRKSILGDLAILTGGTVFSDELDIKLERATPDLFGSTGSVTITKEDTILLNGDGSKDFINQRCEQIRAAINDASVSDYEKEKLQERLAKLSGGVAVIKVGGSSELEVGEKKDRFVDALNATRAAVEEGTVPGGGVALLKSIKCLDNLSPANFDQKLGIGIVKSALQKPAKTIVDNAGEEGAVIVGKILDNHVDDFNYGYDAAKGEYGDLVSRGIVDPLKVVRTALVDASGVASLLTTTECMITEAPEENKGAAGGMGRMGGMGGMGDMGMM

SEQ ID NO: 9648 - DNA, 1773 bp, Glomus intraradices
  CDS (1)..(1773)
atgcagcgcgtctcacaatttttcaataaagctcctcatataactatttctccttccctatctatggtatctagaaactctaaaagaccgtttctatcgcgattttatgctactcacaaagaccttaaatttggagttgaaggacgtgcttcattactaaaaggtgttgatattttagctaaggcggtagctgttacacttggtcccaagggacgtaatgtgttgattgaacaaccatatggtagccctaagatcacaaaggacggtgtcactgtagctaaaagtatatcacttaaagacaaattcgaaaaccttggtgcaaggttagttcaagacgttgccaacaaaactaatgaaatggcaggagatggtaccacaaccgctacgattctcacgcgagcaatttttgtagaaggtgtaaaaaatgttgccgctggctgtaacccgatggatctacgtcgcggagttcaaatggcggttgattccattgtcaaatttctacgagagaaaagtcgtgttataactacaagcgaagagatagctcaggttgctacgatctcggctaatggcgatacgcatgttggtaaattaatagctaatgccatggaaaaagtcgggaaggaaggcgtcatcacagtaaaagaaggaaagacaatcgaagatgagttagaaataaccgaaggaatgcgttttgatcgtggatatatatcaccatattttatcactgaagctaaaactcaaaaagttgaatttgaaaagcctttaattctactctccgagaaaaaaatttcagttttgcaagatattttaccggcattagaaacttcatctacacaacgcagaccgcttttaattatatctgaagatattgatggtgaagctttggccgcttgtatcttgaataaattacgtggcaatattcaagtggccgctgtaaaagctcccggctttggtgataatagaaaatctatcttaggtgatttagctatattaacaggtggaacagttttctcagatgagttagatatcaagcttgagcgtgctactcctgatcttttcggttcaaccggttccgttactattaccaaggaagacaccatccttcttaacggtgatggttccaaagactttataaatcaacgttgtgaacaaatccgtgcagcaattaatgatgcgtctgtttctgattatgagaaagaaaaattacaagaacgccttgctaaattgtcgggcggtgtagctgttatcaaagtaggtggatcttctgaactcgaagttggcgaaaagaaagatcggtttgttgatgctttaaatgctacacgagctgcggttgaggaaggcactgttccagggggaggcgttgcccttttgaaatctattaaatgtcttgataatttgtcacccgccaattttgatcaaaaattaggtatagacatagttaaatcagcacttcaaaagccagcaaaaactattgtggataatgctggtgaagaaggtgccgttattgttggcaaaatcctagataatcatgtggatgattttaattatggatatgatgctgctaagggcgagtatggcgatcttgtttcacgtggtattgtagatccattgaaagttgtgagaacagcactcgttgatgcttcaggtgttgctagtttattaacaacgacggaatgcatgattaccgaagctccagaggaaaataagggagccgctggcggaatgggacgtatgggtggaatgggtggaatgggtgatatgggtatgatgtaa

SEQ ID NO: 9649 - protein, 590 aa, Glomus intraradices
MQRVSQFFNKAPHITISPSLSMVSRNSKRPFLSRFYATHKDLKFGVEGRASLLKGVDILAKAVAVTLGPKGRNVLIEQPYGSPKITKDGVTVAKSISLKDKFENLGARLVQDVANKTNEMAGDGTTTATILTRAIFVEGVKNVAAGCNPMDLRRGVQMAVDSIVKFLREKSRVITTSEEIAQVATISANGDTHVGKLIANAMEKVGKEGVITVKEGKTIEDELEITEGMRFDRGYISPYFITEAKTQKVEFEKPLILLSEKKISVLQDILPALETSSTQRRPLLIISEDIDGEALAACILNKLRGNIQVAAVKAPGFGDNRKSILGDLAILTGGTVFSDELDIKLERATPDLFGSTGSVTITKEDTILLNGDGSKDFINQRCEQIRAAINDASVSDYEKEKLQERLAKLSGGVAVIKVGGSSELEVGEKKDRFVDALNATRAAVEEGTVPGGGVALLKSIKCLDNLSPANFDQKLGIDIVKSALQKPAKTIVDNAGEEGAVIVGKILDNHVDDFNYGYDAAKGEYGDLVSRGIVDPLKVVRTALVDASGVASLLTTTECMITEAPEENKGAAGGMGRMGGMGGMGDMGMM

SEQ ID NO: 9650 - DNA, 1803 bp, Solanum commersonii
  CDS (1)..(1803)
atggcatctacttttgctggtatgtcctcagcaggtcccttggctgctcccagcacttcctcaaacaagctttcctctgttgctaatatatcttccacctctttcgggagcaaaagaaatgttgcactaagaaagtcacgcaggctgacaattttggctgcagctaaagagttgcacttcaacaaggatgggtcagctatcaagaagctacagaatggtgtgaacaaacttgctgatctagttggagttactcttggcccaaaaggcaggaatgttgtccttgagagcaagtatggtgctccaaaaattgttaatgatggagttactgtggccagagaggttgaattagaggatccagtaaaaaacattggtgcgaaactagtgagacaagctgctgccaaaaccaatgacctggctggggatgggactacaacatctgtcgtgctagctcagggcctaattgctgaaggtgttaaggtggttgcagctggtgcaaaccctgtcctaatcaccagaggaattgagaagacagcaaaagcattagtagctgagttgaaaaacatgtcaaaagaggtggaagacagtgaactaccagatgtggctgcagtaagtgctgggaacaatttggaagtagggagtatgattgctgaacccatgagcacggttggaaggaagggtgttgtgacactagaggagggtaaaagtgctgaaaacagtctgcgtgtggttgaaggaatgcaatttgaccgtggttacttcgctccttactttgttaccgacagtgagaaaatgtcagttgaatatgacaactgtaagttgctactggttgataaaaagataacaaatgcaaaagatcttgttaatgtcctgaaagatgctatcagaaatggttccccaactttaattattgccgaaaatattgaccaagaagctttggcgactcttgttgtcaataagcttagaggtgccttaaaggtcgctgcacttaaggctcctggttttggtgagcgaaaaagccagtatcttgatgacatagcaacccttactggaggcactgttattagggaggaacttggccttaccttggacaaggctgacaaggaagttctaggtcatgctgctaaagtagtgctgactaaggatgccactacaattgttggtgatggtagcactcaggaagcagtcaacaaacgtgttgctcagattaaaaacctgatagaggctgcagatcaagattatgaaaaggaaaagctaaatgaaagaattgctaagttatcaggaggtgtggctgtcatacaggttggagctcaaactgaaactgaattgaaggagaagaaacttagagtggaagatgctctcaatgcaacaaaggcggctgttgagagaggtattgttgttggaggagggtgcacgctcctcagacttgctgcaaaagttgatgcaataaagggaacccttgcaaatgatgaggagaaggttggagctgatattgtccaaagagcattgagctaccctttgaaattaattgctaaaaatgctggcgttaatggaagtgttgtcagtgagaaggtgctgtcaagtgatgatcccaaatttggatataatgctgcaactggcaactatgaagacttaataatggctgctggcatcattgatccaacaaaggtggtgaggtgttgtctagaacacgctgcatctgtggctaagacattcttgatgtcagattgcgtggtggttgagatcaaggagcccgaggcagcagttgctggcaacccaatggacaactcaggatacggttactag

SEQ ID NO: 9651 - protein, 600 aa, Solanum commersonii
MASTFAGMSSAGPLAAPSTSSNKLSSVANISSTSFGSKRNVALRKSRRLTILAAAKELHFNKDGSAIKKLQNGVNKLADLVGVTLGPKGRNVVLESKYGAPKIVNDGVTVAREVELEDPVKNIGAKLVRQAAAKTNDLAGDGTTTSVVLAQGLIAEGVKVVAAGANPVLITRGIEKTAKALVAELKNMSKEVEDSELPDVAAVSAGNNLEVGSMIAEPMSTVGRKGVVTLEEGKSAENSLRVVEGMQFDRGYFAPYFVTDSEKMSVEYDNCKLLLVDKKITNAKDLVNVLKDAIRNGSPTLIIAENIDQEALATLVVNKLRGALKVAALKAPGFGERKSQYLDDIATLTGGTVIREELGLTLDKADKEVLGHAAKVVLTKDATTIVGDGSTQEAVNKRVAQIKNLIEAADQDYEKEKLNERIAKLSGGVAVIQVGAQTETELKEKKLRVEDALNATKAAVERGIVVGGGCTLLRLAAKVDAIKGTLANDEEKVGADIVQRALSYPLKLIAKNAGVNGSVVSEKVLSSDDPKFGYNAATGNYEDLIMAAGIIDPTKVVRCCLEHAASVAKTFLMSDCVVVEIKEPEAAVAGNPMDNSGYGY

SEQ ID NO: 9652 - DNA, 1749 bp, Paracentrotus lividus
  CDS (1)..(1749)
atgtatagaatatccagtgtactccgacccctgacatccagggccctcacaccatcagtaaacagagctgtgtgcccacaccttgccaggagctatgctaaggacatcaagtttggagcagaagccagaggtatgatgctgcagggcgttgacctcttagctgatgctgtagcagtcactatgggacctaaggggcgtaatgtaattatagaacagagctggggcagtcccaaaatcacaaaagatggtgtcactgtcgctaaggctgtagagctcaaagacaaatggcagaacattggagctaagcttgtacaagacgttgcaaacaacaccaacgaggaggcaggagacggaaccacaacagcaacagttctggcccgagccattgccaaggagggctttgacaacatcagccgtggagccaatccaactgagatcaggaaaggaatcatgaatgctgtcgaggtcgtcattaaagagttacagaagcagtccaagccagtcacaacaccagaagaaatcgcccaggttgctaccatctcagctaatggagatgcaggaattggtgagctcatctccagggcaatgaagaaggtcggtcgccatggtgtcatcacagtcaaggacggcaagacattgaatgatgagcttgaggtcattgaaggtctcaagtttgacaggggttacatctcaccgtacttcatcaactcagctaaaggtcagaaagtagaattccaagatgccctcctcctgctgagtgagaagaagatctctaccatccaagccattgttcctgccttggagcttgctaatgctcagaggaaaccacttgttatcattgctgaagacgttgatggtgaagcactcagcacccttgttctcaacaggttaaaggttggtctccaggtggcagcagtcaaggcacctggttttggtgacaacaggaagaaccagcttcatgatatggctgtctctacaggaggcatggtatttggcgatgaagctatggaggtaaagattgaagatgttcagatccaggatctaggtcaggtcggtgagatcgctatcaccaaggatgacacactcattctcaagggtaagggaaagcaggaggatgtagacagaagagtagctgagattgctgaacagatcgagaacaccaactcagagtatgagagagagaagctcaatgaacgtcttgccaagctttctgatggtgttgcagtactgaaggtcggaggttcaagcgacgttgaggtgaatgagaagaaggaccgagtaaacgatgcattgaatgcaaccagggctgcagtagaggaaggtatcgtcctaggaggtggtaccgccctcatcagatgtcttccatgtctgcagaacgtcccagcagagaacgctgatcagaagattggagttgagattgtcaggagagacctccgtgtcccaacccagactatcgccaataacgctggtgtagagggagccctcattgttgagaaggtgattgactcatcggaggagattggttataacgccatggaaggagagtttgtagatatggtcaaggccggtatcattgatccaacaaaggttgtaaggacagcactcatggatgcatcgggcgtggcatctctcctgacgaccgccgagaccgtcatcactgagatccctaaggaagagaaggagatgccaatgggtggaggaggcatgggcggtatgggaggtatgggcggcatgggcggcatgatgtga

SEQ ID NO: 9653 - protein, 582 aa, Paracentrotus lividus
MYRISSVLRPLTSRALTPSVNRAVCPHLARSYAKDIKFGAEARGMMLQGVDLLADAVAVTMGPKGRNVIIEQSWGSPKITKDGVTVAKAVELKDKWQNIGAKLVQDVANNTNEEAGDGTTTATVLARAIAKEGFDNISRGANPTEIRKGIMNAVEVVIKELQKQSKPVTTPEEIAQVATISANGDAGIGELISRAMKKVGRHGVITVKDGKTLNDELEVIEGLKFDRGYISPYFINSAKGQKVEFQDALLLLSEKKISTIQAIVPALELANAQRKPLVIIAEDVDGEALSTLVLNRLKVGLQVAAVKAPGFGDNRKNQLHDMAVSTGGMVFGDEAMEVKIEDVQIQDLGQVGEIAITKDDTLILKGKGKQEDVDRRVAEIAEQIENTNSEYEREKLNERLAKLSDGVAVLKVGGSSDVEVNEKKDRVNDALNATRAAVEEGIVLGGGTALIRCLPCLQNVPAENADQKIGVEIVRRDLRVPTQTIANNAGVEGALIVEKVIDSSEEIGYNAMEGEFVDMVKAGIIDPTKVVRTALMDASGVASLLTTAETVITEIPKEEKEMPMGGGGMGGMGGMGGMGGMM

SEQ ID NO: 9654 - DNA, 1635 bp, Rhizobium meliloti
  CDS (1)..(1635): transl_table=11
atgtctgccaaggaaatcaaattctccactgatgcgcgcgatcgcatgctgcgtggtgtcgaattgctcaacaacgccgtcaaggtgacgctgggtcccaagggccgcaatgtcgtcatcgacaaggcctatggcgcgccgcgcatcaccaaggacggcgtcgccgttgccaaggaaatcgagctggccgacaagttcgagaacatgggcgcgcagatggtgcgcgaggtggcctctaggaccaacgacctcgccggtgacggcaccacgacggcgactgtgctcgctgcctccctcctgcgcgaaggcgccaagctcgtcgccgccggcatgaaccccatggatctcaaacgtggcatcgaccttggtgtcgctgctgtcgtcaaggaaatccaggcgcgcgccaagaaggtcgagtcctcgggcgagattgcccaagtcggcaccatcgccgccaatggcgacgcgacggtcggcgagatgatcgccaaggcgatggacaaggtcggcaatgaaggcgccatcaccgtcgaggaagccaagactgccgagaccgaactcgacgttgtcgagggcatgcaattcgaccgcggctatctctcgccctatttcgtcaccaatgccgagaagatgcgcgtggagctggaggacccctacatcctcatccacgaaaagaagcttggcaatttgcaagcgatgctgccgatactcgaggcggtcgtgcagagcggcaacccgttgctgatcctctctgaggatgtcgagggcgaggttctggcgacgctggtcgtaaacaagttgcgcggtggcctgaaggtcgcggccgtcaaggcgccgggcttcggcgaccgtcgcaaggccatactggaagacattgccgtcctcacggccggccagatgatctccgaggatctcggcatcaagctcgagaacgtcacgctcgacatgctcggccgcgccaagcgcgtgctgatcgagaaggacaccaccacgatcatcgccggctccggcgataaagctaccatccaggcgcgcatccggcagatcaaggcacagatcgaggagacgacctccgactatgacaaggaaaaactgcaggaacgcctggcgaaacttgccggcggcgtcgcggtaatccgcgtcggcggcgcgaccgaaatcgaggtcaaggaaaagaaggaccgcatcgacgatgcgctgaacgccacgcgcgccgcggctgaggaaggcattgttcctggcggtggcgttgccctgttacgcgccaggtcggtcctggtcggactggccggagcgaatgcggacgtcacggcgggcatctcgatcgtgctcagggcgcttgaaaccccgatccggcagatcgccgagaacgccggtgtcgaaggttcgatcgtcgtgggaaaactcaccgacggcagggattacaaccagggctttgacgcgcagacggagacctatgtcgacatgatcaaggccggcatcgtcgacccggcgaaggtcgtgcggaccgctttgcaggacgccggctcaatcgcggcacttctgatcactgccgaagcgatgatcgccgacatcccctcaagagaatctgcccggtcggccggtaacggcgacatgggcgggatgggatactga

SEQ ID NO: 9655 - protein, 544 aa, Rhizobium meliloti
MSAKEIKFSTDARDRMLRGVELLNNAVKVTLGPKGRNVVIDKAYGAPRITKDGVAVAKEIELADKFENMGAQMVREVASRTNDLAGDGTTTATVLAASLLREGAKLVAAGMNPMDLKRGIDLGVAAVVKEIQARAKKVESSGEIAQVGTIAANGDATVGEMIAKAMDKVGNEGAITVEEAKTAETELDVVEGMQFDRGYLSPYFVTNAEKMRVELEDPYILIHEKKLGNLQAMLPILEAVVQSGNPLLILSEDVEGEVLATLVVNKLRGGLKVAAVKAPGFGDRRKAILEDIAVLTAGQMISEDLGIKLENVTLDMLGRAKRVLIEKDTTTIIAGSGDKATIQARIRQIKAQIEETTSDYDKEKLQERLAKLAGGVAVIRVGGATEIEVKEKKDRIDDALNATRAAAEEGIVPGGGVALLRARSVLVGLAGANADVTAGISIVLRALETPIRQIAENAGVEGSIVVGKLTDGRDYNQGFDAQTETYVDMIKAGIVDPAKVVRTALQDAGSIAALLITAEAMIADIPSRESARSAGNGDMGGMGY

SEQ ID NO: 9656 - DNA, 1647 bp, Lawsonia intracellularis
  CDS (1)..(1647): transl_table=11
atggcttctaaagaaatcctttttgatgctaaagcccgtgaaaaactttcacgaggtgtagataaacttgcaaatgctgttaaagtaacacttggacctaaaggccgtaatgtcgttattgaaaagtcttttggttccccagttattacaaaagatggtgtatctgttgcaaaagaaattgaacttgaagataagtttgaaaatatgggcgctcaaatggttaaagaagtagcttccaaaactagcgatattgctggtgatggaactacaacagcaacagtccttgcacaagctatttatcgtgaaggtgtaaaacttgtagcagctggtcgtaatcctatggccattaaacgtggcatagataaagctgttgttgctgttactaaagaactaagcgacattacaaagcctactcgtgaccaaaaagaaatagctcaagttggaaccatttctgcaaactctgatacaacaataggtaatatcatagctgaagctatggctaaagttggaaaagaaggtgttatcacagttgaggaagctaaaggtcttgaaactacattagatgtggttgaaggaatgaagtttgaccgtggctacctctctccatactttgtaactaatcctgagaaaatggtttgtgaacttgataacccttatatcctttgtaatgagaagaagattactagcatgaaagacatgctaccaatcttagaacaagttgctaaagtaaaccgtccactccttattattgctgaagacgtagaaggtgaagcacttgcaacacttgtagtcaataagctccgtggagcactccaagttgtagccgtaaaagctcctggttttggtgaacgccgtaaagctatgcttgaagatattgctatccttactggaggaggagcaatatttgaagatcgtggtataaagcttgaaaatgtaagcttgtcttctttaggaacagctaaacgtgtagttattgacaaagaaaatactactatcgttgatggtgctggaaaatcagaagacattaaagctcgagttaaacaaattcgtgcacaaattgaagaaacaagctcagattatgatcgtgaaaaacttcaagaacgtcttgcaaaacttgttggtggagtagctgttatccatgttggagctgctactgaaactgaaatgaaagagaagaaggatcgtgtagaagatgctctaaatgcaacaagagctgcggttgaagaaggtattgtccctggtggtggtactgcttttgtccgctccattaaagtccttgatgatattaaacctgctgatgatgatgaacttgctggacttaatatcatccgtcgttctcttgaagagcctttacgtcaaattgctgcaaatgctggctatgaaggttctattgttgtagaaaaagttcgtgaagcaaaagatggttttggatttaatgctgcatcaggagaatatgaagaccttattaaagctggtgtcattgatcctaaaaaagttacacgtattgcattacaaaatgcagcatcagtagcctccttacttctaactacagaatgcgctattgctgaaaaaccagaacctaaaaaagatatgcctatgcctggcggtggtatgggtggtatgggtggtatggacggtatgtactag

SEQ ID NO: 9657 - protein, 548 aa, Lawsonia intracellularis
MASKEILFDAKAREKLSRGVDKLANAVKVTLGPKGRNVVIEKSFGSPVITKDGVSVAKEIELEDKFENMGAQMVKEVASKTSDIAGDGTTTATVLAQAIYREGVKLVAAGRNPMAIKRGIDKAVVAVTKELSDITKPTRDQKEIAQVGTISANSDTTIGNIIAEAMAKVGKEGVITVEEAKGLETTLDVVEGMKFDRGYLSPYFVTNPEKMVCELDNPYILCNEKKITSMKDMLPILEQVAKVNRPLLIIAEDVEGEALATLVVNKLRGALQVVAVKAPGFGERRKAMLEDIAILTGGGAIFEDRGIKLENVSLSSLGTAKRVVIDKENTTIVDGAGKSEDIKARVKQIRAQIEETSSDYDREKLQERLAKLVGGVAVIHVGAATETEMKEKKDRVEDALNATRAAVEEGIVPGGGTAFVRSIKVLDDIKPADDDELAGLNIIRRSLEEPLRQIAANAGYEGSIVVEKVREAKDGFGFNAASGEYEDLIKAGVIDPKKVTRIALQNAASVASLLLTTECAIAEKPEPKKDMPMPGGGMGGMGGMDGMY

SEQ ID NO: 9658 - DNA, 1647 bp, Escherichia coli
  CDS (1)..(1647): transl_table=11
atggcagctaaagacgtaaaattcggtaacgacgctcgtgtgaaaatgctgcgcggcgtaaacgtactggcagatgcagtgaaagttaccctcggtccaaaaggccgtaacgtagttctggataaatctttcggtgcaccgaccatcaccaaagatggtgtttccgttgctcgtgaaatcgaactggaagacaagttcgaaaatatgggtgcgcagatggtgaaagaagttgcctctaaagcaaacgacgctgcaggcgacggtaccaccactgcaaccgtactggctcaggctatcatcactgaaggtctgaaagctgttgctgcgggcatgaacccgatggacctgaaacgtggtatcgacaaagcggttaccgctgcagttgaagaactgaaagcgctgtccgtaccatgctctgactctaaagcgattgctcaggttggtaccatctccgctaactccgacgaaaccgtaggtaaactgatcgctgaagcgatggacaaagtcggtaaagaaggcgttatcaccgttgaagacggtaccggtctgcaggacgaactggacgtggttgaaggtatgcagttcgaccgtggctacctgtctccttacttcatcaacaagccggaaactggcgcagtagaactggaaagcccgttcatcctgctggctgacaagaaaatctccaacatccgcgaaatgctgccggttctggaagctgttgccaaagcaggcaaaccgctgctgatcatcgctgaagatgtagaaggcgaagcgctggcaactgctgttgttaacaccattcgtggcatcgtgaaagtcgctgcggttaaagcaccgggcttcggcgatcgtcgtaaagctatgctgcaggatatcgcaaccctgactggcggtaccgtgatctctgaagagatcggtatggagctggaaaaagcaaccctggaagacctgggtcaggctaaacgtgttgtgatcaacaaagacaccaccactatcatcgatggcgtgggtgaagaagctgcaatccagggccgtgttgctcagatccgtcagcagattgaagaagcaacttctgactacgaccgtgaaaaactgcaggaacgcgtagcgaaactggcaggcggcgttgcagttatcaaagtgggtgctgctaccgaagttgaaatgaaagagaaaaaagcacgcgttgaagatgccctgcacgcgacccgtgctgcggtagaagaaggcgtggttgctggtggtggtgttgcgctgatccgcgtagcgtctaaactggctgacctgcgtggtcagaacgaagaccagaacgtgggtatcaaagttgcactgcgtgcaatggaagctccgctgcgtcagatcgtattgaactgcggcgaagaaccgtctgttgttgctaacaccgttaaaggcggcgacggcaactacggttacaacgcagcaaccgaagaatacggcaacatgatcgacatgggtatcctggatccaaccaaagtaactcgttctgctctgcagtacgcagcttctgtggctggcctgatgatcaccaccgaatgcatggttaccgacctgccgaaaaacgatgcagctgacttaggcgctgctggcggtatgggcggcatgggtggcatgggcggcatgatgtaa

SEQ ID NO: 9659 - protein, 548 aa, Escherichia coli
MAAKDVKFGNDARVKMLRGVNVLADAVKVTLGPKGRNVVLDKSFGAPTITKDGVSVAREIELEDKFENMGAQMVKEVASKANDAAGDGTTTATVLAQAIITEGLKAVAAGMNPMDLKRGIDKAVTAAVEELKALSVPCSDSKAIAQVGTISANSDETVGKLIAEAMDKVGKEGVITVEDGTGLQDELDVVEGMQFDRGYLSPYFINKPETGAVELESPFILLADKKISNIREMLPVLEAVAKAGKPLLIIAEDVEGEALATAVVNTIRGIVKVAAVKAPGFGDRRKAMLQDIATLTGGTVISEEIGMELEKATLEDLGQAKRVVINKDTTTIIDGVGEEAAIQGRVAQIRQQIEEATSDYDREKLQERVAKLAGGVAVIKVGAATEVEMKEKKARVEDALHATRAAVEEGVVAGGGVALIRVASKLADLRGQNEDQNVGIKVALRAMEAPLRQIVLNCGEEPSVVANTVKGGDGNYGYNAATEEYGNMIDMGILDPTKVTRSALQYAASVAGLMITTECMVTDLPKNDAADLGAAGGMGGMGGMGGMM

SEQ ID NO: 9660 - DNA, 1836 bp, Arabidopsis thaliana
  CDS (1)..(1836)
atggctttctcacaagctgctctctctgcgttgcctctttctgatcgaactttccgcaaaaagccatcttcttcttcttcatcttcaccgaatttcgttctgagagtaagagctgctgcaaaagaagttcactttaaccgtgatggctctgtcaccaagaagcttcaggcaggtgcagatatggtggctaaactattaggcgtgacgttaggtccaaagggacgaaacgtggtgttgcagaacaagtacgggcctcctaggattgtcaatgacggtgaaactgttcttaaagagattgaattggaggacccgttagagaatgttggagtgaaacttgtgaggcaagcgggtgctaagactaatgaccttgccggtgatggttccactacatctataattcttgctcatggccttattactgaaggtattaaggtgatttctgctggaacaaatcccatccaagttgcccgtggtattgagaaaaccacaaaagctcttgttttagagctcaagtcaatgtccagagagattgaagatcatgagcttgctcatgttgcagcagttagtgcggggaatgactacgaagtgggaaacatgatttccaatgcttttcaacaagtaggaaggactggtgtagtaacaatagagaaaggaaaataccttgtgaacaatctcgagattgtggaaggaatgcagtttaatcgtggctacttatcgccatactttgtcactgatcgaaggaagagggaagctgaattccatgattgcaagctgcttttggtagataagaaaataacaaatccaaaagatatgttcaagatattggattctgctgttaaagaggaatttccagttctaatagttgccgaagatattgagcaagacgctcttgctcctgttattaggaacaaactaaaaggtaacctgaaggtggcagccatcaaagctcctgcttttggggagcgcaagagtcactgcttggatgatcttgcaatctttactggagccaccgtgatcagagatgagatgggcctgagcttagaaaaggctggaaaggaggtcttaggaacagcaaaaagggttcttgttactaaggattcaacactgattgttaccaacggattcacccagaaagcagtcgacgaaagggtttcgcagattaaaaatcttatcgagaacaacgaggagaattttcagaagaagatcctcaatgaaagagtagccagattatctggtggaattgcaataatccaggtaggtgcactgacacaagttgagttgaaggataaacagctaaaggttgaagatgccctgaatgcaactaagtcagcaattgaagaagggattgtagttggtggtggttgcgccctcttgcgactggctacaaaagtggacagaatcaaagagacccttgacaacacagaacagaagattggagctgaaatcttcaagaaagcattgagctaccccataagacttatagccaaaaacgcagacacaaatggcaatatcgtcatagaaaaggtcttatcgaacaaaaacaccatgtacggttacaatgctgcaaagaatcaatatgaagatctgatgttggctggtataattgatccaaccaaggttgtgagatgttgcttggaacacgcttcatcagtggctcaaacgtttctgacatcggattgcgttgtagttgagatcaaagaaatcaaaccaagaccaatcattaatccaccattacctacttcttctccagctacctcctccatgttccctgacagaaaattaccaagatttcctcaaattatgccaagaactcgaagccactttccacggaagtag

SEQ ID NO: 9661 - protein, 611 aa, Arabidopsis thaliana
MAFSQAALSALPLSDRTFRKKPSSSSSSSPNFVLRVRAAAKEVHFNRDGSVTKKLQAGADMVAKLLGVTLGPKGRNVVLQNKYGPPRIVNDGETVLKEIELEDPLENVGVKLVRQAGAKTNDLAGDGSTTSIILAHGLITEGIKVISAGTNPIQVARGIEKTTKALVLELKSMSREIEDHELAHVAAVSAGNDYEVGNMISNAFQQVGRTGVVTIEKGKYLVNNLEIVEGMQFNRGYLSPYFVTDRRKREAEFHDCKLLLVDKKITNPKDMFKILDSAVKEEFPVLIVAEDIEQDALAPVIRNKLKGNLKVAAIKAPAFGERKSHCLDDLAIFTGATVIRDEMGLSLEKAGKEVLGTAKRVLVTKDSTLIVTNGFTQKAVDERVSQIKNLIENNEENFQKKILNERVARLSGGIAIIQVGALTQVELKDKQLKVEDALNATKSAIEEGIVVGGGCALLRLATKVDRIKETLDNTEQKIGAEIFKKALSYPIRLIAKNADTNGNIVIEKVLSNKNTMYGYNAAKNQYEDLMLAGIIDPTKVVRCCLEHASSVAQTFLTSDCVVVEIKEIKPRPIINPPLPTSSPATSSMFPDRKLPRFPQIMPRTRSHFPRK

SEQ ID NO: 9662 - DNA, 1725 bp, Schistosoma japonicum
  CDS (1)..(1725)
atgttacgagctctaagttcacttcgtggtagtttggttccagctagacaaaaagttgttcaaaggttttatgcaaaggaagtgaagttcggggctgacgcaagatcagctatgttgattggtgttgatgtactggcggatgctgttgcagtcaccatgggccctaaaggtcgtaacgtaataatagaaagctcgtggaaatctccaaaaatcacaaaagatggggttactgttgccaaaggtattgagctgaaggataagttccagaatattggggctaagttagtacaggacgttgctaacaacaccaacgaagaggctggggatggtactacaacagccactgttttagcgcgagctatagctaaagagggttttgaaaagataagtaaaggcgctaatcctatcgagttccgaagaggtgttatgcttgctgttgatgctgttgtcaaagagctcaaatctttttcgaagcaaatatccacaccagaagagatagcacaagttgcgacaatatccgctaacggtgacaaggctattggcgacctaatcgcttcagctatgaagagggttgggaatgatggcacgataactgttaaggatggcaaaactcttcacgatgagttggagtttatcgaaggtatgaaattcgaccgtggttatatctctccatattttatcaacactgagaaaggagcccgatgtgaattccaagatgccttcatattgttttctgaaaaaaagataaacagcattcagacattattaccagctctcgaactatgccaccaacaaaaacggccgctgctgattatcgccaaggatgttgagggtgaagctcttacagcacttgtactaaatcgcttaaaactgggcttacaggtctgtgcagtcaaggcacccaaggttttcggggataatcgcgaaaaatacattaaaagatatggctgtagcaacaggggtatagtgttcgggacgaagcagatatttgtccaagttagaggatgtacaactgcaagatttgggacgtgtttcagaagctgtaataacaaaagacgattgtttactaatgcgaggtcgtggaaacaaaatggacatcgacaaacgtatcgccacaaattaaagatgaaatggaagcctccaacagcgagtatgaaaaaagaaaaaatgcacgaacgcttggccaagttgtcaaacggcgtcgcagtaattaaggttggtggaagtagtgaagtagaagttagtgagaaaaaggatcgatatactgatgcactcaatgcaacgagagcagcaattgaggaaggcatagtgcctggtggtggcactgctttgctgcgatgcattcctgtcctggatacgttatctaccaagaacgaagatcagcgaacaggtgtgcggattgttctacgtgcactttcaactccgtgctataccattgcacataacgcaggtgtcaacgcctctgttgtcgttgaaaaagtcaaaggtatgagccagaatatgggttacgatgctcaaaatgatgtttacgttgatatgatcgaggctgggattattgacccaactaaggtcgtcagaactgcattggttgatgcagctggtgttgcttccttactcacaactgcagaaaccgtggtgacggatttaccaaaagaagagaccggaggcaacgcagcaggaatgggtgggatgggaggtatgggtggaatgggaggcatgatgtaa

SEQ ID NO: 9663 - protein, 574 aa, Schistosoma japonicum
MLRALSSLRGSLVPARQKVVQRFYAKEVKFGADARSAMLIGVDVLADAVAVTMGPKGRNVIIESSWKSPKITKDGVTVAKGIELKDKFQNIGAKLVQDVANNTNEEAGDGTTTATVLARAIAKEGFEKISKGANPIEFRRGVMLAVDAVVKELKSFSKQISTPEEIAQVATISANGDKAIGDLIASAMKRVGNDGTITVKDGKTLHDELEFIEGMKFDRGYISPYFINTEKGARCEFQDAFILFSEKKINSIQTLLPALELCHQQKRPLLIIAKDVEGEALTALVLNRLKLGLQVCAVKAPKVFGDNREKYIKRYGCSNRGIVFGTKQIFVQVRGCTTARFGTCFRSCNNKRRLFTNARSWKQNGHRQTYRHKLKMKWKPPTASMKKEKMHERLAKLSNGVAVIKVGGSSEVEVSEKKDRYTDALNATRAAIEEGIVPGGGTALLRCIPVLDTLSTKNEDQRTGVRIVLRALSTPCYTIAHNAGVNASVVVEKVKGMSQNMGYDAQNDVYVDMIEAGIIDPTKVVRTALVDAAGVASLLTTAETVVTDLPKEETGGNAAGMGGMGGMGGMGGMM

SEQ ID NO: 9664 - DNA, 1719 bp, Liriomyza sativae (vegetable leafminer)
  CDS (1)..(1719)
atgttccgtttacctgcaacattagcacgtactgcattacgccgtcacagggaagtgcgcagctatgcaaaagatgtgaaatttggcccagaagtcagagcaatgatgttacaaggagttgatgtacttgccgatgctgtgcctgttacaatgggtcccaaaggacgtaatgttattattgaacaatcctgggtttcacccaaaataactaaggatggtgtaacagttgccaaatcaattgaattgaaagacaaattccaaaatattggtgccaatttgatacagtatgtgtccaacaacaccaatgaggaagcgggggatgggacgacgtcagcaacagttttggcacgtgctattgcaaaagagggttttgaaaagatctcaaagggtgccaatcctgtagaaattcgtcgtggtgtcatgttggctgttgacactgtcaaggatcatttaaaatccatgtcacgtccagttaaaaccccagaagaaattgctcaagtggccacaatctcagctaatggtgacaaagccattggtaacttgctcagtgaagccatgaagaaagttggacgtgatggtgtcattactgtcaaagacggtaagactctcattgatgaattggaggtcattgagggtatgaaatttgatcgtggatacatttctccctactttattaattccgccaaaggagccaaggtggaattccaagatgctttattgttgctatctgaaaagaaaatttcaaatgtgcaaagtattattcctgctttggagttggccaatagccaacgtaaacccttggttatcattgctgaagacatcgatggtgaggcattgagcactttggtagtaaaccgtttgaaaattggactacaagtagctgctgtcaaagcccccggcttcggcgaaaatcgtaaatccacactcactgacatggccattgctactggtggcatcgtttttggtgatgaagccaacttggtcaaactcgaggatgtcaacatcaacgatttgggcaaagtaggtgaggttgttatcaccaaggatgatacattatttttaagaggcaagggaaagaaggaggatattgatcgtcgtgttgaacaaattagagatcaaatagctgacaccacctcggaatatgaaaaggagaaattgcaagaacgtttggcacgtttggcatctggtgtggctcttttgcgtgtaggtggctccagtgaagtggaagtgaatgagaaaaaagatcgtgtacatgatgctttgaatgccacacgtgcagcagtagaggaaggtattgtgcccggtggtggtaccgctttattgcgttgcattccagtgttggagggcttgaagggtcaaaatgatgatcaaaacatgggtatcgaaatagtacgccgtgcattgcgtatgccttgcatgactattgccaaaaacgctggcgttgatggtgccatggttgtggctaaagttgaaacacaatccggtgattacggttatgatgcgctgaagggcgagtacggcaatttgattgaaaagggaatcattgatccaacaaaggttgtacgcacagccatcacagatgcttctggtgttgcatcgcttttgactacagctgaagctgtcgtaactgaaattccaaaggaagatggccctgcaatgcctggtatgggaggcatgggaggaatgggtggtatgggcagtatgggtggtatgatgtaa

SEQ ID NO: 9665 - protein, 572 aa, Liriomyza sativae (vegetable leafminer)
MFRLPATLARTALRRHREVRSYAKDVKFGPEVRAMMLQGVDVLADAVPVTMGPKGRNVIIEQSWVSPKITKDGVTVAKSIELKDKFQNIGANLIQYVSNNTNEEAGDGTTSATVLARAIAKEGFEKISKGANPVEIRRGVMLAVDTVKDHLKSMSRPVKTPEEIAQVATISANGDKAIGNLLSEAMKKVGRDGVITVKDGKTLIDELEVIEGMKFDRGYISPYFINSAKGAKVEFQDALLLLSEKKISNVQSIIPALELANSQRKPLVIIAEDIDGEALSTLVVNRLKIGLQVAAVKAPGFGENRKSTLTDMAIATGGIVFGDEANLVKLEDVNINDLGKVGEVVITKDDTLFLRGKGKKEDIDRRVEQIRDQIADTTSEYEKEKLQERLARLASGVALLRVGGSSEVEVNEKKDRVHDALNATRAAVEEGIVPGGGTALLRCIPVLEGLKGQNDDQNMGIEIVRRALRMPCMTIAKNAGVDGAMVVAKVETQSGDYGYDALKGEYGNLIEKGIIDPTKVVRTAITDASGVASLLTTAEAVVTEIPKEDGPAMPGMGGMGGMGGMGSMGGMM

SEQ ID NO: 9666 - DNA, 1719 bp, Liriomyza huidobrensis (pea leafminer)
  CDS (1)..(1719)
atgttccgtttacctgctacattagcacgtactgcattacgtcgtcaattggcagtgcgcagttacgcaaaagatgttaaattcggtcccgaagtaagagctatgatgttgcaaggagtagatgtacttgctgatgctgtggcagttaccatgggtccaaaaggccgtaatgttattattgaacaatcttggggttcaccaaaaatcactaaggatggggtcacagttgccaaatcaattgaattgaaggacgaattccaaaatattggtgcaaaattggtacaagatgtggccaacaacactaatgaagaagcgggggatgggacgacgtcagccactgtattggcacgtgcaattgctaaggaaggatttgagaaaatttcaaagggtgctaatcctgtagaaattcgtcgtggtgtcatgttggctgtagatactgtcaaagatcatttgaaatcaatgtctcgtccagttaagactccagaagaaatagctcaagtagccaccatctcagctaatggagacaaggccattggtaacttgttgagtgaagctatgaagaaggtaggccgtgatggtgttattactgtcaaggatggtaagactttgattgatgaattggaagttattgagggcatgaaattcgatcgtggttacatttccccctacttcattaactcctccaaaggagctaaagtagaattccaagatgctcttttgttgttgtctgagaagaaaatttcaaatgtgcaaagcattattccagctttggaattggccaatagccaacgcaaacctttagtcattattgctgaagatattgatggcgaagctttgagcactttggtagtcaaccgtttgaaaattggactacaagttgctgcagtcaaagcccccggcttcggcgaaaatcgtaaatccaccctcaccgatatgcccattgctactggtggtattgttttcggcgatgaagccaatttggtcaaacttgaagatatcaatatcaacgatttgggcaaagtaggtgaggttgtcattaccaaggatgatacattgttgttaaaaggcaaaggaaagaaagaggatattgaacgtcgtactgaacaaatcagagatcaaatcgctgataccacctctgaatatgaaaaggagaaattacaagaacgtttagctcgtttggcttctggagtagcacttttgcgtgttggtggatccagtgaagtagaagttaatgaaaagaaagacagagtacatgatgcttcgaatgccacacgtgctgcagtagaagaaggtattgtgcccggtggtggtactgctctattgcgttgcattccagttttggaaggtatgaagggtcaaaatgaagatcaaaacatgggcattgaaattgttcgtcgtgcattgcgtatgccttgcatgacaattgccaaaaacgcaggcgttgatggtgccatggttgttgctaaagttgaaactcaatctggtgattatggttatgatgcacttaagggtgaatacggcaatcttattgaaaagggaatcattgatccaacaaaggttgtacgcacagctatcacagatgctgctggtgttgcatcacttttgactacagctgaggccgttgtaactgatattccaaaggaagatggccctgcaatgcctggtatgggtggtatgggaggaatgggtggtatgggcggtatgggtggtatgatgtaa

SEQ ID NO: 9667 - protein, 572 aa, Liriomyza huidobrensis (pea leafminer)
MFRLPATLARTALRRQLAVRSYAKDVKFGPEVRAMMLQGVDVLADAVAVTMGPKGRNVIIEQSWGSPKITKDGVTVAKSIELKDEFQNIGAKLVQDVANNTNEEAGDGTTSATVLARAIAKEGFEKISKGANPVEIRRGVMLAVDTVKDHLKSMSRPVKTPEEIAQVATISANGDKAIGNLLSEAMKKVGRDGVITVKDGKTLIDELEVIEGMKFDRGYISPYFINSSKGAKVEFQDALLLLSEKKISNVQSIIPALELANSQRKPLVIIAEDIDGEALSTLVVNRLKIGLQVAAVKAPGFGENRKSTLTDMPIATGGIVFGDEANLVKLEDININDLGKVGEVVITKDDTLLLKGKGKKEDIERRTEQIRDQIADTTSEYEKEKLQERLARLASGVALLRVGGSSEVEVNEKKDRVHDASNATRAAVEEGIVPGGGTALLRCIPVLEGMKGQNEDQNMGIEIVRRALRMPCMTIAKNAGVDGAMVVAKVETQSGDYGYDALKGEYGNLIEKGIIDPTKVVRTAITDAAGVASLLTTAEAVVTDIPKEDGPAMPGMGGMGGMGGMGGMGGMM

SEQ ID NO: 9668 - DNA, 1641 bp, Cytophaga sp. FIRDI-133-V546
  CDS (1)..(1641): transl_table=11
atggtaaaagaaatgaagtttagcgaagacgcacgtcgttccatgttacgtggtgtagataaattagcggacgcagtaaaagtaacgcttggaccaaaaggtcgtaacgtagttctagagaagaaatttggttctcctttaattacaaatgacggtgttacaatcgcaaaagaaatcgaattagaagatgcattcgaaaacatgggtgcaaaacttgtagctgaagttgcaagcaaaacaaatgatgttgctggagacggtacaacaactgcaacagtattagcacaagcgctaattcgtgaaggtcttaaaaacgtaacggctggtgcgaacccagttggactacgtaaagggattgaaaaagctgtagctgtagctgttgaagagctaaaagcgatttcaaaaccaatcgaaggtaaagaatcaatcgctcaagttgcggcaatctctgctgctgacgatgaagtaggtcaattaatcgcagaagctatggagcgcgtaggtaacgacggcgttatcacattagaagagtctaaagggttcacgactgaacttgaagtggtagaaggtatgcaattcgaccgtggatatgcatctccttacatggtaactgactctgataaaatggaagctgtgttagaaaatccgtatatcttaatcacagataaaaagatctctaacattcaagaaattttaccagtattagagcaagtggtacaacaaggtaaaccactattactaatcgctgaagatgttgaaggtgaagcattagctacattagtagtgaacaaactacgtggtacattcaatgcagtagctgttaaagcgcctggattcggtgaccgtcgtaaagcaatgctagaagacatctctacattaactggtggagaagtaatcactgaagagatcggtttagatcttaaatcatctacaatcgaccaattaggtcgcgcagcgaaagttgttgttacaaaagaacacacaacaatcgttagcggtgctggtaacccagctgaaatcgatgctcgcgtaaaacaaatccgcgctcaattagaagaaacaacttctgaatttgaccgtgaaaaattacaagagcgcctagctaaattagctggtggagtagcagtaatcaaagttggtgctgcaactgaaacagaacttaaagaacgtaaattacgtatcgaagacgcattaaactctactcgtgctgcggttgaagaaggtatcgtagctggtggtggtactgcgctagtaaatatctataataaagtagctggagttgaagcagaaggtgacgaagctactggtatcaacatcgtactacgtgcgatcgaagaaccagttcgtcaaatcgctcacaacgcaggtcttgaaggatctgtaatcatcgagcgcttgaaaaacgaagcagttggcgtaggcttcaacgcagcttctggcaaatgggtaaacatgatcgaaacaggaatcgttgacccaacaaaagtaactcgctcagctcttcaaaacgcagcatctgtagcagcaatgttcttaactacagaagctgtagtagctgacaaaccagaaccagctggcgcttctggcatgcctgacatgtccggaatgggcggtatgggtggaatgggtggcatgatgtaa

SEQ ID NO: 9669 - protein, 546 aa, Cytophaga sp. FIRDI-133-V546
MVKEMKFSEDARRSMLRGVDKLADAVKVTLGPKGRNVVLEKKFGSPLITNDGVTIAKEIELEDAFENMGAKLVAEVASKTNDVAGDGTTTATVLAQALIREGLKNVTAGANPVGLRKGIEKAVAVAVEELKAISKPIEGKESIAQVAAISAADDEVGQLIAEAMERVGNDGVITLEESKGFTTELEVVEGMQFDRGYASPYMVTDSDKMEAVLENPYILITDKKISNIQEILPVLEQVVQQGKPLLLIAEDVEGEALATLVVNKLRGTFNAVAVKAPGFGDRRKAMLEDISTLTGGEVITEEIGLDLKSSTIDQLGRAAKVVVTKEHTTIVSGAGNPAEIDARVKQIRAQLEETTSEFDREKLQERLAKLAGGVAVIKVGAATETELKERKLRIEDALNSTRAAVEEGIVAGGGTALVNIYNKVAGVEAEGDEATGINIVLRAIEEPVRQIAHNAGLEGSVIIERLKNEAVGVGFNAASGKWVNMIETGIVDPTKVTRSALQNAASVAAMFLTTEAVVADKPEPAGASGMPDMSGMGGMGGMGGMM

SEQ ID NO: 9670 - DNA, 1647 bp, Escherichia coli
  CDS (1)..(1647): transl_table=11
atggcagctaaagacgtaaaattcggtaacgacgctcgtgtgaaaatgctgcgcggcgtaaacgtactggcagatgcagtgaaagttaccctcggtccaaaaggccgtaacgtagttctggataaatctttcggtgcaccgaccatcaccaaagatggtgtttccgttgctcgtgaaatcgaactggaagacaagttcgaaaatatgggtgcgcagatggtgaaagaagttgcctctaaagcaaacgacgctgcaggcgacggtaccaccactgcaaccgtactggctcaggctatcatcactgaaggtctgaaagctgttgctgcgggcatgaacccgatggacctgaaacgtggtatcgacaaagcggttaccgttgcagttgaagaactgaaagcgctgtccgtaccatgctctgactctaaagcgattgctcaggttggtaccatctccgctaactccgacgaaaccgtaggtaaactgatcgctgaagcgatggacaaagtcggtaaagaaggcgttatcaccgttgaagacggtaccggtctgcaggacgaactggacgtggttgaaggtatgcagttcgaccgtggctacctgtctccttacttcatcaacaagccggaaactggcgcagtagaactggaaagcccgttcatcctgctggctgacaagaaaatctccaacatccgcgaaatgctgccggttctggaagctgttgccaaagcaggcaaaccgctgctgatcatcgctgaagatgtagaaggcgaagcgctggcaactctggttgttaacaccatgcgtggcatcgtgaaagtcgctgcggttaaagcaccgggcttcggcgatcgtcgtaaagctatgctgcaggatatcgcaaccctgactggcggtaccgtgatctctgaagagatcggtatggagctggaaaaagcaaccctggaagacctgggtcaggctaaacgtgttgtgatcaacaaagacaccaccactatcatcgatggcgtgggtgaagaagctgcaatccagggccgtgttgctcagatccgtcagcagattgaagaagcaacttctgactacgaccgtgaaaaactgcaggaacgcgtagcgaaactggcaggcggcgttgcagttatcaaagtgggtgctgctaccgaagttgaaatgaaagagaaaaaagcacgcgttgaagatgccctgcacgcgacccgtgctgcggtagaagaaggcgtggttgctggtggtggtgttgcgctgatccgcgtagcgtctaaactggctgacctgcgtggtcagaacgaagaccagaacgtgggtatcaaagttgcactgcgtgcaatggaagctccgctgcgtcagatcgtattgaactgcggcgaagaaccgtctgttgttgctaacaccgttaaaggcggcgacggcaactacggttacaacgcagcaaccgaagaatacggcaacatgatcgacatgggtatcctggatccaaccaaagtaactcgttctgctctgcagtacgcagcttctgtggctggcctgatgatcaccaccgaatgcatggttaccgacctgccgaaaaacgatgcagctgacttaggcgctgctggcggtatgggcggcatgggtggcatgggcggcatgatgtaa

SEQ ID NO: 9671 - protein, 548 aa, Escherichia coli
MAAKDVKFGNDARVKMLRGVNVLADAVKVTLGPKGRNVVLDKSFGAPTITKDGVSVAREIELEDKFENMGAQMVKEVASKANDAAGDGTTTATVLAQAIITEGLKAVAAGMNPMDLKRGIDKAVTVAVEELKALSVPCSDSKAIAQVGTISANSDETVGKLIAEAMDKVGKEGVITVEDGTGLQDELDVVEGMQFDRGYLSPYFINKPETGAVELESPFILLADKKISNIREMLPVLEAVAKAGKPLLIIAEDVEGEALATLVVNTMRGIVKVAAVKAPGFGDRRKAMLQDIATLTGGTVISEEIGMELEKATLEDLGQAKRVVINKDTTTIIDGVGEEAAIQGRVAQIRQQIEEATSDYDREKLQERVAKLAGGVAVIKVGAATEVEMKEKKARVEDALHATRAAVEEGVVAGGGVALIRVASKLADLRGQNEDQNVGIKVALRAMEAPLRQIVLNCGEEPSVVANTVKGGDGNYGYNAATEEYGNMIDMGILDPTKVTRSALQYAASVAGLMITTECMVTDLPKNDAADLGAAGGMGGMGGMGGMM

SEQ ID NO: 9672 - DNA, 1767 bp, Anemonia viridis
  CDS (1)..(1767)
atgtaccgattaccaagtttaattcgtccaggaagactagtactatcaagccgaagccttgtccctcgtcttggagctagttttagtacctccccgcagcaaaatgccaaggaactcaaatttggtgctgatgctagatcctccatgttgcaaggagtggaggttttagctgatgctgttgcagtcactttaggtccaaagggaagaaatgttataatcgaacaaagttttggtggaccaaaaataaccaaagatggtgttacagttgccaaagccattgaacttaaggacaaattccaaaatattggtgctcgtctggttcaagatgtagcgaacaacacaaatgaagaggctggagatggaacaacaacagcgactgtactggccagatcaatagcaacagaaggtttcagcaaggtgtcaaaaggtgccaacccacaggaagtaagaagaggtgtgatgttagctgttgagaatatagtagactcactgaagcaaatgtctaaacctgttactacccctgaagaaatagcacaggtagcaacaatttcagcaaatggggataaaagaataggggagttgatctcttctgcaatgaaaagagttggcagaagtggtgttattacagtcaaggatggtaaaacacttaatgatgaaatggaagtcattgaaggaatgaagtttgacagaggacatatttctccatattttattaacacagctaaaggccaaaaggttgaatatcaggactgtcttgtacttttgtgccagaagaagatctcttcaatccaacaaatagtccctgctctagaacttgctaattcccatagaaaacctcttgttattgttgctgaagatgtcgatggtgaagcccttaccacccttgtcttgaacagacttaaagttggtctacaaattgctgcagtaaaggcaccaggttttggtgataatcgcaagaatatgctgcaagatatggccattgcaacaggaggcatggtgtttggtgatgaagcacttgaaacaaagttggaagacatccagatacaagactttggagaagttggtgaggtatctatcaccaaagatgatacactattcctcaggggcaagggaagccaagaagatgtagaaaaacgctgtgaccacatcaaagaagaattggatagcacaaattctgaatatgaaaaagagaagctgaatgaaagattagctaagctgtctgatggtgttgctatcttaaagattggaggatccagtgaagtagaagtaaatgagaagaaagacagagtaactgatgctttgaatgctacccgtgctgcagtagaagaaggcatagtgcctggtggtggagtagcgttactcagacgtactaataacttgaacgaccttaaactagagaatgctgaacaagagattggtgtagaattagtaatcaaagccctgcgaaaaccacttcacacaattgctgaaaatgctggtgttgaagctgcacttgtcgtagaaaaggtactacaacaaaatgggaactccggatatgacgcacaaaataacaaatacgtcgatatgattcaagaaggcatcatcgaccctaccaaggtggtacgtaccgccatcacagatgctgcaggagttgcctcactcctcaccactgccgagacagtcatcgtagaagctcccaaggatgagaaagacccaatggctggcatgggaggaatgggtggaatgggaggaatgggtgggatgggaggaatgggagggatgatgtag

SEQ ID NO: 9673 - protein, 588 aa, Anemonia viridis
MYRLPSLIRPGRLVLSSRSLVPRLGASFSTSPQQNAKELKFGADARSSMLQGVEVLADAVAVTLGPKGRNVIIEQSFGGPKITKDGVTVAKAIELKDKFQNIGARLVQDVANNTNEEAGDGTTTATVLARSIATEGFSKVSKGANPQEVRRGVMLAVENIVDSLKQMSKPVTTPEEIAQVATISANGDKRIGELISSAMKRVGRSGVITVKDGKTLNDEMEVIEGMKFDRGHISPYFINTAKGQKVEYQDCLVLLCQKKISSIQQIVPALELANSHRKPLVIVAEDVDGEALTTLVLNRLKVGLQIAAVKAPGFGDNRKNMLQDMAIATGGMVFGDEALETKLEDIQIQDFGEVGEVSITKDDTLFLRGKGSQEDVEKRCDHIKEELDSTNSEYEKEKLNERLAKLSDGVAILKIGGSSEVEVNEKKDRVTDALNATRAAVEEGIVPGGGVALLRRTNNLNDLKLENAEQEIGVELVIKALRKPLHTIAENAGVEAALVVEKVLQQNGNSGYDAQNNKYVDMIQEGIIDPTKVVRTAITDAAGVASLLTTAETVIVEAPKDEKDPMAGMGGMGGMGGMGGMGGMGGMM

SEQ ID NO: 9674 - DNA, 1803 bp, Neocallimastix patriciarum
  CDS (1)..(1803)
atgttatctgcaagatcattaatttgtaaaagtatgattaagtctggcttcagaagagctgttgctccatctgttgctatggctgctagttctatgactcttactgctagacgtaactattctagcaagtacaaggatattatttttgctcaagaaggtcgtgacaagcttgctaagggtgttaacgttttagctaaagctgtttctgtaaccttaggtccaaagggaagaaatgttttaattgaacaagaattcgatccaccaaagattactaaggatggtgttactgttgctaagtctgttgaacttgaagacaagtttgaaaacttaggtgccagaattgttcaagacgttgctatcaaaactaatgatgaagctggtgatggtactaccactgctactgttcttgccagagccattttcgctgaaggtttaaagaatgtctctgctggtgttaacccagttgaacttagaagaggtgttcaaaaggctgttgatgttgttgttgatttccttaaagaacaagctcatccaattagtacttttgaagaaattgctcaagtcggtaccatttctgctaatggtgataagcatattggtggtcttttagctgaagccatgaaaaaggttggtaaggatggtgttattaacattcatgaaggtaaaactcttgaagatgaattaaccattactgaaggtatgaaattcgataacggtttcttatctccacacttcattactgataataagggtaagaaatgtgaactcgaaaatccatacattttaattaccgaagaaaaaatttctgctgttcaagatattgttccagctttagaaattgctgctaacaaccgtagaccacttttaattattgctgatgatgttgaaggtgatgctttagctacttgtgttcttaacaagattcgtggtcaagtccaagtttgttgtattaaggctccaggatatggtgatcaccgtaagaacaacttaggagatattgcttgtcttactaacggtactgttatgagtccaaatgttgaattaactttagataaggttactgaagaacttcttggttcttgtgaaagaattactgttaccagagatgatactgtcttcttaaacggtgctggtgataaggctaagattgctgaaagatgtaatcaaatcagaagcattattaagacagctgatctttccatttacgaaaaggaaaagcatgaagaacgtttagccaagttaactggtggtgttgccgttattaaggttggtggtgtttctgaagttgaagttggtgaaaagaaggatagattcgttgatgctttacatgctactcgtgctgctattgaagaaggtattgttccaggtggtggtacagctttattaaaggcttctaaggttcttactaacttaaaggctgatacttttgatcaacaacttggtgttgatcttgttaagaaggctattcaagaaccatgtaagactatcgttaacaatgctggtggtgaaggagctgttgttgttggtcgtttatacaatagttttgaagttaagggtgttgaagataaggctgttagtaagaaggattacaagccatttacctatggttttgatgcctacaagggtgaatactgtgatatgattaaggctggtattattgatccagttaaggttgttcgtactgctattgttgatgctagtggtgttgccagtttattaactacttctgaatgtatgattgttgatggtccagatgatgaaccaccagcaccaccagctggtatgccaatgggtatgatgtaa

SEQ ID NO: 9675 - protein, 600 aa, Neocallimastix patriciarum
MLSARSLICKSMIKSGFRRAVAPSVAMAASSMTLTARRNYSSKYKDIIFAQEGRDKLAKGVNVLAKAVSVTLGPKGRNVLIEQEFDPPKITKDGVTVAKSVELEDKFENLGARIVQDVAIKTNDEAGDGTTTATVLARAIFAEGLKNVSAGVNPVELRRGVQKAVDVVVDFLKEQAHPISTFEEIAQVGTISANGDKHIGGLLAEAMKKVGKDGVINIHEGKTLEDELTITEGMKFDNGFLSPHFITDNKGKKCELENPYILITEEKISAVQDIVPALEIAANNRRPLLIIADDVEGDALATCVLNKIRGQVQVCCIKAPGYGDHRKNNLGDIACLTNGTVMSPNVELTLDKVTEELLGSCERITVTRDDTVFLNGAGDKAKIAERCNQIRSIIKTADLSIYEKEKHEERLAKLTGGVAVIKVGGVSEVEVGEKKDRFVDALHATRAAIEEGIVPGGGTALLKASKVLTNLKADTFDQQLGVDLVKKAIQEPCKTIVNNAGGEGAVVVGRLYNSFEVKGVEDKAVSKKDYKPFTYGFDAYKGEYCDMIKAGIIDPVKVVRTAIVDASGVASLLTTSECMIVDGPDDEPPAPPAGMPMGMM

SEQ ID NO: 9676 - DNA, 1806 bp, Piromyces sp. E2
  CDS (1)..(1806)
atgttatctttaagacaagaaacttcaaagattgtttgtcaaaacattttaaagaacggtataagtagccgtatcggttctgcttctagatctgttttaagtagacgtaactatgctgctaaggatattatgttttctgaagacggtagagcaaagttagccaagggtgttaacactttagctaaggctgtttctgtcactttaggtccaaaaggaagaaacgttttaattgataaccaatatggtttaccaaaaattactaaggatggtgttactgttgccaagtctgttgctttaaaagatagattcgaaaacttaggtgctagaatcgttcaagatgttgccattaaaactaacgattatgctggtgatggtactaccactgctactgtcttagcccgtgctatttttgctgaaggtttaaaaaacgttcaagctggtattaacccaatggatttacgtaagggtgttcaaatggctgttgatgaagtcgttaaattcttaaaggaaaacaagagagaaattaaaactaagaaggaaattgcccaagttggtactatttctgctaacaatgacaagcacattggtaacatgttagctgaagctatggaaaaggtcggtaaggatggtgttattaccattcaagaaggtagaactatgaaggatgaattagttgtcaccaagggtatgagtttcaagagacaaggtttcatttcttcttacttcattactgatatcaagaagcaaaaatgtgaattcaagaatccacttattctaatttgtgaccaaagaatttctgctattcaagatgttattccagctttagaaattgctgctgaaaaccgtagaccaattttaattgttgctgaagatattgaaggtgaagctttagctgcctgtatcttaaacaagattagaggtcaagttcaagtttgctgtgttagatctccatctttcggtgataacagaagagaaactattaaggatttaggtattttagttaagggtaatgtattcaataatgaagttgaaaacagtcttgataaggttgaaattggtatgttaggtacttgtgataccgttaccgttactaaggatgataccgtttttattaatggtgctggttccaaggaagaaattgaaaagagatgcaacgctatcagagaagcaattgctaccactgattctgaatttgaaaagaagaatttaagagaacgtttagctaagcttactggtggtgttgccttagctaaggttggtggtgtttctgaagttgatgttaatgaaaagattgaccgtttcgttgatgctttatgtgctactcaagctgctgttgaagaaggtattgttccaggtggtggtaccgctttacttaaggcttctaaggttttagaaaagcttcacgcagattccttcgatgttcaattaggtattgatattgttaagaaggccattaaggttccaattcaaaccattgttaacaatgctggtggtgaaggtgccgttgttgctgaaactatctacaacagttacaaggttgatggtgttaaggacagtaatgttgataaatatgaaccattctcctacggttatgatgcctacaacaatgaattctgtgatttaattgccgaaggtattattgatccagttaaggttgttcgttctgctattgttgatgccagtggtgttgctagtttattaactacttctgaatgtatgattgttgacaagccaaagaagaagactactccaccaccagctgctccaggtatgggtggtatgggtggtatgggtggtatgttctaa

SEQ ID NO: 9677 - protein, 601 aa, Piromyces sp. E2
MLSLRQETSKIVCQNILKNGISSRIGSASRSVLSRRNYAAKDIMFSEDGRAKLAKGVNTLAKAVSVTLGPKGRNVLIDNQYGLPKITKDGVTVAKSVALKDRFENLGARIVQDVAIKTNDYAGDGTTTATVLARAIFAEGLKNVQAGINPMDLRKGVQMAVDEVVKFLKENKREIKTKKEIAQVGTISANNDKHIGNMLAEAMEKVGKDGVITIQEGRTMKDELVVTKGMSFKRQGFISSYFITDIKKQKCEFKNPLILICDQRISAIQDVIPALEIAAENRRPILIVAEDIEGEALAACILNKIRGQVQVCCVRSPSFGDNRRETIKDLGILVKGNVFNNEVENSLDKVEIGMLGTCDTVTVTKDDTVFINGAGSKEEIEKRCNAIREAIATTDSEFEKKNLRERLAKLTGGVALAKVGGVSEVDVNEKIDRFVDALCATQAAVEEGIVPGGGTALLKASKVLEKLHADSFDVQLGIDIVKKAIKVPIQTIVNNAGGEGAVVAETIYNSYKVDGVKDSNVDKYEPFSYGYDAYNNEFCDLIAEGIIDPVKVVRSAIVDASGVASLLTTSECMIVDKPKKKTTPPPAAPGMGGMGGMGGMF

SEQ ID NO: 9678 - DNA, 1731 bp, Trichinella spiralis
  CDS (1)..(1731)
atggcaatgcgtaatcaattgttccgtcggtgtctctcttggaatggtaaactcaaagccaatgtccgtggttatgctgctaaagatttgcgatttggtaccgaagcccgggctgccatgcttaccggtgttgatctacttgctgacgctgtagcagttacaatgggtccaaagggaaggaacgttataatagagcaaagttggggtagtcccaaaattaccaaggatggtgtgacggtggccaaagcagtggaactgaaagaaaagtggcagaatgttggagcccgcctcgtgcaggatgtggccaataaaacaaatgagcaggctggtgatggaactacatgtgcgaccgttcttgctcgtgcgattgcgcgtgaaggttttgatagtattagtaaaggagcgaatccaattgaaatcagaaaaggcgttatgatggctgtggatgttgtaattgataatttgaaaaaaatatcaaaacctgtcactacaccagaagagatagcccaggttgctacaatttcggccaatggagatgtcagtattggaaatttaatttccgaagcaatgaagagagttggcaaagaaggagtgatcactgtcaaagacggaaaaacattaaatgatgagctggaagtcattgaagggatgaagttcgatcgaggctacatttctccatatttcataaataccgcaaaaggagcgaaatgcgaatttcaaaattgtttgattttattttctgaaaagaaaattaacagtgttcaagaaattgtaccagttttggaactggcgaatcagcataggagaccgttgttaattattgcagaggatgtagacggagaagctcttacaacactagttttgaatagattgaaagtgaacttgcaagtttgtgcagtaaaagctccaggatttggtgacaatcgtaaaaacactctacatgacatggcaattgcttcaggaggaatggtcgttggtgatgaagccaatttgattaaattggaagaagttaaactgcacaatcttggtgaagtagaggaggttttgattacaaaggatgatacgttgcttttgaggggaaaaggtaaaaaggaggaagtcgctcagcgaattgcacagatcaaagatgaaatggaaatgtcgaattctgaatatgaaaaagaaaaaatgcaagaacgtttgtctaaactatcgaatggtgtagcggtgattaaagtcggtggatcaagtgaagtagaagtgaatgaaaagaaagaccgtgtgaatgacgccatgaatgctacaaaagctgctgttgaagagggcattgtacccggtggtggatgtatgcatctgttgcgctgctatccagcactggatgaattaaaccctctaatgaagatccagcgacgaggcattgaaattattcgcaaagccgttcgacaaccatgcatgacaatagcgaaaaatgcaggagtggattcagcgcaagttgtggaaaaagttttggttagaaatgaaccaacttttggatacgatgctcttcgtggagaatatgtggatatgatctctagtggaattatcgatccaacgaaagtgattagaaccgcccttcaggatgcagccggtgtagcatcgttgttatctactgcagaatgtgtgataactgaaattccaaaagaagacaaattcccagccggaggaatgggaggcgctggtggcatgggtggaatgggtggaatggactattga

SEQ ID NO: 9679 - protein, 576 aa, Trichinella spiralis
MAMRNQLFRRCLSWNGKLKANVRGYAAKDLRFGTEARAAMLTGVDLLADAVAVTMGPKGRNVIIEQSWGSPKITKDGVTVAKAVELKEKWQNVGARLVQDVANKTNEQAGDGTTCATVLARAIAREGFDSISKGANPIEIRKGVMMAVDVVIDNLKKISKPVTTPEEIAQVATISANGDVSIGNLISEAMKRVGKEGVITVKDGKTLNDELEVIEGMKFDRGYISPYFINTAKGAKCEFQNCLILFSEKKINSVQEIVPVLELANQHRRPLLIIAEDVDGEALTTLVLNRLKVNLQVCAVKAPGFGDNRKNTLHDMAIASGGMVVGDEANLIKLEEVKLHNLGEVEEVLITKDDTLLLRGKGKKEEVAQRIAQIKDEMEMSNSEYEKEKMQERLSKLSNGVAVIKVGGSSEVEVNEKKDRVNDAMNATKAAVEEGIVPGGGCMHLLRCYPALDELNPLMKIQRRGIEIIRKAVRQPCMTIAKNAGVDSAQVVEKVLVRNEPTFGYDALRGEYVDMISSGIIDPTKVIRTALQDAAGVASLLSTAECVITEIPKEDKFPAGGMGGAGGMGGMGGMDY

SEQ ID NO: 9680 - DNA, 1638 bp, Enterobacter aerogenes
  CDS (1)..(1638): transl_table=11
atggcagcaaaagacgtaaaattcggtaacgacgctcgtgtaaaaatgctgcgcggcgtaaacgtactggcagatgcagttaaagtcaccctgggcccgaaaggccgtaacgttgttctggacaaatccttcggcgcgccgaccatcactaaagatggcgtttccgttgctcgtgaaatcgaactggaagacaaattcgaaaacatgggcgcgcagatggtgaaagaagttgcctctaaagcgaacgacgctgcaggcgacggtaccaccaccgcaaccgtactggctcaggctatcgttaacgaaggtctgaaagccgttgctgcgggcatgaacccgatggatctgaaacgtggtatcgacaaagctgtcgttgccgctgtggaagaactgaaagcgctgtccgtaccgtgctctgactctaaagccattgctcaggttggtactatctccgctaactccgacgaaaccgtaggtaaactgatcgctgaagcgatggataaagtcggtaaagaaggcgttatcaccgttgaagacggtaccggtctgcaggacgaactggacgtggttgaaggtatgcagttcgaccgtggctacctgtctccttacttcatcaacaagccggaaactggcgcagtagaactggaaagcccgttcattctgctggctgacaagaaaatctccaacatccgcgaaatgctgccggttctggaagctgtagcgaaagcaggcaaaccgctgctgatcatcgctgaagatgttgaaggcgaagcgctggcaactctggttgttaacaccatgcgcggtatcgtgaaagtcgctgcggttaaagcacctggcttcggcgatcgtcgtaaagcaatgctgcaggatatcgctaccctgaccggtggtaccgttatctctgaagagatcggtatggagctggaaaaagcaactctggaagatctgggtcaggcgaaacgcgttgttatcaacaaagataccaccaccatcattgatggcgtgggcgacgaagctgcaatccagggtcgcgtgactcagattcgtcagcagatcgaagaagcaacttccgactatgaccgtgaaaaactgcaggagcgcgtagcgaaactggcaggcggcgttgcggttatcaaagttggtgctgccactgaagttgaaatgaaagagaagaaagcccgcgttgaagatgccctgcacgctacccgtgctgcggtagaagaaggcgtggttgctggtggtggtgttgcgctgattcgcgtagcgtctaaaattgccggcctgaaaggtcagaacgaagaccagaacgtaggtatcaaagttgcgctgcgcgcaatggaagccccactgcgtcaaatcgtactgaactgcggcgaagagccgtctgtagtggctaacaccgtgaaagcgggtgacggtaactacggttacaacgctgcaactgaagaatacggcaacatgatcgacatgggtatcctggatccaaccaaagtaactcgttctgctctgcagtacgcggcttctgttgcgggtctgatgatcaccaccgagtgcatggttaccgacctgccgaaaagcgatgcgcctgacttaggtgctgctggcggcatgggcggcatgggcggcatgatgtaa

SEQ ID NO: 9681 - protein, 545 aa, Enterobacter aerogenes
MAAKDVKFGNDARVKMLRGVNVLADAVKVTLGPKGRNVVLDKSFGAPTITKDGVSVAREIELEDKFENMGAQMVKEVASKANDAAGDGTTTATVLAQAIVNEGLKAVAAGMNPMDLKRGIDKAVVAAVEELKALSVPCSDSKAIAQVGTISANSDETVGKLIAEAMDKVGKEGVITVEDGTGLQDELDVVEGMQFDRGYLSPYFINKPETGAVELESPFILLADKKISNIREMLPVLEAVAKAGKPLLIIAEDVEGEALATLVVNTMRGIVKVAAVKAPGFGDRRKAMLQDIATLTGGTVISEEIGMELEKATLEDLGQAKRVVINKDTTTIIDGVGDEAAIQGRVTQIRQQIEEATSDYDREKLQERVAKLAGGVAVIKVGAATEVEMKEKKARVEDALHATRAAVEEGVVAGGGVALIRVASKIAGLKGQNEDQNVGIKVALRAMEAPLRQIVLNCGEEPSVVANTVKAGDGNYGYNAATEEYGNMIDMGILDPTKVTRSALQYAASVAGLMITTECMVTDLPKSDAPDLGAAGGMGGMGGMM

SEQ ID NO: 9682 - DNA, 1620 bp, Bacillus stearothermophilus
  CDS (1)..(1620): transl_table=11
atggcaaaagaaattaaattcagcgaagaagctcgtcgcgcgatgttgcgcggtgtggacaaactagctgatgcagtaaaagtaacgttaggtccaaaaggccgtaacgttgtattagagaaaaaattcggttctccattaatcactaacgacggtgtaacaatcgcgaaagaaatcgaattagaagacccatttgaaaacatgggtgcgaagcttgttgttgaagttgcaagcaaaacgaacgatgttgctggggacggtacaacaacagcgacagttcttgcgcaagcaatgattcgcgaaggattgaaaaacgttacagctggcgcaaacccaatgggaatccgcaaaggtattgaaaaagcagttgctgtagcggtagaagaattaaaagcaatctccaaaccaatccaaggaaaagaatcgatcgcgcaagttgcggctatttctgcggctgacgaagaagttggtcaattaatcgcagaagcaatggaacgcgtcggcaacgacggtgttatcacattagaagaatcgaaaggtttcacaacagaattagatgttgtcgaaggtatgcaatttgaccgcggttatgcgtctccatacatgatcacagatacggaaaaaatggaagcagtgcttgaaaatccatatatcttaatcactgacaaaaaaatctcgaacattcaagacctcttgcctatcttagaacaagtggttcaacaaggcaaaccattgttaatcatcgcggaagacgtcgaaggcgaagcgcttgcgacattagttgtaaacaaacttcgcggtacattcactgcggtagcggtaaaagcgcctggcttcggtgatcgccgtaaagcaatgttggaagacatcgcgatcttgactggcggtgaagtcatctccgaagaactaggacgcgaattaaaatcgacaacaatcgcatcgcttggccgcgcttcgaaagttgttgtaacgaaagaaaatacgacaatcgtagaaggcgctggcgattctgaccgcattaaagctcgcatcaaccaaatccgtgcgcaattagaagaaactacttctgaatttgaccgcgaaaaattacaagaacgtctagcaaaactagctggcggtgtagcggtcatcaaagttggtgcggcgacagaaacagaattgaaagaacgcaaattgcgcattgaagacgcgctcgactctactcgtgcggctgtcgaagaaggtattgtagccggcggtggtacggcattaatgaacgtatatagcaaagttgctgcgattgaagcagaaggcgacgaagcaactggtgtgaaaatcgttcttcgcgcaatcgaagaaccagttcgccaaatcgcgcaaaacgctggtttggaaggatctgtcattgttgaacgcttaaaaacagaaaaacctggcatcggcttcaacgctgctactggcgaatgggtaaacatgatcgaagctggtatcgttgacccaacaaaagtaactcgttccgctctgcaaaacgcagcttctgttgccgctatgttcttaacaacagaagcagttgtcgctgacaaaccagaagaaaacaaaggcggcaacaacggaatgcctgacatgggcggaatgatgtaa

SEQ ID NO: 9683 - protein, 539 aa, Bacillus stearothermophilus
MAKEIKFSEEARRAMLRGVDKLADAVKVTLGPKGRNVVLEKKFGSPLITNDGVTIAKEIELEDPFENMGAKLVVEVASKTNDVAGDGTTTATVLAQAMIREGLKNVTAGANPMGIRKGIEKAVAVAVEELKAISKPIQGKESIAQVAAISAADEEVGQLIAEAMERVGNDGVITLEESKGFTTELDVVEGMQFDRGYASPYMITDTEKMEAVLENPYILITDKKISNIQDLLPILEQVVQQGKPLLIIAEDVEGEALATLVVNKLRGTFTAVAVKAPGFGDRRKAMLEDIAILTGGEVISEELGRELKSTTIASLGRASKVVVTKENTTIVEGAGDSDRIKARINQIRAQLEETTSEFDREKLQERLAKLAGGVAVIKVGAATETELKERKLRIEDALDSTRAAVEEGIVAGGGTALMNVYSKVAAIEAEGDEATGVKIVLRAIEEPVRQIAQNAGLEGSVIVERLKTEKPGIGFNAATGEWVNMIEAGIVDPTKVTRSALQNAASVAAMFLTTEAVVADKPEENKGGNNGMPDMGGMM

SEQ ID NO: 9684 - DNA, 1791 bp, Arabidopsis thaliana
  CDS (1)..(1791)
atggcatcaacctttagcgcaacgtcgtcaatgggttcatctttggctcctccttcgaatcgattgtcatcttttgtttcgatctcatcaagctcttttggaaggactcagagtattgctcagaggaaagcaaggtttcctaaaatatatgcggctaagcaattgcatttcaataaggacgggactgcgattaagaagcttcaagctggtgtgaataaacttgcggatttagttggggttactttaggtcctaaaggcaggaatgttgttctagagagcaaatacggttcccctagaatcgttaatgatggtgttacggtcgctagagaggttgagcttgaggatccagttgagaacattggtgctaagctagtgagacaagctgcttccaagactaatgacttagctggtgatggaacaacgacttctgttgttcttgctcaaggtcttattgctgaaggtgtaaaggtggtagctgctggtgcaaatcctgttttgattaccagaggtattgagaaaaccaccaaagctcttgtggctgagttgaagaaaatgtcaaaggaggttgaagacagtgaactagcagatgttgcagcagttagtgcaggaaacaattacgaagtaggcaatatgattgcagaagcaatggcaaaagttggtcgtaaaggtgttgtcactctagaggaaggcaaaagcgctgagaacagcctttacgttgttgaaggaatgcaatttgatcgtggttatatctctccttactttgtcaccgacagtgagaaaatgtgtgcagaatatgagaactgcaagttgtttcttgttgacaaaaagataacaaatgctagagatattattagcattctggaagatgcgattaaaggtggatacccgcttttgatcattgctgaagatattgagcaagagccattagcgactcttgttgttaacaagcttcgtgggacaataaaagttgctgctttgaaagctcctggatttggagagaggaaaagccagtaccttgatgacattgctgcgcttacaggagctactgtgattagggaagaagttggacttcagttggagaaagttggaccagaagttttgggtaatgctggtaaagtggttctcacaaaagatactacaacgatagttggtgatggaagtactgaagaagttgtgaagaagagagttgaacagatcaagaatcttatcgaggctgctgaacaagactatgaaaaggaaaagcttaatgagagaattgctaaattatcaggcggtgttgctgtaattcaggttggagcacaaactgagacagagcttaaggagaagaaattaagagttgaagatgctcttaatgctacaaaggctgctgtggaagaaggtattgttgttggcggaggatgtactctgctaagacttgcatcgaaagtggacgctattaaagagactctagcaaacgatgaagaaaaggttggagctgacattgttaagaaagcattgagctacccactgaagttaatcgccaagaacgctggtgtcaatggcagcgttgtcagtgagaaggttctttctagtgacaaccctaaacatggttacaatgctgcaactggcaaatacgaagatctcatggctgcaggaatcattgatccaaccaaagttgtgagatgttgcctagagcatgcttcatctgtggcaaagacattcttgatgtctgattgtgttgttgtggagatcaaggagcctgaatcagcagctcctgctggtaaccctatggacaattcaggtatctcttag

SEQ ID NO: 9685 - protein, 596 aa, Arabidopsis thaliana
MASTFSATSSMGSSLAPPSNRLSSFVSISSSSFGRTQSIAQRKARFPKIYAAKQLHFNKDGTAIKKLQAGVNKLADLVGVTLGPKGRNVVLESKYGSPRIVNDGVTVAREVELEDPVENIGAKLVRQAASKTNDLAGDGTTTSVVLAQGLIAEGVKVVAAGANPVLITRGIEKTTKALVAELKKMSKEVEDSELADVAAVSAGNNYEVGNMIAEAMAKVGRKGVVTLEEGKSAENSLYVVEGMQFDRGYISPYFVTDSEKMCAEYENCKLFLVDKKITNARDIISILEDAIKGGYPLLIIAEDIEQEPLATLVVNKLRGTIKVAALKAPGFGERKSQYLDDIAALTGATVIREEVGLQLEKVGPEVLGNAGKVVLTKDTTTIVGDGSTEEVVKKRVEQIKNLIEAAEQDYEKEKLNERIAKLSGGVAVIQVGAQTETELKEKKLRVEDALNATKAAVEEGIVVGGGCTLLRLASKVDAIKETLANDEEKVGADIVKKALSYPLKLIAKNAGVNGSVVSEKVLSSDNPKHGYNAATGKYEDLMAAGIIDPTKVVRCCLEHASSVAKTFLMSDCVVVEIKEPESAAPAGNPMDNSGIS

SEQ ID NO: 9686 - DNA, 1725 bp, Neurospora crassa
  CDS (1)..(1725)
atgcagcgcgcgttgaccagagcttccgtcggcaaggcggccactcgtcttcccgcccagcagctccgctttgctcacaaggagctcaagttcggtgttgagggccgtgccgctctcctcgccggtgtcgagaccctcgccaaggccgttgccaccactctcggtcccaagggccgcaatgtcctcatcgagtccagcttcggctcccccaagatcaccaaggatggtgtcaccgtcgccaagtccatcagcctgaaggacaagttcgagaacctcggtgcccgcctcatccaggaggtcgccggcaagaccaacgaggtcgccggtgacggtaccacctccgccaccgtcctcgcccgcgccatcttctccgagaccgtcaagaacgtcgctgccggctgcaaccccatggatctccgccgcggtatccaggctgccgtcgaggccgtcgtcgagtacctccaggccaacaagcgcgatgtcaccacctccgaggaggttgcccaggtcgccaccatctccgccaacggcgacaagcacattggtgagctgattgcctcggccatggagaaggtcggcaaggagggtgtcatcacctgcaaggagggcaagactctctacgacgagctcgaggttaccgagggtatgcgcttcgaccgcggctacgtctccccctacttcatcaccgaccccaagtcccagaaggtcgagttcgagaagcccctgatcctcctctccgagaagaagatctcccaggcctccgacatcatccccgccctcgagatctccagccagacccgccgccccctcgtcatcattgccgaggacattgacggtgaggctcttgccgtctgcattctcaacaagcttcgcggccagctccaggtcgccgccgtcaaggcccccggcttcggtgacaaccgcaagtccatccttggcgacattgccgtcctgaccaatggtaccgtcttcaccgacgagctcgacgtcaagctcgagaaggccacccccgacatgctcggctccaccggctccatcaccatcaccaaggacgacaccatcatcctcaacggtgagggctccaaggatgccattgcccagcgctgcgagcagatccgcggcgtcatggccgatccctccacctccgagtacgagaaggagaagctccaggagcgtctcgccaagctctctggcggtgttgccgtcatcaaggtcggcggtgcctccgaggttgaggttggtgagaagaaggaccgcttcgtcgatgctctcaacgccacccgcgctgccgttgaggagggtatcctccccggtggtggtactgccctcatcaaggcttccgtccacgctctcaagaacgtcaagcccgccaacttcgaccagcagctcggtgtcaccattgtccgcaacgccatcacccgccccgccaagaccatcattgagaacgccggtctcgagggctccgtcgttgtcggcaagctcactgacgagttcgccaacgacttcaacaagggcttcgactcggccaaggctgagtacgtcgacatgatccaggccggtattctcgaccccctcaaggtcgtccgcaccggtctcgttgacgcctccggtgtcgcctccctcctcggtactaccgaggttgccattgttgaggctcccgaggagaagggccccgctcccatgggtggcatgggcggcatgggcggcatgggtggcatgatgtaa

SEQ ID NO: 9687 - protein, 574 aa, Neurospora crassa
MQRALTRASVGKAATRLPAQQLRFAHKELKFGVEGRAALLAGVETLAKAVATTLGPKGRNVLIESSFGSPKITKDGVTVAKSISLKDKFENLGARLIQEVAGKTNEVAGDGTTSATVLARAIFSETVKNVAAGCNPMDLRRGIQAAVEAVVEYLQANKRDVTTSEEVAQVATISANGDKHIGELIASAMEKVGKEGVITCKEGKTLYDELEVTEGMRFDRGYVSPYFITDPKSQKVEFEKPLILLSEKKISQASDIIPALEISSQTRRPLVIIAEDIDGEALAVCILNKLRGQLQVAAVKAPGFGDNRKSILGDIAVLTNGTVFTDELDVKLEKATPDMLGSTGSITITKDDTIILNGEGSKDAIAQRCEQIRGVMADPSTSEYEKEKLQERLAKLSGGVAVIKVGGASEVEVGEKKDRFVDALNATRAAVEEGILPGGGTALIKASVHALKNVKPANFDQQLGVTIVRNAITRPAKTIIENAGLEGSVVVGKLTDEFANDFNKGFDSAKAEYVDMIQAGILDPLKVVRTGLVDASGVASLLGTTEVAIVEAPEEKGPAPMGGMGGMGGMGGMM

SEQ ID NO: 9688 - DNA, 1620 bp, Bacillus sp. MS
  CDS (1)..(1620): transl_table=11
atggcaaaagaaattaaattcagcgaagaagctcgtcgtgcgatgttacgtggtgtggacaaattagctgatgcagtaaaagtaacgttaggtccaaaaggccgtaacgtcgtattagagaaaaaattcggttctccattaattacaaacgacggtgtaacaatcgcgaaagaaatcgaattagaagatccatttgaaaacatgggtgcgaagcttgtcgctgaagttgcaagcaaaacaaacgatgttgctggggacggtacaacaacggcaacagttttagcgcaagcaatgatccgcgaaggattgaaaaacgttacagctggcgcaaacccaatgggcatccgtaaaggtattgaaaaagcggttgctgtggcagtagaagaattaaaagcaatctccaaaccaatcaaaggaaaagaatcgattgctcaagttgcggctatctctgcagctgacgaagaagttggccaattaatcgcagaagcaatggaacgtgttggtaatgacggtgttatcacattagaagaatcaaaaggcttcacaacagaattagatgttgtggaaggtatgcaatttgaccgtggttatgtatctccatacatgatcacagatacagaaaaaatggaagcagtgcttgaaaatccatatatcttaatcacagacaaaaaaatctctaacatccaagacatcttgcctatcttagaacaagttgttcaacaaggcaaaccattattaatcatcgcagaagatatcgaaggcgaagcgcttgcaacattagtagtaaacaaacttcgcggtacattcactgctgtagcggtaaaagctcctggcttcggtgatcgtcgtaaagcaatgcttgaagacatcgcaatcttaactggcggtgaagtcatctccgaagagctaggacgtgaattaaaatctgcaacaatcgcatcacttggccgcgcttcaaaagtagtcgtaacaaaagaaaatacaacaatcgtagatggcgctggcgactctgaacgcattaaagctcgcatcaaccaaattcgtgctcaattagaagaaacaacttctgaattcgatcgtgaaaaattacaagaacgtctagcaaaattagctggcggcgtcagggtaatcaaagttggtgcagctacagaaacagaattgaaagaacgcaaattacgcatcgaagacgcgctcaactctactcgtgccgctgtggaagaaggtatcgtagccggcggtggtacagcattaatgaacgtatacaataaagttgctgcgattgaagcagaaggcgatgaagcaactggtgtgaaaatcgttcttcgcgcaattgaagagccagttcgccaaatcgcgcaaaacgctggtttggaaggctctgtcattgttgaacgcttaaaaacagaaaaacctggcatcggcttcaacgcggctactggtgaatgggtagacatgattgaagctggtatcgtagacccaacgaaagtaactcgttccgcacttcaaaacgcagcttctgttgccgctatgttcttaacaacagaagcagttgtcgctgacaaaccagaagaaaacaaaggcggcaacgcaggcatgcctgacatgggcggaatgatgtaa

SEQ ID NO: 9689 - protein, 539 aa, Bacillus sp. MS
MAKEIKFSEEARRAMLRGVDKLADAVKVTLGPKGRNVVLEKKFGSPLITNDGVTIAKEIELEDPFENMGAKLVAEVASKTNDVAGDGTTTATVLAQAMIREGLKNVTAGANPMGIRKGIEKAVAVAVEELKAISKPIKGKESIAQVAAISAADEEVGQLIAEAMERVGNDGVITLEESKGFTTELDVVEGMQFDRGYVSPYMITDTEKMEAVLENPYILITDKKISNIQDILPILEQVVQQGKPLLIIAEDIEGEALATLVVNKLRGTFTAVAVKAPGFGDRRKAMLEDIAILTGGEVISEELGRELKSATIASLGRASKVVVTKENTTIVDGAGDSERIKARINQIRAQLEETTSEFDREKLQERLAKLAGGVRVIKVGAATETELKERKLRIEDALNSTRAAVEEGIVAGGGTALMNVYNKVAAIEAEGDEATGVKIVLRAIEEPVRQIAQNAGLEGSVIVERLKTEKPGIGFNAATGEWVDMIEAGIVDPTKVTRSALQNAASVAAMFLTTEAVVADKPEENKGGNAGMPDMGGMM

SEQ ID NO: 9690 - DNA, 1722 bp, Myzus persicae
  CDS (1)..(1722)
atgtaccgtatctctgccgctcttgctagaaacaatgtacccaaatactttgcaagaaactatgccaaggacattaagtttgggcctgaagtgcgaaaacttatgcttgagggagttgatatcctcgctgatgctgttgctgtaaccatgggcccaaaaggccgtaatgtcatcatagaacaaagttggggttctcctaaaatcactaaggatggtgtaactgttgccaaaggtattgaattgcaagataaattccaaaacattggtgctaagcttgtgcaggatgtagcaaataataccaatgatgaagctggtgatggcacaacaacagctactgttttagcacgtgctatagctaaagaaggatttgaatcaattataaagggtgctaatcctattgaaattagacgaggagttatgttagcagttgacgaagttaaagtaaaattaggtgaattatcaaagaaagttcagtctgcagaagagattgcacaagttgccacaatttctgctaatggcgatactagcattggacaacttattgcttctgctatggaaaaagtcggaaaagatggtttgataacagtcaaagatggaaaaaccttaggcgatgaattggatgtcatcgagggcttaaaatttgatagagggtacatttccccatatttcattaactcagctaaaggtgccaaagtagaattccaagatgctttggtgttattcagcgagaaaaaaatttcatctgctcaatcattaattcctgctttagaattagccaatgcacaacgtaagccacttgtcataattgctgaagaccttgatggtgaagttattggaatgctagttttaaatagattgaaaataggtcttaatgttgctgccgtcaaagcacctggatttggagataatcgcaaatctacattgactgatatggcaattgcaactggaggtgttgtttttggacaagaaggtaatgaactgaagatagaagatattaaagctggtgattttggcgaagtcaaagaagtagttatcactaaagatgacactttgcttttaaaaggtaaaggcataccatctgacgttgaacaaagagctgaacaaattagagatcagattaaggatacttcatctgaatatgaaaaagaaaaactgcaagaacgtcttgcaaggttagcatctggtgttgctgtgttgaaaattggtggtagtagtgaagttgaagtcaatgagaagaaagaccgtgttactgatgcactaaacgccacccgtgcagctgttgaagaaggtattgttcccggaggtggtactgctttaattcgttgctcatctgcattagatggagtcaaagtagccaataaagatcagaaaattggtgttgaaattgtacgcaaagcattgaccatgccatgtatgacaattgcccgaaatgctggtgttgatgctggtgtcgtagttgctaaggtgtctgaaggtaaagaggcccttttgggatatgatgcaatgaccgatgtttatgttaacatggttgaaaagggaatcattgatccaaccaaagttgtcagaacagcattaactgacgctgcaggtgttgcttcattgttgactacagcagaagcagttatcactgaattaccaaagaaagatgagccattacccggtggtggtatgggaggaatgggtggtatgggcggtatgggaggaatggggggcatgatgtaa

SEQ ID NO: 9691 - protein, 573 aa, Myzus persicae
MYRISAALARNNVPKYFARNYAKDIKFGPEVRKLMLEGVDILADAVAVTMGPKGRNVIIEQSWGSPKITKDGVTVAKGIELQDKFQNIGAKLVQDVANNTNDEAGDGTTTATVLARAIAKEGFESIIKGANPIEIRRGVMLAVDEVKVKLGELSKKVQSAEEIAQVATISANGDTSIGQLIASAMEKVGKDGLITVKDGKTLGDELDVIEGLKFDRGYISPYFINSAKGAKVEFQDALVLFSEKKISSAQSLIPALELANAQRKPLVIIAEDLDGEVIGMLVLNRLKIGLNVAAVKAPGFGDNRKSTLTDMAIATGGVVFGQEGNELKIEDIKAGDFGEVKEVVITKDDTLLLKGKGIPSDVEQRAEQIRDQIKDTSSEYEKEKLQERLARLASGVAVLKIGGSSEVEVNEKKDRVTDALNATRAAVEEGIVPGGGTALIRCSSALDGVKVANKDQKIGVEIVRKALTMPCMTIARNAGVDAGVVVAKVSEGKEALLGYDAMTDVYVNMVEKGIIDPTKVVRTALTDAAGVASLLTTAEAVITELPKKDEPLPGGGMGGMGGMGGMGGMGGMM

SEQ ID NO: 9692 - DNA, 1797 bp, Onchocerca volvulus
  CDS (1)..(1797)
atggcacgacttgtttcacgtacagtacgatcaggtctaagacactacgccaaggatgtaaagtttggcgctgatggacgtgcttcaatgctgtatggtgtggatacgctagctgatgcagttgcggtaactatgggaccaaagggaagaaatgtcgtaatcgagcaatcatggggaagtccaaagatcaccaaggatggtgttactgtagcgaaagcaattgatttcaaagataaatacaagaatttgggagcaaaattagtacaggatgttgcaaacaaaaccaatgaagaagctggtgatggcaccacatgtgccacagttttggcacgagcaattgcaaaggaaggttttgagaatatcagcaaaggagctaacccagtggaagttcgaagaggtgtaatgaaagctgtggagctcttggttgctgaattgaagaaaatgagcaaagatgtgacaactccggaagaaattgcgcaagtagcgacaatctcagcaaatggtgattccagtgtaggaaaattgatatccgaagcgatgaagacggtcggaaataagggtgtgatcacagtaaaagatggcaaaactcttcatgatgaattagaaacgatcgaaggaatgaaatttgaccgtggatacatttctccttactttatcaacacctcaaagggagccaaagtggaattcgagaaatgccttctcttgttttcggaaaagaaaatcagccaagtgcaagatatcgtaccagctcttgaattggcaaacaagtatagaaagccaattgtgattatcgcagaagatgtggatggcgaagcacttactactcttgtgctgaatagattaaaagttggtctccaagtggcagctgtgaaagcacctggttttggcgacaacaggaaaaacacattgaaggatatggcaatagctacaggtggaacagtctttggagatgatgctaatttgctgaaaattgaagatgtacaaatcagtgatctcggtgaagctgaagaagtttcaatcacaaaagatgatacactcatcttgcgtggcaagggaaaacctgaagatcttgaaaaacgaatttcaatgattgaagatgaaatggatcaaagcacatctgaatacgagaaggagaaactgaatgagcggttggcgaagctttcaaaaggtgttgcagtcctgaaagtaggtggcgccagtgaagtggaggtgaacgaaaagaaagatcgcgtaacagatgccttgaatgccactagagcagctgttgaagaaggtattgtcccaggtggcggtgttgcactgcttcgtgccttgaaggctatcgaaaatgtcaaaggagaaaatactgatcaggacaaaggtatccgaatagtgcaaaaggcagtacgtgaaccaattatgacaattgtaaggaatgctggtgttgatccatcttctgttgtggaaaaagtactcgccagtaatgaattgccgttcggatatgatgccatgaatgatacttttgtggatatgttcaaagctggtatcattgatcctacaaaagtcattcgaactgctcttcaggatgcggctggtgttgcatcactattggctacaacggaatgcgtggtgacagaattaccgaaagaggaaccgcagatggcagctggaatgggtggtggtatgggtggccggtatgggaggaatgtactaatctttgaacggggtgttgtttttggtaaaattggtattattttccttttggattatggcctatcgtttcgatgtttaattatttcatctgatatgttgttttga

SEQ ID NO: 9693 - protein, 598 aa, Onchocerca volvulus
MARLVSRTVRSGLRHYAKDVKFGADGRASMLYGVDTLADAVAVTMGPKGRNVVIEQSWGSPKITKDGVTVAKAIDFKDKYKNLGAKLVQDVANKTNEEAGDGTTCATVLARAIAKEGFENISKGANPVEVRRGVMKAVELLVAELKKMSKDVTTPEEIAQVATISANGDSSVGKLISEAMKTVGNKGVITVKDGKTLHDELETIEGMKFDRGYISPYFINTSKGAKVEFEKCLLLFSEKKISQVQDIVPALELANKYRKPIVIIAEDVDGEALTTLVLNRLKVGLQVAAVKAPGFGDNRKNTLKDMAIATGGTVFGDDANLLKIEDVQISDLGEAEEVSITKDDTLILRGKGKPEDLEKRISMIEDEMDQSTSEYEKEKLNERLAKLSKGVAVLKVGGASEVEVNEKKDRVTDALNATRAAVEEGIVPGGGVALLRALKAIENVKGENTDQDKGIRIVQKAVREPIMTIVRNAGVDPSSVVEKVLASNELPFGYDAMNDTFVDMFKAGIIDPTKVIRTALQDAAGVASLLATTECVVTELPKEEPQMAAGMGGGMGGRYGRNVLIFERGVVFGKIGIIFLLDYGLSFRCLIISSDMLF

SEQ ID NO: 9694 - DNA, 1632 bp, Anabaena sp. (strain L31)
  CDS (1)..(1632): transl_table=11
atggcaaagcgcattatttacaacgaaaacgctcgtcgcgccctggagcgtggtattgacatcctagctgaggctgtagctgttaccctcggccctaaaggtcgtaacgtagtattagaaaagaaatatggtgcgccccaaatcgtaaatgacggcgtaaccatcgctaaagaaatcgaattagaagatcatattgaaaacactggcgttgctttaatacgccaggctgcttctaaaacaaatgatgtcgcaggtgacggtacaactaccgcgactgtgttagctcatgcaattgtcaaagaaggtttacggaacgttgcagctggtgctaacgcgattctgttgaagcgtggtattgataaagctacaaacttcttggtcgacagaatcagagaacacgctcggtctgtagaagattctaaggcgatcgcccaagttggggcaatctctgctggtaacgacgatgaagtccgtcagatgattgctgaagcattggataaagtcggtaaggaagccgttatctccttagaagaaggtaagtctgtaactaccgaattggaagtaacagaagggatgcgctttgacaaaggctatatttccccctacttcgccaccgacccagaacggatggaagcgattttcgatgagcctttccttgctgttgacgacaagcaaatcgctcttgtacaagatttagtaccagttcttgagccagtagcgcgtgctggtcgtcctctggtgattattgctgaagatattgaaaaagaagctttagcaactttggtagttaaccgtttacgcggtgtactgaatgtagctgctgtgaaggctcctggttttggcgatcgccgcaaggctatgctggaagatatcgctatcctcaccggcggacaattaatcaccgaagatgcaggtctgaagctcgacaacaccaaactagacagcttaggtaaagctcgccgcatcaccatcaccaaagacagcaccacaattgttgctgaaggtaacgacgttgcagttaaagctcgtgtagaacaaattcgtcgccaaatggaagaaaccgaatcttcctacgacaaaggaaaactacaggagcgtttggctaaactttccggtggtgtagctgtagttaaagttggtgcggctaccgaaaccgaaatgaaagacaagaaactccgcctagaagatgctatcaacgcaaccaaggctgctgttgaagaaggtatcgttcccggtggtggtacaaccttggctcacctcacccccgaactcgaagcttgggctaacagcaccctcaaagacgaagaattgactggtgctttgattgttgctcgtgcattacccgcaccattaaagagaattgcggaaaacgcaggtcaaaacggtgcagtaattgctgaacgtgtcaaagaaaaagaatttaacgttgatttcaacgctgctaccaacgagttcgttgatatgttcagcgctggtatcgttgaccccgcgaaagtaacccgttctgctctgcaaaacgcactttcctatgcctgtatggtgttaacaaccgggactgtggttgacaaaccagaacccaaagatgctgctcctgctggtgtggggggtggcggcggtgacttcgattactaa

SEQ ID NO: 9695 - protein, 543 aa, Anabaena sp. (strain L31)
MAKRIIYNENARRALERGIDILAEAVAVTLGPKGRNVVLEKKYGAPQIVNDGVTIAKEIELEDHIENTGVALIRQAASKTNDVAGDGTTTATVLAHAIVKEGLRNVAAGANAILLKRGIDKATNFLVDRIREHARSVEDSKAIAQVGAISAGNDDEVRQMIAEALDKVGKEAVISLEEGKSVTTELEVTEGMRFDKGYISPYFATDPERMEAIFDEPFLAVDDKQIALVQDLVPVLEPVARAGRPLVIIAEDIEKEALATLVVNRLRGVLNVAAVKAPGFGDRRKAMLEDIAILTGGQLITEDAGLKLDNTKLDSLGKARRITITKDSTTIVAEGNDVAVKARVEQIRRQMEETESSYDKGKLQERLAKLSGGVAVVKVGAATETEMKDKKLRLEDAINATKAAVEEGIVPGGGTTLAHLTPELEAWANSTLKDEELTGALIVARALPAPLKRIAENAGQNGAVIAERVKEKEFNVDFNAATNEFVDMFSAGIVDPAKVTRSALQNALSYACMVLTTGTVVDKPEPKDAAPAGVGGGGGDFDY

SEQ ID NO: 9696 - DNA, 1611 bp, Nocardia farcinica
  CDS (1)..(1611): transl_table=11
atggcaaagcagatcgagttcgacgaaaaagctcgccgggctctcgaacgcggcgtcgacaagctcgccgacgcggtgaaggtcacgctcgggccgcgcggccgtcacgtggtgctcgccaaggcgttcggcggaccgaccgtcaccaacgacggcgtcaccatcgcgcgtgacatcgacctcgaggatccgttcgagaacctcggcgcccagctggtcaagagcgtcgccaccaagaccaacgacgtcgcgggcgacggcaccaccaccgccaccgtgctggcgcaggcgctggtgcgcggcggcctgaagaacgtcgcggcgggcgccaacccgatcgccgtcggctcgggcatcgccaaggccgccgacgcggtctccgaggcgctgctggccgcggccaccccggtctccggtgagcaggccatcgcgcaggtcgcgacggtgtcctcgcgcgacgaggagatcggcgagatggtcggcaaggcgctgaccaccgtcggcaaggacggcgtggtcaccgtcgaggaatcctcgacgctgcagaccgagctcgtcgtcaccgagggcgtgcagttcgacaagggctacctctcgccctacttcatcaccgacaccgacacccaggaagcggtgctggaggacgcgttcgtcctgctgcaccgtgagaagatcagctcgctgccggacctgctgccgctgctcgagaagatcgccgaggcgggcaagccggtgctgatcgtcgccgaggacgtcgaaggcgaggcgctgtcgacgctggtggtgaactccatccgcaagaccctcaaggccgtcgcggtcaaggcgccgttcttcggcgatcgccgcaaggcgttcctcgacgacctggccgtggtcaccgcgggcaccgtggtcaacccggacctgggtatcacgctgcgcgaggcgggcatcgacgtgctcggcaaggcgcgccgcgtggtggtcaccaaggacgagaccaccatcatcgacggtgcgggcaccgccgaggacatcgccgcgcgcgccgcccagctgcgccgcgagatcgaggcgaccgattccgactgggatcgcgagaagctcgaggagcggctggccaagctggccggcggcgtcgcggtcatcaaggtcggcgcggccaccgagaccgcgctcaaggagcgcaagtaccgcgtcgaggacgcggtgagcgcggccaaggcggccgtcgacgagggcatcgtgcccggtggcggcaccgccctggtgcaggcggccaccaagctggtcgagctgcgcgactcgctctccggtgacgaggcggtcggcgtcgaggtcgtccgcaaggcgctggaggcgccgctgttctggatcgccagcaacgcgggcctggacggcgccgtggtggtcagcaaggtggccgagggcaaggagggcttcaacgccgccaccctcagctacggcgacctgctcaccgacggtgtcgtcgacccggtgaaggtcacccgctcggccgtggtgaacgccgcctccgtggcgcgcatggtgctcaccaccgagagcgccgtggtcgacaagcccgccgaggaggccgaggaccacagccaccacggtcacgcgcactga

SEQ ID NO: 9697 - protein, 536 aa, Nocardia farcinica
MAKQIEFDEKARRALERGVDKLADAVKVTLGPRGRHVVLAKAFGGPTVTNDGVTIARDIDLEDPFENLGAQLVKSVATKTNDVAGDGTTTATVLAQALVRGGLKNVAAGANPIAVGSGIAKAADAVSEALLAAATPVSGEQAIAQVATVSSRDEEIGEMVGKALTTVGKDGVVTVEESSTLQTELVVTEGVQFDKGYLSPYFITDTDTQEAVLEDAFVLLHREKISSLPDLLPLLEKIAEAGKPVLIVAEDVEGEALSTLVVNSIRKTLKAVAVKAPFFGDRRKAFLDDLAVVTAGTVVNPDLGITLREAGIDVLGKARRVVVTKDETTIIDGAGTAEDIAARAAQLRREIEATDSDWDREKLEERLAKLAGGVAVIKVGAATETALKERKYRVEDAVSAAKAAVDEGIVPGGGTALVQAATKLVELRDSLSGDEAVGVEVVRKALEAPLFWIASNAGLDGAVVVSKVAEGKEGFNAATLSYGDLLTDGVVDPVKVTRSAVVNAASVARMVLTTESAVVDKPAEEAEDHSHHGHAH

SEQ ID NO: 9698 - DNA, 1638 bp, Rhizobium meliloti
  CDS (1)..(1638): transl_table=11
atggcagctaaagaagtcaagttcggccgcagcgcgcgcgaaaagatgctgcgcggcgtcgacatcctcgccgatgcagtcaaggtgacgctcggcccgaagggccgcaacgtcgttatcgacaagtcgttcggcgcgccgcgcatcaccaaggacggcgtttcggtcgccaaggagatcgaactcgaagacaagttcgagaacatgggcgcccagatggtccgcgaagtcgcttcgaagaccaacgacattgccggtgacggcacgacgactgcaaccgttctcgcccaggcgatcgttcgcgaaggcgcgaaggccgttgccgccggcatgaacccgatggacctgaagcgcggtatcgacctggctgtcgccgaagtcgtcaaggacctgctcgccaaggccaagaagatcaacacctcggacgaagtcgcccaggtcggcacgatctcggcaaacggcgaaaagcagatcggtctcgacattgcggaagcgatgcagaaggtcggcaacgaaggcgtcatcacggttgaagaagccaagaccgccgagaccgagctcgaagtcgtcgaaggcatgcagttcgaccgcggctacctgtcgccctatttcgtcaccaacccggaaaagatggtcgccgacctcgaagacgctttcattctcctgcacgagaagaagctctccaacctccaggcgatgctcccggttctcgaagccgtcgtgcagaccggcaagccgctcctcatcatcgctgaagacgtcgaaggcgaagcactcgcaacgctcgtcgtcaacaagctgcgtggcggcctgaagatcgctgccgtcaaggccccgggcttcggcgaccgccgcaaggccatgctcgaagacatcgccatcctgacaggcggcacggtgatctcggaagacctcggcatcaaactcgaaagcgtcacgctcgacatgctcggccgcgctaagaaggtttcgatcaccaaggaaaacacgacgatcgtcgacggcgccggccagaagtccgacatcgaaggccgcgtcgctcagatcaaggcccagatcgaagaaaccacctccgactacgaccgtgagaagctgcaggagcgccttgccaagctcgccggcggcgtcgctgtcatccgcgtcggcggtgcgacggaagtcgaagtgaaggaaaagaaggaccgcatcgacgacgccctcaacgcgacgcgggctgccgttcaggaaggcatcgtaccgggcggcggcgttgccctgctgcgttcttccgtcaagatcaccgtcaagggtgagaacgacgatcaggacgccggcgtcaacatcgttcgccgcgctctgcagtctccggcccgtcagatcgttgaaaacgctggcgacgaagcctccatcgttgtcggcaagatcctcgagaagaacaccgacgacttcggctacaacgctcagaccggcgagtatggcgacatgatcgccatgggcatcatcgacccggtcaaggtcgttcgcaccgcgcttcaggacgcagcctcggttgcttcgctgctcatcaccaccgaagccatgatcgccgaactgccgaagaaggacgctccggcaatgcctggcggcatgggcggaatgggtggaatggacatgatgtga

SEQ ID NO: 9699 - protein, 545 aa, Rhizobium meliloti
MAAKEVKFGRSAREKMLRGVDILADAVKVTLGPKGRNVVIDKSFGAPRITKDGVSVAKEIELEDKFENMGAQMVREVASKTNDIAGDGTTTATVLAQAIVREGAKAVAAGMNPMDLKRGIDLAVAEVVKDLLAKAKKINTSDEVAQVGTISANGEKQIGLDIAEAMQKVGNEGVITVEEAKTAETELEVVEGMQFDRGYLSPYFVTNPEKMVADLEDAFILLHEKKLSNLQAMLPVLEAVVQTGKPLLIIAEDVEGEALATLVVNKLRGGLKIAAVKAPGFGDRRKAMLEDIAILTGGTVISEDLGIKLESVTLDMLGRAKKVSITKENTTIVDGAGQKSDIEGRVAQIKAQIEETTSDYDREKLQERLAKLAGGVAVIRVGGATEVEVKEKKDRIDDALNATRAAVQEGIVPGGGVALLRSSVKITVKGENDDQDAGVNIVRRALQSPARQIVENAGDEASIVVGKILEKNTDDFGYNAQTGEYGDMIAMGIIDPVKVVRTALQDAASVASLLITTEAMIAELPKKDAPAMPGGMGGMGGMDMM

SEQ ID NO: 9700 - DNA, 1623 bp, Streptomyces albus G
  CDS (1)..(1623): transl_table=11
atggcgaagattctgaagttcgacgaggacgcccgtcgcgcccttgagcgcggcgtgaaccagctggccgacaccgtcaaggtgaccatcggccccaagggccgcaacgtcgtcatcgacaagaagttcggcgccccgaccatcaccaacgacggcgtcaccatcgcccgtgaggtcgagtgcgacgacccgtacgagaacctcggcgcccagctcgtcaaggaggtggcgaccaagaccaacgacatcgcgggtgacggcaccaccaccgcgaccgtgctggcccaggcgctggtccgcgagggcctgcgcaacgtcgccgccggcgcctccccggccgccctgaagaagggcatcgacgccgccgtcgccgccgtctccgccgagctgctcgacaccgcgcgcccgatcgacgacaagtccgacatcgccgccgtcgccgcgctctccgcgcaggacaagcaggtcggcgagctcatcgccgaggcgatggacaaggtcggcaaggacggtgtcatcaccgtcgaggagtccaacaccttcggtgtcgacctggacttcaccgagggcatggccttcgacaagggctacctgtccccgtacatggtgaccgaccaggagcgtatggaggccgtcctcgacgacccgtacatcctgatccaccagggcaagatcggttcgatccaggacctgctgccgctgctggagaaggtcatccaggcgggtggctccaagccgctgctgatcatcgccgaggacgtcgagggcgaggccctgtcgaccctggtggtcaacaagatccgcggcacgttcaacgccgtcgccgtcaaggcgcccggcttcggtgaccgccgcaaggcgatgctcggcgacatggccaccctcaccggtgccaccgtcatcgccgaggaggtcggcctcaagctcgaccaggccggtctggacgtgctgggcaccgcccgccgcgtcaccgtcaccaaggacgacacgaccatcgtggacggcggcggcaacgccgaggacgtccagggccgcgtcgcccagatcaaggccgagatcgagtcgaccgactcggactgggaccgcgagaagctccaggagcgcctcgccaagctggccggcggcgtctgcgtgatccgcgtcggcgcggccaccgaggtcgagctgaaggagcgcaagcaccgtctggaggacgccatctccgcgacccgcgccgcggtcgaggagggcatcgtctccggtggtggctccgcgctggtccacgccgtcaaggtcctggacgacaacctcggccgcaccggcgacgaggccaccggtgtcgcggtcgtccgccgcgccgccgtcgagccgctgcgctggatcgccgagaacgccggcctcgagggctacgtcatcaccaccaaggtggcggagctcgacaagggccagggcttcaacgcggccaccggcgagtacggcgacctggtcaaggccggcgtcatcgacccggtcaaggtcacccgctccgccctggagaacgcggcctccatcgcctccctgctcctgacgaccgagaccctggtcgtcgagaagccggccgaggaggagcccgaggccggtcacggtcacgggcacagccactga

SEQ ID NO: 9701 - protein, 540 aa, Streptomyces albus G
MAKILKFDEDARRALERGVNQLADTVKVTIGPKGRNVVIDKKFGAPTITNDGVTIAREVECDDPYENLGAQLVKEVATKTNDIAGDGTTTATVLAQALVREGLRNVAAGASPAALKKGIDAAVAAVSAELLDTARPIDDKSDIAAVAALSAQDKQVGELIAEAMDKVGKDGVITVEESNTFGVDLDFTEGMAFDKGYLSPYMVTDQERMEAVLDDPYILIHQGKIGSIQDLLPLLEKVIQAGGSKPLLIIAEDVEGEALSTLVVNKIRGTFNAVAVKAPGFGDRRKAMLGDMATLTGATVIAEEVGLKLDQAGLDVLGTARRVTVTKDDTTIVDGGGNAEDVQGRVAQIKAEIESTDSDWDREKLQERLAKLAGGVCVIRVGAATEVELKERKHRLEDAISATRAAVEEGIVSGGGSALVHAVKVLDDNLGRTGDEATGVAVVRRAAVEPLRWIAENAGLEGYVITTKVAELDKGQGFNAATGEYGDLVKAGVIDPVKVTRSALENAASIASLLLTTETLVVEKPAEEEPEAGHGHGHSH

SEQ ID NO: 9702 - DNA, 1629 bp, Streptomyces avermitilis
  CDS (1)..(1629): transl_table=11
atggcgaagatcctgaagttcgacgaggacgcccgtcgcgccctcgagcgcggcgtcaacaagcttgccgacacggtcaaggtgacgatcggccccaagggccgcaacgtcgtcatcgacaagaagttcggcgcccccaccatcaccaacgacggtgtcaccatcgcccgcgaggtcgaggtcgaggacccgtacgagaacctcggcgcccagctggtgaaggaggtggcgaccaagaccaacgacatcgcgggtgacggtacgaccaccgccaccgtgctggcccaggcgctcgtccgcgagggcctgaagaacgtcgccgccggcgcgtcccccgccctcctgaagaagggcatcgacgccgcggtcaaggctgtgtccgaggagctcctcgcgaccgcccgcccgatcgacgagaagtccgacatcgccgccgtcgccggtctgtccgcccaggacagccaggtcggcgagctcatcgccgaggcgatggacaaggtcggcaaggacggtgtcatcaccgtcgaggagtccaacaccttcggtctggagctggacttcaccgagggcatggccttcgacaagggctacctgtcgccgtacttcgtgacggaccaggagcgcatggaggccgtcctcgaggacccgtacatcctcatccaccagggcaagatctcctccatccaggacctcctgccgctgctggagaaggtcatccaggccaacgcctccaagccgctgctgatcatcgccgaggacgtcgagggcgaggcactgtcgaccctggtcgtgaacaagatccgcggcacgttcaacgcggtcgcggtcaaggcccccggcttcggtgaccgccgcaaggccatgctcggcgacatcgccaccctcaccggcggtcaggtcatcgccgaggaggtcggcctcaagctcgaccaggtcggcctggacgtgctgggcaccgcccgccgcgtgaccgtcaccaaggacgacaccaccatcgtcgacggtggcggcagctccgacgaggtcgccggccggatcaaccagatcaaggccgagatcgagaacaccgactccgactgggaccgcgagaagctccaggagcgcctcgcgaagctggccggcggcgtgtgcgtcatcaaggtcggcgccgccaccgaggtggagctgaaggagaagaagcaccgtctggaggacgccatctccgcgacccgcgccgcggtcgaggagggcatcgtctccggtggtggctccgcgctcgtccacgccgtgaaggtcctggagggcaacctcggcaagaccggcgacgaggccacgggtgtcgcggtcgtccgccgcgccgccgtcgagccgctgcgctggatcgccgagaacgccggcctcgagggctacgtcatcacctccaaggtcgccgagctcgacaagggccagggcttcaacgccgcgaccggcgagtacggcgacctggtcaagtccggtgtcatcgacccggtcaaggtcacccgctccgccctggagaacgccgcgtccatcgcgtccctgctcctgacgaccgagaccctggtcgtcgagaagccggcggaagaggaggccgacgcgggccacggccacggtcacggccactcgcactga

SEQ ID NO: 9703 - protein, 542 aa, Streptomyces avermitilis
MAKILKFDEDARRALERGVNKLADTVKVTIGPKGRNVVIDKKFGAPTITNDGVTIAREVEVEDPYENLGAQLVKEVATKTNDIAGDGTTTATVLAQALVREGLKNVAAGASPALLKKGIDAAVKAVSEELLATARPIDEKSDIAAVAGLSAQDSQVGELIAEAMDKVGKDGVITVEESNTFGLELDFTEGMAFDKGYLSPYFVTDQERMEAVLEDPYILIHQGKISSIQDLLPLLEKVIQANASKPLLIIAEDVEGEALSTLVVNKIRGTFNAVAVKAPGFGDRRKAMLGDIATLTGGQVIAEEVGLKLDQVGLDVLGTARRVTVTKDDTTIVDGGGSSDEVAGRINQIKAEIENTDSDWDREKLQERLAKLAGGVCVIKVGAATEVELKEKKHRLEDAISATRAAVEEGIVSGGGSALVHAVKVLEGNLGKTGDEATGVAVVRRAAVEPLRWIAENAGLEGYVITSKVAELDKGQGFNAATGEYGDLVKSGVIDPVKVTRSALENAASIASLLLTTETLVVEKPAEEEADAGHGHGHGHSH

SEQ ID NO: 9704 - DNA, 1626 bp, Streptomyces lividans
  CDS (1)..(1626): transl_table=11
atggcgaagatcctgaagttcgacgaggacgcccgtcgcgccctcgagcgcggcgtcaacaagctcgccgacaccgtgaaggtgacgatcggccccaaggcgaacgtcgtcatcgacaagaagttcggcccccccaccatcaccaacgacggcgtcaccatcgcccgcgaggtcgaggtcgaggacccgtacgagaacctcggcgcccagctggtgaaggaggtggcgaccaagaccaacgacatcgcgggtgacggcaccaccaccgccaccgtgctcgcccaggcgctcgtgcgcgagggcctgaagaacgtcgccgccggtgcctccccggcgctgctgaagaagggcatcgacgcggccgtcgccgccgtgtcggaagaccttctcgccaccgcccgcccgatcgacgagaagtccgacatcgccgccgtggccgcgctgtccgcccaggaccagcaggtcggcgagctgatcgccgaagcgatggacaaggtcggcaaggacggtgtcatcaccgtcgaggagtccaacaccttcggtctggagctggacttcaccgagggcatggccttcgacaagggctaccgtctgcgcctacttcgtacggaccaggagcgcatggaggccgtcctcgacgacccgtacatcctgatcaaccagggcaagatctcctccatcgcggacctgctgccgctgctggagaaggtcatccaggccaacgcctccaagccgctgctgatcatcgccgaggacctggagggcgaggcgctctccaccctcgtcgtcaaccagatccgcggcaccttcaacgcggtggccgtcaaggcccccggcttcggcgaccgccgcaaggcgatgctgcaggacatggccgtcctcaccggcgccacggtcatctccgaggaggtcggcctcaagctcgaccaggtcggcctcgaggtgctcggcaccgcccgccgcatcaccgtcaccaaggacgacaccacgatcgtcgacggtcccggcaagcgcgacgaggtccaggcccgcatcgcccagatcaaggccgagatcgagaacacggactccgactgggaccgcgagaagctccaggagcgcctcgcgaagctggccggcggcgtgtgcgtgatcaaggtcggcgccgccaccgaggtggagctgaaggagcgcaagcaccgtctggaggacgccatctccgcgacccgcgccgcggtcgaggagggcatcgtctccggtggtggctccgcgctggtccacgccgtcaaggtgctcgagggcaacctcggcaagaccggcgacgaggccaccggtgtcgcggtcgtccgccgcgccgccgtcgagccgctgcgctggatcgccgagaaccccggcctggagggttacgtcatcacctccaaggtcgccgacctcgacaagggccagggcttcaacgccgccaccggcgagtacggcgacctggtcaaggccggcgtcatcgacccggtgaaggtcacccgctccgccctggagaaccccgcctccatcgcctccctcctgctgacgaccgagaccctggtcgtcgagaagaaggaagaggaagagccggccgccggtggccacagccacctaggccactcccactga

SEQ ID NO: 9705 - protein, 541 aa, Streptomyces lividans
MAKILKFDEDARRALERGVNKLADTVKVTIGPKANVVIDKKFGPPTITNDGVTIAREVEVEDPYENLGAQLVKEVATKTNDIAGDGTTTATVLAQALVREGLKNVAAGASPALLKKGIDAAVAAVSEDLLATARPIDEKSDIAAVAALSAQDQQVGELIAEAMDKVGKDGVITVEESNTFGLELDFTEGMAFDKGYRLRLLRTDQERMEAVLDDPYILINQGKISSIADLLPLLEKVIQANASKPLLIIAEDLEGEALSTLVVNQIRGTFNAVAVKAPGFGDRRKAMLQDMAVLTGATVISEEVGLKLDQVGLEVLGTARRITVTKDDTTIVDGPGKRDEVQARIAQIKAEIENTDSDWDREKLQERLAKLAGGVCVIKVGAATEVELKERKHRLEDAISATRAAVEEGIVSGGGSALVHAVKVLEGNLGKTGDEATGVAVVRRAAVEPLRWIAENPGLEGYVITSKVADLDKGQGFNAATGEYGDLVKAGVIDPVKVTRSALENPASIASLLLTTETLVVEKKEEEEPAAGGHSHLGHSH

SEQ ID NO: 9706 - DNA, 1638 bp, Thermosynechococcus vulcanus
  CDS (1)..(1638): transl_table=11
atggcgaaacgcattatctacaacgaaaatgctcgtcgtgcccttgaaaaagggatggacatcctggctgaatctgtggctgtgacccttggtccgaaaggtcggaacgtggttctggagaaaaaatttggggcgccgcaaattgtcaatgatggcgtcaccattgctaaagaaatcgaactcgaagatcacattgaaaacaccggcgtggctctaattcgccaagctgcctccaagaccaatgatgctgccggtgacggtaccacgacggcgacggttcttgcccatgccatggtgaaagaggggctgcgcaacgttgctgctggtgctaaccccattgccctgaaacgtggcattgacaaagccacccaattccttgttgaaaaaattgctgaacatgcccgtccagtggaggactccaaagccattgcccaagtggcggcgatctctgcggggaacgatgaagaagtgggtcggatgattgccgacgctatggacaaagtgggcaaagagggcgtgatctccctcgaagaggcaaaatccatgaccacggaactggaggtcaccgaggggatgcgctttgacaagggctacatttccccctactttgccactgacaccgagcgcatggaagctgtgctcgatgagcccttcgtgctggtcaccgacaagaaaattaccttggtgcaagatctggtgccgatcctcgaacaggtggctcgcgccggtaagcccttggtcatcattgccgaagacatcgagaaagaggccttggcgaccctggtggtcaaccgtctgcgcggtgtcttgaatgtagctgctgtgaaagctcccggctttggcgatcgcagtaaagcgatgctcgaagatattgccgtgctcactgcgggtcaagtgatcgccgaggatgcgggtctgaagctggaaaatgccaagctggatatgctcggtaaagctcgccgcatcacgatcaccaaagatcacaccacgattgtggccgaaggcaatgaaaaagccgtcaaggctcgctgcgagcaaatccgtcgccaaatcgaagaaactgactccagctacgacaaagaaaaactgcaagagcggttggccaaactggcgggtggtgtggcagtgattaaagtcggtgctgccaccgaaactgaaatgaaggatcgcaaactccgtctggaagatgcgattaacgccaccaaagccgctgttgaagaggggattgttcccggtggcggtaccaccttggttcacttggctcctgagttgagcaactgggccgctgagcatctaacgggtgaagaactgattggtgccaacattgttgagcgtgccctcagcgctcccctgcgtcgcattgccgaaaacgcgggtcaaaatggtgccatcattgtcgaacgggtcaaagaaaaacccttcgatgtgggttatgatgccgccaaagatgaatatgtcaacatgttcgatgccggtatcgttgaccctgccaaagttacccgctcggctctgcaaaatgcggcctctattgccggtatggtcctgaccaccgagtgcatcatcgttgacaagcccgaacccaaggaaaataatcctgcgggcagcggtgcgggtatgggcggtgacttcgactactaa

SEQ ID NO: 9707 - protein, 545 aa, Thermosynechococcus vulcanus
MAKRIIYNENARRALEKGMDILAESVAVTLGPKGRNVVLEKKFGAPQIVNDGVTIAKEIELEDHIENTGVALIRQAASKTNDAAGDGTTTATVLAHAMVKEGLRNVAAGANPIALKRGIDKATQFLVEKIAEHARPVEDSKAIAQVAAISAGNDEEVGRMIADAMDKVGKEGVISLEEAKSMTTELEVTEGMRFDKGYISPYFATDTERMEAVLDEPFVLVTDKKITLVQDLVPILEQVARAGKPLVIIAEDIEKEALATLVVNRLRGVLNVAAVKAPGFGDRSKAMLEDIAVLTAGQVIAEDAGLKLENAKLDMLGKARRITITKDHTTIVAEGNEKAVKARCEQIRRQIEETDSSYDKEKLQERLAKLAGGVAVIKVGAATETEMKDRKLRLEDAINATKAAVEEGIVPGGGTTLVHLAPELSNWAAEHLTGEELIGANIVERALSAPLRRIAENAGQNGAIIVERVKEKPFDVGYDAAKDEYVNMFDAGIVDPAKVTRSALQNAASIAGMVLTTECIIVDKPEPKENNPAGSGAGMGGDFDY

SEQ ID NO: 9708 - DNA, 1674 bp, Anabaena sp. (strain L31)
  CDS (1)..(1674): transl_table=11
atggcaaaaattatttcatttgacgaagagtcacggcgtgctttagaacggggtgtcaatgccctggctgatgcagtgaaaatcactttggggccaaagggtcgtaacgtgcttttagaaaaaaaatacggcacacctcaaattgttaatgatggtatcactgttgctaaagaaattgaattagaagatcctttagaaaatactggtgctagattaattcaagaggtggcatcaaaaaccaaggatgtagctggtgatggtacaaccactgcgacagttttggtacaagctttaattaaagaaggtttgaagaacgtcgcggctggtattaaccccgtgagcttgaagcgtggtattgataaaactactgaagcgttggtagaagaaattgccaaggtagccaaaccagtagaagggagtgcgatcgctcaagttgccaccgtttcagctggtaacgatgaagaagttggtggcatgattgccgaagctgtggaaagagtcaccaaagacggtgtcatcaccgtagaagaatccaaatccctcacgaccgaacttgacgtagtagaagggatgcatattgaccgaggctatatttccccctacttcatcaccaacaacgaacgccaaaccgtggaattggaaaatgcccggattctcattactgacaaaaaaattaacagcatccaagaattagtacccgttctgaaaaaagtagctcgtttgggtcaacctctactcatcgttgctgaagatgtagaaggtgatgccttagcaaccttagtagtgaacaaagccaggggtgtactttccgtagcagcaattaaagccccaggatttggcgaacgccgcaaagcgttattacaagatatcgccattctgacagatggtcagctaatttctgaagaaatcggtctaagcctagatacagcttccatcgacgctttatgtacagcgcggacaatcacaattgataaggaaaacaccacaattgttgcaggtactaccaccaagccagaaattcaaaaacggattggtcaaattcgcaaacagttggaagaaactgattctgaatacgacaaagaaaaattacaagaacgcattgccaagctagctggtggtattgcagtgattaaagtcggtgcggtacccgaaaccgaactcaaagaccgcaaactgcgcatcgaaaatgcactcaacgctaccaaagcggctgtagctgaaagtattggtcctggcggtggtaaaaccttaatttacttagctagcaaagtggacccgattaaggcttattttgaagaagaagaaaaaatcggcgctgatatcgttaaacgtgctttagaagcacccttacgccaaattgccgataatgctggtgaagaaggttctgttatcgtctctagagtgaaagacagcgattttaacgtaggttacaacgctgctaccggagagtttgaagacctcattgcagctggtattatcgaccccgctaaggttgtccgttcggcattgcaaaacgccgcttccatcgctggtttagttctcaccaccgaagcgatcgttgtggaaaaaccagagaaaaaacctgctgttcctgctgatcccggcatgggcggcatgggcggcatgggcggcatgggtggtatgggcggcatgggtggtatgggtatgttctaa

SEQ ID NO: 9709 - protein, 557 aa, Anabaena sp. (strain L31)
MAKIISFDEESRRALERGVNALADAVKITLGPKGRNVLLEKKYGTPQIVNDGITVAKEIELEDPLENTGARLIQEVASKTKDVAGDGTTTATVLVQALIKEGLKNVAAGINPVSLKRGIDKTTEALVEEIAKVAKPVEGSAIAQVATVSAGNDEEVGGMIAEAVERVTKDGVITVEESKSLTTELDVVEGMHIDRGYISPYFITNNERQTVELENARILITDKKINSIQELVPVLKKVARLGQPLLIVAEDVEGDALATLVVNKARGVLSVAAIKAPGFGERRKALLQDIAILTDGQLISEEIGLSLDTASIDALCTARTITIDKENTTIVAGTTTKPEIQKRIGQIRKQLEETDSEYDKEKLQERIAKLAGGIAVIKVGAVPETELKDRKLRIENALNATKAAVAESIGPGGGKTLIYLASKVDPIKAYFEEEEKIGADIVKRALEAPLRQIADNAGEEGSVIVSRVKDSDFNVGYNAATGEFEDLIAAGIIDPAKVVRSALQNAASIAGLVLTTEAIVVEKPEKKPAVPADPGMGGMGGMGGMGGMGGMGGMGMF

SEQ ID NO: 9710 - DNA, 1653 bp, Bradyrhizobium japonicum
  CDS (1)..(1653): transl_table=11
atgtcagcaaaagaagtcaaattcggagtcgatgcccgcgaccgcatgctgcgcggtgtcgacatcctccacaatgcggtaaaagtgacgctcggaccgaagggccgcaacgtcgtcctcgacaagtcgttcggcgctccccgtattaccaaggatggcgtcaccgtcgccaaggagatcgagctcgaggacaagttcgagaacatgggcgcccagatggtgcgcgaagtcgcctccaagtccgcagacgcggctggcgacggcaccaccaccgcgaccgtgctcgccgctgcgatcgtccgtgaaggcgccaagtcggttgccgccggcatgaacccgatggatctgaagcgcggcatcgacatggctgtggaagccgtggtcgccgacctcgtcaaaaactccaagaaggtcacctcgaacgaggaaatcgcccaggtcggcacgatttcagccaatggcgatgcggagatcggcaagttcatctccgacgccatgaagaaggtcggcaacgagggtgtcatcaccgttgaggaagccaagtcgctcgagaccgaactcgaagttgtcgagggcatgcagttcgaccgcggctatatctcgccctacttcgtcaccaacgccgataagatgcgcgttgaaatggatgatgcctacgtcctgattaatgagaaaaagctatctcagttgaatgaactacttcccttgttggaagccgtggtgcagagcggcaagccgcttgtgattatcgccgaagacgtcgaaggcgaagcgctcgccaccctcgtcgtcaaccgtctccgcggcggcctgaaggtcgcggccgtcaaggctccgggcttcggcgatcgccgcaaggccatgctccaggacatcgcgatcctaaccggcggccaggcgatctcggaagacctcggcatcaagctcgagaacgtcacgctcaatatgctcggtcgcgccaagaaggtgatgatcgacaaggagaacaccacgatcgtcagcggcgccggcaagaaggccgacatcgaagcgcgcgtggcgcaaatcaaggcgcagatcgaggagaccacctcggactacgaccgtgagaagctgcaggagcgtcttgccaagctcgcgggcggcgtcgcggtgatccgcgtcggcggcgcgactgaggtcgaggtgaaggagcgcaaggatcgcgtggacgatgcgatgcatgcgacccgcgcggcggttgaagaaggcatcctgccaggcggcggcgttgcgctactgcgtgcctccgagcacctcaagggcattcgcaccaaaaatgacgaccagaagaccggggtcgagatcgtgcgcaaggcgttgtcctacccggcccgccagatcgcaatcaacgcgggcgaggacggctcggtcatcgtcggcaagatcctcgaaaaggatcagtactcgtacggctacgactcgcagaccggcgaatacggcaacctggtctccaagggtatcatcgatccgactaaggtggttcgagtggcgatccagaacgcggcgtccgtcgcagcgctcctgatcaccaccgaagctatggtggcggaagtgccgaagaagaacaccggtgcgggcggcatgcctccgggcggcggcggcatgggtggcatggggggtatggacttctaa

SEQ ID NO: 9711 - protein, 550 aa, Bradyrhizobium japonicum
MSAKEVKFGVDARDRMLRGVDILHNAVKVTLGPKGRNVVLDKSFGAPRITKDGVTVAKEIELEDKFENMGAQMVREVASKSADAAGDGTTTATVLAAAIVREGAKSVAAGMNPMDLKRGIDMAVEAVVADLVKNSKKVTSNEEIAQVGTISANGDAEIGKFISDAMKKVGNEGVITVEEAKSLETELEVVEGMQFDRGYISPYFVTNADKMRVEMDDAYVLINEKKLSQLNELLPLLEAVVQSGKPLVIIAEDVEGEALATLVVNRLRGGLKVAAVKAPGFGDRRKAMLQDIAILTGGQAISEDLGIKLENVTLNMLGRAKKVMIDKENTTIVSGAGKKADIEARVAQIKAQIEETTSDYDREKLQERLAKLAGGVAVIRVGGATEVEVKERKDRVDDAMHATRAAVEEGILPGGGVALLRASEHLKGIRTKNDDQKTGVEIVRKALSYPARQIAINAGEDGSVIVGKILEKDQYSYGYDSQTGEYGNLVSKGIIDPTKVVRVAIQNAASVAALLITTEAMVAEVPKKNTGAGGMPPGGGGMGGMGGMDF

SEQ ID NO: 9712 - DNA, 1626 bp, Nocardia farcinica
  CDS (1)..(1626): transl_table=11
atggccaagacaattgcgtatgacgaagaggcccgccgcggcctcgagcgcggtctgaacagcctcgccgacgcggtcaaggtgacgctgggccccaagggtcgcaacgttgtcctggagaagaagtggggcgcccccacgatcaccaacgatggtgtgtccatcgccaaggagatcgagctggaggatccctacgagaagatcggcgccgagctggtcaaggaagtcgccaagaagaccgacgacgtcgcgggcgacggcaccaccaccgccaccgtgctcgcccaggcgctggtgcgcgagggtctgcgcaacgtggccgcgggcgcgaacccgctgggcctcaagcgcggcatcgagaaggccgtcgaggccgtgaccgccaagctgctcgacaccgccaaggaggtcgagaccaaggagcagatcgccgccaccgcgggcatctccgcgggcgacgcgtccatcggtgagctgatcgccgaggccatggacaaggtcggcaaggaaggcgtcatcaccgtcgaggagagcaacaccttcggcctccagctggagctgaccgagggcatgcgcttcgacaagggctacatctccggctacttcgtgaccgatcccgagcgtcaggaagcggtcctcgaggatccctacatcctgctcgtcggctcgaaggtctccaccgtcaaggacctgctgccgctgctggagaaggtcatccaggccggcaagccgctgctgatcatcgccgaggacgtcgagggcgaggccctgtcgaccctggtcgtgaacaagatccgtggcaccttcaagtccgtcgccgtcaaggccccgggcttcggtgaccgccgcaaggctcagctggccgacatcgccatcctgaccggtggcgaggtcatcagcgaagaggtcggcctctcgctggagaccgcgggcatcgagctgctcggccaggctcgcaaggtcgtcgtgaccaaggacgagaccaccatcgtcgagggcgcgggcgacgccgaggcgatcaagggccgggtcgcgcagatccgcaccgagatcgagaactccgactccgactacgaccgcgagaagctgcaggagcggctggccaagctggccggcggcgtggccgtcatcaaggcgggcgcggccaccgaggtcgagctcaaggagcgcaagcaccgcatcgaggacgccgtccgcaacgcgaaggccgccgtcgaggagggcatcgtcgccggtggtggcgtggccctgctgcaggccgccccggccctggacgagctgaagctgaccggtgacgaggccaccggcgcgaacatcgtgcgcgtcgctctctcggctccgctgaagcagatcgccttcaacgccggcctcgagcccggcgtggtcgccgagaaggtctcgaacctggaggccggccacggcctgaacgccgactcgggcgagtacgaggacctgctggccgccggcgtcgccgacccggtcaaggtcacccgctcggcgctgcagaacgcggcctccatcgcggccctgttcctcaccaccgaggccgtcgtcgccgacaagccggagaaggccgccgctcccgccggcgacccgaccggtggcatgggcggcatggacttctga

SEQ ID NO: 9713 - protein, 541 aa, Nocardia farcinica
MAKTIAYDEEARRGLERGLNSLADAVKVTLGPKGRNVVLEKKWGAPTITNDGVSIAKEIELEDPYEKIGAELVKEVAKKTDDVAGDGTTTATVLAQALVREGLRNVAAGANPLGLKRGIEKAVEAVTAKLLDTAKEVETKEQIAATAGISAGDASIGELIAEAMDKVGKEGVITVEESNTFGLQLELTEGMRFDKGYISGYFVTDPERQEAVLEDPYILLVGSKVSTVKDLLPLLEKVIQAGKPLLIIAEDVEGEALSTLVVNKIRGTFKSVAVKAPGFGDRRKAQLADIAILTGGEVISEEVGLSLETAGIELLGQARKVVVTKDETTIVEGAGDAEAIKGRVAQIRTEIENSDSDYDREKLQERLAKLAGGVAVIKAGAATEVELKERKHRIEDAVRNAKAAVEEGIVAGGGVALLQAAPALDELKLTGDEATGANIVRVALSAPLKQIAFNAGLEPGVVAEKVSNLEAGHGLNADSGEYEDLLAAGVADPVKVTRSALQNAASIAALFLTTEAVVADKPEKAAAPAGDPTGGMGGMDF

SEQ ID NO: 9714 - DNA, 1629 bp, Rhizobium leguminosarum
  CDS (1)..(1629): transl_table=11
atggctgctaaagaaatcaaattcagcaccgaagcccgcgagaagatgttgcgtggcgtcgacatcctggccaacgccgtgaaggcgaccctcggcccgaagggccgcaacgtcgtgatcgacaagtcgttcggcgccccgcgcatcaccaaggacggggtttcggtcgccaaggaaatcgaactcgaagacaagttcgagaatatgggcgcccagatggtccgcgaagttgcttcgaagaccagcgacattgccggcgacggcaccaccaccgcaacggtgctggcccaggcgatcgtcaaggagggcgccaaggcagttacctcagggatgaacccgatggacctgaaacgcggcatcgatcttgcggtcgccgccatcgtcgcggaactgaaggccaatgcccgcaagatctcaaacaattccgaaatcgcccaggtcggcacgatctccgccaatggcgatgccgaaatcggccgctttttggcggaagccatggaaaaggtcggcaatgatggcgtcatcaccgtcgaagaagccaagaccgccgaaaccgaactcgaagttgtcgaaggcatgcagttcgatcgcggctatctcagcccctacttcgtgactaatgccgacaagatgcgggtggagttcgaagacccttatatcctcatccacgagaagaagctctcgaacctgcagtctatgctgccggttctcgaagccgtcgtccagtccagcaagccgctgctcatcatcgctgaagatgtcgaaggcgaagccctcgcaacgctcgtcgtcaacaagctgcgcggcggcctgaagatcgccgccgtcaaggcgcccggcttcggcgaccgccgcaaggccatgctcgaagacatcgccatcctgaccgccggcaccgtcatctccgaagatctcggcatcaagctcgaatccgtcacgctcgacatgctcggccgtgccaagaaggtgtcgatcgagaaggagaacaccacaatcgtcgacggttcgggcgccaagacggacatcgaaggtcgtgtggcccagatcaaggctcagatcgaagaaaccacctccgactacgaccgcgagaagctgcaggagcgccttgccaagctcgcgggcggcgttgccgtcatccgcgtcggcggctcgacggaggtcgaggtgaaggagaagaaggaccgcgtcgacgacgcgcttcacgcaacccgcgcggcggtcgaggaaggcattctgccgggcggcggtgtggcgctgctgcgcgccgtcaaggcgctcgacgccgtcaagaccgccaatggtgaccagcgcgtcggtgtcgacatcgttcgccgcgcggtcgaggcgccggctcgccagatcgcagaaaacgccggcgcggaaggctcggtcattgtcggcaagctgcgcgagaagagcgagttctcctacggctggaacgctcagacgggcgaatatggcgacctttatgcacagggcgtcatcgatccggccaaggtggttcgcaccgcgctgcaggatgcggcctccatcgccggccttctcgtcacgacggaagccatgatcgccgagaagcccaagaaggacgcgccgccgccaatgcccgccggccccggcatggatttctaa

SEQ ID NO: 9715 - protein, 542 aa, Rhizobium leguminosarum
MAAKEIKFSTEAREKMLRGVDILANAVKATLGPKGRNVVIDKSFGAPRITKDGVSVAKEIELEDKFENMGAQMVREVASKTSDIAGDGTTTATVLAQAIVKEGAKAVTSGMNPMDLKRGIDLAVAAIVAELKANARKISNNSEIAQVGTISANGDAEIGRFLAEAMEKVGNDGVITVEEAKTAETELEVVEGMQFDRGYLSPYFVTNADKMRVEFEDPYILIHEKKLSNLQSMLPVLEAVVQSSKPLLIIAEDVEGEALATLVVNKLRGGLKIAAVKAPGFGDRRKAMLEDIAILTAGTVISEDLGIKLESVTLDMLGRAKKVSIEKENTTIVDGSGAKTDIEGRVAQIKAQIEETTSDYDREKLQERLAKLAGGVAVIRVGGSTEVEVKEKKDRVDDALHATRAAVEEGILPGGGVALLRAVKALDAVKTANGDQRVGVDIVRRAVEAPARQIAENAGAEGSVIVGKLREKSEFSYGWNAQTGEYGDLYAQGVIDPAKVVRTALQDAASIAGLLVTTEAMIAEKPKKDAPPPMPAGPGMDF

SEQ ID NO: 9716 - DNA, 1629 bp, Rhizobium meliloti
  CDS (1)..(1629): transl_table=11
atggctgccaaggaagtcaaattcaccagtgatgcccgcgatcggatgctgcgcggcgtggacatcatggccaacgcggtccgcgtgactttgggaccgaaggggcggaacgtcgtcatcgacaagtccttcggtgcaccgcggatcaccaaggacggggtttcggtcgccaaggaaatcgagctcgaggacaagttcgagaatatgggcgcgcagatgctgcgcgaagtggcgtcgcgcaccagcgacattgccggcgacggcaccaccactgccaccgtactcgcgcaggctatcgttagggagggcgccaaggccgtcgcatcgggaatgaacccgatggatctgaagcgcggcatcgatcttgccgtcgaggcgatcgtcaaggaactcaggaacaatgcccgcaaggtctccaaaaatgccgaaatcgcccaggtggcgacgatttcggccaatggcgatgccgaaatcggccgttacctggccgaagcgatggaaaaggtcggcaatgagggcgtgatcaccgtcgaggaggccaagaccgccgagatcgaactcgaagtcgtcgagggaatggagttcgatcggggatatctatccccctatttcatcaccaatcaggaaaagatgagggtggagctggaagacgcctacatcctgcttcacgagaagaagctctccaacctgcaggcgatgatcccaattctcgaatcggtcatccagtccggcaagccgctcctgatcattgccgaagatgtcgagggagaggcgctcgccaccctcgtcgtcaacaagcttcgcggcggcctgaagatcgctgcggtcaaggccccgggcttcggcgaccgtcgcaagtccatgctggaagatatcgcgatcctgaccggcggcaccgtcatttccgaggaactcgggatcaagctcgaaaacaccacgatggataccctcggccgtgcgaagcgcatcatggtggacaaggagacgacgacgatcgtcgacggcgccggatcgaaggaggatatcggcggccgcgtcgcacagatcaaggcacagatcgaggacacgacctcggactatgatcgagagaagttgcaggagcggctcgccaagctcgcgggcggcgtcgcggtcatccgcgtcggcggctcgaccgaggtcgaagtcaaggagaagaaggaccgtgtcgacgatgcgctgcatgcaacgcgcgcggcggtcgaggaaggcattctgcccggcggcggcgtggcgctgctgcgggtcgtgagcgcgctcaacggtcttgccaccgccaatgacgaccagcgcgtgggcatcgagatcgtccgccgcgcaatcgaggcacccgtgcgtcagatcgccgagaacgccggcgccgagggatcgatcatagtcgggaagctgcgcgagaaacaggatttcgcctttggctggaacgcccagactggagaattcggcgatctcttccaaatgggcgtcatcgatcccgcgaaggtcgtgcgcgccgcgcttcaggacgctgcctccatcgccggtcttctcgtgacgacggaagcgatgatcgccgagaaaccgaagaaggacgggcagccgcagatgccgcctggcggcggaatggacttctga

SEQ ID NO: 9717 - protein, 542 aa, Rhizobium meliloti
MAAKEVKFTSDARDRMLRGVDIMANAVRVTLGPKGRNVVIDKSFGAPRITKDGVSVAKEIELEDKFENMGAQMLREVASRTSDIAGDGTTTATVLAQAIVREGAKAVASGMNPMDLKRGIDLAVEAIVKELRNNARKVSKNAEIAQVATISANGDAEIGRYLAEAMEKVGNEGVITVEEAKTAEIELEVVEGMEFDRGYLSPYFITNQEKMRVELEDAYILLHEKKLSNLQAMIPILESVIQSGKPLLIIAEDVEGEALATLVVNKLRGGLKIAAVKAPGFGDRRKSMLEDIAILTGGTVISEELGIKLENTTMDTLGRAKRIMVDKETTTIVDGAGSKEDIGGRVAQIKAQIEDTTSDYDREKLQERLAKLAGGVAVIRVGGSTEVEVKEKKDRVDDALHATRAAVEEGILPGGGVALLRVVSALNGLATANDDQRVGIEIVRRAIEAPVRQIAENAGAEGSIIVGKLREKQDFAFGWNAQTGEFGDLFQMGVIDPAKVVRAALQDAASIAGLLVTTEAMIAEKPKKDGQPQMPPGGGMDF

SEQ ID NO: 9718 - DNA, 1623 bp, Streptomyces albus G
  CDS (1)..(1623): transl_table=11
atggccaagatcatcgcgttcgacgaggaggcgcggcgcggtctcgagcgcgggatgaaccagctcgccgacgccgtcaaggtcacccttggccccaagggccgcaacgtcgtcctcgagaagaagtggggcgcccccacgatcaccaacgatggtgtctccatcgccaaggagatcgagctcgaagacccgtacgagaagatcggcgccgagctggtcaaggaggtcgcgaagaagacggacgacgtcgccggtgacggcacgacgaccgcgaccgtcctggcccaggcgctcgtccgcgagggtctgcgcaacgtcgccgcgggtgccaacccgatggccctgaagcgcggcatcgagaaggccgtcgaggccgtctcctccgccctgctggagcaggcgaaggacgtggagaccaaggagcagatcgcctccaccgcctccatctccgccgccgacacccagatcggcgagctgatcgccgaggccatggacaaggtcggcaaggaaggcgtcatcaccgtcgaggagtcccagaccttcggtctggagctggagctcaccgagggtatgcgcttcgacaagggctacatctcggcgtacttcgccaccgacatggagcggatggaggcgtcgctcgacgacccgtacatcctcatcgtcaactccaagatcggcaacgtgaaggacctgctcccgctgctggagaaggtcatgcagtcgggcaagccgctgctgatcatcgccgaggacgtcgagggcgaggccctgtcgaccctggtggtcaacaagatccgtggcaccttcaagtccgtcgccgtcaaggccccgggcttcggcgaccgccgcaaggccatgctcggtgacatcgccatcctcacgggcggcacggtcatctccgaggaggtcggcctcaagctggagaacgccggtctcgacctgctgggccgcgcccgcaaggtcgtcatcaccaaggacgagaccacgatcgtcgacggtgccggcgacacggaccaggtcaacggccgcgtcgcgcagatccgcgccgagatcgagaacagcgactcggactacgaccgcgagaagctccaggagcgtctggcgaacgtggccggcggcgtggccgtcatcaaggccggtgccgccaccgaggtcgagctgaaggagcgcaagcaccgcatcgaggacgcggtgcgcaacgccaaggccgccgtcgaggagggcatcgtcgccggtggtggcgtggctctgctccaggcttcctcggtcttcgagaagctcgagctcgagggcgacgaggccaccggtgccgccgccgtcaagctggccctggaggccccgctcaagcagatcgccgtcaacggtggcctggagggcggcgtggtcgtggagaaggtgcgcaacctctccgtgggccacggcctgaacgccgcgaccgggcagtacgtcgacatgatcgccgagggcatcctcgacccggccaaggtgacgcgttccgcgctccagaacgccgcgtcgatcgccgccctcttcctcaccaccgaggccgtcatcgccgacaagccggagaaggccgccgccgctgccccgggtggcatgcccggcggtgacatggacttctga

SEQ ID NO: 9719 - protein, 540 aa, Streptomyces albus G
MAKIIAFDEEARRGLERGMNQLADAVKVTLGPKGRNVVLEKKWGAPTITNDGVSIAKEIELEDPYEKIGAELVKEVAKKTDDVAGDGTTTATVLAQALVREGLRNVAAGANPMALKRGIEKAVEAVSSALLEQAKDVETKEQIASTASISAADTQIGELIAEAMDKVGKEGVITVEESQTFGLELELTEGMRFDKGYISAYFATDMERMEASLDDPYILIVNSKIGNVKDLLPLLEKVMQSGKPLLIIAEDVEGEALSTLVVNKIRGTFKSVAVKAPGFGDRRKAMLGDIAILTGGTVISEEVGLKLENAGLDLLGRARKVVITKDETTIVDGAGDTDQVNGRVAQIRAEIENSDSDYDREKLQERLANVAGGVAVIKAGAATEVELKERKHRIEDAVRNAKAAVEEGIVAGGGVALLQASSVFEKLELEGDEATGAAAVKLALEAPLKQIAVNGGLEGGVVVEKVRNLSVGHGLNAATGQYVDMIAEGILDPAKVTRSALQNAASIAALFLTTEAVIADKPEKAAAAAPGGMPGGDMDF

SEQ ID NO: 9720 - DNA, 1626 bp, Streptomyces avermitilis
  CDS (1)..(1626): transl_table=11
atggccaagatcatcgcgttcgacgaggaggcacggcgcggtctcgagcgcgggatgaaccagctcgccgacgccgtcaaggtcacccttggccccaagggccgcaacgtcgtcctcgagaagaagtggggcgcccccacgatcaccaacgatggtgtttccatcgccaaggagatcgagctcgaggacccgtacgagaagatcggcgccgagctggtcaaggaagtcgccaagaagacggacgacgtcgccggtgacggtacgaccaccgcgaccgtcctcgcccaggcgctcgtccgcgagggcctgcgcaacgtagccgccggcgccaacccgatggctctcaagcgcggtatcgagaaggccgtcgaggccgtctccggtgccctgctcgagcaggcgaaggatgtcgagaccaaggagcagatcgcttcgacggcctccatctccgccgccgacacccagatcggcgagctcatcgccgaggcgatggacaaggtcggcaaggaaggcgtcatcaccgtcgaggagtcccagaccttcggtctggagctcgagctcaccgagggtatgcgcttcgacaagggctacatctcggcgtacttcgccaccgacatggagcgtatggaggcgtcgctcgacgacccgtacatcctgatcgccaactccaagatcagttccgtcaaggacctgctcccgctcctcgagaaggtcatgcagtcgggcaagccgctgctgatcatcgccgaggacgtcgagggcgaggccctgtcgaccctggtcgtcaacaagatccgtggcaccttcaagtccgtcgccgtcaaggctccgggcttcggtgaccgccgcaaggccatgctcggcgacatcgccatcctcacgggcggcgaggtcatctccgaggaggtcggcctcaagctggagaacgcgagcatcgacctgctcggtcgcgcccgcaaggtcgtcatcaccaaggacgagaccacgatcgtcgacggcgccggctcggccgaccaggtcgccggccgggtcaaccagatccgtgccgagatcgagaactccgactcggactacgaccgcgagaagctccaggagcgtctggcgaagctggccggcggcgtggccgtcatcaaggccggtgccgccaccgaggtcgagctcaaggagcgcaagcaccgcatcgaggacgccgttcgcaacgcgaaggcggccgtcgaggagggcatcgtcgccggtggtggcgtggccctcatccaggcttcctcggtcttcgagaagctggagctcacgggtgacgaggcgaccggcgccaacgccgtgcggctcgccctggaggccccgctcaagcagatcgccgtcaacggtggtctcgagggtggcgtcatcgtcgagaaggtgcgcaacctgcccgtcggccacggcctgaacgccgcgaccggtgagtacgtcgacatgatcgccgaaggcatcatcgacccggcgaaggtcacgcgctctgccctgcagaacgccgcctccatcgccgcgctgttcctgaccaccgaggccgtcatcgccgacaagccggagaaggccgccgcgggcggcgctccgggcggcatgccgggcggtgacatggacttctga

SEQ ID NO: 9721 - protein, 541 aa, Streptomyces avermitilis
MAKIIAFDEEARRGLERGMNQLADAVKVTLGPKGRNVVLEKKWGAPTITNDGVSIAKEIELEDPYEKIGAELVKEVAKKTDDVAGDGTTTATVLAQALVREGLRNVAAGANPMALKRGIEKAVEAVSGALLEQAKDVETKEQIASTASISAADTQIGELIAEAMDKVGKEGVITVEESQTFGLELELTEGMRFDKGYISAYFATDMERMEASLDDPYILIANSKISSVKDLLPLLEKVMQSGKPLLIIAEDVEGEALSTLVVNKIRGTFKSVAVKAPGFGDRRKAMLGDIAILTGGEVISEEVGLKLENASIDLLGRARKVVITKDETTIVDGAGSADQVAGRVNQIRAEIENSDSDYDREKLQERLAKLAGGVAVIKAGAATEVELKERKHRIEDAVRNAKAAVEEGIVAGGGVALIQASSVFEKLELTGDEATGANAVRLALEAPLKQIAVNGGLEGGVIVEKVRNLPVGHGLNAATGEYVDMIAEGIIDPAKVTRSALQNAASIAALFLTTEAVIADKPEKAAAGGAPGGMPGGDMDF

SEQ ID NO: 9722 - DNA, 1641 bp, Bradyrhizobium japonicum
  CDS (1)..(1641): transl_table=11
atgtcagccaaagaagtgaagttcggagtaaacgcgcgggaccgtatgctgcgcggtgtcgacattctcgccaacgccgtgcaggtcacgctcggtccgaaaggccgcaacgtcgtgctcgacaagtcgttcggcgcacctcgaattaccaaggacggcgttgccgtcgccaaggagatcgagctcgacgacaagttcgagaacatgggtgcccagatggtgcgtgaggtcgcttcgaaggctgcggatgctgctggcgacggtaccaccaccgcgaccgtcctggccgctgcgattgtgcgagaaggcgccaagtcggttgccgccggcatgaacccgatggacctcaagcgcggtatcgaccttgcggtcgaggctgtggttgcggaccttcagaagaactccaagaaggtcacctcgaacgacgagatcgcccaggtcggcgcaatttcggcaaacggcgaccaggagatcggcaagttcctcgccgacgcggtgaagaaggtcggcaacgagggtgtcatcacggttgaagaagccaaatcgctcgagaccgagcttgacgtcgtcgagggcatgcagttcgaccgcggctacatctcgccctacttcgtcaccaacgccgacaagatgcgcgttgagatggacgacgcctacatcctcatcaacgagaagaagctctcctcgctgaacgagctgctgccgctgctcgaggccgtggtgcagaccggcaagccgctggtcatcgtcgccgaggacgtcgaaggcgaagcgcttgcgaccctggtcgtgaaccgtctgcgcggtggtctgaaggtcgcggccgtcaaggctccgggcttcggcgatcgccgcaaggccatgctgcaggacatcgcgatcctgaccggcggccaggcgatctcggaagatctcggcatcaagctcgagaacgtcacgctcaacatgctcggccgcgccaagaaggtgatgatcgacaaggagaacaccacgatcgtcaacggcgccggcaagaaggccgacatcgaggcgcgcgtggcccagatcaaggcgcagatcgaggagaccacctcggactacgaccgtgagaagctccaggagcgtctcgccaagctcgctggcggcgtcgcggtgatccgcgtcggcggcgcgaccgaggtcgaggtgaaggagcgcaaggatcgcgttgatgacgcgatgcatgcgacccgcgcggcggtcgaggaaggcatcgtcccgggcggcggcgtcgccctgctccgtgcttccgagcagctcaagggtctgcgcaccgagaacgacgaccagaagaccggcgtcgagattgtgcgtaaggcgctgtcctggccggcccgccagatcgcgatcaacgccggcgaggacggttcgatcgtggtcggcaaggtcctcgacaacgagcagtactcttttggtttcgacgcccagacaggcgagtacagcaacctcgtttccaagggtatcattgacccggccaaggtcgtgcgcatcgcggtccagaacgcctcttcggtggccgggctgctgatcacgacggaagcgatggttgccgagctgccgaagaaggctacggctggtccagcaatgcctgcggcccccggcatgggcggtatggacttctga

SEQ ID NO: 9723 - protein, 546 aa, Bradyrhizobium japonicum
MSAKEVKFGVNARDRMLRGVDILANAVQVTLGPKGRNVVLDKSFGAPRITKDGVAVAKEIELDDKFENMGAQMVREVASKAADAAGDGTTTATVLAAAIVREGAKSVAAGMNPMDLKRGIDLAVEAVVADLQKNSKKVTSNDEIAQVGAISANGDQEIGKFLADAVKKVGNEGVITVEEAKSLETELDVVEGMQFDRGYISPYFVTNADKMRVEMDDAYILINEKKLSSLNELLPLLEAVVQTGKPLVIVAEDVEGEALATLVVNRLRGGLKVAAVKAPGFGDRRKAMLQDIAILTGGQAISEDLGIKLENVTLNMLGRAKKVMIDKENTTIVNGAGKKADIEARVAQIKAQIEETTSDYDREKLQERLAKLAGGVAVIRVGGATEVEVKERKDRVDDAMHATRAAVEEGIVPGGGVALLRASEQLKGLRTENDDQKTGVEIVRKALSWPARQIAINAGEDGSIVVGKVLDNEQYSFGFDAQTGEYSNLVSKGIIDPAKVVRIAVQNASSVAGLLITTEAMVAELPKKATAGPAMPAAPGMGGMDF

SEQ ID NO: 9724 - DNA, 1635 bp, Rhizobium leguminosarum
  CDS (1)..(1635): transl_table=11
atgtctgccaaggaaatcagattctccaacgacgcgcgcgaccgcctgctgcgcggcgtcgaattgctcaacaacgccgtcaaggtgacgcttggcccgaagggtcgcaacgtcgtcattgacaaggcctatggcgcaccgcgcattaccaaggacggcgtcagcgtcgccaaggagatcgagctcgcggacaagttcgagaacatgggcgcgcaaatggtgcgcgaggtggcttcgaagaccaatgatcttgccggcgacggcacgacgacggcaacggtgctcgccgcctccatattccgcgaaggcgcaaagctcgtcgctgccggcatgaaccctatggatctccggcgcggcatcgatctcggcgttaccgccgtcgtcaaggaaatcaaggcgagggcgatgaaggtcaaatcgtcaagcgagatcgcccaggtcggcaccattgccgccaatggcgacgccgccatcggcgagatgatcgccaaggcgatggacaaggtcggcaatgagggcgtcataacagtcgaagaggcgcgaaccgccgagaccgaactcgacgtcgtcgagggtatgcagttcgaccgcggctatctctcaccctatttcgtcaccaatgccgagaagatgcgcgtggaactggaggatccctatatcctcgttcacgagaagaaactcggcagtctgcaggcgatgctgccgatcctggaagccgtcgtacagaccggcaaaccgctgctcctcatctcggaggacgtcgaaggcgaggcgctggcgacgcttgttgttaacaagctgcgcggcggcctgaaggtcgcagccgtcaaggcgccgggtttcggtgatcgccgtaaggccatgctggaagacattgccgtgctcacatcaggccagatgatttccgaggatctcggcatcaagctcgacaacgtcacgctcgatatgctcggccacgccaagcgcgtgctgatcgacaaggaatccaccacgatcatcgacggctccggcgagaaagcggccatccaggcacgtatccagcagatcaaggcgcagatcgaggagaccacttccgattacgataaggaaaagctgcaggaacgcctggcgaaactcgccggtggcgtcgcggttatccgcgtcggcggcgcgaccgaaacggaagtcaaggaaaagaaggaccgcatcgacgatgcgctgaacgccacccgtgcggcggtcgaagagggcatcgtgcccggcggcggcgtggcactgttgcgcgccaagtcggcgctcacgggcctgaccggggagaacgccgacgtgacggcgggcatctcgatcgtgctcagggcgctcgaagccccgatccggcagatcgccgacaatgccgggttcgagggctccatcgtcgttggaaaactcgcgggcagcaataaccacaatcagggcttcgacgcacagacggagacctatgtcgatatgatcgaggccggcatcgtcgatcccgccaaggtcgtgcgcaccgctctgcaggacgccggctcgattgcggcgcttctgatcaccgccgaggtgatgatcgctgacattcccgcaagagactccgcccctgcagccggaaatggcggcatgggcgatatgggatactga

SEQ ID NO: 9725 - protein, 544 aa, Rhizobium leguminosarum
MSAKEIRFSNDARDRLLRGVELLNNAVKVTLGPKGRNVVIDKAYGAPRITKDGVSVAKEIELADKFENMGAQMVREVASKTNDLAGDGTTTATVLAASIFREGAKLVAAGMNPMDLRRGIDLGVTAVVKEIKARAMKVKSSSEIAQVGTIAANGDAAIGEMIAKAMDKVGNEGVITVEEARTAETELDVVEGMQFDRGYLSPYFVTNAEKMRVELEDPYILVHEKKLGSLQAMLPILEAVVQTGKPLLLISEDVEGEALATLVVNKLRGGLKVAAVKAPGFGDRRKAMLEDIAVLTSGQMISEDLGIKLDNVTLDMLGHAKRVLIDKESTTIIDGSGEKAAIQARIQQIKAQIEETTSDYDKEKLQERLAKLAGGVAVIRVGGATETEVKEKKDRIDDALNATRAAVEEGIVPGGGVALLRAKSALTGLTGENADVTAGISIVLRALEAPIRQIADNAGFEGSIVVGKLAGSNNHNQGFDAQTETYVDMIEAGIVDPAKVVRTALQDAGSIAALLITAEVMIADIPARDSAPAAGNGGMGDMGY

SEQ ID NO: 9726 - DNA, 1635 bp, Rhizobium meliloti
  CDS (1)..(1635): transl_table=11
atgtccgccaaacaaatagtcttctccactgacgcccgcgatcgcctgcttcgcggcgtggaattgctcaacaatgccgtcaaggtgacactcggcccaaagggccgcaatgtcgttatcgacaagtcctatggcgctccacgcattaccaaagacggcgtctctgtcgccaaggaaatcgaacttgaagacaagttcgaaaatatgggtgcgcagatggtgcgcgcggtagcctcgaagaccaatgaccttgccggcgacggcaccacgacggcgaccgtgctcgccgcgtccatctttcgcgaaggcgccaagctggtttcggtgggcatgaacccaatggacctaaagcgcggcatcgatcttggggttgccgctgtcctcgcggaaatcaaggcgcgcgcgacgaaggtcatctcgtcgagcgagatcgctcaggtcggcacgatcgccgccaatggcgacgccggcgtcggcgagatgatcgcaagggcgatggagaaggttggcaacgagggtgtcattaccgtcgaagaggccaggacggccgataccgaactcgacgtcgtcgagggcatgcagttcgaccgcggttatctctcgccgtatttcgtgaccaatgccgagaagatgcgcgtggaactggaggatccctacatcctcattcacgagaagaagctcggcagcctgcaggctatgctgcctatcctggaggccgcggtgcagagcgggaaaccgttgctgatcatctccgaagacgtcgaaggcgaagtgctggcgacgctcgtcgtcaacaggctgcgaggtggcctgaagatcgcggcagtcaagacgccaggtttcggcgaccgccgcaaggccatgctggaagacattgccgttttgacggccggccagatgatctccgaggatctcggcatcaagcttgagaatgtcacgctcgatatgcttggccgcgccaggcgggtgctgatcgagaaagacacgaccacaatcatcgacggctccggcgacaaagcctccattcaggcgcgcgtcagccaaatcaaggcgcagatcgaggagacggcgtccgactacgacaaggaaaagctgcaggagcggttggcgaaactcgccggcggcgtcgcggtcatccgcgtcggcggcgcgaccgagcttgaagtgaaggaaaagaaggaccgcatcgacgatgccctgaacgctacgcgcgcggcggtcgaagaaggcatcgttcccggcggcggggtggcgctgctccgagcaaaatcggcccttgtcggtctcaccgacgataacgccgacgtaacggcaggcatctcgatcgtgcgccgagccctggaagcaccaatccgccagatcgccgacaatgccggtgtggaaggttcgatcgttgtcggaaagcttgtcgacggcagggatcacaaccaagggttcgacgcacagacggaaacctatgtcgatatgatcaaggccggcatcgtcgatcccgccaaggtcgtacggacagcattgcgggacgctggctcgatcgcgtcacttctgatcaccgccgaagccatgatcgccgatattcccgagagagggtctccccaaagcaccggaaacggcgccgtggatagtatgggatactga

SEQ ID NO: 9727 - protein, 544 aa, Rhizobium meliloti
MSAKQIVFSTDARDRLLRGVELLNNAVKVTLGPKGRNVVIDKSYGAPRITKDGVSVAKEIELEDKFENMGAQMVRAVASKTNDLAGDGTTTATVLAASIFREGAKLVSVGMNPMDLKRGIDLGVAAVLAEIKARATKVISSSEIAQVGTIAANGDAGVGEMIARAMEKVGNEGVITVEEARTADTELDVVEGMQFDRGYLSPYFVTNAEKMRVELEDPYILIHEKKLGSLQAMLPILEAAVQSGKPLLIISEDVEGEVLATLVVNRLRGGLKIAAVKTPGFGDRRKAMLEDIAVLTAGQMISEDLGIKLENVTLDMLGRARRVLIEKDTTTIIDGSGDKASIQARVSQIKAQIEETASDYDKEKLQERLAKLAGGVAVIRVGGATELEVKEKKDRIDDALNATRAAVEEGIVPGGGVALLRAKSALVGLTDDNADVTAGISIVRRALEAPIRQIADNAGVEGSIVVGKLVDGRDHNQGFDAQTETYVDMIKAGIVDPAKVVRTALRDAGSIASLLITAEAMIADIPERGSPQSTGNGAVDSMGY

SEQ ID NO: 9728 - DNA, 1638 bp, Rhizobium meliloti
  CDS (1)..(1638): transl_table=11
atggcagctaaagaagtcaagttcggccgcagcgcgcgcgaaaagatgctgcgcggcgtcgacatcctcgccgatgcagtcaaggtgacgctcggcccgaagggccgcaacgtcgtcatcgacaagtcgttcggcgcaccgcgcatcaccaaggatggcgtcaccgtcgccaaggagatcgaactcgaagacaagttcgagaacatgggcgcccagatggtccgcgaagtcgcttcgaagaccaacgacattgccggtgacggcacgacgactgcaaccgttctcgcccaggcgatcgttcgcgaaggcgcgaaggccgttgccgccggcatgaacccgatggacctgaagcgcggtattgacctggccgtcgccgaagtcgtcaaggacctgctcgccaaggccaagaagatcaacacctcggacgaagtcgcccaggtcggcacgatctcggcaaacggcgaaaagcagatcggtctcgacattgcggaagcgatgcagaaggtcggcaacgaaggcgtcatcacggttgaagaagccaagaccgccgagaccgagctcgaagtcgtcgaaggcatgcagttcgaccgcggctacctgtcgccctatttcgtcaccaacccggaaaagatggtcgccgacctcgaagacgctttcattctcctgcacgagaagaagctctccaacctccaggcgatgctcccggttctcgaagccgtcgtgcagaccggcaagccgctcctcatcatcgctgaagacgtcgaaggcgaagcactcgcaacgctcgtcgtcaacaagctgcgtggcggcctgaagatcgctgccgtcaaggccccgggcttcggcgaccgccgcaaggccatgctcgaagacatcgccatcctgacaggcggcacggtgatctcggaagacctcggcatcaaactcgaaagcgtcacgctcgacatgctcggccgcgctaagaaggtttcgatcaccaaggaaaacacgacgatcgtcgacggcgccggccagaagtccgacatcgaaggccgcgtcgctcagatcaaggcccagatcgaagaaaccacctccgactacgaccgtgagaagctgcaggagcgccttgccaagctcgccggcggcgtcgctgtcatccgcgtcggcggtgcgacggaagtcgaagtgaaggaaaagaaggaccgcatcgacgacgccctcaacgcgacgcgggctgccgttcaggaaggcatcgtaccgggcggcggcgttgccctgctgcgttcttccgtcaagatcaccgtcaagggtgagaacgacgatcaggacgccggcgtcaacatcgttcgccgcgctctgcagtctccggcccgtcagatcgttgaaaacgctggcgacgaagcctccatcgttgtcggcaagatcctcgagaagaacaccgacgacttcggctacaacgctcagaccggcgagtatggcgacatgatcgccatgggcatcatcgacccggtcaaggtcgttcgcaccgcgcttcaggacgcagcctcggttgcttcgctgctcatcaccaccgaagccatgatcgccgaactgccgaagaaggacgctccggcaatgcctggcggcatgggcggaatgggtggaatggacatgatgtga

SEQ ID NO: 9729 - protein, 545 aa, Rhizobium meliloti
MAAKEVKFGRSAREKMLRGVDILADAVKVTLGPKGRNVVIDKSFGAPRITKDGVTVAKEIELEDKFENMGAQMVREVASKTNDIAGDGTTTATVLAQAIVREGAKAVAAGMNPMDLKRGIDLAVAEVVKDLLAKAKKINTSDEVAQVGTISANGEKQIGLDIAEAMQKVGNEGVITVEEAKTAETELEVVEGMQFDRGYLSPYFVTNPEKMVADLEDAFILLHEKKLSNLQAMLPVLEAVVQTGKPLLIIAEDVEGEALATLVVNKLRGGLKIAAVKAPGFGDRRKAMLEDIAILTGGTVISEDLGIKLESVTLDMLGRAKKVSITKENTTIVDGAGQKSDIEGRVAQIKAQIEETTSDYDREKLQERLAKLAGGVAVIRVGGATEVEVKEKKDRIDDALNATRAAVQEGIVPGGGVALLRSSVKITVKGENDDQDAGVNIVRRALQSPARQIVENAGDEASIVVGKILEKNTDDFGYNAQTGEYGDMIAMGIIDPVKVVRTALQDAASVASLLITTEAMIAELPKKDAPAMPGGMGGMGGMDMM

SEQ ID NO: 9730 - DNA, 1626 bp, Bradyrhizobium japonicum
  CDS (1)..(1626): transl_table=11
atggcacacaaacaagtcctgttccattcagcagcccgcgagaagatcttgcgcggcgcgtctctccttgcagacgcggtgcgcgtgacgctcggcccgaagtcgaaatcagtcctgatccagaagggatggggagcgccgatcgtctgcaacgacggggtcaccattgccaaggaattcgacttgaaggatgccgaagagaaccttggcgctcaggtgttgcgtcagctcgcggagaaaaccggcgacgtcgtcggcgacggcaccagcacgtctaccatccttgcacatgccatcctgtcggacggggttcgcaatgttgtggctggcgcgagcgcgatcgacctcaaacgtggcctcgatcgcggaacgcaggccgccatcgccgcattgcgcgctatggcaacgcccgtaaaatccagggcggagaaggtgcaagtcgccacgatttcggcccacaacgatgcgtcgatcggcgaactcgtagccgatgcgatcgagaaggtcggcggcgacggcgtgatatcggtcgaggagtccaagacgaccgaaacgcttctggacgtcgtcgagggaatgaaattcgaccggggttttctttcaccctatttcatcaccgatgccgaccggatggaatcggtgttgcaggatccctacgtcctgctctgcgaccacaagatcggcgcattgcgcgatctggttccccttctcgagcaggtcgccaagagcggtcagccgcttctgatcattgccgaggacatcgagggcgaagcgctggccactctcatcgtcaatcaattgcggggcgtgctcaaggcttgcgccgtcaaggcccccgggtttggtgaccggcgcaaggccatgctcgaggatatcgcgatattgaccggcgctcaggtgatctcggaagagatcggcttgaacttggagaacgccaccctgcaacaactcggtcgtgccgcgcgcgtggtcgccgacaaggagaatacaacgttgatcggcagcggtggcgatcgcacccgcatcgatgcacgactgggccagatccgggtcgaaatcgaaaagacgactagcgattacgatcgcgagaagctcgaagagcgcctcgccaagctgtcgggaggcgtcgcggtgatccgggtgggagcgccgaccgaggccgaaatgaaggcgaagaaggaagctttggacgatgcaatcagttcgacgaaagcggcggtcgcggaaggcattgtgcccggtggcgggctggctctgctccgtgcagtcgcggccgtggccaaggaggaagcggcctgtgagggcgacgagcggaccggcgtacagatcctgagacgcgctcttgaggctccggcgcgccagattgccgagaattccgcggccgacggaggcgtcgtggttgcgcggatgctcgaaggtgaaggcagcattggcttcgatgcctcccgcaaggtctatgtcgatctcgtcgcggctggcatcgtcgatccggtcaaggtcgtacggacagccctcgaaaacgcggtctcggtcgcgagcgtgctccttctgaccgaagcgacgatgacggaaatcccggagccgaaacgcgagagactgcccgaaccggacttggcggtgcagtag

SEQ ID NO: 9731 - protein, 541 aa, Bradyrhizobium japonicum
MAHKQVLFHSAAREKILRGASLLADAVRVTLGPKSKSVLIQKGWGAPIVCNDGVTIAKEFDLKDAEENLGAQVLRQLAEKTGDVVGDGTSTSTILAHAILSDGVRNVVAGASAIDLKRGLDRGTQAAIAALRAMATPVKSRAEKVQVATISAHNDASIGELVADAIEKVGGDGVISVEESKTTETLLDVVEGMKFDRGFLSPYFITDADRMESVLQDPYVLLCDHKIGALRDLVPLLEQVAKSGQPLLIIAEDIEGEALATLIVNQLRGVLKACAVKAPGFGDRRKAMLEDIAILTGAQVISEEIGLNLENATLQQLGRAARVVADKENTTLIGSGGDRTRIDARLGQIRVEIEKTTSDYDREKLEERLAKLSGGVAVIRVGAPTEAEMKAKKEALDDAISSTKAAVAEGIVPGGGLALLRAVAAVAKEEAACEGDERTGVQILRRALEAPARQIAENSAADGGVVVARMLEGEGSIGFDASRKVYVDLVAAGIVDPVKVVRTALENAVSVASVLLLTEATMTEIPEPKRERLPEPDLAVQ

SEQ ID NO: 9732 - DNA, 1629 bp, Rhizobium meliloti
  CDS (1)..(1629): transl_table=11
atggctgcgaaggaagtcaaattccagaccgacgcacgcgagcgcatgctgcgtggtgtcgacgtgctggccaatgccgtaaaggtaactctcggtccgaagggccgtaacgtcgttatcgacaagtcgttcggtgcgccgcggatcaccaaggatggcgtctccgtcgccaaggaaatcgaactcgaggacaagttcgagaatatgggcgcgcagatgctgcgcgaagtcgcatccaggaccaacgaccttgccggggacggaacgacgaccgctacggtgctcgcacaggcaatcgtccgggaaggtgccaaggccgtcgcctcgggcatgaacccgatggacttgaagcgcggcatcgatctcgcagtcgatgcggtcgtgaaggaattgaagaacaacgccaggaagatctccaagaattccgagatcgctcaggtcggtaccatttccgccaatggcgacaccgaaatcggacgctatctcgccgaagccatggagaaggtcggcaatgaaggggtgatcacggtcgaggaggccaagacggccgagacggaactcgaggtcgtcgagggtatgcagttcgaccgcggctatctctctccctatttcatcaccaatcaggacaagatgcgcgtggaactggaggatccctatatcctcatccacgaaaagaagctttcgaacctgcaggccatgctgccggtgctcgaagcggtcgtccagtccggcaagccgctcctcatcatcgccgaggatgtggaaggcgaggcgctcgccaccctcgtcgtcaacaagttacgcggcggcctcaaggttgctgccgtcaaggcgcccggcttcggcgaccgccgcaaggccatgctggaagacatcgccatccttaccggcggcaccgtcgtttcggaagacctcggcatcaagcttgaaagcgtcacgctcgacatgctgggccgtgctaagaaagtctcgatcgagaaggagaacaccaccatcatcgacggtgcgggttcgaaagccgatatcgagggccgtaccgcgcagatccgcgcccagatcgaggagacgacctctgactatgatcgcgagaagctgcaggaacgccttgccaagctcgccggcggcgtcgcagtcatccgcgtaggtggctctaccgaagtcgaggtgaaggaaaagaaggaccgcgtcgacgacgcgttgcacgcgacgcgggcggcagtcgaggaagggatactgcccggcggcggcgtcgcgttgctgcgggcggtcaaggctctcgacggccttaagaccgccaacaacgatcagcgcgtcggggtcgatctcgtgcgccgcgctatcgaagctcccgtccgccagattgcggaaaacgccggagccgagggctcgatcatcgtcggcaagctgcgcgagaagacggagttctcttatggctggaatgcccagaccaacgaatatggcgatctctatgccatgggcgtcatcgacccggccaaggtcgtccgcaccgcgcttcaggacgcagcgtcggttgccggtcttctcgtcacgaccgaagccatgatcgccgaaaagcccaagaaggaagccgcaccggcgcttccggccggcggcggcatggacttttaa

SEQ ID NO: 9733 - protein, 542 aa, Rhizobium meliloti
MAAKEVKFQTDARERMLRGVDVLANAVKVTLGPKGRNVVIDKSFGAPRITKDGVSVAKEIELEDKFENMGAQMLREVASRTNDLAGDGTTTATVLAQAIVREGAKAVASGMNPMDLKRGIDLAVDAVVKELKNNARKISKNSEIAQVGTISANGDTEIGRYLAEAMEKVGNEGVITVEEAKTAETELEVVEGMQFDRGYLSPYFITNQDKMRVELEDPYILIHEKKLSNLQAMLPVLEAVVQSGKPLLIIAEDVEGEALATLVVNKLRGGLKVAAVKAPGFGDRRKAMLEDIAILTGGTVVSEDLGIKLESVTLDMLGRAKKVSIEKENTTIIDGAGSKADIEGRTAQIRAQIEETTSDYDREKLQERLAKLAGGVAVIRVGGSTEVEVKEKKDRVDDALHATRAAVEEGILPGGGVALLRAVKALDGLKTANNDQRVGVDLVRRAIEAPVRQIAENAGAEGSIIVGKLREKTEFSYGWNAQTNEYGDLYAMGVIDPAKVVRTALQDAASVAGLLVTTEAMIAEKPKKEAAPALPAGGGMDF

SEQ ID NO: 9734 - DNA, 1641 bp, Bradyrhizobium japonicum
  CDS (1)..(1641): transl_table=11
atggcagctaaagaagtcaaattctcggttgatgcgcgcgacaagatgctgcgcggcgtcgacatcctcgccaacgcggtgaaggtcacgctcggtccgaagggccgcaacgtcgtgctcgacaagtcgttcggcgctccccgtatcaccaaggacggcgtcaccgtcgccaaggagatcgagctcgaggacaagttcgagaacatgggcgcgcagatggtgcgcgaagtcgcctccaagtccgctgatgcggccggcgacggcaccaccaccgcgaccgtgctggcccaggcgatcgtgcgcgaaggcgccaagtcggttgccgccggcatgaacccgatggacctcaagcgcggtatcgacctcgcggtcgaagccgtcgttgcggacctcgtcaaaaactccaagaaggtcacctcgaacgacgagatcgcccaggtcggcaccatctcggccaacggcgacgcggagatcggcaagttcctggccgacgccatgaagaaggtcggcaacgagggtgtcatcaccgtcgaggaagccaagtcgctcgagaccgagctcgacgtcgtcgagggcatgcagttcgaccgcggctacatctcgccctacttcgtcaccaacgccgacaagatgcgcgttgagatggacgacgcctacatcctcatcaacgagaagaagctctcctcgctgaacgagctgctgccgctgctcgaggccgtggtgcagaccggcaagccgctggtcatcgtcgccgaggacgtcgagggtgaagccctcgcgaccctggtcgtgaaccgtctgcgcggtggtctgaaggtcgcggccgtcaaggctccgggcttcggcgatcgccgcaaggccatgctgcaggacatcgcgatcctgaccggcggccaggcgatctcggaagatctcggcatcaagctcgagaacgtcacgctcaacatgctcggtcgcgccaagaaggtgatgatcgacaaggagaacaccacgatcgtcaacggcgccggcaagaaggccgacatcgaggcgcgcgtgtcccagatcaaggcgcagatcgaggaaaccacctcggactacgaccgtgagaagctccaggagcgtctcgccaagctcgctggcggcgtcgcggtgatccgcgtcggcggcgcgaccgaggtcgaggtgaaggagcgcaaggatcgcgttgatgacgcgatgcacgcgacccgcgcggctgtggaagaaggcatcgtcccgggcggcggcgtcgccctgctccgtgcttccgagcagctcaagggcctgcgcaccaagaacgacgaccagaagaccggcgtcgagatcgtgcgcaaggcgctgtcggctcccgctcgccagatcgcgatcaacgccggtgaagacggctcggtgatcgtcggcaagatcctggagaacaagacgtacgcctacggcttcgactcccagaccggcgagtacgtcaacctggtcaccaagggcatcatcgacccgaccaaggtggtccgcaccgcgatccagaacgcagcctcggttgcggcgctgctgatcaccacggaagccatggtcgccgagctgcccaagaagggcggcgccggccccgcgatgcctccgggcggcggcatgggcggcatggacttctaa

SEQ ID NO: 9735 - protein, 546 aa, Bradyrhizobium japonicum
MAAKEVKFSVDARDKMLRGVDILANAVKVTLGPKGRNVVLDKSFGAPRITKDGVTVAKEIELEDKFENMGAQMVREVASKSADAAGDGTTTATVLAQAIVREGAKSVAAGMNPMDLKRGIDLAVEAVVADLVKNSKKVTSNDEIAQVGTISANGDAEIGKFLADAMKKVGNEGVITVEEAKSLETELDVVEGMQFDRGYISPYFVTNADKMRVEMDDAYILINEKKLSSLNELLPLLEAVVQTGKPLVIVAEDVEGEALATLVVNRLRGGLKVAAVKAPGFGDRRKAMLQDIAILTGGQAISEDLGIKLENVTLNMLGRAKKVMIDKENTTIVNGAGKKADIEARVSQIKAQIEETTSDYDREKLQERLAKLAGGVAVIRVGGATEVEVKERKDRVDDAMHATRAAVEEGIVPGGGVALLRASEQLKGLRTKNDDQKTGVEIVRKALSAPARQIAINAGEDGSVIVGKILENKTYAYGFDSQTGEYVNLVTKGIIDPTKVVRTAIQNAASVAALLITTEAMVAELPKKGGAGPAMPPGGGMGGMDF

SEQ ID NO: 9736 - DNA, 1632 bp, Bradyrhizobium japonicum
  CDS (1)..(1632): transl_table=11
atggctgccaaagacgtcaagttttccggagacgcgcgcgaacgcatgctgcgcggcgtcgacattctcgccaacgccgtcaaggtgacgctcggcccgaagggccgcaacgtcgtcatcgagaagagcttcggcgcgccccgcatcaccaaggacggcgtcaccgtcgccaaggagatcgagctcgaggacaagttcgagaacatgggcgcccagatggtgcgtgaggtcgcttccaagaccaacgacctcgccggcgacggcaccaccaccgcgaccgtgctggcccaggccatcgtgcgcgaaggcgccaaggcggttgccgccggcatgaacccgatggacctcaagcgcggcatcgacatcgcggttgcggccgtcatcaaggacatcgagaagcgcgccaagccggtcgcttcctcctccgaggtcgcccaggtcggcactatctcggccaacggcgatgccgccatcggcaagatgatcgcgcaggcgatgcagaaggtcggcaacgagggcgtcatcaccgtcgaggagaacaagtcgctcgacaccgaggtcgacatcgtcgagggcatgaagttcgaccgcggctatctcagcccctacttcgtcaccaacgccgagaagatgaccgccgagctcgaggacgcctacatcctcctgcacgagaagaagctctcgggcctccaggccatgctgccggtgctcgaagccgtggtgcagtcgggcaagccgctcgtgatcatcgccgaggacgtcgagggcgaggcgctggccaccctggtcgtcaaccgcctgcgcggcggcctcaaggtcgccgccgtcaaggcgccgggcttcggtgaccgccgcaaggccatgctcgaggatctcgcgatcctcaccggcggccagctcatctccgaagagctcggcatcaagctcgagaacgtcacggtgaagatgctcggccgcgccaagaaggtggtgatcgacaaggagaacaccacgatcgtcaacggtgccggcaagaagcccgacatcgaggcccgcgtcggccagatcaaggcgcagatcgaggagaccacctcggactacgaccgcgagaagctccaggagcgcctcgccaagctcgccggcggcgtcgcggtgatccgcgtcggcggcgcgaccgagatcgaggtcaaggagaagaaggaccgcgtcgaggacgccctcaacgccacccgtgccgcggtgcaggaaggcatcgtccccggcggcggcgtcgcgctgctccgcgccaagaaggcggtgggccgtctcaccaacgccaatgacgacgtccaggccggcatcaacatcgtgctgaaggcgctggaagccccgatccgccagatctccgagaacgcgggcgtggaaggctcgatcgtcgtcggcaagatcctggagaacaagtccgagaccttcggcttcgacgcccagaacgaggactatgtcgacatggtcgagaagggcatcatcgaccccgccaaggtggtgcgcaccgcgctccaggacgcctcctccgtggccggcctgctggtgaccaccgaagccatggtcgccgaggcgccgaagaaggacgctccgcccgcgatgccagccggcggcggcatgggcggcttctga

SEQ ID NO: 9737 - protein, 543 aa, Bradyrhizobium japonicum
MAAKDVKFSGDARERMLRGVDILANAVKVTLGPKGRNVVIEKSFGAPRITKDGVTVAKEIELEDKFENMGAQMVREVASKTNDLAGDGTTTATVLAQAIVREGAKAVAAGMNPMDLKRGIDIAVAAVIKDIEKRAKPVASSSEVAQVGTISANGDAAIGKMIAQAMQKVGNEGVITVEENKSLDTEVDIVEGMKFDRGYLSPYFVTNAEKMTAELEDAYILLHEKKLSGLQAMLPVLEAVVQSGKPLVIIAEDVEGEALATLVVNRLRGGLKVAAVKAPGFGDRRKAMLEDLAILTGGQLISEELGIKLENVTVKMLGRAKKVVIDKENTTIVNGAGKKPDIEARVGQIKAQIEETTSDYDREKLQERLAKLAGGVAVIRVGGATEIEVKEKKDRVEDALNATRAAVQEGIVPGGGVALLRAKKAVGRLTNANDDVQAGINIVLKALEAPIRQISENAGVEGSIVVGKILENKSETFGFDAQNEDYVDMVEKGIIDPAKVVRTALQDASSVAGLLVTTEAMVAEAPKKDAPPAMPAGGGMGGF

SEQ ID NO: 9738 - DNA, 1641 bp, Acetobacter aceti
  CDS (1)..(1641): transl_table=11
atggctgccaaagacgtaaagtttggtgcagacgcacgccagcgtatgcgcgcgggtgtggatattctggctgacgctgtaaaagtaacgctgggccccaaaggccgtaacgtggtgctggacaagagcttcggtgctccccgtatcaccaaggacggtgtttccgttgccaaggaaatcgaactggctgacaagttcgaaaacatgggcgctcagatgctgcgtgaagtagcatccaaaaccaacgacattgctggtgacggcaccacaacggctacggttctggctcaggctatcgtgcgtgaaggccacaaggctgttgccgctggcatgaacccgatggatctgaagcgcgggatcgacaaggctgttgccgttgtgatcgaagagctgaagaagaacgctaagaaagtaaccaccccggcggaaaccgctcaggttggtacgatttctgcaaacggtgaatctgaaatcggtcagatgatctccgaagccatgcagaaagttggctccgaaggcgtgatcacggttgaagaagccaagcacttccagacagaactggatgttgttgaaggcatgcagtttgaccgcggctacatttctccgtacttcgtgacgaacccggaaaagatgacagcggatctggaaaacccctacatcctgatccatgaaaagaagctgtcttccctgcagcccatgctgccactgctggaatccgttgttcagtccggccgtccgctgctgatcattgcagaagacgttgacggtgaagctctggcaactctggttgtcaacaagctgcgcggtggcctgaaaattgctgctgttaaggctccgggctttggtgatcgccgcaacgtaatgctggaagacattgctatccttacgggtggtcaggtcatcagcgaagatctgggcatcaagctggaaaccgttaccctgaacatgcttggcacggccaagaaagtgcacatcgacaaagaaaacaccaccattgttgatggtgctggcaaagccgatgacatcaagggtcgcgttaagcagatccgtgcacagatcgaagaaacctcttccgactacgaccgcgaaaagctgcaggaacgtctggccaaactggctggcggtgttgccgtgatccgcgttggtggttccaccgaagtggaagtgaaagaacgcaaagaccgcgttgacgatgccctgcacgcaacccgcgctgctgtggaagaaggcattgttccgggtggtggcacggctctggcccgcgctacgctgaagctggaaggcctgcactaccacaacgatgaccagcgcgttggtggtgacatcatccgccgcgctctgcaggctcctctgcgccagatcgctcacaacgctggtgaagacggcgctgtgatcgcaaacaaggtgctggaaaacagcgactacaacttcgggttcgacgctcaggcaggcgaatacaagaacctagttgaagccggtattatcgacccggccaaggttgtccgcacggctctgcaggatgcagcatctgttgctggtctgctgatcaccacggaagccatggttgctgaacgcccggaaaagaaagctgctccggctggcggccctgacatgggtggcatgggcggtatggacttctaa

SEQ ID NO: 9739 - protein, 546 aa, Acetobacter aceti
MAAKDVKFGADARQRMRAGVDILADAVKVTLGPKGRNVVLDKSFGAPRITKDGVSVAKEIELADKFENMGAQMLREVASKTNDIAGDGTTTATVLAQAIVREGHKAVAAGMNPMDLKRGIDKAVAVVIEELKKNAKKVTTPAETAQVGTISANGESEIGQMISEAMQKVGSEGVITVEEAKHFQTELDVVEGMQFDRGYISPYFVTNPEKMTADLENPYILIHEKKLSSLQPMLPLLESVVQSGRPLLIIAEDVDGEALATLVVNKLRGGLKIAAVKAPGFGDRRNVMLEDIAILTGGQVISEDLGIKLETVTLNMLGTAKKVHIDKENTTIVDGAGKADDIKGRVKQIRAQIEETSSDYDREKLQERLAKLAGGVAVIRVGGSTEVEVKERKDRVDDALHATRAAVEEGIVPGGGTALARATLKLEGLHYHNDDQRVGGDIIRRALQAPLRQIAHNAGEDGAVIANKVLENSDYNFGFDAQAGEYKNLVEAGIIDPAKVVRTALQDAASVAGLLITTEAMVAERPEKKAAPAGGPDMGGMGGMDF

SEQ ID NO: 9740 - DNA, 1644 bp, Actinobacillus actinomycetemcomitans
  CDS (1)..(1644): transl_table=11
atggcagcaaaagacgtaaaattcggcaacgacgcacgcgtaaaaatgttaaacggcgtaaatattttagccgatgcagtaaaagttactctcggtccaaaaggtcgtaacgtagtgttagacaaatctttcggtgcaccgaccatcaccaaagacggggtttccgtggcgcgtgaaatcgaattagaagataaatttgaaaacatgggcgcccaaatggtgaaagaagtggcgtccaaagcgaacgacgcggcaggggacggtaccacaaccgccaccgtattggctcaagccatcgtgaacgaaggcttaaaagccgttgccgccggtatgaacccgatggatttaaaacgcggtatcgacaaagctgtcaactcagtggttgccgagcttaaaaatctctccaaaccatgcgaaacctcaaaagaaatcgaacaagttggcacgatctctgcaaattccgacagcattgtgggtcaattaatcgctcaagccatggaaaaagtgggtaaagaaggcgtaattaccgtggaagacggcaccggtttggaagacgaattggatgtggttgaaggtatgcaattcgaccgcggttacctttccccatacttcatcaacaagcctgaaaccgccactgtggaactggacaatccgtttatcctgttagtagataaaaaaatctccaacatccgcgaattattgccggtattagaaggcgtggcgaaagccggtaaaccattgttaatcatcgccgaagatgtggaaggcgaagctttggcaaccttggttgtaaacaccatgcgcggtatcgtgaaagtggccgcagtgaaagcgccgggctttggtgaccgccgtaaagcgatgttacaagatattgcgattttaaccgccggtacggtcatttccgaagaaatcggtatggaattggaaaaagccacacttgaagatttaggtcaggcaaaacgtattgttatcaacaaagataacaccaccatcatcgacggtatcggcgatgaagcacaaatccaaggtcgtgtagcgcaaattcgtcaacaaattgaagagtccacttccgactacgacaaagagaaattacaagaacgcgtggcgaaattggccggcggtgttgcggtgattaaagtgggcgcggcaaccgaagtggaaatgaaagagaaaaaagcgcgcgttgaagacgccttacacgcgacccgagcggcggtagaagaaggcatcgttgccggtggtggcgtggcgttaattcgtgcagccggcagagtagtcggcttacaaggcgagaacgaagagcaaaatgtgggtatcaagcttgcccttcgtgctatggaagcaccgttgcgtcaaatcgtggcaaatgccggtgaagaagcttccgtgatcgccagcgcagtgaagaacggtgaaggcaatttcggttataacgcaggcactgaacagtacggcgacatgatcgctatgggtattttggatccgacgaaagtcacccgttccgcattacaatttgcggcgtctgttgccggtttaatgatcactaccgaatgtatggtcaccgagttaccgaaagacgacaaagctgacctcggcgctgccggaatgggcggtatgggaggcatgggcgggatgatgtaa

SEQ ID NO: 9741 - protein, 547 aa, Actinobacillus actinomycetemcomitans
MAAKDVKFGNDARVKMLNGVNILADAVKVTLGPKGRNVVLDKSFGAPTITKDGVSVAREIELEDKFENMGAQMVKEVASKANDAAGDGTTTATVLAQAIVNEGLKAVAAGMNPMDLKRGIDKAVNSVVAELKNLSKPCETSKEIEQVGTISANSDSIVGQLIAQAMEKVGKEGVITVEDGTGLEDELDVVEGMQFDRGYLSPYFINKPETATVELDNPFILLVDKKISNIRELLPVLEGVAKAGKPLLIIAEDVEGEALATLVVNTMRGIVKVAAVKAPGFGDRRKAMLQDIAILTAGTVISEEIGMELEKATLEDLGQAKRIVINKDNTTIIDGIGDEAQIQGRVAQIRQQIEESTSDYDKEKLQERVAKLAGGVAVIKVGAATEVEMKEKKARVEDALHATRAAVEEGIVAGGGVALIRAAGRVVGLQGENEEQNVGIKLALRAMEAPLRQIVANAGEEASVIASAVKNGEGNFGYNAGTEQYGDMIAMGILDPTKVTRSALQFAASVAGLMITTECMVTELPKDDKADLGAAGMGGMGGMGGMM

SEQ ID NO: 9742 - DNA, 1641 bp, Azotobacter vinelandii
  CDS (1)..(1641): transl_table=11
atggctgcaaaagaagtcaagttcggtgattccgcccgcaagaaaatgctggtaggcgtgaacgtcctggccgatgccgtcaaggccactctcggcccgaaaggccgcaacgtggtcctggacaagagcttcggcgcaccgaccatcaccaaggatggcgtatccgtggccaaggaaatcgagctcaaagacaagttcgagaacatgggcgcccaactggtgaaggacgtggcctccaaggccaacgacgaagccggtgacggtaccaccaccgctaccgtactggcccaggccatcgtcaacgaaggcctgaaggccgttgccgcaggcatgaacccgatggatctgaagcgcggcatcgataaggcgaccatcgccatcgttgcggagctgaagtcgctggccaagccgtgctccgactccaaggcgatcgcccaggtaggcaccatttccgccaactccgacgagtccatcggtaacatcatcgccgaggccatgaacaaggtcggcaaggaaggcgtgatcaccgtcgaggaaggctcgggcctggagaacgagttgtccgtcgtcgaaggcatgcagttcgatcgtggctacctgtctccgtacttcatcaacaagcccgacaccatggttgccgaactggacaacccgctgctgctgctggtcgacaagaagatctccaacatccgcgagctgctgccggtgctggaagccgtggccaagtccggccgtccgctgctgatcgtcgccgaagacgtcgaaggcgaagccctggccaccctggtggtcaacaacatgcgtggcatcgtcaaggtcgctgccgtgaaggctccgggcttcaacgatcgtcgcaaggccatgctgcaggtcatcgccatcctgaccggcgccaccgtgatctccgagaaggtcggcctgagcttggaaagcgccactctggagcatctgggtaagcccaaggcgctcgtgctgaacaaggaaaacaccaccatcatgcacggtgccggtgcccaggccgacatcgaggctgctgtggcgcagatccgcaagcagatcgaggaaacctcctccgattacgatcgcgagaagctgcaggagcgtctggccaagctggccggtggcgtggccgtgatcaaggtcggtgccgccaccgaggtcgagatgaaggagaaaaaggcccgcgtcgaagcagccctgcatgcgacccgtgcggcagtggaggagggcgtggttcccggcggcggcgtggctctggtgcgtgccctgcaggccatcgagggtctgaagggcgacaacgaagaccagaacgtcggcatcgccctgctacgtcgtgccgtcgaagcaccgctgcgtcagatcgtcgccaatgccggtgatgagccgagcgtggtggtcgacaaggtcaagcagggctctggcaacttcggcttcaacgctgccagcggcgtatacggcgacatgatcgagatgggcatcctcgatccggccaaggttacccgctccgcgctgcaggcggcttcttcgatcggtggactgatgatcaccaccgaggccatggtcgccgacattgtcgaagacaaggcagctccagccatgccggacatgggcggtatgggtggcatgggcggcatgatgtaa

SEQ ID NO: 9743 - protein, 546 aa, Azotobacter vinelandii
MAAKEVKFGDSARKKMLVGVNVLADAVKATLGPKGRNVVLDKSFGAPTITKDGVSVAKEIELKDKFENMGAQLVKDVASKANDEAGDGTTTATVLAQAIVNEGLKAVAAGMNPMDLKRGIDKATIAIVAELKSLAKPCSDSKAIAQVGTISANSDESIGNIIAEAMNKVGKEGVITVEEGSGLENELSVVEGMQFDRGYLSPYFINKPDTMVAELDNPLLLLVDKKISNIRELLPVLEAVAKSGRPLLIVAEDVEGEALATLVVNNMRGIVKVAAVKAPGFNDRRKAMLQVIAILTGATVISEKVGLSLESATLEHLGKPKALVLNKENTTIMHGAGAQADIEAAVAQIRKQIEETSSDYDREKLQERLAKLAGGVAVIKVGAATEVEMKEKKARVEAALHATRAAVEEGVVPGGGVALVRALQAIEGLKGDNEDQNVGIALLRRAVEAPLRQIVANAGDEPSVVVDKVKQGSGNFGFNAASGVYGDMIEMGILDPAKVTRSALQAASSIGGLMITTEAMVADIVEDKAAPAMPDMGGMGGMGGMM

SEQ ID NO: 9744 - DNA, 1620 bp, Bacillus stearothermophilus
  CDS (1)..(1620): transl_table=11
atggcaaaagaaattaaattcagcgaagaagctcgtcgcgcgatgttacgcggtgtggataaactagcagatgcggtaaaagtaacattaggtccaaaaggccgtaacgtcgtattagagaaaaaatttggttctccattaattacaaacgacggtgtaacgatcgcgaaagaaatcgaattggaagacccatttgaaaacatgggtgcaaaacttgttgcggaagtagcaagcaaaacaaatgatgttgctggggacggtacaacaacggcaacagttttagcgcaagcaatgatccgcgaaggattgaaaaacgttacagctggcgctaacccaatgggcatccgtaaaggtattgaaaaagcggtcgctgtggcagtagaagaattaaaagcaatctccaaaccaattcaaggtaaagaatcgattgctcaagttgcagcgatctctgcggctgacgaagaagttggtcaattaatcgcagaagcaatggaacgcgttggcaacgatggtgttatcacattagaagaatcgaaaggcttcgcaacggaattagatgttgtcgaaggtatgcaatttgaccgtggttatgtatctccatacatgatcacagatacagaaaaaatggaagcagtgcttgaaaatccatacatcttaattacagataaaaaagtttctagcatccaagaaatcttgcctatcttagaacaagtagttcaacaaggaagaccgctattaattatcgcagaagatgtcgaaggcgaagcgctcgcaacattagtcgtcaacaaacttcgtggtacattcaatgcggtagcggtaaaagcgcctggcttcggcgatcgtcgtaaagcgatgcttgaagatatcgcgattttaactggcggtgaagttatctccgaagaactaggacgtgaattaaaatctgcaacaattgcatcgcttggccgcgcttcgaaagtagttgtaacgaaagaaaatacaacaatcgtagaaggcgctggcgattctaaacgcattaaagctcgcatcaaccaaatccgtgcgcaattagaagaaactacttcggaattcgaccgcgaaaaattacaagaacgccttgcaaaattagctggcggcgtagcggtaatcaaagttggtgcggcgacagaaacagaattgaaagaacgcaaattgcgcattgaagacgcgctcaactctactcgtgcggctgtcgaagaaggtatcgtagccggcggtggtacggcattaatgaacgtatacagcaaagtggctgcaatcgaagcggaaggcgacgaagcaactggtgtgaaaatcgttcttcgcgcaatcgaagagccagttcgtcaaatcgcgcaaactgctggtttggaaggctctatcattgttgaacgcttaaaaacagaaaaacctggcatcggcttcaacgcggctactggtgaatgggtagacatgattgaagctggtatcgtagacccaacaaaagtaactcgttctgcacttcaaaacgcagcttctgttgccgctatgttcttaacaactgaagcagttgttgctgacaaaccagaagaaaacaaaggcggcaacccaggaatgcctgacatgggcggaatgatgtaa

SEQ ID NO: 9745 - protein, 539 aa, Bacillus stearothermophilus
MAKEIKFSEEARRAMLRGVDKLADAVKVTLGPKGRNVVLEKKFGSPLITNDGVTIAKEIELEDPFENMGAKLVAEVASKTNDVAGDGTTTATVLAQAMIREGLKNVTAGANPMGIRKGIEKAVAVAVEELKAISKPIQGKESIAQVAAISAADEEVGQLIAEAMERVGNDGVITLEESKGFATELDVVEGMQFDRGYVSPYMITDTEKMEAVLENPYILITDKKVSSIQEILPILEQVVQQGRPLLIIAEDVEGEALATLVVNKLRGTFNAVAVKAPGFGDRRKAMLEDIAILTGGEVISEELGRELKSATIASLGRASKVVVTKENTTIVEGAGDSKRIKARINQIRAQLEETTSEFDREKLQERLAKLAGGVAVIKVGAATETELKERKLRIEDALNSTRAAVEEGIVAGGGTALMNVYSKVAAIEAEGDEATGVKIVLRAIEEPVRQIAQTAGLEGSIIVERLKTEKPGIGFNAATGEWVDMIEAGIVDPTKVTRSALQNAASVAAMFLTTEAVVADKPEENKGGNPGMPDMGGMM

SEQ ID NO: 9746 - DNA, 1635 bp, Bacillus subtilis
  CDS (1)..(1635): transl_table=11
atggcaaaagaaattaagtttagtgaagaagctcgccgcgcaatgcttcgcggtgtcgatgcacttgctgatgctgttaaagtaactttaggaccaaaaggacgcaacgtggttctagagaaaaaattcggttctccgttaatcacaaatgacggtgtaacaatcgctaaagaaatcgagctagaagacgcgtttgaaaacatgggtgctaagcttgttgctgaagtagccagcaaaacaaacgacgttgccggtgacggtacaacaactgcaacagttcttgcgcaagcaatgatccgtgaaggccttaaaaacgtaacagcaggcgctaaccctgtaggcgtgcgtaaagggatggaacaagctgtagcggttgcgatcgaaaacttaaaagaaatttctaagccaatcgaaggcaaagagtctatcgctcaggttgctgcgatctctgctgctgatgaggaagtcggaagccttatcgctgaagcaatggagcgcgtaggaaacgacggcgttatcacaatcgaagagtctaaaggcttcacaactgagcttgaagttgttgaaggtatgcaattcgaccgcggatatgcgtctccttacatggtaactgactctgataagatggaagcggttcttgacaatccttacatcttaatcacagacaaaaaaatcacaaacattcaagaaatccttcctgtgcttgagcaggttgttcagcaaggcaaaccattgcttctgatcgctgaggatgttgaaggcgaagcacttgctacacttgttgtgaacaaacttcgcggcacattcaacgcagtggctgttaaagctcctggtttcggtgatcgccgtaaagcaatgcttgaagacatcgctgtccttactggcggagaagtcatcacagaagatcttggccttgacctgaaatctactcaaatcgctcaattgggacgcgcttctaaagttgtcgttactaaagaaaacacaacaatcgttgaaggcgctggcgaaacagacaaaatttctgcccgtgtgactcaaatccgcgctcaagtggaagaaacaacttctgaattcgacagagaaaaattacaagagcgtcttgctaaacttgctggcggcgtagctgtcatcaaagtcggcgctgcgactgaaactgagctgaaagagcgtaaacttcgcatcgaagacgccttgaactcaactcgcgcagctgttgaagaaggcatcgtatccggtggtggtacagcgcttgtaaacgtatataacaaagtcgctgcagttgaagctgaaggcgatgctcaaacaggtatcaacatcgtgcttcgcgcgcttgaagagccaatccgtcaaatcgcacacaacgctggccttgaaggatctgtcatcgttgagcgcctcaaaaacgaagaaatcggcgtaggcttcaacgctgcaactggcgaatgggtaaacatgatcgaaaaaggtatcgttgacccaacaaaagttacacgctcagctcttcaaaacgctgcgtctgtagctgcaatgttcttaacaacagaagctgttgtcgctgacaagccagaagaaaacggtggcggcgcaggaatgcctgatatgggcggcatgggcggtatgggtggaatgatgtaa

SEQ ID NO: 9747 - protein, 544 aa, Bacillus subtilis
MAKEIKFSEEARRAMLRGVDALADAVKVTLGPKGRNVVLEKKFGSPLITNDGVTIAKEIELEDAFENMGAKLVAEVASKTNDVAGDGTTTATVLAQAMIREGLKNVTAGANPVGVRKGMEQAVAVAIENLKEISKPIEGKESIAQVAAISAADEEVGSLIAEAMERVGNDGVITIEESKGFTTELEVVEGMQFDRGYASPYMVTDSDKMEAVLDNPYILITDKKITNIQEILPVLEQVVQQGKPLLLIAEDVEGEALATLVVNKLRGTFNAVAVKAPGFGDRRKAMLEDIAVLTGGEVITEDLGLDLKSTQIAQLGRASKVVVTKENTTIVEGAGETDKISARVTQIRAQVEETTSEFDREKLQERLAKLAGGVAVIKVGAATETELKERKLRIEDALNSTRAAVEEGIVSGGGTALVNVYNKVAAVEAEGDAQTGINIVLRALEEPIRQIAHNAGLEGSVIVERLKNEEIGVGFNAATGEWVNMIEKGIVDPTKVTRSALQNAASVAAMFLTTEAVVADKPEENGGGAGMPDMGGMGGMGGMM

SEQ ID NO: 9748 - DNA, 1620 bp, Bacillus thermoglucosidasius
  CDS (1)..(1620): transl_table=11
atggcaaaagaaattaaattcagcgaagaagctcgtcgtgcgatgctgcgcggtgttgacaaactagctgatgcagtaaaagtaacgttaggtccaaaaggccgtaacgttgtattagagaaaaaattcggttctccattaattacaaacgacggtgttacgatcgcgaaagaaatcgaattagaagacccatttgaaaacatgggtgcgaagcttgttgctgaagttgcaagcaaaacaaacgatgttgctggggacggtacaacaacagcgacagttttagctcaagcgatgatccgtgaaggcttaaagaacgtaacagctggcgcaaacccaatgggaatccgcaaaggtattgaaaaagcggttgctgtagcggtagaagaattaaaagcaatctccaaaccaatccaaggaaaagaatcgatcgcgcaagttgcggctatttctgcggctgacgaagaagttggccaattaattgcagaagcaatggaacgcgtcggcaacgacggtgttatcacattagaagaatcaaaaggtttcacaacagaattagatgttgtggaaggtatgcaatttgaccgcggttatgcgtctccatacatgatcacagatacagaaaaaatggaagcagtgcttgaaaatccatatatcttaatcactgacaaaaaaatctcgaacattcaagacatcttgcctatcttagaacaagttgttcaacaaggcaaaccattgttaatcatcgcggaagacgtcgaaggcgaagcgcttgcaacattagttgttaacaaacttcgcggcacgttcactgcggtagcggttaaagcgcctggcttcggtgatcgccgtaaagcaatgttggaagacatcgcaatcttaactggcggtgaagtcatctccgaagaattaggacgcgaattaaaatcaacaacaattgcatcacttggccgcgcttcgaaagttgttgtaacgaaagaaaatacaacaatcgttgaaggcgctggcgattctgaacgcattaaagctcgcatcaaccaaatccgcgctcaattagaagaaactacttctgaattcgaccgcggaaaattacaagaacgtttggcaaaacttgctggcggcgtagcggtcatcaaagttggtgcagcgacagaaacagaattgaaagaacgcaaattgcgcattgaagacgcgctcaactctactcgtgcggctgtcgaagaaggtatcgtagccggcggtggtacggcattaatgaacgtatataacaaagttgctgcgatcgaagcagaaggcgacgaagcaactggtgtgaaaatcgttcttcgcgcaatcgaagagccagttcgccaaatcgcgcaaaacgctggtttggaaggctctgtcattgttgaacgcttaaaatccgaaaaacctggcatcggcttcaacgctgctactggcgaatgggtaaacatgatcgaagctggtattgttgacccaacgaaagtaactcgctccgctctgcaaaacgcagcttctgttgccgctatgttcttaacaacagaagcagttgtcgctgacaaaccagaagaaaacaaaggcggcaatagcggaatgcctgacatgggcggaatgatgtaa

SEQ ID NO: 9749 - protein, 539 aa, Bacillus thermoglucosidasius
MAKEIKFSEEARRAMLRGVDKLADAVKVTLGPKGRNVVLEKKFGSPLITNDGVTIAKEIELEDPFENMGAKLVAEVASKTNDVAGDGTTTATVLAQAMIREGLKNVTAGANPMGIRKGIEKAVAVAVEELKAISKPIQGKESIAQVAAISAADEEVGQLIAEAMERVGNDGVITLEESKGFTTELDVVEGMQFDRGYASPYMITDTEKMEAVLENPYILITDKKISNIQDILPILEQVVQQGKPLLIIAEDVEGEALATLVVNKLRGTFTAVAVKAPGFGDRRKAMLEDIAILTGGEVISEELGRELKSTTIASLGRASKVVVTKENTTIVEGAGDSERIKARINQIRAQLEETTSEFDRGKLQERLAKLAGGVAVIKVGAATETELKERKLRIEDALNSTRAAVEEGIVAGGGTALMNVYNKVAAIEAEGDEATGVKIVLRAIEEPVRQIAQNAGLEGSVIVERLKSEKPGIGFNAATGEWVNMIEAGIVDPTKVTRSALQNAASVAAMFLTTEAVVADKPEENKGGNSGMPDMGGMM

SEQ ID NO: 9750 - DNA, 1641 bp, Burkholderia cepacia
  CDS (1)..(1641): transl_table=11
atggcagctaaagacgtcgtattcggcgattccgcccgttcgaagatggtcgaaggcgtgaacattctcgccaacgcagtcaaggtcacgctgggtccgaagggccgcaacgtcgtgctcgagcgcagcttcggcggcccgacggtcaccaaggacggtgtgtcggtcgcgaaggaaatcgagctgaaggacaagctccagaacatgggcgcgcaaatggtcaaggaagtcgcttccaagaccagcgacaacgcaggcgacggcacgacgacggcaaccgtcctcgcgcaatcgatcgttcgcgaaggcatgaagtacgtcgcatcgggcatgaacccgatggacctgaagcgcggcatcgacaaggcagtcgcagcggctgtcgaagagctgaagaagatcagcaagccgtgcacgaccaacaaggaaatcgcacaagtcggctcgatctcggcgaacagcgattcgtcgatcggcgatcgcatcgctgaagcgatggacaaggtcggcaaggaaggcgtcatcaccgtcgaagacggcaagtcgctggccgacgaactcgacgtcgtcgaaggcatgcaattcgaccgcggctacctgtcgccgtacttcatcaacaacccggacaagcaagtcgccgtcctcgacaacccgttcgtgctgctgcacgacaagaaggtgtcgaacatccgtgatctgctgccggtgctcgagcaagtcgcgaaggctggccgtccgctgctgatcatcgcagaagacgtcgaaggcgaagcgctcgcgacgctggtcgtcaacaacatccgcggcatcctgaagaccgttgcggtcaaggcgccgggcttcggcgatcgtcgcaaggcgatgctggaagacatcgcgatcctgaccggcggtcaagtcattgcggaagaaaccggcctgacgctcgagaaggcaacgctggcagaactgggccaggcgaagcgcatcgaagtgggcaaggaaaacacgacgatcatcgacggcgcaggcgaagctgcaagcatcgaagcacgcgtgaagcaagtgcgcgcgcaaatcgaggaagcgacgtcggactacgaccgtgaaaagctgcaagagcgcgtggccaagctggcaggcggcgttgcagtgatcaaggtcggtgctgcgaccgaagtcgaaatgaaggaaaagaaggcacgtgtcgaagacgcactgcacgcaacccgcgcagctgtggaagaaggcatcgtggccggtggcggcgttgcgctgatccgtgcacgcaccgcgatcgcaggcctgaccggcgcgaacgccgaccagaacgccggcatcaagatcgtgctgcgcgcgatggaagagccgctgcgccagatcgtcacgaacggtggcgaagaagcgagcgtcgtggtggcggcagttgcagcaggcaagggcaactacggctacaacgcagcaacgggcgagtacgtcgacatggtggaagccggcgtcgtcgacccgaccaaggtcacgcgtaccgcgctgcagaacgcagcttcggtggcaggcctgctgctgacgaccgacgcagctgtcgcagaactgccgaaggaagacgcaccgatgccgggcggcatgccgggcggcatgggcggcatgggcatggacatgtaa

SEQ ID NO: 9751 - protein, 546 aa, Burkholderia cepacia
MAAKDVVFGDSARSKMVEGVNILANAVKVTLGPKGRNVVLERSFGGPTVTKDGVSVAKEIELKDKLQNMGAQMVKEVASKTSDNAGDGTTTATVLAQSIVREGMKYVASGMNPMDLKRGIDKAVAAAVEELKKISKPCTTNKEIAQVGSISANSDSSIGDRIAEAMDKVGKEGVITVEDGKSLADELDVVEGMQFDRGYLSPYFINNPDKQVAVLDNPFVLLHDKKVSNIRDLLPVLEQVAKAGRPLLIIAEDVEGEALATLVVNNIRGILKTVAVKAPGFGDRRKAMLEDIAILTGGQVIAEETGLTLEKATLAELGQAKRIEVGKENTTIIDGAGEAASIEARVKQVRAQIEEATSDYDREKLQERVAKLAGGVAVIKVGAATEVEMKEKKARVEDALHATRAAVEEGIVAGGGVALIRARTAIAGLTGANADQNAGIKIVLRAMEEPLRQIVTNGGEEASVVVAAVAAGKGNYGYNAATGEYVDMVEAGVVDPTKVTRTALQNAASVAGLLLTTDAAVAELPKEDAPMPGGMPGGMGGMGMDM

SEQ ID NO: 9752 - DNA, 1650 bp, Erwinia carotovora subsp. atroseptica
  CDS (1)..(1650): transl_table=11
atggcagctaaagacgtaaaattcggtaatgacgctcgcgtaaaaatgctgcgcggcgtgaatgtactggctgatgcagtgaaggttaccctgggcccgaaaggccgtaacgtagttttggataaatccttcggtgcaccgaccattactaaagacggtgtatctgttgcgcgtgaaatcgaactggaagacaagtttgagaacatgggcgcacagatggtgaaagaagttgcctctaaagcgaatgacgcagcaggcgacggcaccacgaccgcaaccgtattggctcagtccatcatcactgaaggcctgaaagctgttgctgcgggcatgaacccgatggatctgaagcgcggcatcgacaaagcagtgattgctgctgttgaagaattgaaaaaacaatctgttccttgctctgattttaaagcaatcgcacaggttggtaccatctctgcaaactccgacgaaaccgtgggtaaattgattgcagaagcgatggagaaagtgggtaaagaaggcgttatcaccgttgaagaaggcacaggcctgcaagacgagttggacgtggttgaaggtatgcagtttgaccgtggctacctgtctccgtacttcatcaacaagccggaaaccggttctattgagctggaaagcccgttcattctgcttgccgacaaaaaaatctccaacatccgtgaaatgctgccagtactggaagccgtagcgaaagcgggtaaaccgctgctgatcattgcagaagatgttgaaggtgaagcgctggcgacactggtagtgaacaccatgcgcggtatcgtgaaagtggctgcggtgaaagcaccgggcttcggtgaccgtcgtaaagccatgctgcaagatatcgcgacgttgactgcgggtaccgtgatctctgaagagattggtctggagctggaaaaagcgacgctggaagatttgggtcaggctaaacgtgttgttatcaacaaagacaccaccatcatcattgatggcgtgggtgatgaagtggcaattcagggtcgtgtgactcagattcgccagcagattgaagatgcaacgtctgactacgacaaagaaaaactgcaagagcgtgtggctaaactggcgggcggcgtagccgttatcaaagttggcgccgcgactgaagttgaaatgaaagagaagaaagcacgcgttgaagatgcgctgcacgccactcgcgccgctgttgaagaaggcgttgttgcaggtggtggtgttgcactgattcgtgctgcggcttctatcagtgtatctggcctgaaaggcgataacgaagaccaaaacgtgggtatcaaagttgcgctgcgcgcaatggagtctccgctgcgtcagatcgtaatcaacgccggtgaagaagcctccgtgatcgccaataccgttaaagcgggcgaaggcagctacggttataacgcctataccgaagaatacggcgatatgatcgcaatgggtattctggatccgaccaaagtaacgcgttctgctttgcagtatgcagcttctattgctggtctgatgattaccaccgaatgtatggtgaccgacctgccgaaaggcgatgcgcctgatttaggtgctggtggcatgggcggcatgggtggaatgggcggcatgatgtaa

SEQ ID NO: 9753 - protein, 549 aa, Erwinia carotovora subsp. atroseptica
MAAKDVKFGNDARVKMLRGVNVLADAVKVTLGPKGRNVVLDKSFGAPTITKDGVSVAREIELEDKFENMGAQMVKEVASKANDAAGDGTTTATVLAQSIITEGLKAVAAGMNPMDLKRGIDKAVIAAVEELKKQSVPCSDFKAIAQVGTISANSDETVGKLIAEAMEKVGKEGVITVEEGTGLQDELDVVEGMQFDRGYLSPYFINKPETGSIELESPFILLADKKISNIREMLPVLEAVAKAGKPLLIIAEDVEGEALATLVVNTMRGIVKVAAVKAPGFGDRRKAMLQDIATLTAGTVISEEIGLELEKATLEDLGQAKRVVINKDTTIIIDGVGDEVAIQGRVTQIRQQIEDATSDYDKEKLQERVAKLAGGVAVIKVGAATEVEMKEKKARVEDALHATRAAVEEGVVAGGGVALIRAAASISVSGLKGDNEDQNVGIKVALRAMESPLRQIVINAGEEASVIANTVKAGEGSYGYNAYTEEYGDMIAMGILDPTKVTRSALQYAASIAGLMITTECMVTDLPKGDAPDLGAGGMGGMGGMGGMM

SEQ ID NO: 9754 - DNA, 1638 bp, Pseudomonas putida
  CDS (1)..(1638): transl_table=11
atggctgctaaagacgtaaaattcggcgattccgcccgtaagaaaatgctggttggtgtcaacgttctggctgacgcggtaaaagcgaccctgggcccgaaaggccgcaacgtggtcctggccaagagcttcggcgcaccgaccatcaccaaggacggcgtttccgttgccaaagagatcgagctgaaagacgcgttcgagaacatgggcgcccagctggtcaaggaagtcgcttccaaggccaacgatgcagccggtgacggcaccaccaccgctaccgttctggctcagtccatcgtcaacgaaggcctgaaagccgtcgctgccggcatgaacccgatggacctgaagcgcggtatcgacaaggctaccgccgctgtcgtcgccgagctgaaaaacctgtccaagccatgcgccgactccaaggccatcgctcaggtaggcaccatctccgccaactccgacagctccatcggtgaaatcatcgccgaagccatggaaaaagtcggtaaagaaggcgtgatcaccgttgaagaaggctcgggcctggaaaacgaactgtctgtcgttgaaggcatgcagttcgaccgtggctacctgtcgccgtacttcgtcaacaagccggacaccatggttgccgagctggaaggcccgctgctgctgctggtcgacaagaagatctcaacatcgcgagctgctgccagtactgagcgtgcaagcgctggccgtccgctgctgatcgttgcagaagacgttgaaggcgaagcgctggctaccctggtagtcaacaacatgcgcggcatcgtcaaggttgctgcggtcaaggcaccgggcttcggcgaccgtcgcaaggccatgctgcaggacatcgctgtcctgaccggcggccaggtcatctccgaagaaatcggcgtgtccctggaaaccgctaccctggagcacctgggtaacgccaagcgcgtcatcctgtccaaggaaaacaccaccatcatcgacggcgctggcgccgacaccgagatcgaagcacgcgtcaagcagatccgtgcccagatcgaagagacttcctcggactacgaccgtgagaagctgcaagagcgtctggccaaactggctggcggtgttgccgtgatcaaggtcggtgctggcaccgaagtcgagatgaaagagaagaaagcacgcgttgaagacgccctgcacgctacccgtgcagccgttgaagaaggcgtggtgcctggcggtggtgttgccctggtgcgtgctctgaacgctatcgttgacctcaaaggtgacaacgaagaccagaacgtcggtatcgcactgctgcgtcgcgctgttgagtcgccgctgcgtcagatcactgccaacgccggcgacgagccaagcgttgtggccaacaaggtcaagcagggttcgggaaacttcggttacaacgctgctaccggtgagtacggcgacatgatcgagatgggcatcctggacccagccaaggtcacccgttcggcactgcaagctgctgcttcgattggcggtcttatgatcaccaccgaagccatgattgctgatgctccgagcgacgctccagctggcggcggtatgccagacatgggcggcatgggtggcatgggcggcatgatgtaa

SEQ ID NO: 9755 - protein, 545 aa, Pseudomonas putida
MAAKDVKFGDSARKKMLVGVNVLADAVKATLGPKGRNVVLAKSFGAPTITKDGVSVAKEIELKDAFENMGAQLVKEVASKANDAAGDGTTTATVLAQSIVNEGLKAVAAGMNPMDLKRGIDKATAAVVAELKNLSKPCADSKAIAQVGTISANSDSSIGEIIAEAMEKVGKEGVITVEEGSGLENELSVVEGMQFDRGYLSPYFVNKPDTMVAELEGPLLLLVDKKISTSRAAASTERASAGRPLLIVAEDVEGEALATLVVNNMRGIVKVAAVKAPGFGDRRKAMLQDIAVLTGGQVISEEIGVSLETATLEHLGNAKRVILSKENTTIIDGAGADTEIEARVKQIRAQIEETSSDYDREKLQERLAKLAGGVAVIKVGAGTEVEMKEKKARVEDALHATRAAVEEGVVPGGGVALVRALNAIVDLKGDNEDQNVGIALLRRAVESPLRQITANAGDEPSVVANKVKQGSGNFGYNAATGEYGDMIEMGILDPAKVTRSALQAAASIGGLMITTEAMIADAPSDAPAGGGMPDMGGMGGMGGMM

SEQ ID NO: 9756 - DNA, 1641 bp, Rhizobium leguminosarum bv. viciae
  CDS (1)..(1641): transl_table=11
atggcatctaaagaaatcaagtttggccgcaccggccgcgaaaagatgctgcgtggcgtcgacattctcgccgatgcagtgaaggtcacgctcggcccgaagggccgtaacgtcatcatcgacaagtccttcggcgctccgcgcatcaccaaggacggcgtttcggtcgccaaggagatcgaactcgaagacaagttcgaaaacatgggcgcccagatggtccgcgaagttgcttcgaagaccaacgacatcgccggcgacggcaccacgactgcaaccgttcttgcccaggcgatcgttcgcgaaggcaacaaggccgttgccgccggcatgaacccgatggacctgaagcgcggcatcgatcttgctgttgctgacgtcgtgaaggatctccaggccaaggccaagaagatctccacctcggaagaagttgcacaggtcggcacgatttcggccaatggcgacaagcaggtcggtctcgacattgctgaagccatgcagaaggtcggcaacgaaggcgtcatcacggttgaagaagccaagaccgccgaaaccgaactcgaagtcgtcgaaggcatgcagttcgaccgcggctacctcagcccctacttcgtgaccaacccggaaaagatgatcgcagacctcgaagatgtcttcattctccttcacgagaagaagctctcgaacctgcagtcgatgctcccggttctcgaagctgtcgtccagaccggcaagccgctcctcatcgtcgctgaagacgtagaaggcgaagccctcgcaacgctcgtcgtcaacaagctgcgcggtggcctcaagatcgctgccgtcaaggcgcccggcttcggcgatcgccgcaagcgcatgctcgaagacatcgccatcctgacgggcggcactgtcatctctgaagatctcggcatcaagctcgaatccgtcacgctcgacatgctcggccgtgccaagaaggtttcgatctccaaggaaaacaccacgatcgtcgacggttcgggcgccaagaccgacatcgaaggccgtgttgcccagatcaaggctcagatcgaagaaaccacctccgactacgaccgcgagaagctgcaggaacgccttgccaagctcgctggcggcgttgccgtcatccgcgtcggcggctcgacggaagttgaagtgaaggaaaagaaggaccgcatcgacgacgcgctcaacgcgacccgcgctgctgttcaggaaggcatcgtccccggcggcggtatcgctctcgctcgctcctccacgaagatcaccgtcaagggtgcaaacgacgaccaggaagccggcatcaacatcgttcgccgcgccctgcagtcgctcgttcgtcagatcgctgaaaacgcaggcgacgaagcctcgatcgttgtcggcaaggtcctcgacaagaacgaagacaacttcggctacaacgcccagacatccgaatatggcgacatgatcgccatgggtatcgtcgacccgctcaaggtcgttcgcacggcgctgcagaacgccgcttctgtcgcatcgctgctgatcaccaccgaagccatgatcgccgaactgccgaagaaggatgccccagctggcatgccgggcggcatgggcggcatgggcggtatggacatgatgtga

SEQ ID NO: 9757 - protein, 546 aa, Rhizobium leguminosarum bv. viciae
MASKEIKFGRTGREKMLRGVDILADAVKVTLGPKGRNVIIDKSFGAPRITKDGVSVAKEIELEDKFENMGAQMVREVASKTNDIAGDGTTTATVLAQAIVREGNKAVAAGMNPMDLKRGIDLAVADVVKDLQAKAKKISTSEEVAQVGTISANGDKQVGLDIAEAMQKVGNEGVITVEEAKTAETELEVVEGMQFDRGYLSPYFVTNPEKMIADLEDVFILLHEKKLSNLQSMLPVLEAVVQTGKPLLIVAEDVEGEALATLVVNKLRGGLKIAAVKAPGFGDRRKRMLEDIAILTGGTVISEDLGIKLESVTLDMLGRAKKVSISKENTTIVDGSGAKTDIEGRVAQIKAQIEETTSDYDREKLQERLAKLAGGVAVIRVGGSTEVEVKEKKDRIDDALNATRAAVQEGIVPGGGIALARSSTKITVKGANDDQEAGINIVRRALQSLVRQIAENAGDEASIVVGKVLDKNEDNFGYNAQTSEYGDMIAMGIVDPLKVVRTALQNAASVASLLITTEAMIAELPKKDAPAGMPGGMGGMGGMDMM

SEQ ID NO: 9758 - DNA, 1623 bp, Rhodothermus marinus
  CDS (1)..(1623): transl_table=11
atggctgcgaagcagattacgttcaacgcggatgcgcgcatggcgctgaagcggggcgtcgacaagctggccgacgctgtaaaggtgacgctggggccgaagggccgcaacgtgatcattgagaagaagtttggcgccccgaccgtcacgaaggacggcgtgacggtggccaaggaaatcgagctggaggacaagctggagaacgtcggtgcccagatggtcaaggaggtcgcctcgaagacgagcgatgtggcgggtgacggtacgacgacggcgaccgtcctggcccaggccatcctgacggccggtctgaagagcgtcacggccggtgcgaacccgatggacctgaagcggggcatcgacaaggccgtggaggtggtcgtggccgagctgcgcaagatgagccaggaggtgcaggacaagaaccgcattgcgcaggtggcgacgatctcggccaacggcgacaaggccatcgggcagctcatcgccgacgcgttcgagaaggtcggcaaggacggcgtcatcacggtcgaggaggccaagggcaccgagacgacgctcgaggtcgtcgagggtatgcagttcgaccgggggtacctctcgccctacttcgtgacgaaccccgacacgatggaggccgtcctggaggacgcctacatcctgattcatgacaagaagatctcggcgatgaaggacctgctgccgattctggagaaggtggtccagaccggccggccgctcctgatcatcgccgaggatgtggagggcgaggcgctggcgaccctggtcgtcaacaagctgcgcggcgtgctgaaggtggcggccgtcaaggcgccgggcttcggcgatcgccgcaaggccatgctggaagacatcgccatcctgaccggcggtacggttatctctgaggagaagggttaccgcctggagaacgccacgctggactacctgggccaggccgagcggatcatcgtcgacaaggacaacacgacgatcgtcggcggcaagggcgatccggctcagatcaaggcccgcgccaaccagatccggcagcagatcgaggagaccaccagcgactacgaccgcgagaagctgcaggagcggttggcgaagctggccggtggcgtggcggtactgaagatcggtgcggccaccgagcccgaaatgaaagagaagaaggcccgcgtcgaggacgcgctgcacgcgacgcgtgccgccgtcgaagagggcatcgtgccgggtggtggtgtggcctacatccgggccattgcggcgctcgacaaggtcgaggtggaaaacgaggaccagaagatcggcgtgcagatcgtccagcgggcgctggaagagccgctccggcagattgctgcgaacgcgggctgggaaggctcgatcgtcgtccagcgcgtcaaggaaggtcagggcgacttcggcttcaacgcccagaccgaagagttcggtaacctgctggagcagggcgtgatcgacccgacgaaggtcgcgcgcacggcgctggagaacgccgcctcggtggccggcctgctgctgaccacggaggccgtcgtggccgaaaagccggagaaggaaaaggctgcggcgccgagccctggcgacatggacttctaa

SEQ ID NO: 9759 - protein, 540 aa, Rhodothermus marinus
MAAKQITFNADARMALKRGVDKLADAVKVTLGPKGRNVIIEKKFGAPTVTKDGVTVAKEIELEDKLENVGAQMVKEVASKTSDVAGDGTTTATVLAQAILTAGLKSVTAGANPMDLKRGIDKAVEVVVAELRKMSQEVQDKNRIAQVATISANGDKAIGQLIADAFEKVGKDGVITVEEAKGTETTLEVVEGMQFDRGYLSPYFVTNPDTMEAVLEDAYILIHDKKISAMKDLLPILEKVVQTGRPLLIIAEDVEGEALATLVVNKLRGVLKVAAVKAPGFGDRRKAMLEDIAILTGGTVISEEKGYRLENATLDYLGQAERIIVDKDNTTIVGGKGDPAQIKARANQIRQQIEETTSDYDREKLQERLAKLAGGVAVLKIGAATEPEMKEKKARVEDALHATRAAVEEGIVPGGGVAYIRAIAALDKVEVENEDQKIGVQIVQRALEEPLRQIAANAGWEGSIVVQRVKEGQGDFGFNAQTEEFGNLLEQGVIDPTKVARTALENAASVAGLLLTTEAVVAEKPEKEKAAAPSPGDMDF

SEQ ID NO: 9760 - DNA, 1647 bp, Stenotrophomonas maltophilia
  CDS (1)..(1647): transl_table=11
  misc_feature (1444)..(1444): s is g or c
atggcagctaaagacgtaaaattcggtaacgacgctcgtgtgaaaatgctgcgcggcgtaaacgtactggcagatgcagtgaaagttaccctcggtccaaaaggccgtaacgtagttctggataaatctttcggtgcaccgaccatcaccaaagatggtgtttccgttgctcgtgaaatcgaactggaagacaagttcgaaaatatgggtgcgcagatggtgaaagaagttgcctctaaagcaaacgacgctgcaggcgacggtaccaccactgcaaccgtactggctcaggctatcatcctgaaggtcatgaaagctgttgctgcgggcatgaacccgatggacctgaaacgtggtatcgacaaagcggttaccgttgcagttgaagaactgaaagcgctgtccgtaccatgctctgactctaaagcgattgctcaggttggtaccatctccgctaactccgacgaaaccgtaggtaaactgatcgctgaagcgatggacaaagtcggtaaagaaggcgttatcaccgttgaagacggtaccggtctgcaggacgaactggacgtggttgaaggtatgcagttcgaccgtggctacctgtctccttacttcatcaacaagccggaaactggcgcagtagaactggaaagcccgttcatcctgctggctgacaagaaaatctccaacatccgcgaaatgctgccggttctggaagctgttgccaaagcaggcaaaccgctgctgatcatcgctgaagatgtagaaggcgaagcgctggcaactctggttgttaacaccatgcgtggcatcgtgaaagtcgctgcggttaaagcaccgggcttcggcgatcgtcgtaaagctatgctgcaggatatcgcaaccctgactggcggtaccgtgatctctgaagagatcggtatggagctggaaaaagcaaccctggaagacctgggtcaggctaaacgtgttgtgatcaacaaagacaccaccactatcatcgatggcgtgggtgaagaagctgcaatccagggccgtgttgctcagatccgtcagcagattgaagaagcaacttctgactacgaccgtgaaaaactgcaggaacgcgtagcgaaactggcaggcggcgttgcagttatcaaagtgggtgctgctaccgaagttgaaatgaaagagaaaaaagcacgcgttgaagatgccctgcacgcgacccgtgctgcggtagaagaaggcgtggttgctggtggtggtgttgcgctgatccgcgtagcgtctaaactggctgacctgcgtggtcagaacgaagaccagaacgtgggtatcaaagttgcactgcgtgcaatggaagctccgctgcgtcagatcgtattgaactgcggcgaagaaccgtctgttgttgctaacaccgttaaaggcggcgacggcaactacggttacaacgcagtcsaccgaagaatacggcaacatgatcgacatgggtatcctggatccaaccaaataactcgttctgctctgcagtacgcagcttctgtggctggcctgatgatcaccaccgaatgcatggttaccgacctgccgaaaaacgatgcagctgacttaggcgctgctggcggtatgggcggcatgggtggcatgggcggcatgatgtaa

SEQ ID NO: 9761 - protein, 548 aa, Stenotrophomonas maltophilia
  misc_feature (482)..(482): The Xaa at location 482 stands for Asp, or His.
MAAKDVKFGNDARVKMLRGVNVLADAVKVTLGPKGRNVVLDKSFGAPTITKDGVSVAREIELEDKFENMGAQMVKEVASKANDAAGDGTTTATVLAQAIILKVMKAVAAGMNPMDLKRGIDKAVTVAVEELKALSVPCSDSKAIAQVGTISANSDETVGKLIAEAMDKVGKEGVITVEDGTGLQDELDVVEGMQFDRGYLSPYFINKPETGAVELESPFILLADKKISNIREMLPVLEAVAKAGKPLLIIAEDVEGEALATLVVNTMRGIVKVAAVKAPGFGDRRKAMLQDIATLTGGTVISEEIGMELEKATLEDLGQAKRVVINKDTTTIIDGVGEEAAIQGRVAQIRQQIEEATSDYDREKLQERVAKLAGGVAVIKVGAATEVEMKEKKARVEDALHATRAAVEEGVVAGGGVALIRVASKLADLRGQNEDQNVGIKVALRAMEAPLRQIVLNCGEEPSVVANTVKGGDGNYGYNAVXRRIRQHDRHGYPGSNQITRSALQYAASVAGLMITTECMVTDLPKNDAADLGAAGGMGGMGGMGGMM

SEQ ID NO: 9762 - DNA, 1626 bp, Thermoanaerobacter brockii
  CDS (1)..(1626): transl_table=11
atggcaaaacaaatcaaatatggtgaagaagctcgtagagcattagaaagaggagttaatgcagttgcggatactgtaaaagttacactaggaccaagaggtcgtaatgtggtacttgacaaaaagtatggttccccaacagtaacaaatgacggtgttacaattgcgagagaaattgaattagaagacccatttgaaaatcaaggggctcagcttttgaaagaagcagctacaaaaactaatgatattgctggtgacggtacaacaactgcaacacttttagcacaagcaatggttcgtgaagggcttaaaaacctcgctgcaggagctaacccaatgcttttaagaagaggcattgcaaaagctgttgatgctgcagttgagggattaaagaggatatctaaacctatagataataaagagtcaattgctcacgttgcctctatatcagcagctgatgaagagataggaaagctcattgcagaagcaatggacaaagtaggaaaagatggagttataactgttgaagaatcaaaaacattaggtacaactcttgaagttgttgaaggaatgcaatttgacagaggatatatctccccttatatggtgacagatgctgaaaaaatggaggcagtattagaagagcctgttattcttattacagataaaaaaatctcaaatattcaagatttgttaccactcttagaacaaatagtacagcagggaaagaagcttctcattattgctgatgacgtagaaggagaagcattggcaacattaattgttaacaaattaagaggtacatttacatgtgtagctgtaaaagctcctggttttggtgacagaagaaaagaaatgttacaagatatagcaatactcacaggcggtcaagtaatttccgaagaattaggttatgacttgaaagatgtaagattagatatgcttggccgtgcaagacaagtaaaagttacgaaagaatatacaacaattgtaggtggcgcaggagatccatcagaaattaagaagagagtaaatcaaataaaagctcagattgaagaaacgacatcagactatgacagagagaaattacaagaaagacttgcaaaattggctggtggtgtagctgtaattcaagctggtgctgcaactgagacagaactcaaagaaaagaaacacagaattgaagacgcattagcagctacaaaagcagcagtagaagagggtatagtacctggtggcggtattgcccttctcaatgtaatagaagatgtacaaaaagtagttgactccttagagggcgatttcaagacgggtgctaagatagtattaagagcattagaagagcctgtaagacaaattgcaacaaatgctggtgttgacggttctgtaatagtagaaaaaataaaagctgctaaagatccaaacttcggatatgatgcttacaaggaagaattcacagacatgttcaaagcaggtattgtggacccaacaaaagttacaaggacagctttacaaaatgctgcgtcaattgcttcaatgatactcacaacagaggcaatagtagtagacataccagagaagaatacaggaatgccaaatcccggagcaggaatggatatgatgtaa

SEQ ID NO: 9763 - protein, 541 aa, Thermoanaerobacter brockii
MAKQIKYGEEARRALERGVNAVADTVKVTLGPRGRNVVLDKKYGSPTVTNDGVTIAREIELEDPFENQGAQLLKEAATKTNDIAGDGTTTATLLAQAMVREGLKNLAAGANPMLLRRGIAKAVDAAVEGLKRISKPIDNKESIAHVASISAADEEIGKLIAEAMDKVGKDGVITVEESKTLGTTLEVVEGMQFDRGYISPYMVTDAEKMEAVLEEPVILITDKKISNIQDLLPLLEQIVQQGKKLLIIADDVEGEALATLIVNKLRGTFTCVAVKAPGFGDRRKEMLQDIAILTGGQVISEELGYDLKDVRLDMLGRARQVKVTKEYTTIVGGAGDPSEIKKRVNQIKAQIEETTSDYDREKLQERLAKLAGGVAVIQAGAATETELKEKKHRIEDALAATKAAVEEGIVPGGGIALLNVIEDVQKVVDSLEGDFKTGAKIVLRALEEPVRQIATNAGVDGSVIVEKIKAAKDPNFGYDAYKEEFTDMFKAGIVDPTKVTRTALQNAASIASMILTTEAIVVDIPEKNTGMPNPGAGMDMM

SEQ ID NO: 9764 - DNA, 1617 bp, Thermotoga neapolitana
  CDS (1)..(1617): transl_table=11
atgccgaagcttctgaagttcaacgaggaagcaagaagggctctcgaaagaggtgtggacaaggtcgcaaacgctgtgaagataacccttggaccgaagggaagaaacgttgtcattgagaaatcctggggatctccaaccataacgaacgacggtgtttctattgcaaaggaaattgagctcgaggataaattcgaaaacctcggtgctcagctcgtgaaggaggttgcctctaagacgaacgatgtcgccggagacggtacgacaacggcaacggttcttgcgcaggcgatgatcaaagaaggtctcaagaacgttgcagccggtgcgaacccgatcctgctcaaaagaggaatagacaaggccgttgaaagggccgttgaggaaatcaaaaagctctccaagaaactctctggaagggaagacatcgctcatgttgcggcgatttccgccaacagccctgaaataggagaacttatcgccgaggccatggacaaagttggagaagacggtgtcatcacggttgaggactccaagacactcgagacctacgttgaattcaccgaaggaatgcagttcgacaggggatacatctcaccgtactttgtgacggatgcagagaagatggaagtcgttttgaaggaaccttccatcctcattaccgacaggaaactcagtgctgtgaagcctctgataccgattcttgagaaagttgctcaaacagggaagccactccttgtcattgccgaggacgtcgaaggtgaagctctgaccacactcgttctcaacaaactcaagggaacgcttcagtcctgtgcagtaaaagcacctggatttggtgaaagaagaaaggccatgctccaggatatagccatcctcaccggcggacaggttgcaagtgaagaactcggaatcaacctcgaagacctcacactcgaggaccttggaagggccgaccttgtgagggtcaagaaagacgagaccatcatcatcggaggaaaaggagatcccgaagcgatcaagaagagaatcgcacagatcaaggctcagatagaagagaccacatctgagtacgaaaaagaaactctccaggagagaatggccaaactcgccggtggagtcgccgtcataaaggtcggagccgccaccgaaacagagctcaaggaaaagaagcacagaatcgaagacgctctgagcgcaactagggctgccgtagaagagggaatcgttcccggtggaggagtcactctcctgagatccagaaaagccgtagaaaagcttctcgaagagctcgatggtgacgagaagataggagcacagatcgtctacaaagccctctctgcaccgatcagacagattgcagagaacgctggatacgatggagccgtgatcatagagaagatccttgccagcgacgatccggcttacggtttcgacgctctgaggggcgaatttggaaacatgtttgagaaaggaatcatagatcctgcaaaggtcacaaggagcgctctccagaacgcagcatccatcgctggaatgctcctgacaacggaagtgctggtggtcgaaaaacctgaggaaaagaaagaaacaccgtctctgcctgaggaatactga

SEQ ID NO: 9765 - protein, 538 aa, Thermotoga neapolitana
MPKLLKFNEEARRALERGVDKVANAVKITLGPKGRNVVIEKSWGSPTITNDGVSIAKEIELEDKFENLGAQLVKEVASKTNDVAGDGTTTATVLAQAMIKEGLKNVAAGANPILLKRGIDKAVERAVEEIKKLSKKLSGREDIAHVAAISANSPEIGELIAEAMDKVGEDGVITVEDSKTLETYVEFTEGMQFDRGYISPYFVTDAEKMEVVLKEPSILITDRKLSAVKPLIPILEKVAQTGKPLLVIAEDVEGEALTTLVLNKLKGTLQSCAVKAPGFGERRKAMLQDIAILTGGQVASEELGINLEDLTLEDLGRADLVRVKKDETIIIGGKGDPEAIKKRIAQIKAQIEETTSEYEKETLQERMAKLAGGVAVIKVGAATETELKEKKHRIEDALSATRAAVEEGIVPGGGVTLLRSRKAVEKLLEELDGDEKIGAQIVYKALSAPIRQIAENAGYDGAVIIEKILASDDPAYGFDALRGEFGNMFEKGIIDPAKVTRSALQNAASIAGMLLTTEVLVVEKPEEKKETPSLPEEY

SEQ ID NO: 9766 - DNA, 1644 bp, Wolinella recta
  CDS (1)..(1644): transl_table=11
atggcgaaagagatatttttttcagacgaggctagaaataggctatacgagggcgttagaaaactaaacgacgcggtaaaagtgacgatggggcctcgcggcagaaacgtgctggtgcaaaagagcttcggtgctcctgcgataaccaaagacggcgtgagcgtggctaaagagatcgagctaaaagacgctctggaaaacatgggtgcgggtctggtaaaagaggtcgcaagcaagacaaacgacgaagcgggcgatggcacgactacggctacggttttggcgcactctatctttaaagagggcttaagaaatatcaccgcaggcgcgaatccggtcgaggtaaaacgcggtatggataagcaagccgcagctatcatcgccgagctaaaaaatctatcgcgcaaggttaccgataaaaaagagatcgcgcaagtagcgactatctcggcaaactccgactccgctatcggcggactgatcgctgatgcgatggaaaaggtcggcaaagacggcgtcatcaccgtcgaggaggcaaaatccattcaagatgaactaaacgtggtcgagggtatgcagtttgaccgcggatatctaagcccatacttcatcacgaacgccgaaaagatgcaggttgagcttcaaagcccatatattttgcttttcgataagaagattacgaatctaaaagatctattgcctgtgctcgagcagatccaaaaaacaggcaaaccgctactaatcatcgctgaagacatcgaaggcgaggcgctcgcgacgctagtggtaaataaacttcgcggcgtgctaaacatctctgcggttaaggctccgggctttggcgatcgcagaaaagcgatgcttgaggatatcgcgatattaaccggcggcgaagtagtgagcgaagagctgggtagaacgctagaaagcgcgactctaagtgacctaggacaagcttcaagcgtgatcatcgacaaggataacacgactatcgtaaatggcgcaggcgagaaatccgcaatcgacgctagaatcatccagataaaagctcagatcgcagaaactacgagcgactacgataaagaaaaactccaagagcgcctagctaagctaagcggcggcgtagcggttatcaaggtcggcgctgctacggagactgagatgaaagagaaaaaagaccgcgtagacgacgctctaagcgcgactaaggcggctgtagaagaaggcatcgtgatcggcggcggcgccgcatttatcaaagccggtgcgaaagtggatctaaatttaagcggcgacgaggctataggcgcagatatcgtaaggcgcgcgctaacggctccgctccgccagatcgccgaaaatgcgggctttgacgcgggcgtagtagcaaactccgtaagcgtgagcaaggatgacaactacggctttaacgcggctacgggcgagtatgtggatatgtttaaagcaggtatcatcgacccggtcaaggtcgagcgcatcgctcttcaaaacgcggttagcgtggcgagcctgctcctaacgacggaagctaccataagcgagctaaaagaggacaaaccgatgcctgcgatgcccgatatgagcggtatgggcggcatgggcggcatgggcggcatgatgtaa

SEQ ID NO: 9767 - protein, 547 aa, Wolinella recta
MAKEIFFSDEARNRLYEGVRKLNDAVKVTMGPRGRNVLVQKSFGAPAITKDGVSVAKEIELKDALENMGAGLVKEVASKTNDEAGDGTTTATVLAHSIFKEGLRNITAGANPVEVKRGMDKQAAAIIAELKNLSRKVTDKKEIAQVATISANSDSAIGGLIADAMEKVGKDGVITVEEAKSIQDELNVVEGMQFDRGYLSPYFITNAEKMQVELQSPYILLFDKKITNLKDLLPVLEQIQKTGKPLLIIAEDIEGEALATLVVNKLRGVLNISAVKAPGFGDRRKAMLEDIAILTGGEVVSEELGRTLESATLSDLGQASSVIIDKDNTTIVNGAGEKSAIDARIIQIKAQIAETTSDYDKEKLQERLAKLSGGVAVIKVGAATETEMKEKKDRVDDALSATKAAVEEGIVIGGGAAFIKAGAKVDLNLSGDEAIGADIVRRALTAPLRQIAENAGFDAGVVANSVSVSKDDNYGFNAATGEYVDMFKAGIIDPVKVERIALQNAVSVASLLLTTEATISELKEDKPMPAMPDMSGMGGMGGMGGMM

SEQ ID NO: 9768 - DNA, 1728 bp, Cucurbita maxima
  CDS (1)..(1728)
atgcaccgattcgctacaggcctcgcttccaaagcccgtcttgctaggaacggtgccaatcagattgctagtaggtctaactggagaagaaactatgcggcgaaagacgttaaatttggggtggaggctcgaggtcttatgctcaagggtgttgaggatcttgctgatgccgttaaagttacaatgggtccgaaggggcgcactgtagtgattgaacaaagttttggggctcccaaagttacaaaagatggtgtgaccgtcgccaaaagtatcgagtttaaagataaagttaaaaatgttggtgccagtcttgtgaagcaggttgctaacgcgaccaatgatgtcgcaggcgatgggaccacttgtgctactattctcacaaaagcaatatttacggagggctgcaagtctgttgcttctggaatgaatgccatggatttaagacgtggtatctccatggctgttgattcagtggtgacaaacttgaagagtagagcacgaatgattagcacatcagaagagatagcacaggttgggacaatatctgcaaatggcgaaagagaaattggtgagttaattgccaaagccatggagaaagttggcaaggagggcgtgatcaccatatctgatgggaagacaatggataacgagttggaagttgttgaagggatgaagttagacaggggatatatttccccttatttcattacaaaccagaagaaccagaaatgtgaattggacgatcctcttattataatctatgaaaagaaaatctcaagcataaatgctgtggtgaaagttttggagttggctctgaagaagcaaaggccccttcttattgtttccgaagatgttgaaagtgaggcactagctactcttatcctgaataagcttcgtgctggaattaaggtctgtgccattaaagcaccaggttttggcgaaaataggaaggccggactgcaggaccttgcagttctcacgggtggtcaagtcattactgaagagcttggaatgaatctcgagaaagtcgatctggacatgcttggctcttgcaagaagatcacaatttcaaaggatgatactgttattcttgatggcgctggtgacaagaaggctattgaggaaagatgtgatcagataaggtcgggtattgaagcaagcacttccgattacgacaaggaaaaattacaggagagattagcgaaactctctggcggtgtagctgtattgaagattggaggagcaagtgaagcagaagtgggcgagaagaaggatagagtcaccgatgctttgaatgccacaaaagcagctgttgaagaaggaatagtaccagggggtggtgttgctcttttgtatgcatccaaagaattagataaacttccaactgccaactttgatcagaagattggtgtccagattattcagaatgctctaaagacacctgtacacacgattgcatcgaatgcgggagtcgagggagccgttgtggttggtaagctcttggagcaggacgaccctgatcttggttatgatgctgcaaagggtgaatatgtagatatggtcaaagctggcattatcgaccctctgaaagtaatcagaactgcactagttgacgccgcaagtgtttcctctttgatgaccacaactgaagtggtcgtagtcgaactccccaaggacgaaaatgaagttccagcaatgggtggtggcatgggcggaatggattactaa

SEQ ID NO: 9769 - protein, 575 aa, Cucurbita maxima
MHRFATGLASKARLARNGANQIASRSNWRRNYAAKDVKFGVEARGLMLKGVEDLADAVKVTMGPKGRTVVIEQSFGAPKVTKDGVTVAKSIEFKDKVKNVGASLVKQVANATNDVAGDGTTCATILTKAIFTEGCKSVASGMNAMDLRRGISMAVDSVVTNLKSRARMISTSEEIAQVGTISANGEREIGELIAKAMEKVGKEGVITISDGKTMDNELEVVEGMKLDRGYISPYFITNQKNQKCELDDPLIIIYEKKISSINAVVKVLELALKKQRPLLIVSEDVESEALATLILNKLRAGIKVCAIKAPGFGENRKAGLQDLAVLTGGQVITEELGMNLEKVDLDMLGSCKKITISKDDTVILDGAGDKKAIEERCDQIRSGIEASTSDYDKEKLQERLAKLSGGVAVLKIGGASEAEVGEKKDRVTDALNATKAAVEEGIVPGGGVALLYASKELDKLPTANFDQKIGVQIIQNALKTPVHTIASNAGVEGAVVVGKLLEQDDPDLGYDAAKGEYVDMVKAGIIDPLKVIRTALVDAASVSSLMTTTEVVVVELPKDENEVPAMGGGMGGMDY

SEQ ID NO: 9770 - DNA, 1728 bp, Cucurbita maxima
  CDS (1)..(1728)
atgcaccgcttcgcttcaggcctcgcctccaaagctcgccttgctaggaagggtgccaatcagattgctagtagatcgagctggagcagaaactatgctgctaaagacgttaaatttggagtggaggctcgaggacttatgcttaagggtgttgaggatcttgctgatgccgttaaagtcacaatgggtccgaaggggcgcaatgtcgtgattgaacagagttatggggctcccaaggttacaaaagatggtgtgactgttgcaaagagtatcgagtttaaagataaggttaaaaatgttggtgccagtcttgtgaagcaggttgctaatgcaacaaatgatgtagctggtgatgggaccacttgtgctactattcttacaagagcaatatttacggagggctgcaaatccgttgctgctggaatgaatgccatggatctaagacgtggtatttccatggcagtcgattccgttgtgacaaacttgaagagcagagcacgaatgataagcacatcagaagagatagcccaggtcggaacaatatctgccaatggagaaagagaaattggtgagttgattgccaaggccatggagaaagttggcaaggagggcgtgatcaccatctcggatgggaagacattgtttaatgagttggaagttgttgaagggatgaagttagataggggatacatttctccttacttcattactaaccaaaagaaccagaaatgtgaattggatgatcctcttattctaatccatgaaaagaaaatctctagcattaactctgtggtgaaagttttagagttggctctgaagaggcaaaggccccttcttattgtttctgaagatgtcgaaagtgatgcactagccactcttatcttgaataagctccgtgctggaattaaggtctgtgccattaaagcaccaggttttggtgaaaataggaaggctggactgcacgaccttgcagttctcacgggtggtcagctcattactgaagagcttggaatgaatcttgaaaaagttgatctggatatgcttggctcttgcaagaagatcaccatttcaaaggacgatacagtaattctagatggcgctggtgacaagaagtctatcgaggaaagatgtgaacagataaggtcagctatagaactgagcacttctgattatgacaaggagaagttacaggaaagattagcgaagctctctggtggtgtagctgtattgaagattggaggagcaagtgaggcagaagtaggtgagaaaaaggatagagtcactgatgccttgaatgccacaaaagcagctgttgaagaaggaattgtaccaggtggtggtgttgctcttttgtatgcatcgaaagaactagataaactttcaactgccaacttcgatcagaaaattggtgtccaaattattcagaatgctctaaagacacccgtacacacaatcgcatcgaatgcgggagttgagggggctgtcgtggttgggaagctgttggagcaggacaaccctgatcttggttacgatgctgcaaaaggtgaatatgtggatatgatcaaagctggcatcattgatcctcttaaagtaattagaactgcactggtcgatgccgctagcgtttcctctttgatgacaactacagaagccatcgtagtcgaactccccaaggatgaaaaggaagttccagcaatgggtggcggcatgggaggaatggattactaa

SEQ ID NO: 9771 - protein, 575 aa, Cucurbita maxima
MHRFASGLASKARLARKGANQIASRSSWSRNYAAKDVKFGVEARGLMLKGVEDLADAVKVTMGPKGRNVVIEQSYGAPKVTKDGVTVAKSIEFKDKVKNVGASLVKQVANATNDVAGDGTTCATILTRAIFTEGCKSVAAGMNAMDLRRGISMAVDSVVTNLKSRARMISTSEEIAQVGTISANGEREIGELIAKAMEKVGKEGVITISDGKTLFNELEVVEGMKLDRGYISPYFITNQKNQKCELDDPLILIHEKKISSINSVVKVLELALKRQRPLLIVSEDVESDALATLILNKLRAGIKVCAIKAPGFGENRKAGLHDLAVLTGGQLITEELGMNLEKVDLDMLGSCKKITISKDDTVILDGAGDKKSIEERCEQIRSAIELSTSDYDKEKLQERLAKLSGGVAVLKIGGASEAEVGEKKDRVTDALNATKAAVEEGIVPGGGVALLYASKELDKLSTANFDQKIGVQIIQNALKTPVHTIASNAGVEGAVVVGKLLEQDNPDLGYDAAKGEYVDMIKAGIIDPLKVIRTALVDAASVSSLMTTTEAIVVELPKDEKEVPAMGGGMGGMDY

SEQ ID NO: 9772 - DNA, 1710 bp, Heliothis virescens
  CDS (1)..(1710)
atgtttaaaatgtatcgttcaccgcatattaccagaaatagtttcaagtatttaaaagcaacaaatattaattcatgtcgcttttacgcaaaagaagtaagatttggtccggacgttcggtctctcatgttacaaggagttgatatcttagcagatgccgatgatgtcactatgggcccaaagggcgtaaacgtaattttggcaaaaaatttagggcctcctaaaattacaaaagatggtgtgactgtagccaaaggtatagatttaaaagataaattccaaaatattggtgctagacttgttcagaatgtagcaaataaaaccaacgaagaggctggagatggaacaactacagctacagttttagcacggcctattgcgaaagaaggatttgaaaatatatcgaggggagctaatcctattgaaataaggaagggagtcatgttagcggtcgaatcagttaaacgacaattaaaggaaatgtctaaaccagtaaacacatccgaggaaatagaacaagtagctacaatatccgcaaacggtgatgaatctataggaaaattaattgcagccgccatgaacagagtaggcaaaaatggtgttattactgttaaagatggtaaaacattagaagatgaactagaaatcatagaaggtatgaagtttgatcgtggttacgtttcaccatatttcataaattcaaataaaggtccaaaagttgaatacaatgatgccttagttctgtactctgaaaagaaaatatattatgcatctcaagtggttccagctttagaattagcaaattcacagaagaaacctctagtcattattgcggaagactatgacggtgaaccattgtccgtattagtagtgaataaattaaaaatcggtttgccggtagtagcagtcaaagctcctggttttggtgaatacagaaccaatgccttacttgatatggctgccgcaactggaggtgtttttgaagatgatacaaacttagtaaggctagaggattgccaggctgaaagttttggtcaagttggtgaagtgataattacaaaagattcaactcttttactgaaagggaagggtgaccctaatgaaataaaacaacgcattgatcaaataaaagaagaattagaaacagctactagtaattacgaccgcgaaaggcttattgatcgtttgggtaggctacagtctggtgtagctgtattattaataggtggctgtagcgaggttgaagtgaacgagaaaaaagatcgtgtcaatgacgcactaaatgctactagagcagcagttgaagaaggcattgtacctggaggtggagcagcactgcttcgatgtatacctgctctggacctactaaaacccgcaaataaagatcaagaaatcggtgtctccattattaaaaaagctttgcgtacgccttgcataactattgcttctaatgctggtttcgacggcgcagtggtagtatcgaaagtcgaagacatgggccctgagtatggttatgacgcgttaaataatgaatatgtgaatatgattgagaaaggcataatagatcctaccaaagttgtaagaagagctttaactgatgctagtggtgtggcgtcattacttactacagccgaagcagtcatatgtgacatgccgaaacaaaaggatccaccaccagagtatgcacctatcggaggtggtgactattag

SEQ ID NO: 9773 - protein, 569 aa, Heliothis virescens
MFKMYRSPHITRNSFKYLKATNINSCRFYAKEVRFGPDVRSLMLQGVDILADADDVTMGPKGVNVILAKNLGPPKITKDGVTVAKGIDLKDKFQNIGARLVQNVANKTNEEAGDGTTTATVLARPIAKEGFENISRGANPIEIRKGVMLAVESVKRQLKEMSKPVNTSEEIEQVATISANGDESIGKLIAAAMNRVGKNGVITVKDGKTLEDELEIIEGMKFDRGYVSPYFINSNKGPKVEYNDALVLYSEKKIYYASQVVPALELANSQKKPLVIIAEDYDGEPLSVLVVNKLKIGLPVVAVKAPGFGEYRTNALLDMAAATGGVFEDDTNLVRLEDCQAESFGQVGEVIITKDSTLLLKGKGDPNEIKQRIDQIKEELETATSNYDRERLIDRLGRLQSGVAVLLIGGCSEVEVNEKKDRVNDALNATRAAVEEGIVPGGGAALLRCIPALDLLKPANKDQEIGVSIIKKALRTPCITIASNAGFDGAVVVSKVEDMGPEYGYDALNNEYVNMIEKGIIDPTKVVRRALTDASGVASLLTTAEAVICDMPKQKDPPPEYAPIGGGDY

SEQ ID NO: 9774 - DNA, 1773 bp, Ajellomyces capsulata
  CDS (1)..(1773)
atgcagcgagctctttcgtctacctccagggcttcggtcctttcctctgcccccacacgcgcgcctgtgtctcgatttcgttccgctggtttaagccttcagcagcagagattcgcccataaggagctcaaattcggcgtagaaggtcgtgctgcactcctcaagggtattgacactcttgcaaaggctgtttgcacaacactcggtcccaagggaagaaatgtcttgattgagtcttcctacggttcccccaagatcaccaaggacggtgtcactgttgcgaaggcagttacccttcaagacaagttcgagaatttgggtgctcgtctgctccaggacgttgcgtcgaagaccaacgaggttgccggcgacggaactaccactgcaactgtccttgctcgggctattttctccgaaactgtcaagaatgtcgcggcaggatgcaacccaatggacctacggaggggtatccaggctgccgttgaggctgttgttgagtacctccaggcgaacaagagggatatcaccacaacggaggaaattgcccaggttgctactatttctgccaatggcgatacccatgttggcaagctgatctccaatgccatggagaaagtcggaaaagaaggtgtgattactgtcaaggacggaaagaccatcgaggatgagctggaagtcactgagggcatgcgattcgaccgcggatacgtctcgccttacttcatcaccgatactaaggcacagaaagttgagttcgagaagcccctgattgttctttctgagaagaaaatctccgccgtccaggacatcatccccgcccttgaagcctccaccactctgcgacgacccctcgtcatcatcgctgaggacattgagggtgaggctcttgctgtctgcatcctcaacaagctccgcggccaactgcaggtcgccgccgtcaaggtccccggcttcggcgacaaccgcaagagcatcctcggcgacatcggcattctcaccaatgctaccgtcttcaccgacgagctcgatatgaaacttgagaaggctactgcggatatgctcggctccactggctccatcaccatcactaaggaagacaccataatcctcaacggcgatggcagcaaggattccatcgcgcagcgttgtgaacagatccggggcgtcatcgctgaccccaccacctccgactacgagaaggagaaactccaagaacgcctcgccaaactctccggcggtgttgctgttatcaaagttggcggtgcttctgaggttgaagtaggcgaaaagaaggaccgtgttgttgacgccctcaatgccactcgcgccgctgttgaggaaggtatccttccaggtggtggcaccgctctcctgaaagcagcggctaacggcctcgcgtccgtgaagccgaccagcagcgaccaacttcgacgtatcagcagcttggtgtcagccatcactcgccccgcacgcaccatcgtggagaatgcggggttggaagggagtgtcattgtcggcaagctgaccgatgagcatgccagcgacttcaataggggtttcgatagcgccaagggcgagtatgtcgatatgattgcttctggtattgttgatccgctcaaagttgttcgtaccgcgcttgtggatgcgagcggcgtggcgtcgctacttggtaccactgaggtggctattgtcgaggcgccagaggagaagggccctgctggacctcctggtggtatgggcggcatgggtggcatgggcggtggcatgttctaa

SEQ ID NO: 9775 - protein, 590 aa, Ajellomyces capsulata
MQRALSSTSRASVLSSAPTRAPVSRFRSAGLSLQQQRFAHKELKFGVEGRAALLKGIDTLAKAVCTTLGPKGRNVLIESSYGSPKITKDGVTVAKAVTLQDKFENLGARLLQDVASKTNEVAGDGTTTATVLARAIFSETVKNVAAGCNPMDLRRGIQAAVEAVVEYLQANKRDITTTEEIAQVATISANGDTHVGKLISNAMEKVGKEGVITVKDGKTIEDELEVTEGMRFDRGYVSPYFITDTKAQKVEFEKPLIVLSEKKISAVQDIIPALEASTTLRRPLVIIAEDIEGEALAVCILNKLRGQLQVAAVKVPGFGDNRKSILGDIGILTNATVFTDELDMKLEKATADMLGSTGSITITKEDTIILNGDGSKDSIAQRCEQIRGVIADPTTSDYEKEKLQERLAKLSGGVAVIKVGGASEVEVGEKKDRVVDALNATRAAVEEGILPGGGTALLKAAANGLASVKPTSSDQLRRISSLVSAITRPARTIVENAGLEGSVIVGKLTDEHASDFNRGFDSAKGEYVDMIASGIVDPLKVVRTALVDASGVASLLGTTEVAIVEAPEEKGPAGPPGGMGGMGGMGGGMF

SEQ ID NO: 9776 - DNA, 1779 bp, Paracoccidioides brasiliensis
  CDS (1)..(1779)
atgcagcgagcttttacttcctcccgggcttcggtcctctcctccgcttcctccacacgcgctcctctctcgcgattccgatctgctggagtgggtctgcagcagcagcgatttgctcataaggaactcaaattcggcgtagaggcccgcgcttctctcctcaagggtatcgatacccttgcaaaggctgtaaccactactctcggcccaaagggacgaaatgtcctgattgaatccccctacggttccccaaagattaccaaggacggcgttactgttgccaaggctgtgacccttcaagacaaattcgagaacctgggtgctcgtctcctccaggacgttgcctccaagaccaacgaggttgctggtgacggcactactactgcaaccgtgcttgcccgggctattttctcagaaaccgttaagaatgtcgctgctggatgcaaccccatggatctcaggagaggtatccagtctgccgttgaagccgttgtcgagtacctgcagacgaacaagcgggatatcaccaccactgaagagattgcccaggtcgctactatctctgccaacggtgatacccatgttggcaagctgatctccaatgccatggagaaggtcggaaaggaaggtgttattactgtcaaggacggaaagaccatcgacgatgagttagaggtcaccgagggcatgcgattcgaccgtggctatgtatccccatacttcattaccgataccaaggcgcagaaggtcgaatttgagaagcccctgattctgctttctgagaagaaaatctctgcagtccaagatattattccagccctggaagcctccacaagtctccgacgccctctcgttatcattgcagaggacatcgaaggtgaagccctcgccgtctgtatcctcaacaagctccggggccaactgcaagttgctgccgtcaaagccccaggatttggcgacaaccgcaaatccatccttggcgacatcggcatcctaaccaatgccactgttttcaccgacgagctcgacctcaaactcgaaaaagcaactccagacatgctcggctccactggctccatcactatcacaaaggaagacaccatcatccttaacggtgaaggtagcaaggacgccatcgcccaacgctgcgagcagatccgctccgtcatctccgatccagcaacctccgactacgaaaaggagaaactccaagaacgcctcgccaagctctccggcggcgtcgccgtaattaaagtgggcggggcctccgagatcgaagtaggcgagaaaaaggaccgcgtcgtcgacgcactgaacgccacccgcgccgccgtcgaagaaggcatccttcccggcggtggcacggccctcctcaaagccgctgccaacggcctcacatccctcaacccgaccaacttcgaccagaaactcggaatctccatcatcaagaacgccatcacgcgtcccgcgcgcaccatcgtcgaaaactccgggcttgagggctccgttatcgttgggaaactgacggacgacttcgcgggcgatttcaaccggggcttcgacagtgcgaggggggagtatgtggatatgataggggcggggattgtggatccgttgaaggttgtgaggacggctctggtagatgctagcggggtcgcgtcgttgttggggaccacggaggtggcgattgttgaggcgccggaggagaaggtacctgctgggtctggtgcgggtggcatgggtggtggcatgggcggtatgggcgggggtatgttctag

SEQ ID NO: 9777 - protein, 592 aa, Paracoccidioides brasiliensis
MQRAFTSSRASVLSSASSTRAPLSRFRSAGVGLQQQRFAHKELKFGVEARASLLKGIDTLAKAVTTTLGPKGRNVLIESPYGSPKITKDGVTVAKAVTLQDKFENLGARLLQDVASKTNEVAGDGTTTATVLARAIFSETVKNVAAGCNPMDLRRGIQSAVEAVVEYLQTNKRDITTTEEIAQVATISANGDTHVGKLISNAMEKVGKEGVITVKDGKTIDDELEVTEGMRFDRGYVSPYFITDTKAQKVEFEKPLILLSEKKISAVQDIIPALEASTSLRRPLVIIAEDIEGEALAVCILNKLRGQLQVAAVKAPGFGDNRKSILGDIGILTNATVFTDELDLKLEKATPDMLGSTGSITITKEDTIILNGEGSKDAIAQRCEQIRSVISDPATSDYEKEKLQERLAKLSGGVAVIKVGGASEIEVGEKKDRVVDALNATRAAVEEGILPGGGTALLKAAANGLTSLNPTNFDQKLGISIIKNAITRPARTIVENSGLEGSVIVGKLTDDFAGDFNRGFDSARGEYVDMIGAGIVDPLKVVRTALVDASGVASLLGTTEVAIVEAPEEKVPAGSGAGGMGGGMGGMGGGMF

SEQ ID NO: 9778 - DNA, 1752 bp, Brassica napus
  CDS (1)..(1752)
atggcgactgcaaatgctctctcctctccctctgtcctctgctcttcacgacagggaaagctgagtggtggaagtcagcagaaaggtcaaagagtaagctacaggaaagcaaacagacgcttcagtcttagagcaaatgtaaaggagattgctttcgaccagagctcaagagctgctcttcaagctggtatcgacaagcttgctgatgctgttggtctcactcttggccctagagggaggaatgttgtgttggatgagtttggtagccccaaggttgtgaacgatggagtcaccatcgctagggccattgagttacctgacgccatggagaacgctggtgcagcactcatccgcgaggttgcgagtaagactaatgactcagctggcgacgggacaacaactgcttccgtcctggctcgggaaatcatcaaacacggtctgttgagcgtcacttccggcgccaatcctgtctccctcaagagaggaatcgacaagaccgttcaagctttgatagaagagcttgagaagagatctagacctgtcaaaggcggtcgagacatcaaagccgtggctacaatctcagctggaaacgatgagcttattggagcgatgatcgctgacgccattgacaaagtgggacctgatggtgtctctccaattgagtcctcatcctcctttgagaccaccgtcgaagtcgaagaagggatggagattgacagaggctacatctcccctcagttcgttaccaaccccgagaagctgctcgtcgagttcgagaacgcgagggtgttgatcactgatcagaagatcaccgccatcaaggacatcatccccatcttggagaaaaccactcagcttcgagctccgttgctgatcatcgctgaggatgtcacaggggaggccttagcaactctggttgtgaacaaactccgcggtgttctcaacgttgttgctgttaaagctccagggttcggagaaaggagaaaagctatgcttcaggatatagcaatcttgacggagccgagtacagcccttgacatgggcctgctggtggaaaacacgaccatagatcagttggggattgctagaaaagtgactatcagcaaagactcgaccacgcttatagccgacgcagcttccaaggcagagcttcaagctcgtatctcccagctgaagaaggagtccttcgagactgactctgtgtatgactcggagaagctcgctgagaggattgctaagctctctggtggtgttgccgtcattaaagtcggagcagcgactgagaccgagctcgaggaccgtaagcttcgtattgaggatgcaaagaacgcaacgttcgctgctatcgaggaaggaatagttcccggtggtggcgccacgttggtgcatctctccactgtgattcccgccattaaggagacgtttgaggacgctgatgttcgtttgggagctgatatagtacagaaggcattggtggcacagtcgcttattgcgcagaacgctggaatcgaaggggaagttgtggtggagaagattatgttcagtgaatgggagctagggtacaacgccatgactgatacctatgagaatctgttggaagcgggagtgattgatccagctaaagtgacgagatgtgcgctgcagaacgctgcttcggttgcagggatggtgctgaccactcaggccattgttgttgacaaacctaaacccaaggctcctgctgctgctgcacctgagggcctcatggtgtaa

SEQ ID NO: 9779 - protein, 583 aa, Brassica napus
MATANALSSPSVLCSSRQGKLSGGSQQKGQRVSYRKANRRFSLRANVKEIAFDQSSRAALQAGIDKLADAVGLTLGPRGRNVVLDEFGSPKVVNDGVTIARAIELPDAMENAGAALIREVASKTNDSAGDGTTTASVLAREIIKHGLLSVTSGANPVSLKRGIDKTVQALIEELEKRSRPVKGGRDIKAVATISAGNDELIGAMIADAIDKVGPDGVSPIESSSSFETTVEVEEGMEIDRGYISPQFVTNPEKLLVEFENARVLITDQKITAIKDIIPILEKTTQLRAPLLIIAEDVTGEALATLVVNKLRGVLNVVAVKAPGFGERRKAMLQDIAILTEPSTALDMGLLVENTTIDQLGIARKVTISKDSTTLIADAASKAELQARISQLKKESFETDSVYDSEKLAERIAKLSGGVAVIKVGAATETELEDRKLRIEDAKNATFAAIEEGIVPGGGATLVHLSTVIPAIKETFEDADVRLGADIVQKALVAQSLIAQNAGIEGEVVVEKIMFSEWELGYNAMTDTYENLLEAGVIDPAKVTRCALQNAASVAGMVLTTQAIVVDKPKPKAPAAAAPEGLMV

SEQ ID NO: 9780 - DNA, 1764 bp, Pisum sativum
  CDS (1)..(1764)
atggcttcaaccaacgctctatcctctacctcaattcttcgttcaccaaccaaccaggcacagaccagtctcagcaagaaggttaaacaacatggaagggtcaatttcaggcagaaacctaaccgttttgtggttaaagccgccgctaaagatatcgcctttgaccaacattcacgctccgctatgcaagccggaattgataaacttgccgatgctgttggcctcactcttggacccagagggaggaatgttgtgttggatgagtttggaagtcctaaggtagttaatgatggtgtgacaattgcaagagctattgagcttcctgatcccatggaaaatgctggtgcagctcttataagggaggttgcaagtaaaactaatgactctgctggcgacgggactacaacggcttcgattctggctagggaaattataaagcttggacttctcaatgtaacatcgggtgctaatcctgtgtcgatcaagaaaggaattgataaaactgtggcggctttggtggaagagcttgagaagttggctaggcctgttaaaggtggagatgatataaaagctgttgctactatttctgctggaaatgatgagttgattggaaaaatgattgctgaagcgattgacaaggttggacccgatggtgttttatccattgagtcttctaactcgtttgagacgacagttgaagttgaagaaggaatggagattgacagaggatatatctcccctcagtttgtaacaaatccagagaaatcaattgttgaatttgagaacgccagagtcttgattaccgatcagaagatttcagcaatcaaagatatcattcctctgctggagaaaaccactcaattgagagcccccttgcttatcatttctgaagatatcactggtgaggctttggcgacccttgttgtcaataagctgcgtggtatccttaatgtcgctgccatcaaagctccaggatttggtgaaagaagaaaggcccttcttcaagacattgctatattgacaggtgctgagttccaagccagtgatctgggccttctcgttgaaaacaccacaattgaacaacttggtttggcccggaaggtgaccatctccaaggattctaccactattattgccgatgctgcatcaaaggatgagttgcaatccagggttgcacaactaaagaaagagttgtctgagacagactcaatttatgattctgagaaactcgccgagagaattgctaagttgtctggtggagttgctgtcatcaaggtcggtgctgccacagagaccgaactggaggatcgtaagctccgtattgaggatgccaagaatgcaacttttgccgccattgaggaaggtattgttcctggtggaggcactgcattggttcatctatctggttatgtcccagcaattaaggagaagcttgaagatgcagatgagaggctaggagctgacattgttcaaaaggcattggtagcacctgctgcattgattgctcaaaatgctggaatagagggtgaagtagttgtggagaaaattaagaatggtgaatgggaggttggttacaatgccatgacagacacttacgagaatttagtggagtctggagtcattgaccctgccaaggtaacaaggtgtgctttgcagaatgctgcttcagtagccgggatggtcttaaccacacaggccatcgtcgtcgaaaagcccaagcccaaagcagccgtggctgctgccccacaaggccttactatttaa

SEQ ID NO: 9781 - protein, 587 aa, Pisum sativum
MASTNALSSTSILRSPTNQAQTSLSKKVKQHGRVNFRQKPNRFVVKAAAKDIAFDQHSRSAMQAGIDKLADAVGLTLGPRGRNVVLDEFGSPKVVNDGVTIARAIELPDPMENAGAALIREVASKTNDSAGDGTTTASILAREIIKLGLLNVTSGANPVSIKKGIDKTVAALVEELEKLARPVKGGDDIKAVATISAGNDELIGKMIAEAIDKVGPDGVLSIESSNSFETTVEVEEGMEIDRGYISPQFVTNPEKSIVEFENARVLITDQKISAIKDIIPLLEKTTQLRAPLLIISEDITGEALATLVVNKLRGILNVAAIKAPGFGERRKALLQDIAILTGAEFQASDLGLLVENTTIEQLGLARKVTISKDSTTIIADAASKDELQSRVAQLKKELSETDSIYDSEKLAERIAKLSGGVAVIKVGAATETELEDRKLRIEDAKNATFAAIEEGIVPGGGTALVHLSGYVPAIKEKLEDADERLGADIVQKALVAPAALIAQNAGIEGEVVVEKIKNGEWEVGYNAMTDTYENLVESGVIDPAKVTRCALQNAASVAGMVLTTQAIVVEKPKPKAAVAAAPQGLTI

SEQ ID NO: 9782 - DNA, 1767 bp, Brassica napus
  CDS (1)..(1767)
atggcatcaaccttcactgcaacgtcttccattggctccatggttgctccaaatgcccacaaaacggataagaagcttatgaacaagttgtcttcaagctctttcgggaggaggcagaacgtgttccccaagctcagaagatccagtcctgcagttgtatgtgcagccaaggagttgcatttcaacaaagacgggactaccatcaggaagcttcaagctggtgtcaacaagcttgcagacctagttggtgtgacacttggacctaaagggcgaaacgttgttcttgagagcaagtatggatcaccaagaattgtcaatgatggtgtgactgttgcaagggaggttgaattggaagaccctgttgagaacattggtgccaaacttgttaggcaagcagctgccaagaccaatgatctggccggtgatggtaccacaacatctgtggttcttgcacaaggttttattgctgagggtgtcaaggtggtggctgctggtgcaaaccctgtattgatcactagaggcattgagaagacagcaaaggctttggtagccgagctcaagaaaatgtctaaggaggttgaagacagtgagcttgcagatgtggcagccgttagtgccggtaacaatgcagaaattggaagcatgattgctgaagcaatgagcagagtgggcaggaagggtgtggtgacacttgaggagggtaaaagtgcagagaacgctctctacgtggtggaaggaatgcaatttgatcgaggttatgtctccccttactttgtgacagacagcgagaaaatgtcagttgagttcgacaattgcaagttgcttcttgttgacaagaaaattaccaatgcaagggatcttgttggtgttctggaggatgcaattagaggaggatacccaattttaataattgcggaagacattgagcaggaggctttagcgacccttgttgttaacaagcttagaggcacactgaagattgcagctctcaaagctccaggatttggagagcgcaagagccaataccttgatgatattgccatcctcactggagcgactgtgattcgtgaggaagttggtctttcacttgacaaagctggaaaagaggttcttggacatgcagcaaaagttgtcctcactaaggagacttcgaccattgtgggtgatgggagcacacaggacgcagtgcaaaagcgtgttacacaaattaagaaccttattgagcaagcagagcaagactatgagaaggaaaaactgaatgagagaattgcaaagctctctggtggagttgctgtgattcaggtcggagcacaaactgagacagaactcaaagagaagaaactgagagttgaagatgctcttaatgctacaaaggctgctgttgaggaaggaattgtcgttggtggtggttgtactctgcttcgccttgcttccaaggtggatgccattaaagccgcccttgacaatgatgaagaaaaggttggagccgacatcgtgaaaagagcactgagttaccctctgaaactgattgccaagaatgcaggagtcaatggaagcgtagttagcgagaaggtgctttctaacgataatgtgaagttcggttacaatgctgcaaccggcaagtacgaggatctaatggctgcaggaatcatcgatccaactaaggttgtgagatgttgcttggaacatgcagcttcggttgcaaagacattcttgatgtctgactgtgtggttgttgagatcaaggagcctgagccagttccgtag

SEQ ID NO: 9783 - protein, 588 aa, Brassica napus
MASTFTATSSIGSMVAPNAHKTDKKLMNKLSSSSFGRRQNVFPKLRRSSPAVVCAAKELHFNKDGTTIRKLQAGVNKLADLVGVTLGPKGRNVVLESKYGSPRIVNDGVTVAREVELEDPVENIGAKLVRQAAAKTNDLAGDGTTTSVVLAQGFIAEGVKVVAAGANPVLITRGIEKTAKALVAELKKMSKEVEDSELADVAAVSAGNNAEIGSMIAEAMSRVGRKGVVTLEEGKSAENALYVVEGMQFDRGYVSPYFVTDSEKMSVEFDNCKLLLVDKKITNARDLVGVLEDAIRGGYPILIIAEDIEQEALATLVVNKLRGTLKIAALKAPGFGERKSQYLDDIAILTGATVIREEVGLSLDKAGKEVLGHAAKVVLTKETSTIVGDGSTQDAVQKRVTQIKNLIEQAEQDYEKEKLNERIAKLSGGVAVIQVGAQTETELKEKKLRVEDALNATKAAVEEGIVVGGGCTLLRLASKVDAIKAALDNDEEKVGADIVKRALSYPLKLIAKNAGVNGSVVSEKVLSNDNVKFGYNAATGKYEDLMAAGIIDPTKVVRCCLEHAASVAKTFLMSDCVVVEIKEPEPVP

SEQ ID NO: 9784 - DNA, 1788 bp, Pisum sativum
  CDS (1)..(1788)
atggcatcaaccttctcagcaacgacctcctcttgcaatctctcctcttccgctgccatttcttccttccccttggccgccggcaagagaaatgcaaacaaagtcgttctcccgaggaagaatcgcaacgttaaggtctctgccatggcgaaggagttgcatttcaacaaagatggttctgctattaagaaacttcagaatggtgtgaacaagcttgcggatcttgtcggggttacgcttggtcctaaaggaaggaatgttgttcttgagagcaaatatggttcgcctaaaattgttaatgatggtgtcactgttgctaaagaggttgagttggaagacccggttgagaacattggtgccaagttggtgagacaggcagctgcgaagacaaatgacttggcaggtgatggaaccacaacctctgttgttctagcccagggccttattgcagaaggtgtaaaggttgttgcagctggtgcaaaccctgtgcttattacacgtggcattgagaagacatcgaaagctcttgtagctgaacttaagaagatgtcgaaagaggttgaagatagcgaattggcagatgtggcagcagtcagtgctggcaacaaccatgaggttggaaatatgatagctgaagcgttgagtaaggttggtagaaagggtgttgtgacacttgaagagggaaagagtgctgagaacagtctgtatgttgttgaggggatgcaatttgaccgtggttatatttcaccctactttgttactgatagtgagaaaatgactgttgaatttgagaactgcaagttgctattagttgacaaaaagattaccaatgcaagggatcttattaacatactagaggatgcaattagaagtggatttcctattgtgatcatcgctgaggatattgaacaagaagctttagcaactcttgttgtaaacaaacttagaggatctttgaagattgcagcactcaaggcccctgggtttggagaacgcaaaagccaataccttgatgatattgccatcctaacaggaggtactgttatcagagaggaggttggccttaccttggacaaagctgataaagaggttctgggcaatgccgccaaggtggtcctcactaaggatacaaccacaattgttggtgatggaagtacccaagaagcagttaataagagagtttctcaaataaaaaaccaaattgaggccgcagagcaagaatatgaaaaggaaaagctaagtgaaaggattgcaaaactgtctggtggtgtggctgtaatacaggttggtgcacaaactgagacagagctcaaggaaaagaaattgagagttgaagatgctcttaatgctacaaaggcagctgtcgaggagggtattgtagttggtggtggttgcactttgctcagacttgcatcgaaggtggatgcaatcaaggatacccttgcaaatgatgaagaaaaagttggagcagacattgttaaaagagctcttagttaccctctgaaattaatagcgaagaatgctggtgttaatggtagtgttgtgagtgagaaggttctgtccagcgacaatccaaaatatggttataatgctgccacaggcaaatatgaagatttaatggctgcagggatcattgatccaacaaaggtggtcagatgttgcctggaacatgcatcctctgttgccaaaaccttcttaatgtcagactgcgttgttgttgagataaaggaacctgaatcggcacctgttggcaaccccatggacaattcaggatatggtaatatctag

SEQ ID NO: 9785 - protein, 595 aa, Pisum sativum
MASTFSATTSSCNLSSSAAISSFPLAAGKRNANKVVLPRKNRNVKVSAMAKELHFNKDGSAIKKLQNGVNKLADLVGVTLGPKGRNVVLESKYGSPKIVNDGVTVAKEVELEDPVENIGAKLVRQAAAKTNDLAGDGTTTSVVLAQGLIAEGVKVVAAGANPVLITRGIEKTSKALVAELKKMSKEVEDSELADVAAVSAGNNHEVGNMIAEALSKVGRKGVVTLEEGKSAENSLYVVEGMQFDRGYISPYFVTDSEKMTVEFENCKLLLVDKKITNARDLINILEDAIRSGFPIVIIAEDIEQEALATLVVNKLRGSLKIAALKAPGFGERKSQYLDDIAILTGGTVIREEVGLTLDKADKEVLGNAAKVVLTKDTTTIVGDGSTQEAVNKRVSQIKNQIEAAEQEYEKEKLSERIAKLSGGVAVIQVGAQTETELKEKKLRVEDALNATKAAVEEGIVVGGGCTLLRLASKVDAIKDTLANDEEKVGADIVKRALSYPLKLIAKNAGVNGSVVSEKVLSSDNPKYGYNAATGKYEDLMAAGIIDPTKVVRCCLEHASSVAKTFLMSDCVVVEIKEPESAPVGNPMDNSGYGNI

SEQ ID NO: 9786 - DNA, 1749 bp, Brassica napus
  CDS (1)..(1749)
atggcgtccagtaacgctctctcttccgcctccgtcctctgctcctctcgacagggaaagctgagtggtggaaatcagcagaaaggtcaaagagtaagctacaggagacgtttcagtgtcagagcaaatgtaaaggaaatctctttcgaccagagctcaagagctgctcttcaagctggtatcgacaagcttgctgatgctgttggtctcactcttggccctagagggagaaatgttgtgttggatgaatttggaagccccaaggttgtgaatgacggagtcaccattgccagggctattgagttacctgatgccatggagaatgcaggtgcagcgcttatccgtgaggttgctagtaagactaatgactcagctggtgatgggacaacaactgcatctgtccttgctagggaaataatcaaacacggattattgagtgtcacttctggtgccaatcctgtgtccctcaagaggggaatcgacaagactgttcaagctttgattgaagagcttgagaagaaagctagacctgtcaaaggtggtagtgacatcaaagccgtggctacaatctcagctggaaatgatgagcttgtgggaacaatgattgctgatgccattgacaaagttggacctgatggtgttttgtccattgaatcttcttcctcttttgagactacggtcgaagttgaagaaggaatggagattgacagaggttacatctcacctcagtttgttacaaaccctgagaaactactagttgagtttgagaatgcgagggtgttgatcactgatcagaagatcactgcaatcaaagacatcatccccatcttggagaagaccactcagcttcgagctccattgctgattattgcagaggatgttacaggtgaggccttagcaacccttgtcgtgaacaaactccgtggtgtcctcaatgttgtcgccgtgaaggctcctggatttggagaaagaagaaaggctatgcttcaggatatcgctatcttgacaggagctgagtaccaagcccttgacatgggcttgctggtcgagaacacaacaatagatcagttgggtattgctcgtaaagtcaccataagcaaagattcgactacgcttatcgcagatgcagcttccaaggacgagttacaagctcgtatctctcagctcaagaaagaactattcgagactgattctgtctacgactcagagaagctcgctgagagaatagctaaactctccggtggtgttgcggtcattaaagtgggagcagcgactgaaactgagcttgaggaccgtaagcttcgtattgaggacgcaaagaacgctacatttgctgctatcgaagaaggtatagttcctggtggtggtgccactttggtgcatctctccactgtgattcctgccattaaagagaagctggaggatgctgatgaacgtttgggagctgacatagtacagaaggctttggtggcaccagctgcgcttattgcgcagaacgctggaatcgaaggagaagtggtagtggaaaagattatgttcagtgaatgggagatagggtacaacgccatgactgatacctatgagaatctgttggaagctggagtgatcgatccagctaaagtcacgagatgtgcgcttcagaacgctgcatcggttgcagggatggtactgaccactcaggccattgttgttgacaaacccaaacctaaggctcctgctggtgctcctcctcagggtctcatggtctaa

SEQ ID NO: 9787 - protein, 582 aa, Brassica napus
MASSNALSSASVLCSSRQGKLSGGNQQKGQRVSYRRRFSVRANVKEISFDQSSRAALQAGIDKLADAVGLTLGPRGRNVVLDEFGSPKVVNDGVTIARAIELPDAMENAGAALIREVASKTNDSAGDGTTTASVLAREIIKHGLLSVTSGANPVSLKRGIDKTVQALIEELEKKARPVKGGSDIKAVATISAGNDELVGTMIADAIDKVGPDGVLSIESSSSFETTVEVEEGMEIDRGYISPQFVTNPEKLLVEFENARVLITDQKITAIKDIIPILEKTTQLRAPLLIIAEDVTGEALATLVVNKLRGVLNVVAVKAPGFGERRKAMLQDIAILTGAEYQALDMGLLVENTTIDQLGIARKVTISKDSTTLIADAASKDELQARISQLKKELFETDSVYDSEKLAERIAKLSGGVAVIKVGAATETELEDRKLRIEDAKNATFAAIEEGIVPGGGATLVHLSTVIPAIKEKLEDADERLGADIVQKALVAPAALIAQNAGIEGEVVVEKIMFSEWEIGYNAMTDTYENLLEAGVIDPAKVTRCALQNAASVAGMVLTTQAIVVDKPKPKAPAGAPPQGLMV

SEQ ID NO: 9788 - DNA, 1788 bp, Brassica napus
  CDS (1)..(1788)
atggcttcaaccttcagcgcagcgtcttcaatgggctcatccttagctcctcctgcgagcagattatcatctctcgtctcatcaaactcttttggaaagagtcaagcttttgctcagaggaaagcgaggttccccaagatctacgcggctaagcagttgcatttcaataaagacggcactgccattaggaagcttcaagctggtgtgaacaagctcgcggatctagttggagtcactctaggtcctaaaggcaggaacgttgttctcgagagcaagtacggctcaccaagaatcgttaacgacggtgttacagtcgctagagaggttgagcttgaggatccagttgagaacattggtgctaagctagtgaggcaagctgcttccaagaccaatgacttagccggtgacggaacgaccacttccgttgttcttgcgcaaggtctcatcactgaaggtgtaaaggtggtggctgctggtgcaaacccggtgttgatcaccagaggaatcgagaaaaccaccaaagctcttgttgccgagttaaagaagatgtcaaaagaggtggaagatagtgagcttgcagatgtggcagcagttagtgcaggaaacaactacgaagtaggcaacatgattgcggaagcaatggctaaagttggacgcaaaggtgtggtcactctcgaagaaggcaaaagcgctgagaacagtctctacgtcgttgaagggatgcagtttgaccgtggctacatttctccttactttgtcactgacagtgagaagatgtgcgcagaatacgagaactgcaagatgtttcttgttgacaagaaaataacgaacgctagagacattatcagtatcctggaagatgctatcaaaggtggttacccgcttctgatcattgctgaagatatcgagcaagaggcgttggcgactcttgttgttaataagcttcgtggtactatcaaagttgctgctctgaaagctcccggatttggagagaggaagagtcagtaccttgatgacattgctgctcttacaggagctactgtgattagggaagaagttggactacagctggagaaagttggagcagaagttttgggtaatgctggtaaagtggttctcacaaaagacactacgaccatagttggtgatggaagtactgaagaggttgtgaagaagagagttgaacagatcaagaatcttatcgaggctgctgagcaagattatgagaaggaaaagcttaatgagagaatcgctaaattatcaggcggtgttgctgtgattcaggttggagcacaaactgagacagagcttaaggagaagaaactgagagttgaagatgctcttaatgctacaaaggcggctgtggaagaaggtattgttgttggaggtggatgcactctgctaagacttgcatccaaagtggatgctgttaaagagagtctagcaaatgatgaagaaaaggttggagctgacattgttaagaaagcattgagctacccattgaagttaatcgccaagaatgctggtgttaatggcagtgttgtcagcgaaaaggtactctctagcgacgacccaaagcatggttacaacgctgcaacaggcaaatacgaagatctgatggctgcaggaatcattgatccaaccaaagttgtgagatgttgcttagagcatgcttcatcagtggctaagacattcttgatgtctgattgtgtggttgtggagatcaatgagcctgaatcagcagctcctgctggtaaccctatgggcaactcaggttatggcttctaa

SEQ ID NO: 9789 - protein, 595 aa, Brassica napus
MASTFSAASSMGSSLAPPASRLSSLVSSNSFGKSQAFAQRKARFPKIYAAKQLHFNKDGTAIRKLQAGVNKLADLVGVTLGPKGRNVVLESKYGSPRIVNDGVTVAREVELEDPVENIGAKLVRQAASKTNDLAGDGTTTSVVLAQGLITEGVKVVAAGANPVLITRGIEKTTKALVAELKKMSKEVEDSELADVAAVSAGNNYEVGNMIAEAMAKVGRKGVVTLEEGKSAENSLYVVEGMQFDRGYISPYFVTDSEKMCAEYENCKMFLVDKKITNARDIISILEDAIKGGYPLLIIAEDIEQEALATLVVNKLRGTIKVAALKAPGFGERKSQYLDDIAALTGATVIREEVGLQLEKVGAEVLGNAGKVVLTKDTTTIVGDGSTEEVVKKRVEQIKNLIEAAEQDYEKEKLNERIAKLSGGVAVIQVGAQTETELKEKKLRVEDALNATKAAVEEGIVVGGGCTLLRLASKVDAVKESLANDEEKVGADIVKKALSYPLKLIAKNAGVNGSVVSEKVLSSDDPKHGYNAATGKYEDLMAAGIIDPTKVVRCCLEHASSVAKTFLMSDCVVVEINEPESAAPAGNPMGNSGYGF

SEQ ID NO: 9790 - DNA, 1734 bp, Brassica napus
  CDS (1)..(1734)
atgtttcgtttcgtgtccagtctcgcctccaaggctaggattgcaagtaacacaagacaggtttccagcagaatgagctggagcaggaactatgcagcgaaagagattaaatttggggttgaagctcgtgccttgatgcttagaggtgttgaagagcttgctgatgctgttagagtcactatgggtcccaagggacgtactgttgtgattgagcaaagttggggtgctcctaaagtgactaaagatggtgtcaccgttgccaagagcattgagtttaaggataaagtgaagaacgttggtgctagtcttgtgaagcaggttgctaatgctactaatgatgttgctggtgatggtactacgtgtgctactgtgctcaccagggcgatattcacggaaggctgcaaatcagttgcagcaggaatgaacgctatggacctgaggagaggtatctccatggcggttgatgctgtggtgacaaaccttaaaagcagggcgaggatgatcagcacgtctgaggagattgctcaggttgggaccatttctgcgaatggagagagggagattggtgaacttatcgcaaaggctatggagaaggttggcaaagaaggtgtgatcacaatccaagatggaaagacgttgattaatgagttggaagttgtagaagggatgaagttggacagaggttatacttccccttactttatcaccaatcagaaaactcaaaaatgtgaactggaagagcctctcattcttatccatgagaagaagatctcctccatcaactctatagtgaaagtgttggagttggctatgaagaaacaaagaccgctgttgattgtctctgaagatgtggaaagtgaagctcttgcaactcttatccttaacaagctacgtgctggaatcaaggtttgtgccatcaaggccccagggtttggagagaacaggaaggccaacttgcaagaccttgctgcccttactggtggagaggttatcacggatgagcttggcatgaacctagagaaggtggatttgggcatgctagggacctgcaaaagggttactgtttccaaggatgacactgttattcttgatggggctggcgacaagacggccattgaggaaagatgcgagcagattagatcagcaattgaactgagcacctcggattatgacaaggagaaactgcaagaaagattagctaagctttctggaggagttgctgttttgaagattggaggagcaagtgaagctgaggttggtgagaagaaagacagagtgacagacgctttgaatgccactaaagcagctgttgaagagggtattttgccaggaggaggtgtggctcttctgtacgcagcgagagagttagagaaacttccaacagccaactttgaccagaagattggtgtgcagatcattcagaacgctttgaagactcctgttcacacaatagcttcaaacgctggagttgaaggtgctgttatagttggcaagctcttggagcaagataacacagaccttggttatgatgctgctaaaggtgaatatgtggatatggtgaaagctggtatcattgatcctctgaaagtgatcaggaccgctttggttgatgctgccagtgtgtcatctctgttgacgacaactgaagctgtagtcgtggatcttcctaaagatgaaagcgagtccgcaggagctggagcaggcatgggtggaatgggaggcatggattattaa

SEQ ID NO: 9791 - protein, 577 aa, Brassica napus
MFRFVSSLASKARIASNTRQVSSRMSWSRNYAAKEIKFGVEARALMLRGVEELADAVRVTMGPKGRTVVIEQSWGAPKVTKDGVTVAKSIEFKDKVKNVGASLVKQVANATNDVAGDGTTCATVLTRAIFTEGCKSVAAGMNAMDLRRGISMAVDAVVTNLKSRARMISTSEEIAQVGTISANGEREIGELIAKAMEKVGKEGVITIQDGKTLINELEVVEGMKLDRGYTSPYFITNQKTQKCELEEPLILIHEKKISSINSIVKVLELAMKKQRPLLIVSEDVESEALATLILNKLRAGIKVCAIKAPGFGENRKANLQDLAALTGGEVITDELGMNLEKVDLGMLGTCKRVTVSKDDTVILDGAGDKTAIEERCEQIRSAIELSTSDYDKEKLQERLAKLSGGVAVLKIGGASEAEVGEKKDRVTDALNATKAAVEEGILPGGGVALLYAARELEKLPTANFDQKIGVQIIQNALKTPVHTIASNAGVEGAVIVGKLLEQDNTDLGYDAAKGEYVDMVKAGIIDPLKVIRTALVDAASVSSLLTTTEAVVVDLPKDESESAGAGAGMGGMGGMDY

SEQ ID NO: 9792 - DNA, 1755 bp, Glycine max
  CDS (1)..(1755)
atggcctcaaccaacgccctctcttcagcttccattctacgctctcccaaccgccagtctctgaccagaagagcgaaccacaacggaagagtaaattaccgtcaaccgaatagccgtttctccgtcaaagcctccgccaaagagattgcctttgaccagcattcccgctctgctatgcaggccggcattgacaagctcgccgacgccgtcgggctcactcttgggcccagggggaggaatgttgtgttggatgagtttggaagtcctaaagtggttaacgatggtgtcaccattgctcgcgccatcgagctcccagatcctatggaaaatgccggtgcagctcttattagagaggttgctagtaagactaacgactctgccggtgatgggacgaccacggcttcggttcttgctcgcgagataattaagctggggcttcttagtgtgacttctggggctaatcctgtgtctcttaagagagggattgataaaactgtgcagggtttggtggaggagttggagaagaaggccaggcctgtgaaaggtggagatgatatcaaagctgttgcttccatttctgctgggaatgatgagttgattgggcaaatgattgcggaagcaattgataaggttggacctgatggtgttttgtccattgagtcttcgtcttcatttgagaccacagttgaagtggaagaaggaatggagattgacagagggtatatctcgcctcaatttgtgacaaaccctgagaagttgattgttgaatttgagaatgcgagagtgttgatcacggatcagaagatttcagcaataaaagatattataccactgttggagaaaaccactcagttgagagctcctttgcttatcattgctgaggatgtcactggtgaggctttggccacccttgttgtgaataagctacgtggtatccttaacgttgctgccatcaaagctcctggctttggtgagcggcgaaaggccctgcttcaagacattgctatattgactggtgctgagttccaagctagtgatctgggtctgcttgttgaaaacacctcagtggagcagcttggcttggctcggaaaattaccatctccaaggattctaccactatcattgctgatgctgcaacaaaggatgagctgcaagccagggttgctcagttaaagaaggagctgtcacagacagactcagtatatgatactgagaaactggctgagaggatagctaaactgtctggtggagttgcagtcatcaaggttggtgctgccacagagaccgagcttgaggatcgtaagctccgaattgaggatgccaagaatgcaacttttgctgccattgaggaaggtattgtacctggtggaggtactgcactggttcatctctccactcatgtcccagcactcaaggacaagcttgatgatgcagatgagaggctaggagccgacattgtgcaaaaggcactgatagctcctgcagcattgattgctcaaaatgctggaatagaaggtgaagttgttgtggagaaaataaagagtggtgaatgggaggtcggttacaatgctatggtagacaggtatgagaatttagtggaggctggagttatcgaccctgccaaggtaacaaggtgtgcattgcagaatgctgcttcagttgctggaatggtgttgaccacacaggccattgtggtggaaaaacctaagcccaaggcacctgtagctggtgccccacaaggccttaccgtttaa

SEQ ID NO: 9793 - protein, 584 aa, Glycine max
MASTNALSSASILRSPNRQSLTRRANHNGRVNYRQPNSRFSVKASAKEIAFDQHSRSAMQAGIDKLADAVGLTLGPRGRNVVLDEFGSPKVVNDGVTIARAIELPDPMENAGAALIREVASKTNDSAGDGTTTASVLAREIIKLGLLSVTSGANPVSLKRGIDKTVQGLVEELEKKARPVKGGDDIKAVASISAGNDELIGQMIAEAIDKVGPDGVLSIESSSSFETTVEVEEGMEIDRGYISPQFVTNPEKLIVEFENARVLITDQKISAIKDIIPLLEKTTQLRAPLLIIAEDVTGEALATLVVNKLRGILNVAAIKAPGFGERRKALLQDIAILTGAEFQASDLGLLVENTSVEQLGLARKITISKDSTTIIADAATKDELQARVAQLKKELSQTDSVYDTEKLAERIAKLSGGVAVIKVGAATETELEDRKLRIEDAKNATFAAIEEGIVPGGGTALVHLSTHVPALKDKLDDADERLGADIVQKALIAPAALIAQNAGIEGEVVVEKIKSGEWEVGYNAMVDRYENLVEAGVIDPAKVTRCALQNAASVAGMVLTTQAIVVEKPKPKAPVAGAPQGLTV

SEQ ID NO: 9794 - DNA, 1803 bp, Brassica napus
  CDS (1)..(1803)
atggcatcaaccttcactgcaacgtcttccattggctccatggttgctccaaatgcccacaaaacggataagaagcttatgaacaagttgtcttcaagctctttcgggaggaggcagaacgtgttccccaagctcagaagatccagtcctgcagttgtatgtgcagccaaggagttacatttcaacaaagacgggactaccatcaggaagcttcaagctggtgtcaacaagcttgcagaccttgttggtgtgacacttggacctaaagggcgaaacgttgttcttgagagcaagtatggatcaccaagaattgttaatgatggtgtgactgttgcaagggaggttgaattggaagaccctgttgagaacattggtgccaaacttgttaggcaagcagctgccaagaccaatgatctggccggtgatggtaccacaacatctgtggttcttgcacaaggttttattgctgagggtgtcaaggtggtggctgctggtgcaaaccctgtattgatcactagaggcattgagaagacagcaaaggctttggtagccgagctcaagaaaatgtctaaggaggttgaagacagtgagcttgcagatgtggcagccgttagtgccggtaacaatgcagaaattggaagcatgattgctgaagcaatgagcagagtgggcaggaagggtgtggtgacacttgaggagggtaaaagtgcagagaacgctctctacgtggtggaaggaatgcaatttgatcgaggttatgtctccccttactttgtgacagacagtgagaaaatgtcagttgagttcgacaattgcaagttgcttcttgttgacaagaaaattaccaatgcaagggatcttgttggtgttctggaggatgcaattagaggaggatacccaattctaataattgcagaagacattgagcaggaggcattagcgacccttgtagttaacaagcttagaggcacactgaagattgcagctctcaaagctccaggatttggagagcgcaagagccaataccttgacgatattgccatcctcactggagcaactgtgattcgtgaggaagttggtctttcactagacaaagctggaaaagaggttcttggacatgcagcaaaagttgtcctcactaaggagacttcgaccattgtgggtgatgggagcacacaggacgcagtgcaaaagcgtgttacacaaattaagaaccttattgagcaagcagagcaagactatgagaaggaaaaactgaatgagagaattgcaaagctctctggtggagttgctgtgattcaggtcggagcacaaactgagacagaactcaaagagaagaaactgagagttgaagatgctcttaatgctacaaaggctgctgttgaggaaggaattgtggttggtggtggttgtactctgcttcgtcttgcttccaaggtggatgccattaaagccgcccttgacaatgatgaagaaaaggttggagcggatatcgtgaaaagagcactgagttaccctctgaaactgattgccaagaatgcaggagtcaatggaagcgttgttagcgagaaggtgctttctaacgataacgtgaagttcggttacaatgctgcaaccggcaagtacgaggatctaatggctgcaggaatcatcgatccaactaaggttgtgagatgttgcttggaacatgcagcttcggttgcaaagacattcttgatgtctgactgtgtcgttgttgagatcaaggagcctgagccagttcccgtaggcaacccaatggacaactcaggatatggatactga

SEQ ID NO: 9795 - protein, 600 aa, Brassica napus
MASTFTATSSIGSMVAPNAHKTDKKLMNKLSSSSFGRRQNVFPKLRRSSPAVVCAAKELHFNKDGTTIRKLQAGVNKLADLVGVTLGPKGRNVVLESKYGSPRIVNDGVTVAREVELEDPVENIGAKLVRQAAAKTNDLAGDGTTTSVVLAQGFIAEGVKVVAAGANPVLITRGIEKTAKALVAELKKMSKEVEDSELADVAAVSAGNNAEIGSMIAEAMSRVGRKGVVTLEEGKSAENALYVVEGMQFDRGYVSPYFVTDSEKMSVEFDNCKLLLVDKKITNARDLVGVLEDAIRGGYPILIIAEDIEQEALATLVVNKLRGTLKIAALKAPGFGERKSQYLDDIAILTGATVIREEVGLSLDKAGKEVLGHAAKVVLTKETSTIVGDGSTQDAVQKRVTQIKNLIEQAEQDYEKEKLNERIAKLSGGVAVIQVGAQTETELKEKKLRVEDALNATKAAVEEGIVVGGGCTLLRLASKVDAIKAALDNDEEKVGADIVKRALSYPLKLIAKNAGVNGSVVSEKVLSNDNVKFGYNAATGKYEDLMAAGIIDPTKVVRCCLEHAASVAKTFLMSDCVVVEIKEPEPVPVGNPMDNSGYGY

SEQ ID NO: 9796 - DNA, 1761 bp, Brassica napus
  CDS (1)..(1761)
atgtatagactcgtctccagcattgcttcaaaagctagagttgccagaaactgtacatcccagattggaagcagactcagttccactaggaattatgcagcgaaagacataaggttcggtgttgagggtcgtgctttgatgcttagaggtgtcgaggagcttgctgatgctgttaaagtcactatgggaccaaagggtcgtaatgtcatcatcgaacaaagctggggtgcacctaaggtgacaaaggatggtgtaactgttgccaagagcattgagttcaaggacggagtcaagaacgttggtgccagtcttgtcaaacaggttgctaacgccaccaatgacgttgctggtgatggaacaacgtgtgctacggttcttactagagctatcttcacggaaggctgtaaatcagtcgctgctggaatgaatgcaatggacttaagacgtggtatcaaactggctgttgacaccgttgtgaccaacttcaagagccgagcacgcatgattagcacttctgaggaaattgctcaagttggaaccatatcagctaatggagatagagaattggtgactgattgcaaggctatggagagtgttggcaaagagggagtcatcacaatccaagatggcaagaccttgtttaacgagcttgaagttgttgagggtatgaagattgacaggggatacatctccccatacttcattacaaaccagaagaaccaaaaatgtgaactagaagatcctctcattctaatccacgagaagaaaatctccaatttaaattctatggtgaaagtcttagaacttgccctcaagagtcaaaggtcgctgttgatcgttgcggaggatttggagagtgatgctcttgccgtgctaattctaaacaagctccgtgctggaattaaggtctgtgctgtgaaggctcctggttttggagaaaaccgtaaggcaaacatgcacgatctagctaccctcaccggagcccaggtaataacagaagagttgggtatgaatcttgagaaaattgacctcagtatgcttggaaactgcaaaaagataactgtatccaaagacgacactgttttccttggatggggggctggtgacaagaaagcaattggggaacgatgtgaacagatacgatccatggttgaagcgagcgaatctgactatgacaaggagaagctacaagaaaggttggctaagctttctggtggtgttgctgtactaaagattggaggagcgagcgagtcagaagttggagaaaagaaagatagagtaaccgatgctctaaatgccaccaaagcagctgttgaagagggtattgttccaggtggtggtgttgctcttttgtacgcgtcaaaagaacttgacaagctttcaacagctaactttgatcacaaaatcggtgtccaaatcatccaaaacgctctcaagacacctgtttacaccattgcttccaacgctggagtcgagggtgcagtcatcgtaggcaagcttttggaatcagataatcctgacctcggttacgatgctgctaaaggagaatacgttgatatggtaaagtctggtattatcgaccctgtgaaagtgatcagaaccgcattggttgatgctgcaagtgtcgcatctttgttgacaacaacggaagcagttgtgactgagattccaactaaagaggatgcgtctccagctatgggcggtggtggcggcatgggtggcatgggaggtatgggcggtatgggaggaatgggtttctga

SEQ ID NO: 9797 - protein, 586 aa, Brassica napus
MYRLVSSIASKARVARNCTSQIGSRLSSTRNYAAKDIRFGVEGRALMLRGVEELADAVKVTMGPKGRNVIIEQSWGAPKVTKDGVTVAKSIEFKDGVKNVGASLVKQVANATNDVAGDGTTCATVLTRAIFTEGCKSVAAGMNAMDLRRGIKLAVDTVVTNFKSRARMISTSEEIAQVGTISANGDRELVTDCKAMESVGKEGVITIQDGKTLFNELEVVEGMKIDRGYISPYFITNQKNQKCELEDPLILIHEKKISNLNSMVKVLELALKSQRSLLIVAEDLESDALAVLILNKLRAGIKVCAVKAPGFGENRKANMHDLATLTGAQVITEELGMNLEKIDLSMLGNCKKITVSKDDTVFLGWGAGDKKAIGERCEQIRSMVEASESDYDKEKLQERLAKLSGGVAVLKIGGASESEVGEKKDRVTDALNATKAAVEEGIVPGGGVALLYASKELDKLSTANFDHKIGVQIIQNALKTPVYTIASNAGVEGAVIVGKLLESDNPDLGYDAAKGEYVDMVKSGIIDPVKVIRTALVDAASVASLLTTTEAVVTEIPTKEDASPAMGGGGGMGGMGGMGGMGGMGF

SEQ ID NO: 9798 - DNA, 1758 bp, Brassica napus
  CDS (1)..(1758)
atggcgactgcaaacgctctctcctccccatctgtcctctgctcttcacgacagggaaagctgagtggtggaagtcagcagaaaggtcaaagagtaagctacaggaaagctaacagacgcttcagcgttagagccagtgtaaaggagattgctttcgaccagagctcaagagctgctcttcaagcgggtatcgacaagcttgctgatgctgttggtctcactcttggccctagagggaggaatgttgtgttggatgagtttggtagccccaaggttgtgaacgatggagtcaccatcgctagagccattgagttacctgacgccatggagaacgctggtgcagcactcatccgtgaggttgcgagtaagactaatgactcagctggcgacgggacaacaactgcttccgtcctggctcgggaaatcatcaaacacggtctgttgagcgtcacttccggcgccaatcctgtctccctcaagagaggaatcgacaagaccgttcaagctttgatagaagagcttgagaagagagctagacctgtcaaaggcggtagtgacatcaaagccgtggctacaatctcagctggaaacgatgagcttatgggagcgatgatcgctgacgccattgacaaagtgggacctgatggtgttctctccattgaatcctcatcctcctttgagaccaccgtcgaagtcgaagaagggatggagattgacagaggctacatctcacctcagttcgttaccaaccccgagaagctactcgtcgagttcgagaacgcgagggtgttgatcactgatcagaagatcactgccatcaaagacatcatcccaatcttggagaagaccactcagcttcgagctccgttgctgatcatcgcagaggatgtcacaggggaggccttagcaactctggttgtgaacaaactccgcggtgttctcaacgttgtcgccgttaaagctccagggttcggagaaaggagaaaagctatgcttcaggatatagcaatcttgacgggagctgagtaccaggcccttgacatgggcctgctggtcgagaacacgaccatagatcagttggggattgctagaaaagtgactatcagcaaagactcgaccacgcttatagccgacgcagcttccaaggacgagcttcaagctcgtatctcccagctgaagaaggagctcttcgagactgactctgtgtatgactcggagaagctcgctgagaggattgctaagctctctggtggtgttgccgtcattaaagtcggagcagcgactgagaccgagctcgaggaccgtaagcttcgtattgaggatgcaaagaacgcaacgttcgctgctatcgaggaaggaatagttcccggtggtggcgccacgttggtgcatctctccactgtgattcccgccattaaggagacgtttgaggacgctgatgaacgtttgggagctgatatagtacagaaggcattggtggcaccagctgcgcttattgcgcagaacgctggaatcgaaggggaagttgtggtggagaagattatgttcagtgaatgggagctagggtacaacgccatgactgatacctatgagaatctgttggaagcgggagtgattgatccagctaaagtgacgagatgtgcgctgcagaacgctgcttcggttgcagggatggtgctgaccactcaggccattgttgttgacaaacctaaacccaaggctcctgctgctgctgcacctgagggcctcatggtgtaa

SEQ ID NO: 9799 - protein, 585 aa, Brassica napus
MATANALSSPSVLCSSRQGKLSGGSQQKGQRVSYRKANRRFSVRASVKEIAFDQSSRAALQAGIDKLADAVGLTLGPRGRNVVLDEFGSPKVVNDGVTIARAIELPDAMENAGAALIREVASKTNDSAGDGTTTASVLAREIIKHGLLSVTSGANPVSLKRGIDKTVQALIEELEKRARPVKGGSDIKAVATISAGNDELMGAMIADAIDKVGPDGVLSIESSSSFETTVEVEEGMEIDRGYISPQFVTNPEKLLVEFENARVLITDQKITAIKDIIPILEKTTQLRAPLLIIAEDVTGEALATLVVNKLRGVLNVVAVKAPGFGERRKAMLQDIAILTGAEYQALDMGLLVENTTIDQLGIARKVTISKDSTTLIADAASKDELQARISQLKKELFETDSVYDSEKLAERIAKLSGGVAVIKVGAATETELEDRKLRIEDAKNATFAAIEEGIVPGGGATLVHLSTVIPAIKETFEDADERLGADIVQKALVAPAALIAQNAGIEGEVVVEKIMFSEWELGYNAMTDTYENLLEAGVIDPAKVTRCALQNAASVAGMVLTTQAIVVDKPKPKAPAAAAPEGLMV

SEQ ID NO: 9800 - DNA, 1788 bp, Brassica napus
  CDS (1)..(1788)
atggctccaaccttcagcgcaacgtcttcaatgggctcatccttagctcctcctgcgagcagattatcatctctcgtctcatcaaactcttttggaaagagtcaagcttttgctcagaggaaagcgaggttccccaaaatctacgcggccaagcagctgcatttcaataaagacggcactgccataaggaagcttcaagctggtgtgaacaagctcgcggatctagttggagtcactctaggtcctaaaggcaggaacgttgttctcgagagcaaatacggctcaccaagaatcgttaacgacggtgttacagtcgctagagaggttgagcttgaggatccagttgagaacattggtgctaagctagtgaggcaagctgcttccaagaccaatgacttagccggtgacggaacaaccacttccgttgttcttgcgcaaggtctcatcactgaaggtgtaaaggtggtggctgctggtgcaaacccggtgttgatcaccagaggaatcgagaaaaccaccaaagctcttgttgccgagttaaagaagatgtcaaaagaggtggaagatagtgaactcgcagatgtagcagcagtaagtgcaggaaacaactacgaagtaggcaacatgattgcggaagcaatggctaaagttggccgtaaaggcgttgtcactctggaagaaggaaaaagcgcagagaacagtctctacgttgttgaagggatgcaattcgatcgtggctacatttctccttactttgtcactgatagtgagaaaatgtgtgctgaatacgagaactgcaagttgtttcttgttgacaagaaaataacaaatgctagagacattatcagtattcttgaagatgctatcaaaggtggatacccgcttctgatcattgctgaagacatcgagcaagagccattagcgactcttgttgttaacaagcttcgtggtactataaaaattgctgctctaaaagctcccggatttggagagaggaagagtcagtaccttgatgacattgctgctcttacaggagctactgtaattagggaagaagttggactacagctggagaaagttggaccagaagttttgggtaatgctggtaaagtggttctcacaaaagacactacgaccatagttggtgatggaagtactgaagaggttgtgaagaagagagttgaacagatcaagaatcttatcgaggctgctgagcaagactatgagaaggaaaagcttaatgagagaatcgctaaattatcaggcggtgttgctgtgattcaggttggagcacaaactgagacagagcttaaggagaagaaactgagagttgaagatgctcttaatgctacaaaggcggctgtggaagaaggtattgttgttggaggtggatgcactctgctaagacttgcatccaaagtggatgctgttaaagagagtctagcaaatgatgaagaaaaggttggagctgacattgttaagaaagcattgagctacccattgaagttaatcgccaagaacgctggtgttaatggcagtgttgtcagcgaaaaggtactctctagcgacgacccaaagcatggttacaacgctgcaacaggcaaatacgaagatctgatggctgcaggaatcattgatccaaccaaagttgtgagatgttgcttagagcatgcttcatcagtggctaagacattcttgatgtctgattgtgtggttgtggagatcaatgagcctgaatcagcagctcctgctggtaaccctatgggcaactcaggttatggcttctaa

SEQ ID NO: 9801 - protein, 595 aa, Brassica napus
MAPTFSATSSMGSSLAPPASRLSSLVSSNSFGKSQAFAQRKARFPKIYAAKQLHFNKDGTAIRKLQAGVNKLADLVGVTLGPKGRNVVLESKYGSPRIVNDGVTVAREVELEDPVENIGAKLVRQAASKTNDLAGDGTTTSVVLAQGLITEGVKVVAAGANPVLITRGIEKTTKALVAELKKMSKEVEDSELADVAAVSAGNNYEVGNMIAEAMAKVGRKGVVTLEEGKSAENSLYVVEGMQFDRGYISPYFVTDSEKMCAEYENCKLFLVDKKITNARDIISILEDAIKGGYPLLIIAEDIEQEPLATLVVNKLRGTIKIAALKAPGFGERKSQYLDDIAALTGATVIREEVGLQLEKVGPEVLGNAGKVVLTKDTTTIVGDGSTEEVVKKRVEQIKNLIEAAEQDYEKEKLNERIAKLSGGVAVIQVGAQTETELKEKKLRVEDALNATKAAVEEGIVVGGGCTLLRLASKVDAVKESLANDEEKVGADIVKKALSYPLKLIAKNAGVNGSVVSEKVLSSDDPKHGYNAATGKYEDLMAAGIIDPTKVVRCCLEHASSVAKTFLMSDCVVVEINEPESAAPAGNPMGNSGYGF

SEQ ID NO: 9802 - DNA, 1758 bp, Brassica napus
  CDS (1)..(1758)
atggcgactgcaaacgctctctcctctccctctgtcctctgctcttcacgacagggaaagctgagtggtggaagtcagcagaaaggtcaaagagtaagctacaggaaagcaaacagacgcttcagcgttagagcaaatgtaaaggagattgctttcgaccagagctcaagagctgctcttcaagctggtatcgacaagcttgctgatgctgttggtctcactcttggccctagagggaggaatgttgtgttggatgagtttggtagccccaaggttgtgaacgatggagtcaccatcgctagggccattgagttacctgacgccatggagaacgctggtgcagcactcatccgcgaggttgcgagtaagactaatgactcagctggcgacgggacaacaactgcttccgtcctggctcgggaaatcatcaaacacggtctgttgagcgtcacttccggcgccaatcctgtctccctcaagagaggaatcgacaagaccgttcaagctttgatagaagagcttgagaagagggctagacctgtcaaaggcgggagcgacatcaaagccgtggctacaatctcagctggaaacgatgagcttattggagcgatgatcgctgacgccattgacaaagtgggacctgatggtgttctctccattgagtcctcatcctcctttgagaccaccgtcgaagtcgaagaagggatggagattgacagaggctacatctcgcctcagttcgttaccaaccccgagaagctactcgtcgagttcgagaacgcgagggtgttgatcactgaccagaagatcactgccatcaaagacatcatcccaatcttggagaagaccactcagcttcgagctccgttgctgatcatcgctgaggatgtcacaggcgaggccttagcaactctggttgtgaacaaactccgcggtgttctcaacgttgttgctgttaaagctccagggttcggagaaaggagaaaagctatgcttcaggatatagctatcttgactggagctgagtaccaggcccttgacatgggccttctggtcgagaacacgaccatagatcagttggggattgctagaaaagttactatcagcaaagactcgaccacgcttatagccgacgcagcttccaaggacgagctgcaagctcgtatctcccagctgaagaaggagctcttcgagactgactctgtgtatgactcggagaagctcgctgagaggattgctaagctctctggtggtgttgccgtcattaaagtcggagcagcgactgagaccgagctcgaggaccgtaagcttcgtattgaggatgcaaagaacgccacgttcgctgctatcgaggaaggaatagttcccggtggtggcgccacgttggtgcatctctccactgtgattcccgccattaaggagacgtttgaggacgctgatgaacgtttgggagctgatatagtacagaaggcattggtggcaccagctgcgcttattgcgcagaacgctggaatcgaaggggaagttgtggtggagaagattatgttcagtgaatgggagctagggtacaacgccatgactgatacctatgagaatctgttggaagctggagtgattgatccagctaaagtgacgagatgtgcgctgcagaacgctgcttcggttgcagggatggtgctgaccactcaggccattgttgttgacaaacctaaacccaaggctcctgctgctgctgcacctgagggcctcatggtgtaa

SEQ ID NO: 9803 - protein, 585 aa, Brassica napus
MATANALSSPSVLCSSRQGKLSGGSQQKGQRVSYRKANRRFSVRANVKEIAFDQSSRAALQAGIDKLADAVGLTLGPRGRNVVLDEFGSPKVVNDGVTIARAIELPDAMENAGAALIREVASKTNDSAGDGTTTASVLAREIIKHGLLSVTSGANPVSLKRGIDKTVQALIEELEKRARPVKGGSDIKAVATISAGNDELIGAMIADAIDKVGPDGVLSIESSSSFETTVEVEEGMEIDRGYISPQFVTNPEKLLVEFENARVLITDQKITAIKDIIPILEKTTQLRAPLLIIAEDVTGEALATLVVNKLRGVLNVVAVKAPGFGERRKAMLQDIAILTGAEYQALDMGLLVENTTIDQLGIARKVTISKDSTTLIADAASKDELQARISQLKKELFETDSVYDSEKLAERIAKLSGGVAVIKVGAATETELEDRKLRIEDAKNATFAAIEEGIVPGGGATLVHLSTVIPAIKETFEDADERLGADIVQKALVAPAALIAQNAGIEGEVVVEKIMFSEWELGYNAMTDTYENLLEAGVIDPAKVTRCALQNAASVAGMVLTTQAIVVDKPKPKAPAAAAPEGLMV

SEQ ID NO: 9804 - DNA, 1779 bp, Brassica napus
  CDS (1)..(1779)
atggctccaaccttcagcgcaacgtcttcaatgggctcatccttagctcctcctgcgagcagattatcatctctcgtctcatcaaactcttttggaaagagtcaagcttttgctcagaggaaagcgaggttccccaaaatctacgctgccaagcagctgcatttcaataaagacggcactgcgataaggaagcttcaagctggtgtgaacaagctcgcggatctagttggagtcactctaggtcctaaaggcaggaacgttgttctcgagagcaaatacggctctccaagaatcgttaacgacggtgttacagtcgctagagaggttgagcttgaggatccagttgagaacattggtgctaagctagtgaggcaagctgcttccaagactaatgacttagctggtgatggaacaacgacttccgttgttcttgcgcaaggtctcatcgctgaaggtgtcaaggtggtggctgctggtgcaaacccggtgttgattaccagaggaatcgagaaaaccaccaaggctcttgtcgccgagttgaagaagatgtcaaaagaggtcgaagatagtgaactcgcagatgtagcagctgtaagtgcaggaaacaactacgaagtaggcaacatgattgcggaagcaatggctaaagttggccgtaaaggcgttgtcactctggaagaaggaaaaagcgcagagaacagtctctacgttgttgaagggatgcaattcgatcgtggctacatttctccttactttgtcactgatagtgagaaaatgtgtgctgaatacgagaactgcaagttgtttcttgttgacaagaaaataacaaatgctagagacattatcagtattcttgaagatgctatcaaaggtggatacccgcttctgatcattgctgaagacatcgagcaagagccattagcgactcttgttgttaacaagcttcgtggtactataaagattgctgctttaaaagctcctgggtttggagagaggaagagtcagtaccttgatgacattgctgctcttacaggagctactgtaattagggaagaggttgggcttcagttggagaaagttggaccagaggttttgggtaatgctggtaaagtggttctcacaaaagacactacgactattgttggtgatggaagtactgaagaagttgtgaagaagagagttgaacagatcaagaatcttatcgaggctgctgaacaagactatgagaaggaaaagcttaatgagagaatcgctaaattatcaggcggtgttgctgtaatccaggttggagcacaaactgagacagagcttaaggagaagaaattgagagttgaagatgctcttaatgctacaaaggcggctgtggaagaaggtattgttgttggaggtggatgcactctgctaagacttgcagcaaaagtggatgccattaaagcgactctagcaaacgatgaagaaaaggttggagctgagattgttaagaaagcattgagttacccattgaagttaatcgccaagaacgctggtgttaatggtagcgttgtcagcgaaaaggtactctctagcgacaaccctaaacacggttacaacgctgcaactggcaaatacgaagatcttatgtctgcaggaatcattgatccaaccaaagttgtgagatgttgcttagagcatgcttcatctgtggctaagacattcttgatgtctgattgtgtggttgtggagatcaaggagcctgaatcagcagctcctgccatggataattcaggttatggcttctaa

SEQ ID NO: 9805 - protein, 592 aa, Brassica napus
MAPTFSATSSMGSSLAPPASRLSSLVSSNSFGKSQAFAQRKARFPKIYAAKQLHFNKDGTAIRKLQAGVNKLADLVGVTLGPKGRNVVLESKYGSPRIVNDGVTVAREVELEDPVENIGAKLVRQAASKTNDLAGDGTTTSVVLAQGLIAEGVKVVAAGANPVLITRGIEKTTKALVAELKKMSKEVEDSELADVAAVSAGNNYEVGNMIAEAMAKVGRKGVVTLEEGKSAENSLYVVEGMQFDRGYISPYFVTDSEKMCAEYENCKLFLVDKKITNARDIISILEDAIKGGYPLLIIAEDIEQEPLATLVVNKLRGTIKIAALKAPGFGERKSQYLDDIAALTGATVIREEVGLQLEKVGPEVLGNAGKVVLTKDTTTIVGDGSTEEVVKKRVEQIKNLIEAAEQDYEKEKLNERIAKLSGGVAVIQVGAQTETELKEKKLRVEDALNATKAAVEEGIVVGGGCTLLRLAAKVDAIKATLANDEEKVGAEIVKKALSYPLKLIAKNAGVNGSVVSEKVLSSDNPKHGYNAATGKYEDLMSAGIIDPTKVVRCCLEHASSVAKTFLMSDCVVVEIKEPESAAPAMDNSGYGF

SEQ ID NO: 9806 - DNA, 1728 bp, Glycine max
  CDS (1)..(1728)
atgtatcgcttggcttctaacctcgcttccaaagcaaggattgctaggagtagcagccaacagattggaagtaggctgagtttgagcagaaactatgcggctaaagacattaaatttggtgtggaggctcgggctctgatgcttaagggtgttgaagagcttgctgatgctgtcaaagtaaccatgggtcccaagggccgtaatgttgtgattgagcaaagttttggtgcccctaaagtaaccaaagatggagtaactgttgcaaagagcattgaattcaaggataaagttaagaatgttggtgccagtcttgtaaagcaggttgctaatgctactaatgatgtggctggtgatggaaccacgtgcgctacagtccttacacgagcaatatttactgaaggctgcaaatcagttgcagctggaatgaatgcaatggacctgaggcgtggtataagtatggctgtcgatgctgtggtgacaaacttgaaaagcagagcaaggatgattagcacatctgaagaaatagcacaggttgggacaatatctgccaatggggagagggaaattggtgagttaattgcaaaagctatggagaaagttggcaaagagggtgtcatcacaatctcagatggcaagacattgtacaatgagttggaagttgttgaaggaatgaagctcgacaggggatacatttctccatatttcataacaaaccagaagaaccagaaatgtgaacttgaggatcctctcattataatccatgagaagaaaatctcaagcataaatgctatagttaaagtattagagttggctttgaagagacaaagatctttattgattgtcgccgaggatgtggaaagtgatgcccttgcaactcttattctaaataaacttcgggctggaatcaaggtatgtgccatcaaagctcctggttttggtgaaaaccgtaaatctggtctccaggatcttgctgttcttacaggaggtcaacttatcactgaagagcttggcttgaatcttgaaaaagtggatttggatatgcttggcacctgtaaaaaaataacagtttctaaggatgacactgtcattcttgatggagcaggtgacaagaaagcacttgaggaaagatgcgagcagattagatcagcaattgaaaacagcacctcagattatgacaaggaaaagttacaggaaagattagccaagctttctggcggtgccgcagtgcttaagattggaggagccagtgaagctgaagttggtgagaagaaggatagagtgacagatgccttaaatgcaactaaggctgctgtagaggaaggcattgtatcaggtggtggtgttgctcttctatatgcgtcaaaagagttggataaacttcaaactgctaactttgatcagaagattggtgtccagattatccaaaatgctttaaagacacctgtgctcacaattgcatcaaatgcgggtgttgagggtgcagttgttgttggcaaactattggaacaggagaatcatgatctaggatatgatgcagccaaaggtgaatatgttgatatggttaaagctggaatcatagaccctttgaaggtgattaggacagccttggttgatgcagccagtgtatcatctttgatgacaacaactgaagctgttgtgtctgaacttccaaacgataataaagatactccagctatggctggtggcatgggtggcatgggttattga

SEQ ID NO: 9807 - protein, 575 aa, Glycine max
MYRLASNLASKARIARSSSQQIGSRLSLSRNYAAKDIKFGVEARALMLKGVEELADAVKVTMGPKGRNVVIEQSFGAPKVTKDGVTVAKSIEFKDKVKNVGASLVKQVANATNDVAGDGTTCATVLTRAIFTEGCKSVAAGMNAMDLRRGISMAVDAVVTNLKSRARMISTSEEIAQVGTISANGEREIGELIAKAMEKVGKEGVITISDGKTLYNELEVVEGMKLDRGYISPYFITNQKNQKCELEDPLIIIHEKKISSINAIVKVLELALKRQRSLLIVAEDVESDALATLILNKLRAGIKVCAIKAPGFGENRKSGLQDLAVLTGGQLITEELGLNLEKVDLDMLGTCKKITVSKDDTVILDGAGDKKALEERCEQIRSAIENSTSDYDKEKLQERLAKLSGGAAVLKIGGASEAEVGEKKDRVTDALNATKAAVEEGIVSGGGVALLYASKELDKLQTANFDQKIGVQIIQNALKTPVLTIASNAGVEGAVVVGKLLEQENHDLGYDAAKGEYVDMVKAGIIDPLKVIRTALVDAASVSSLMTTTEAVVSELPNDNKDTPAMAGGMGGMGY

SEQ ID NO: 9808 - DNA, 1731 bp, Zea mays
  CDS (1)..(1731)
atgtaccgcgcggccgctagcctcgcctccaaggcgcggcaagccgggaacagcctcgccgcccgccaggttggaagcaggcttgcctggagcaggaactatgctgcgaaggacatcaagtttggtgttgaggcccgtgctctgatgttgaggggtgttgaggagttggcagatgctgtcaaagtgacaatgggacctaaggggcgcaatgtggttattgagcaaagctttggtgcaccgaaagtcacaaaggatggtgtgactgtagcaaagagcattgaatttaaggatagagtaaagaatgttggtgcaagccttgtgaaacaggttgctaatgcaactaatgacactgctggcgatggtaccacatgtgccactgttttgacaaaagcaatatttactgaggggtgcaaatctgttgcggctggaatgaatgcaatggatttaaggcgtggaatctcaatggctgttgatgctgttgtgaccaatctgaagggcatggccagaatgattagcacttcagaagaaattgcacaggtgggtacaatatcagcaaatggagaaagggaaattggtgagcttattgccaaggctatggagaaggttggcaaagagggtgtgatcactattgcggatggcaacaccctttataatgagcttgaagttgtggagggtatgaaacttgacagaggttacatctctccgtacttcattaccaacccaaaaacccagaaatgtgaattggaagacccattgatcttaattcatgacaagaaggtgacgaacatgcatgctgtggttaaggttttagaaatggctctgaagaaacaaaggcctctactgattgttgcagaagatgtggaaagtgaagcattaggtactctgattattaacaagcttcgtgcaggcatcaaggtctgtgctgtcaaagctcctggttttggggaaaacaggaaggcaaacttacaggaccttgcaatccttactggaggagaggtaataactgaagagctaggaatgaaccttgagaatgttgagcctcacatgctgggttcatgcaaaaaggtgactgtctctaaggatgacactgttattcttgatggcgctggagacaaaaagtctattgaagagagggcagaccagattagatcagcagttgagaacagcacttcagattatgacaaggaaaagctccaggaacggttggcaaagctctctggaggtgttgctgttctgaagattggaggagccagcgaagcagaagttggtgagaagaaggatagagtgacagatgcactgaatgctactaaagctgctgttgaagagggcattgtaccaggtggtggtgttgctcttctctatgcatcgaaggagctcgataagttgcagacagcaaattttgatcagaagattggtgtgcaaatcattcagaatgctttgaagacacctgtacacaccattgcctccaatgctggggtggagggagcagtagttgtgggcaagcttttggagcaaggaaatactgaccttggttatgatgctgctaaagacgaatacgttgacatggtgaaggctggtatcattgatccgctaaaggtcatcagaactgcattggtggatgctgctagtgtgtcgtccctgatgaccaccacggaatccataattgtagagatccccaaggaagaggcaccggctccagcaatgggtggcatgggtggaatggattactaa

SEQ ID NO: 9809 - protein, 576 aa, Zea mays
MYRAAASLASKARQAGNSLAARQVGSRLAWSRNYAAKDIKFGVEARALMLRGVEELADAVKVTMGPKGRNVVIEQSFGAPKVTKDGVTVAKSIEFKDRVKNVGASLVKQVANATNDTAGDGTTCATVLTKAIFTEGCKSVAAGMNAMDLRRGISMAVDAVVTNLKGMARMISTSEEIAQVGTISANGEREIGELIAKAMEKVGKEGVITIADGNTLYNELEVVEGMKLDRGYISPYFITNPKTQKCELEDPLILIHDKKVTNMHAVVKVLEMALKKQRPLLIVAEDVESEALGTLIINKLRAGIKVCAVKAPGFGENRKANLQDLAILTGGEVITEELGMNLENVEPHMLGSCKKVTVSKDDTVILDGAGDKKSIEERADQIRSAVENSTSDYDKEKLQERLAKLSGGVAVLKIGGASEAEVGEKKDRVTDALNATKAAVEEGIVPGGGVALLYASKELDKLQTANFDQKIGVQIIQNALKTPVHTIASNAGVEGAVVVGKLLEQGNTDLGYDAAKDEYVDMVKAGIIDPLKVIRTALVDAASVSSLMTTTESIIVEIPKEEAPAPAMGGMGGMDY

SEQ ID NO: 9810 - DNA, 1734 bp, Glycine max
  CDS (1)..(1734)
atgtaccgctttgcaacctccctcgcctccaaagctagaattgctaggagcagcactcaacagattggaagtagggtcagttggaacaggaattatgctgccaaagacattaagtttggtgtggaggcccgggctttgatgcttaagggtgttgaagagctcgccgatgccgtcaaagtaaccatgggccctaaggggcgtaatgtggttattgagcaaagttttggagcacccaaagtgacaaaagatggagtaaccgttgctaagagcattgaattcaaggataaagtcaagaacatcggtgccagtctcgtaaagcaggttgccaatgctaccaatgatgtggctggtgacggaaccacttgtgctacaattctcactaaagcaatatttacggaagggtgtaaatcagttgcagctggaatgaatgcgatggacctgagacgaggtataaatatggctgttgatactgtggtgacaaatctgaaaagcagagcacggatgattagcacttctgaagaaattgcccaggttggaacaatatctgccaatggggagagggaaattggtgagttaattgcaaaagctatggagaaagttggcaaagagggtgtcatcacaatctcagatggcaagacattgtacaatgagttggaagtcgttgaaggaatgaagctcgacaggggatacatttctccatatttcataacaaaccagaagaaccagaaatgtgaacttgaggatcctctcattataatccatgaaaagaaaatctcaagcataaatgctatcgttaaagtattagagttagctttgaagagacaaagatctttattgattgtcgccgaggatgtggaaagtgatgcccttgcaactcttattctaaataaacttcgtgctggaatcaaggtatgtgccatcaaagctcctggttttggtgaaaaccgtaaatctggtctccaggatcttgctgttcttacaggaggtcaacttatcactgaagagcttggcttgaatcttgaaaaagtagatctggacgtgtttggctcttgcaagaagataacaatttctaaagatgacactgtcatccttgatggagctggtgataagaaagcaattgaggaaagatgtgagcagattagatcagcaattgaaaatagcacttcagattatgacaaggaaaagttacaggaaagattagccaagctttctgggggtgttgcagtactgaagattggaggagccagtgaggctgaagttggtgagaagaaggatagagtgacagatgccttaaatgcaaccaaggcagctgtagaggagggcatagtaccaggtggtggtgttgctcttctctatgcatcaagtgagttggataagcttcaaactgctaactttgatcaaaagataggggtccagatcatccaaaatgctttgaagactcctgtgcacacaattgcttcaaatgccggagttgagggtgctgttgttgttggtaaactattggaacagaatgatcctgatcttggatatgatgcagccaaaggtgaatatgttgatatggttaaagctggaatcattgatccattgaaggttattaggaccgccttggttgatgcagccagtgtgtcatctttgatgacaacaactgaagctattgtgtctgaactcccaaaggacgataaagatgttcctgccatgggtggcatgggtggtatgggtggcatggattattaa

SEQ ID NO: 9811 - protein, 577 aa, Glycine max
MYRFATSLASKARIARSSTQQIGSRVSWNRNYAAKDIKFGVEARALMLKGVEELADAVKVTMGPKGRNVVIEQSFGAPKVTKDGVTVAKSIEFKDKVKNIGASLVKQVANATNDVAGDGTTCATILTKAIFTEGCKSVAAGMNAMDLRRGINMAVDTVVTNLKSRARMISTSEEIAQVGTISANGEREIGELIAKAMEKVGKEGVITISDGKTLYNELEVVEGMKLDRGYISPYFITNQKNQKCELEDPLIIIHEKKISSINAIVKVLELALKRQRSLLIVAEDVESDALATLILNKLRAGIKVCAIKAPGFGENRKSGLQDLAVLTGGQLITEELGLNLEKVDLDVFGSCKKITISKDDTVILDGAGDKKAIEERCEQIRSAIENSTSDYDKEKLQERLAKLSGGVAVLKIGGASEAEVGEKKDRVTDALNATKAAVEEGIVPGGGVALLYASSELDKLQTANFDQKIGVQIIQNALKTPVHTIASNAGVEGAVVVGKLLEQNDPDLGYDAAKGEYVDMVKAGIIDPLKVIRTALVDAASVSSLMTTTEAIVSELPKDDKDVPAMGGMGGMGGMDY

SEQ ID NO: 9812 - DNA, 1728 bp, Glycine max
  CDS (1)..(1728)
atgtatcgcttggcttctaacctcgcttccaaagcaaggattgctaggagtagcagccaacagattggaagtaggctgagtttgagcagaaactatgcggctaaagacattaaatttggtgtggaggctcgggctctgatgcttaagggtgttgaagagcttgctgatgctgtcaaagtaaccatgggtcccaagggccgtaatgttgtgattgagcaaagttttggtgcccctaaagtaaccaaagatggagtaactgttgcaaagagcattgaattcaaggataaagttaagaatgttggtgccagtcttgtaaagcaggttgctaatgctactaatgatgtggctggtgatggaaccacatgtgctacagtccttacacgagcaatatttactgaaggctgcaaatcaatcgcggctggaatgaatgcaatggacctgaggcggggtataagtatggctgtcgatgctgtggtcacaaatttgaaaagcagagctaggatgattagcacatctgaagaaatagcgcaggttgggatgatatctgctaatggagagagagaaattggtgagttgattgcaaaagctatggagaaagttggcaaagagggagtaatcacaatttcagttggcaaaacattatataatgagttggaagttgttgaaggaatgaagctcgacaggggctacatatctcctcatttcattacaaacgataagaaccagaaatgtgaacttgaagatccccttattctaattcatgagaagaaaatctctagtataaatgctatagttaaagtcttagagttggctttgaagagacaaagacctttattgattattgccgaggatgtggaaagtgatgcacttgcaactcttattctaaataagcttcgggccggaattaaggtgtgtgctattaaagcccctggttttggtgaaaataggaaggctggtcttcaagatcttgcagttctcacaggaggagcacttattactgaagagcttggcttgaagcttgaaaaagtggatttggatatgcttggtacctgtaaaaaaataacagtttctaaggatgacactgtcattcttgatggagcgggtgacaagaaagcacttgaggaaagatgcgagcagattaggtcagcaattgaaaacagtacctcagattatgacaaggaaaagttacaggaaagattagccaagctttctggtggtgttgcagtgcttaagattggaggagccagtgaagctgaagttggtgagaagaaggatagagtgactgatgcattaaatgcaactaaggctgctgtagaggagggcatagtgcctggtggtggtgttgctcttctatatgcatcgagagagttggataaacttcaaactgctaacttcggtcaaaagattggtgtccagattatccaaaatgctttaaagacacctgtgctcactattgcatcaaatgcgggagttgagggtgcagttgttgttggcaaactattggagcaggagaatcatgatctaggatatgatgcagccaaaggtgaatatgttgatatggttaaagctggaatcatagaccccttgaaggtgattaggacagccttggttgatgcagccagtgtatcgtctttgatgacaacaactgaagctgttgtgtctgaacttccaaacgataataaagatactccagctatggctggtggcatgggtggcatgggttattga

SEQ ID NO: 9813 - protein, 575 aa, Glycine max
MYRLASNLASKARIARSSSQQIGSRLSLSRNYAAKDIKFGVEARALMLKGVEELADAVKVTMGPKGRNVVIEQSFGAPKVTKDGVTVAKSIEFKDKVKNVGASLVKQVANATNDVAGDGTTCATVLTRAIFTEGCKSIAAGMNAMDLRRGISMAVDAVVTNLKSRARMISTSEEIAQVGMISANGEREIGELIAKAMEKVGKEGVITISVGKTLYNELEVVEGMKLDRGYISPHFITNDKNQKCELEDPLILIHEKKISSINAIVKVLELALKRQRPLLIIAEDVESDALATLILNKLRAGIKVCAIKAPGFGENRKAGLQDLAVLTGGALITEELGLKLEKVDLDMLGTCKKITVSKDDTVILDGAGDKKALEERCEQIRSAIENSTSDYDKEKLQERLAKLSGGVAVLKIGGASEAEVGEKKDRVTDALNATKAAVEEGIVPGGGVALLYASRELDKLQTANFGQKIGVQIIQNALKTPVLTIASNAGVEGAVVVGKLLEQENHDLGYDAAKGEYVDMVKAGIIDPLKVIRTALVDAASVSSLMTTTEAVVSELPNDNKDTPAMAGGMGGMGY

SEQ ID NO: 9814 - DNA, 1776 bp, Glycine max
  CDS (1)..(1776)
atggcttcttccaccttcaccgcaatgtccgcttgcaagctttcctcctccgccgccatctcctccttccccacccaccgccgcaccaacgccgtccttctgtccagacgcagccgcgccgccagggtctccgccatggccaaggagttgcacttcaacaaagacggcaccgcaattaggaagctccagagcggtgtgaacaagctcgcggatctggttggggtcacgcttggtcccaagggaaggaatgttgttctcgaaagcaagtacggctcgccgaaaatcgttaacgacggtgtcaccgtcgccaaagaggttgagttggaggatccggttgagaatattggcgccaagttggtgagacaagcagctgccaagacaaacgacttggctggtgatggaaccacgacttcggttgttctagctcagggtcttattgccgaaggcgttaaggttgttgcagctggggccaaccctgtgctcatcacccggggcattgagaagacggcaaaagctcttgtttctgagcttaaactgatgtcaaaagaggttgaagatagtgagttggcagatgtggcagcagtcagtgctgggaacaattatgaagtgggaaatatgatagctgaagcattgagcagagttggtagaaagggtgttgtgacccttgaggagggtaagagtgctgataacagtctatatgttgtcgaggggatgcaatttgaccgtggttatatttctccatactttgttactgacagtgagaaaatggccgttgaatatgagaactgtaagttgctgttagttgacaaaaagataaccaatgcaagggatcttatcaacatactggaggatgctattagaagtggataccctatattaattattgctgaggatattgaacaagaagctttagcaactcttgtggtgaacaaacttagaggatcactgaaaattgcagcactcaaggcccctgggtttggagagcgcaagagccagtaccttgatgatattgccatcttgactggaggtactgtaatcagagaagaggttggccttactttggacaaagctgggaaagaggttctcggatatgcctccaaggtggtgctcaccaaggatacaaccacaattgttggtgatggaagtacccaggaagcagtgaacaagagagttgcacaaattaggaacctaattgaggctgctgagcaagagtatgagaaagaaaagctgaatgagagaattgctaaattatctggtggtgtggctgtcatacaggttggtgcacaaactgagactgagctcaaggaaaagaaattgagagttgaagatgctcttaatgctacaaaggcagctgtagaggagggtattgtagttggtggtggttgcactcttctgagacttgcatcaaaggtggacacaatcaaggatagccttgataatgatgaagaaaaagttggagctgatattgtgaaaagagctcttagttaccctttgaaattaattgccaaaaacgctggtgtcaatggtagtgttgtcagtgagaaggtattgtccagcgacaatccaagatatggatataatgctgccaccggaaaatatgaagatttgatgtctgctgggatcattgatccaacaaaggtggtcagatgttgcctggaacatgcagcctctgtagccaaaaccttcttaatgtcagattgtgtggttgtcgagataaaggaacctgagcctgtacctgctggaaaccccatggacaattcaggatatggtatctag

SEQ ID NO: 9815 - protein, 591 aa, Glycine max
MASSTFTAMSACKLSSSAAISSFPTHRRTNAVLLSRRSRAARVSAMAKELHFNKDGTAIRKLQSGVNKLADLVGVTLGPKGRNVVLESKYGSPKIVNDGVTVAKEVELEDPVENIGAKLVRQAAAKTNDLAGDGTTTSVVLAQGLIAEGVKVVAAGANPVLITRGIEKTAKALVSELKLMSKEVEDSELADVAAVSAGNNYEVGNMIAEALSRVGRKGVVTLEEGKSADNSLYVVEGMQFDRGYISPYFVTDSEKMAVEYENCKLLLVDKKITNARDLINILEDAIRSGYPILIIAEDIEQEALATLVVNKLRGSLKIAALKAPGFGERKSQYLDDIAILTGGTVIREEVGLTLDKAGKEVLGYASKVVLTKDTTTIVGDGSTQEAVNKRVAQIRNLIEAAEQEYEKEKLNERIAKLSGGVAVIQVGAQTETELKEKKLRVEDALNATKAAVEEGIVVGGGCTLLRLASKVDTIKDSLDNDEEKVGADIVKRALSYPLKLIAKNAGVNGSVVSEKVLSSDNPRYGYNAATGKYEDLMSAGIIDPTKVVRCCLEHAASVAKTFLMSDCVVVEIKEPEPVPAGNPMDNSGYGI

SEQ ID NO: 9816 - DNA, 1797 bp, Hordeum vulgare
  CDS (1)..(1797)
atggcttcaccatttggcgccacttctaccgttgggctcatggcagctccaactggccttgtatcagacaagaagccattttcattgtcatctatctcccttgccgacaggccacgccatgtgcgccttcagaggaaatgcaacttcagagttaaagcagctaaggagctctacttcaacaaggatggctcagccaccaagaagctccaggttggagtcaacaagctggcagatcttgttggagttacattgggaccaaagggaaggaatgttgttttggagagcaagtacggctcccctaagattgtcaatgatggtgttacagttgcaagagaggttgagctggaggatcctgttgaaaatattggagctaagttggttaggcaagctgcagcgaagaccaacgatttagctggagatggaacaactacttctgtcgtccttgctcaggggctcattgctgagggtgttaaggttattgcagctggtgccaaccctgttcaaattactcgtggtattgagaaaacagcgaaagcactagtccttgaacttaagaagatgtcaaaggaggttgaagacagtgagcttgccgatgttgctgcggtcagtgctggcaacaactacgaaatcggtaacatgatagcagaggctatgagcaaggttggccggaagggagtggttacccttgaagaggggaggagttccgagaacaatctttatgttgtggagggaatgcagtttgagcgtggttatatctctccttatttcgttaccgacagcgagaaaatgaccaccgagtacgagaactgcaagctgcttttggttgacaagaaaatcaccaacgcacgggatcttatcaatgttctggaggaagccattaggggtcaatacccaatcctgatcattgctgaggatattgagcaggaggctcttgcaacccttgttgtcaacaagctaagaggttctttgaaaatctgtgctatcaaagcccctggttttggagagcgcaagacccagtacctggacgacattgccatcctcaccggaggaactgttatcagagacgaggttggactcacacttgacaaggcagataacacagttctaggaacggctgcaaaggttgtccttacaaaagagtcgacaacaatagttggtgatggcagcacccaggaagaagtgactaagagggttgcacagatcaaaaatctcattgaggtagcagagcaagactacgagaaggaaaaactcaatgagaggattgcaaagctcgccggtggtgttgctgttattcaggtgggagcacaaacagaaactgaacttaaggagaagaagttgcgagttgaggatgctctaaacgcaaccaaggctgccgttgaggaaggtattgttgttggtggagggtgcactcttttgaggctggctgctaaggttgatgccatcaaggacaccctggagaacgacgagcagaaggtcggagctgagatagtgaggagggcgctgtgctacccactcaagttgatcgccaagaatgctggtgtcaatggcagtgttgttaccgagaaggttctttctaacgacaacttcaagttcggctacaacgcagccactgggcagtacgaggacttgatggctgctggtatcatcgaccccactaaggtggtgagatgttgcctggagcatgccgcgtcggtggccaagaccttcctgacgtcggacgtggtggtcgtcgagatcaaggagcctgagcccgcgcccctcgtcaaccccatggacaactccggcttcggatactga

SEQ ID NO: 9817 - protein, 598 aa, Hordeum vulgare
MASPFGATSTVGLMAAPTGLVSDKKPFSLSSISLADRPRHVRLQRKCNFRVKAAKELYFNKDGSATKKLQVGVNKLADLVGVTLGPKGRNVVLESKYGSPKIVNDGVTVAREVELEDPVENIGAKLVRQAAAKTNDLAGDGTTTSVVLAQGLIAEGVKVIAAGANPVQITRGIEKTAKALVLELKKMSKEVEDSELADVAAVSAGNNYEIGNMIAEAMSKVGRKGVVTLEEGRSSENNLYVVEGMQFERGYISPYFVTDSEKMTTEYENCKLLLVDKKITNARDLINVLEEAIRGQYPILIIAEDIEQEALATLVVNKLRGSLKICAIKAPGFGERKTQYLDDIAILTGGTVIRDEVGLTLDKADNTVLGTAAKVVLTKESTTIVGDGSTQEEVTKRVAQIKNLIEVAEQDYEKEKLNERIAKLAGGVAVIQVGAQTETELKEKKLRVEDALNATKAAVEEGIVVGGGCTLLRLAAKVDAIKDTLENDEQKVGAEIVRRALCYPLKLIAKNAGVNGSVVTEKVLSNDNFKFGYNAATGQYEDLMAAGIIDPTKVVRCCLEHAASVAKTFLTSDVVVVEIKEPEPAPLVNPMDNSGFGY

SEQ ID NO: 9818 - DNA, 1761 bp, Brassica napus
  CDS (1)..(1761)
atggcgtccacaaacgctctctcttccgcctcgtccgtactctgctcctctcgacagggaaagctgagtggtgtaaatcagcagaaaggtcaaagagtaagctacagtaaagctaacagacgtttcagtgtcagagcaaatgtaaaggaaatctctttcgaccagagctcaagagctgctcttcaagctggtatcgacaagcttgctgatgctgttggtctcactcttggccctagagggagaaatgttgtgttggatgaatttggaagccccaaggttgtgaatgatggagtcaccattgctagggctattgagttacctgatgctatggagaatgctggtgcagcgcttatccgtgaggttgctagtaagactaatgactcagctggtgatgggacaacaactgcatctgtccttgctagggaaataatcaaacacggattattgagtgtcacttctggtgccaatcctgtgtccctcaagaggggaatcgacaagactgttcaagctttgatcgaagagcttgagaagaaagctagacctgtcaaaggtggtagtgacatccaagccgtggctacaatctctgctggaaatgatgagcttgtgggaacaatgattgctgatgccattgacaaagttggacctgatggtgttttgtccattgaatcttcttcctcttttgagactacggtcgaagttgaagaaggaatggagattgacagaggttacatctcacctcagtttgtgacaaaccctgagaaactactagttgagtttgagaatgcgcgggtgttgatcactgatcagaagatcactgcaatcaaagacatcatccccatcttggagaagaccactcagcttcgagctccattgctgattattgcagaggatgttacaggtgaggccttagcaacccttgtcgtgaacaaactccgtggtgtcctcaatgttgtcgccgtgaaggctcctggatttggagaaagaagaaaggctatgcttcaggatatctctatcttgacaggagctgagtaccaagcccttgacatgggcttgctggtcgagaacacaacaatagatcagttgggtattgctcgtaaagtcaccataagcaaagattcgactacacttatcgcagatgcagcttccaaggacgagttacaagctcgtatctctcagctcaagaaagaactattcgagactgattctgtctacgactcagagaagctcgctgagagaatagctaaactctccggtggtgttgctgtcatcaaagtgggagcagcgactgaaactgagctcgaggaccgtaagcttcgtattgaggacgcaaagaacgctacatttgctgctatcgaagaaggtatagttcctggtggtggcgcaactttggtgcatctctccactgtgattcctgccattaaagagaagctggaggatgctgatgaacgtttgggagctgacatagtgcagaaggctttggtggcaccagctgcgcttattgcgcagaacgctggaatcgaaggagaagttgtagtggaaaagattatgttcagtgaatgggagatagggtacaacgccatgactgatacctatgagaatctgctggaagctggagtgattgatccagctaaagtgacgagatgtgcgcttcagaacgctgcatcggttgcggggatggtactgacaactcaggctattgttgttgacaaaccgaaacctaaggctcctgctgctgctcctcctcaaggtctcatggtgtaa

SEQ ID NO: 9819 - protein, 586 aa, Brassica napus
MASTNALSSASSVLCSSRQGKLSGVNQQKGQRVSYSKANRRFSVRANVKEISFDQSSRAALQAGIDKLADAVGLTLGPRGRNVVLDEFGSPKVVNDGVTIARAIELPDAMENAGAALIREVASKTNDSAGDGTTTASVLAREIIKHGLLSVTSGANPVSLKRGIDKTVQALIEELEKKARPVKGGSDIQAVATISAGNDELVGTMIADAIDKVGPDGVLSIESSSSFETTVEVEEGMEIDRGYISPQFVTNPEKLLVEFENARVLITDQKITAIKDIIPILEKTTQLRAPLLIIAEDVTGEALATLVVNKLRGVLNVVAVKAPGFGERRKAMLQDISILTGAEYQALDMGLLVENTTIDQLGIARKVTISKDSTTLIADAASKDELQARISQLKKELFETDSVYDSEKLAERIAKLSGGVAVIKVGAATETELEDRKLRIEDAKNATFAAIEEGIVPGGGATLVHLSTVIPAIKEKLEDADERLGADIVQKALVAPAALIAQNAGIEGEVVVEKIMFSEWEIGYNAMTDTYENLLEAGVIDPAKVTRCALQNAASVAGMVLTTQAIVVDKPKPKAPAAAPPQGLMV

SEQ ID NO: 9820 - DNA, 1767 bp, Oryza sativa
  CDS (1)..(1767)
atgtcgaggatggcggcgccgccgccgccgctctccggcaccggcaagccgcccacactccccttctccctcaagaagccgccgcccatgccggtgtacaaggacctgcacttcaaccgcgacctctccgccaccaagaagctgcaggccggcgtggacctggtggcacggctggtcggggtgacgctggggcccaaggggaggaacgtggtgctgagcaacaagtacggccctcccaagatcgtcaacgatggggagacggtcctcaaggagattgaattggaggacccgttggaaaatcttggagtgaagctggtcagacaggctggtgccaggacgaacgatgttgctggtgatggttgtaccacttccataatccttgctcaaggcctcatcgctgaaggaatgaaggtgcttgcagctggaattaatcctgtccagattgcgcggggcattgagaagactgcttctgctttggtgtctgaactcagattgatgtcccgggagatagaagaccatgaaattgcacatgtggctgcagttagtgcaggagatgattatgctgttggaaatatgatttctgatgcttttaaaagagtaggcaggaaaggcatggtgaggattgaaaatggaaggggcacggaaaatggtctagagattgtggaaggaatgcaatttgaacgtggttacctctcaccgtactttgtgactgattgtacaaatatgtccgcggagtttactgactgtaagatattgttggttgacaagaaaattactgatgcaagtgagattataaggatattggatagtgctgtcaaagaagattatccattgttgatagttgccgaggatgtggaagaaaaagcaatggctgatttgataaaaaacaagctaaaagggacaattaaagtggctgcaatcaaggccccttcctttggggaacaaatgactcaatgtttggatgacattgccatcatgacaggaggtacactagtgcgtgaagacatgggatatacactagaaaaggcagggaaagaggttctaggttctgcttctaaggttgtagtcgggaaagactcaacactaattgttaccgatggaagcacccaacatgtgatcgagaaaagggttgctcagataaagggccaaattgagaactcaagtgagaggtaccagaagaagatattgggtgagagaatagcaaggttatgtggtggaattgcaatcattcaggtcggtgctcaaacaatcattgagatgaaagacaagaagctcagaattgaagatgcccttaatgcaacaaaggcagctattgaggaaggagttgtgataggtggtggatgtagcctattaagattatccatgaagattgatagaattaaggaatcattggataatatggagcagaagattggcgctgacatcttcaaacaggctttgagttaccctactgcattgattgcaaacaatgctggggtgaacggcagcttcgtcatagaaaaggtgttattaaatgaggacagtagatatggctacaatgctgccaagaaccgctatgaggacttaatggccgctggaatattagatccatcaaaggttgtgagatgttgcatagaacatgctgctgtggtcgccaagtcttttctcacatctgacgtggtgattgttgaggcgaaagaaggcaaaccagttcgcataaggcccccgatgcctcctaaaagtttgatacccccaatgcctgcttctgcttcaggaattcgagtgtag

SEQ ID NO: 9821 - protein, 588 aa, Oryza sativa
MSRMAAPPPPLSGTGKPPTLPFSLKKPPPMPVYKDLHFNRDLSATKKLQAGVDLVARLVGVTLGPKGRNVVLSNKYGPPKIVNDGETVLKEIELEDPLENLGVKLVRQAGARTNDVAGDGCTTSIILAQGLIAEGMKVLAAGINPVQIARGIEKTASALVSELRLMSREIEDHEIAHVAAVSAGDDYAVGNMISDAFKRVGRKGMVRIENGRGTENGLEIVEGMQFERGYLSPYFVTDCTNMSAEFTDCKILLVDKKITDASEIIRILDSAVKEDYPLLIVAEDVEEKAMADLIKNKLKGTIKVAAIKAPSFGEQMTQCLDDIAIMTGGTLVREDMGYTLEKAGKEVLGSASKVVVGKDSTLIVTDGSTQHVIEKRVAQIKGQIENSSERYQKKILGERIARLCGGIAIIQVGAQTIIEMKDKKLRIEDALNATKAAIEEGVVIGGGCSLLRLSMKIDRIKESLDNMEQKIGADIFKQALSYPTALIANNAGVNGSFVIEKVLLNEDSRYGYNAAKNRYEDLMAAGILDPSKVVRCCIEHAAVVAKSFLTSDVVIVEAKEGKPVRIRPPMPPKSLIPPMPASASGIRV

SEQ ID NO: 9822 - DNA, 1731 bp, Triticum aestivum
  CDS (1)..(1731)
atgtaccgcgccgccgccagcctcgcctccaaggcccggctagccgggagcagcgcccgacaggtcgggagcaggctcgcctggagcaggaactatgccgccaaggacatcaggttcggcgtcgaggccagggccatgatgctcaagggtgtcgaagacctggctgatgcggtcaagttgactatgggtcccaaggggcgcactgttattattgagcaaagctttggtgctcccaaagttacaaaggatggagtcaccgttgccaagagcattgaattcagtgacagagtcaagaatgtaggtgcaagtcttgtgaagcaggttgctaatgcgactaatgatactgctggagatggtacaacatgtgctactgttctgacaaaggcaatattcactgagggatgcaagtccgttgcagctggtatgaatgcaatggatctgagacgcggcatctcaatggctgttgattctgtggtaacaaacctaaagggcatggccagaatgatcaacacgtctgaggaaatagcacaggtgggtactatatcagctaatggtgaaagggaaattggtgagctcattgcaaaggctatggagaaggttggcaaagagggagttatcaccattgcggatggtaacactctatacaatgagcttgaagttgtggaaggcatgaagcttgacagaggttacatctctccatactttattaccaaccaaaagaaccagaaatgtgaactagacgatcccttaatcttgatacacgataagaaagtatccaaccttcgctcattggtcaaagtgttggagtttgctctccagaagcaaaggcctctccttattgttgcagaagatctagaaagtgaagcactgggtacactaattcttaacaagcttcgtggaggcttcaaggtctgtgcgatcaaagctcctggttttggagagaacaggaaatccaacttacaggaccttgccatccttactggtggagaagtcataactgaagaacttggaatgaaccttgagaactttgagccaaacatgctgggtacctgcaagaaggttaccatatctaaggatgatacagtcatccttgatggagcgggtgataagaaggccatcgaagagagagctgagctgctgagatcttcaattgagcaatgcacttctgactatgataaggaaaagatacaggagcggctggcaaagctttctggtggtgtcgcagtcctgaagattggtggagcgagtgaagcagaagttggtgagaagaaggacagagtgacagatgcgctaaatgctacaaaagctgcagtagaggagggtattgtaccaggtggtggtgttgcccttctttatgcgtcaaaggacttggataaattgcctacagcaaactttgaccaaaagattggtgtccagatcattcaaaatgctttgaagaccccagtacacacaattgctaccaatgcgggtgtagaaggggctgtcattgttggcaagctcttggagcaggaaaataccgacctgggctatgatgctgccaaaggcgaatatgtggatatggtgaaggctggtatcattgacccacttaaggtgatcagaacagcactggtggatgctgcaagtgtgtcgtctctgatgactaccacggaagccatcatcgttgagatccccaaggaagacaaggcggcacccgcaatgggaggcggcggcatgggagggatggatttctaa

SEQ ID NO: 9823 - protein, 576 aa, Triticum aestivum
MYRAAASLASKARLAGSSARQVGSRLAWSRNYAAKDIRFGVEARAMMLKGVEDLADAVKLTMGPKGRTVIIEQSFGAPKVTKDGVTVAKSIEFSDRVKNVGASLVKQVANATNDTAGDGTTCATVLTKAIFTEGCKSVAAGMNAMDLRRGISMAVDSVVTNLKGMARMINTSEEIAQVGTISANGEREIGELIAKAMEKVGKEGVITIADGNTLYNELEVVEGMKLDRGYISPYFITNQKNQKCELDDPLILIHDKKVSNLRSLVKVLEFALQKQRPLLIVAEDLESEALGTLILNKLRGGFKVCAIKAPGFGENRKSNLQDLAILTGGEVITEELGMNLENFEPNMLGTCKKVTISKDDTVILDGAGDKKAIEERAELLRSSIEQCTSDYDKEKIQERLAKLSGGVAVLKIGGASEAEVGEKKDRVTDALNATKAAVEEGIVPGGGVALLYASKDLDKLPTANFDQKIGVQIIQNALKTPVHTIATNAGVEGAVIVGKLLEQENTDLGYDAAKGEYVDMVKAGIIDPLKVIRTALVDAASVSSLMTTTEAIIVEIPKEDKAAPAMGGGGMGGMDF

SEQ ID NO: 9824 - DNA, 1752 bp, Triticum aestivum
  CDS (1)..(1752)
atgtaccgggcggcggcggcggccatttcgcggtcctcctcctcggcgctgcggcggcagctcgcccgcggcggcttcggcggcgggggcggggagcagcggcagtgggtgcgcgggtatgcggcgaaggaggtcaccttcggcgtcggcgcgcgcgccgccatgctgcggggcgtcaacgacctcgcggacgccgtcaaggtcaccatgggccccaaggggcgcaatgtggttatcgagagatcgaacagatcccctaaggtcaccaaggacggggtcaccgttgccaagagcatagagttcgaggacagcgccaagaatgtcggggcgagcctggtgaagcaggtcgcggatgccactaacaaggcagcaggagatggtaccacttgcgcaactgtgcttacacaggcaattctcacggaaggctgcaaggctgtggcagcaggggtcaatgttatggatttgcggaaaggcataaacaaggctataagcgccgtcactgctcacctcaaaagtaaagcatggatgattgattccccagatgaaataaaccaggtagctacaatttctgcaaatggcgaaaaggaaattggagatctgatatcaaaagctatgggaatagttggaaaggatggcgtcattactattgctgatggcaaaacattggataatgagcttgaagcagtccagggaatgaagttgactagaggctacatatccccttactttgtaactgatcagaagactcagaaatgtgagttgaaagatcctctgattcttattcatgacaagaaaatctcaaacatgaattcacttcttccagcagtgcaaatttccatccagaaccgcagacctcttctcatttttgctgaggatgtagatggagaagctctatcaatgcttgtactgaacaagcatcgtgctggactaaagatatgtgctgtcaaagctcctggatttggtgaaaacagaagggccaatctggatgatatggctgttttaacaggagggcaggttattagcgaggaccaaggtcttgatcttgataaagtcgaactacaaatgctcggcacagctaagaaggttactgtatctcttgatgacactatcattctagatggtggaggtgaaaggcaacagatagaagagaggtgtcaacagcttagagaatcacttgagaacagcacctccatgttcgacaaagaaaaggctcaagagcgtttatcaaaattatctggaggcgttgctattctcaagattggtggagctagtgaagctgaagttggtgagaaaaaagacagggtaacagatgctctaaatgctgcaagggctgctgtggaggagggtattgttccaggtggtggagttgcacttttatatgccaccaaggagatcgacaatattagcacatcgcatgaggatgaaaagattggagttcagattatcaagaatgctttgaaggcccctctgatgaccatagctgcaaatgccggcatcgatggtgccatagttattgggaagctactggaacaagataatcttagtctgggctatgatgcagcaaaaggggagtatgttgacatgatcaaggctggtatcatcgaccccgtgaaggtgatccgaactgcacttcaagatgcagcaagcgtttctctgctgatgacaaccacagaggccgcagtcgctgagcttccgtcgacaaaagccagaattgccagtcgcatgccggacatgagcggaatgggtttctga

SEQ ID NO: 9825 - protein, 583 aa, Triticum aestivum
MYRAAAAAISRSSSSALRRQLARGGFGGGGGEQRQWVRGYAAKEVTFGVGARAAMLRGVNDLADAVKVTMGPKGRNVVIERSNRSPKVTKDGVTVAKSIEFEDSAKNVGASLVKQVADATNKAAGDGTTCATVLTQAILTEGCKAVAAGVNVMDLRKGINKAISAVTAHLKSKAWMIDSPDEINQVATISANGEKEIGDLISKAMGIVGKDGVITIADGKTLDNELEAVQGMKLTRGYISPYFVTDQKTQKCELKDPLILIHDKKISNMNSLLPAVQISIQNRRPLLIFAEDVDGEALSMLVLNKHRAGLKICAVKAPGFGENRRANLDDMAVLTGGQVISEDQGLDLDKVELQMLGTAKKVTVSLDDTIILDGGGERQQIEERCQQLRESLENSTSMFDKEKAQERLSKLSGGVAILKIGGASEAEVGEKKDRVTDALNAARAAVEEGIVPGGGVALLYATKEIDNISTSHEDEKIGVQIIKNALKAPLMTIAANAGIDGAIVIGKLLEQDNLSLGYDAAKGEYVDMIKAGIIDPVKVIRTALQDAASVSLLMTTTEAAVAELPSTKARIASRMPDMSGMGF

SEQ ID NO: 9826 - DNA, 1737 bp, Triticum aestivum
  CDS (1)..(1737)
atggcgtcggccaacgccatctccaccgcctccctcctccgctccttctcctcccaggggaggctgaggaggtccaagaacggccgctcgtcgcggctggtggtgcgcgcggacgccaaggaaatcgccttcgaccagaagtcccgcgccgcgctccaggccggcgtcgagaagctcgccaacgccgtcggcgtcaccctcggcccgcgagggaggaacgtagtgctggatgagtatggcaaccccaaagtggtgaacgatggtgttaccattgcccgtgctattgagctagctaacccaatggaaaatgcgggtgcagctctgattcgtgaggttgctagcaagaccaatgattctgctggtgatgggactacgactgcttgtgtccttgctcgagaaatcatcaagctgggcattttgagtgtaacttctggtgcaaaccctgtatcactaaagaaaggaatagacaaaactgtccagggtctgattgaagagcttgaaagaaaagctagaccagtcaagggcagtggtgatatcaaagctgttgcctctatctctgctggtaacgatgaacttattggagccatgattgctgatgcaattgacaaagtgggcccggatggtgtcctttcgatcgagtcgtcttcatcttttgagactactgttgatgttgaggaagggatggagattgaccgaggctacatttcccctcaatttgtgacaaaccttgagaaatctattgtggagtttgagaacgctagagttcttataactgatcagaagatcacaagcataaaggaaatcattccacttctggagcagactacacagttgagatgcccgctgtttattgtagctgaggacattactggtgaagctttggcaactcttgttgttaacaagctcagaggtattattaatgttgcggcgatcaaagccccaagtttcggtgagcggcggaaggctgtccttcaggatattgccatcgtgacaggcgctgagtacctagcgaaggatcttggtctgttggttgagaatgcaacagtagaccaacttgggacagcaaggaaaatcacaattcatcagactacaaccaccctcatagcagatgcagctagcaaagacgagatccaggccagggttgcacagctaaagaaggagctttctgaaacggattccatctatgactctgagaaattggctgagaggattgccaagctttctggtggtgtggccgtcatcaaggttggagcaacaaccgagacagagctcgaggaccgtcagctgcgtatcgaggacgcgaagaatgccacttttgcagccatcgaggagggcattgttcccggtggtggcgcggcgtatgtgcacctgtctacttacgtccctgcgatcaaagaaaccatcgaagaccatgatgagcgccttggtgccgacatcatccagaaggcattgcaagcaccggcgtccctgatcgccaacaacgccggagtggaaggggaggtcgtgatcgagaagatcaaggagagcgagtgggagatgggttacaacgcgatgaccgacaagtacgagaacctgatcgagtcgggcgtcatcgaccccgccaaggtgacgagatgcgcgctccagaacgccgcctcggtgtccggaatggtcctcaccacgcaggcgatcgtcgtcgagaagcccaagcccaagcccaaggtcgccgagccagcggaggggcagctctccgtctga

SEQ ID NO: 9827 - protein, 578 aa, Triticum aestivum
MASANAISTASLLRSFSSQGRLRRSKNGRSSRLVVRADAKEIAFDQKSRAALQAGVEKLANAVGVTLGPRGRNVVLDEYGNPKVVNDGVTIARAIELANPMENAGAALIREVASKTNDSAGDGTTTACVLAREIIKLGILSVTSGANPVSLKKGIDKTVQGLIEELERKARPVKGSGDIKAVASISAGNDELIGAMIADAIDKVGPDGVLSIESSSSFETTVDVEEGMEIDRGYISPQFVTNLEKSIVEFENARVLITDQKITSIKEIIPLLEQTTQLRCPLFIVAEDITGEALATLVVNKLRGIINVAAIKAPSFGERRKAVLQDIAIVTGAEYLAKDLGLLVENATVDQLGTARKITIHQTTTTLIADAASKDEIQARVAQLKKELSETDSIYDSEKLAERIAKLSGGVAVIKVGATTETELEDRQLRIEDAKNATFAAIEEGIVPGGGAAYVHLSTYVPAIKETIEDHDERLGADIIQKALQAPASLIANNAGVEGEVVIEKIKESEWEMGYNAMTDKYENLIESGVIDPAKVTRCALQNAASVSGMVLTTQAIVVEKPKPKPKVAEPAEGQLSV

SEQ ID NO: 9828 - DNA, 1740 bp, Zea mays
  CDS (1)..(1740)
atggcctcgacgttcggtgccacttctacagttggccttatggctgctccaacggggaagaatgtgcgccttcagaggagggctaacttcagagtaaaagcggctaaggagctgtacttcaacaaggatgggtcagctatcaagaagctccagactggagtcaataagcttgcagacctagttggagttacactcggaccgaagggaaggaatgtcgttttggagagcaagtacggctctcccaagattgttaacgatggcgttacagttgcaagagaggttgagctggaggaccctgtggaaaacattggagctaaattggtcaggcaagctgcagctaagaccaacgatcttgctggagatgggacaaccacctctgtggtccttgctcaggggctgattgctgagggtgttaaggtcgtagcagctggtgctaatcctgttcagattactcgtggtattgagaaaacagctaaagcactagttgaagaactacggaagttgtctaaggaggttgaagatagtgagcttgcagatgttgctgcagttagtgctggcaacaactatgaaattggtaacatgatagcagaggccatgagcaaggtcggtcggaagggcgttgtcacccttgaagaggggaagagttctgagaactttctctatgttgtggagggaatgcaatttgaccgtggttacatctctccgtactttgtaacagacagtgagaaaatgactgcagagtacgagaactgcaagctgcttttggttgataagaaaatcaccaatgcaagggatcttatcaacgttttggaagaatccatcagaggtgcatacccaatcctgataattgcagaggatattgagcaggaggctcttgctacccttgtcgtcaacaagctcagaggatcactgaagatcgctgccatcaaagcccctggttttggagagcgcaagactcagtacttggatgatattgccatccttactggagcaactgtaatcagagatgaagttgggctatcacttgacaaggcagacaaatcagttcttggaacagctgcaaaggttgtccttacgaaagagtcgacaacaattgttggtgatggcagcacccaggaagaagttactaagagggttgcacagattaaaaatctcattgaggcagcagaacaagaatacgaaaaggaaaagctcaatgagaggatagcgaagcttgctggtggtgttgctgtcattcaggtgggagcacaaacagaaactgaactaaaagagaagaagttgagagttgaggatgccctaaatgcaactaaggctgccgttgaggaaggtattgttgttggtggagggtgcactcttttgcggcttgcagctaaagtcgacgccatcaaggatacactggagaacgacgagcagaaggttggagctgaaatagtaaggagggccctgagctacccacttaaattgattgctaaaaacgccggtgtcaatggcagtgttgtcactgagaaggtcctttctaatgataacttcaagtatggttacaatgctgctactggacagtacgaggacctgatggctgctggtatcattgaccccaccaaggtggtgagatgctgcttggagcacgccgcgtcggtggccaagaccttcctgacatcagatgttgtggtcgtcgatatcaaggagccggaggctgcacctgtcgcaaacccgatggacaactctggctatggatactga

SEQ ID NO: 9829 - protein, 579 aa, Zea mays
MASTFGATSTVGLMAAPTGKNVRLQRRANFRVKAAKELYFNKDGSAIKKLQTGVNKLADLVGVTLGPKGRNVVLESKYGSPKIVNDGVTVAREVELEDPVENIGAKLVRQAAAKTNDLAGDGTTTSVVLAQGLIAEGVKVVAAGANPVQITRGIEKTAKALVEELRKLSKEVEDSELADVAAVSAGNNYEIGNMIAEAMSKVGRKGVVTLEEGKSSENFLYVVEGMQFDRGYISPYFVTDSEKMTAEYENCKLLLVDKKITNARDLINVLEESIRGAYPILIIAEDIEQEALATLVVNKLRGSLKIAAIKAPGFGERKTQYLDDIAILTGATVIRDEVGLSLDKADKSVLGTAAKVVLTKESTTIVGDGSTQEEVTKRVAQIKNLIEAAEQEYEKEKLNERIAKLAGGVAVIQVGAQTETELKEKKLRVEDALNATKAAVEEGIVVGGGCTLLRLAAKVDAIKDTLENDEQKVGAEIVRRALSYPLKLIAKNAGVNGSVVTEKVLSNDNFKYGYNAATGQYEDLMAAGIIDPTKVVRCCLEHAASVAKTFLTSDVVVVDIKEPEAAPVANPMDNSGYGY

SEQ ID NO: 9830 - DNA, 1719 bp, Zea mays
  CDS (1)..(1719)
atggcatccgcgaatgccatctccaccgcctccctcctccggcccctctctcagggcagggcgacgaggtcacagcggttcgtggtgcgtgcgaacgccaaagacattgcctttgaccagaaatccagggcagcgctgcaggccggcgtcgagaagctggcaaacgccgtcggtgtcaccctcgggccacgagggaggaatgtggtgctcgatgagtacggcaaccccaaagttgtgaatgatggagtcactattgcccgtgctattgagctgtatgatccaatggaaaatgctggtgcagcattgattcgtgaggttgctagcaagaccaatgattcagctggtgatgggactacaactgcatgcgtccttgctcgtgaaatcatcaagctaggccttctgagtgtaacatctggtgcaaatcctgtatcactaaagaaaggaatagacaaaactgtgcagggcctaattcaggagcttgagaataagtctagaccaatcaagggtggtggtgatatcaaagctgttgcatctatctctgctggcaatgatgaatttatcggatccatgattgctgaagcaattgacaaagtggggcctgatggtgttctatcaattgaatcctcctcgtcttttgagaccactgttgaagttgaagaaggaatggagattgaccgcggttatatttccccacaatttgtgacaaaccttgagaaatcaattgtggagtttgagaattgtaaggttcttattactgatcagaagatcacaagcataaaggaaatccttccgattttggagaagaccacacagctgagagcccctctgttcattattgctgaggacattactggtgaagctttggcaactcttgttgttaacaagcttcgaggaattctcaatgttgcagcgattaaggctccaagttttggtgagcggcggaaggctgtacttcaggacattgccatcgtcacaggtgctgagttcctagcaaaagatcttggtttgttggttgaaaatgctacagaggaacaacttggcacagcaaggaaagtcacgatacatcagactacaacaaccctcatagcagatgcagccagtaaagatgagatccaggcgaggattgcacaactgaagaaggagcttgctgagactgattcagtttatgatactgagaaattggctgagagaattgctaagcttgccggtggtgttgctgttatcaaggttggagctgcaactgagactgagcttgaggaccgccaactaagaattgaggatgcaaaaaatgccacttttgcagctatagaggagggcattgttccaggaggtggtgcggcatatgtgcacctatctacggttgtccctaagatcaaagaagcaattgaggaccctgatgagcgtcttggcgctgatattattcaaaaggcattggtagcacctgcttcattgattgcacacaatgctggagtagagggtgaagtggttgtcgagaagatcaaggagagcgattgggaggtgggctacaatgcaatgactgacaagtacgagaacctgatggaggctggtgtgatcgaccctgccaaggtgaccaggtgtgcgctccagaatgcggcctcagtagctggaatggtcctaaccacgcaggccattgttgttgagaagccaaagccgaagcctcaagtggcagagccaccggagggagcccttaccgtttaa

SEQ ID NO: 9831 - protein, 572 aa, Zea mays
MASANAISTASLLRPLSQGRATRSQRFVVRANAKDIAFDQKSRAALQAGVEKLANAVGVTLGPRGRNVVLDEYGNPKVVNDGVTIARAIELYDPMENAGAALIREVASKTNDSAGDGTTTACVLAREIIKLGLLSVTSGANPVSLKKGIDKTVQGLIQELENKSRPIKGGGDIKAVASISAGNDEFIGSMIAEAIDKVGPDGVLSIESSSSFETTVEVEEGMEIDRGYISPQFVTNLEKSIVEFENCKVLITDQKITSIKEILPILEKTTQLRAPLFIIAEDITGEALATLVVNKLRGILNVAAIKAPSFGERRKAVLQDIAIVTGAEFLAKDLGLLVENATEEQLGTARKVTIHQTTTTLIADAASKDEIQARIAQLKKELAETDSVYDTEKLAERIAKLAGGVAVIKVGAATETELEDRQLRIEDAKNATFAAIEEGIVPGGGAAYVHLSTVVPKIKEAIEDPDERLGADIIQKALVAPASLIAHNAGVEGEVVVEKIKESDWEVGYNAMTDKYENLMEAGVIDPAKVTRCALQNAASVAGMVLTTQAIVVEKPKPKPQVAEPPEGALTV

SEQ ID NO: 9832 - DNA, 1719 bp, Zea mays
  CDS (1)..(1719)
atggcatccgcgaatgccatctccaccgcctccctcctccggcccctctctcagggcagggcgacgaggtcacagcggttcgtggtgcgtgcgaacgccaaagacattgcctttgaccagaaatccagggcagcgctgcaggccggcgtcgagaagctggcaaacgccgtcggtgtcaccctcgggccacgagggaggaatgtggtgctcgatgagtacggcaaccccaaagttgtgaatgatggagtcactattgcccgtgctattgagctgtatgatccaatggaaaatgctggtgcagcattgattcgtgaggttgctagcaagaccaatgattcagctggtgatgggactacaactgcatgcgtccttgctcgtgaaatcatcaagctaggccttctgagtgtaacatctggtgcaaatcctgtatcactaaagaaaggaatagacaaaactgtgcagggcctaattcaggagcttgagaataagtctagaccaatcaagggtggtggtgatatcaaagctgttgcatctatctctgctggcaatgatgaatttatcggatccatgattgctgaagcaattgacaaagtggggcctgatggtgttctatcaattgaatcctcctcgtcttttgagaccactgttgaagttgaagaaggaatggagattgaccgcggttatatttccccacaatttgtgacaaaccttgagaaatcaattgtggagtttgagaattgtaaggttcttattactgatcagaagatcacaagcataaaggaaatccttccgattttggagaagaccacacagctgagagcccctctgttcattattgctgaggacattactggtgaagctttggcaactcttgttgttaacaagcttcgaggaattctcaatgttgcagcgattaaggctccaagttttggtgagcggcggaaggctgtacttcaggacattgccatcgtcacaggtgctgagttcctagcaaaagatcttggtttgttggttgaaaatgctacagaggaacaacttggcacagcaaggaaagtcacgatacatcagactacaacaaccctcatagcagatgcagccagtaaagatgagatccaggcgaggattgcacaactgaagaaggagcttgctgagactgattcagtttatgatactgagaaattggctgagagaattgctaagcttgccggtggtgttgctgttatcaaggttggagctgcaactgagactgagcttgaggaccgccaactaagaattgaggatgcaaaaaatgccacttttgcagctatagaggagggcattgttccaggaggtggtgcggcatatgtgcacctatctacggttgtccctaagatcaaagaagcaattgaggaccctgatgagcgtcttggcgctgatattattcaaaaggcattggtagcacctgcttcattgattgcacacaatgctggagtagagggtgaagtagttgtcgagaagatcaaggacagcgattgggaggtgggctacaatgcaatgactgacaagtacgagaacctgatggaggctggtgtgatcgaccctgccaaggtgaccaggtgtgcgctccagaatgcggcctcagtagctggaatggtcctaaccacacaggccattgttgttgagaagccaaagccgaagcctcaagtggcagagccaccggagggagcccttaccgtttaa

SEQ ID NO: 9833 - protein, 572 aa, Zea mays
MASANAISTASLLRPLSQGRATRSQRFVVRANAKDIAFDQKSRAALQAGVEKLANAVGVTLGPRGRNVVLDEYGNPKVVNDGVTIARAIELYDPMENAGAALIREVASKTNDSAGDGTTTACVLAREIIKLGLLSVTSGANPVSLKKGIDKTVQGLIQELENKSRPIKGGGDIKAVASISAGNDEFIGSMIAEAIDKVGPDGVLSIESSSSFETTVEVEEGMEIDRGYISPQFVTNLEKSIVEFENCKVLITDQKITSIKEILPILEKTTQLRAPLFIIAEDITGEALATLVVNKLRGILNVAAIKAPSFGERRKAVLQDIAIVTGAEFLAKDLGLLVENATEEQLGTARKVTIHQTTTTLIADAASKDEIQARIAQLKKELAETDSVYDTEKLAERIAKLAGGVAVIKVGAATETELEDRQLRIEDAKNATFAAIEEGIVPGGGAAYVHLSTVVPKIKEAIEDPDERLGADIIQKALVAPASLIAHNAGVEGEVVVEKIKDSDWEVGYNAMTDKYENLMEAGVIDPAKVTRCALQNAASVAGMVLTTQAIVVEKPKPKPQVAEPPEGALTV

SEQ ID NO: 9834 - DNA, 1734 bp, Zea mays
  CDS (1)..(1734)
atgtaccgcgcggccgctagcctcgcctccaaggcgcggcaagccgggaacagcctcgccgcccgccaggttggaagcaggcttgcctggagcaggaactatgctgcgaaggacatcaagtttggtgttgaggcccgtgctctgatgttgaggggtgttgaggagttggcagatgctgtcaaagtgacaatgggacctaagggccgcaatgtggttattgagcaaagctttggtgcaccgaaagtcacaaaggatggtgtgactgtagcaaagagcattgaatttaaggatagagtaaagaatgttggtgcaagccttgtgaaacaggttgctaatgcaactaatgacactgctggcgatggtaccacatgtgccactgttttgacaaaagcaatatttactgaggggtgcaaatctgttgcggctggaatgaatgcaatggatttaaggcgcggaatctcaatggctgttgacgctgttgtgaccaatctgaaaggcatggccagaatgatcagcacttcagaagaaattgcacaggtgggtacaatatcagcaaatggggaaagggaaattggtgagcttattgccaaggctatggagaaggttggcaaagagggtgtcatcactattgcggacggtaacaccctttataatgagcttgaagttgtggagggtatgaaactagacagaggttacatctctccgtacttcattaccaactcaaaaacccagaaatgtgaattggaagacccattgatcttaattcatgacaagaaggttacgaacatgcatgctgtggttaaggttttagaaatggctctgaagaaacaaaagcctctactgattgttgcagaagatgtggaaagtgaagcattgggcactttgattattaacaagcttcgtgcaggcatcaaggtctgtgctgtcaaagctcctggttttggggaaaacaggaaggcaaacttacaggaccttgcaatccttactggaggagaggtaataactgaagaactaggaatgaaccttgagaattttgagcctcacatgctgggtacatgcaaaaaggtgaccgtctctaaggatgacactgttattcttgatggagccggagacaagaagtccattgaagagagggcagagcagattagatcagcaattgagaatagcacttcagattatgataaggaaaagctccaggagcggttggcaaagctctctggaggtgttgctgttctgaagattggaggagccagcgaagcagaagttggtgagaagaaggatagagtgacagatgcactgaatgctactaaagctgccgttgaagagggtattgtaccaggtggtggtgttgctcttctctatgcatcgaaggagcttgataaattgcagacagcgaacttcgatcagaagattggtgtgcaaatcattcagaatgctttgaagacacctgtacacacaattgcctccaatgctggggtggagggagcagtagttgtaggaaagcttttggagcaagaaaatactgacctgggttatgatgctgctaaaggtgaatatgttgacatggtgaagaccggtatcattgacccgctaaaggttatcagaactgctttggtggatgctgctagtgtgtcgtccctgatgacaaccacggaatccataattgtagagattcccaaggaagaggcaccggctccagcaatgggtggcggcatgggtggcatggattactaa

SEQ ID NO: 9835 - protein, 577 aa, Zea mays
MYRAAASLASKARQAGNSLAARQVGSRLAWSRNYAAKDIKFGVEARALMLRGVEELADAVKVTMGPKGRNVVIEQSFGAPKVTKDGVTVAKSIEFKDRVKNVGASLVKQVANATNDTAGDGTTCATVLTKAIFTEGCKSVAAGMNAMDLRRGISMAVDAVVTNLKGMARMISTSEEIAQVGTISANGEREIGELIAKAMEKVGKEGVITIADGNTLYNELEVVEGMKLDRGYISPYFITNSKTQKCELEDPLILIHDKKVTNMHAVVKVLEMALKKQKPLLIVAEDVESEALGTLIINKLRAGIKVCAVKAPGFGENRKANLQDLAILTGGEVITEELGMNLENFEPHMLGTCKKVTVSKDDTVILDGAGDKKSIEERAEQIRSAIENSTSDYDKEKLQERLAKLSGGVAVLKIGGASEAEVGEKKDRVTDALNATKAAVEEGIVPGGGVALLYASKELDKLQTANFDQKIGVQIIQNALKTPVHTIASNAGVEGAVVVGKLLEQENTDLGYDAAKGEYVDMVKTGIIDPLKVIRTALVDAASVSSLMTTTESIIVEIPKEEAPAPAMGGGMGGMDY

SEQ ID NO: 9836 - DNA, 1755 bp, Zea mays
  CDS (1)..(1755)
atggccaccattccgaccaccgattctggcctcgtcctcagttcctccgctctcctccggaggactaggagggccgcctcatccgtcaccgccaggctgccagccgtcgcccgccgtcgcccgcagctcctcgtgcgtgcctccaccaaggagatcgcctttgaccagggctccagagccgcccttcaggccggcgtcgagaagctcgccgccgcggtcggcgtcaccctcggacccagaggaaggaatgttgtcttggatgagtttggaacccccaaagtggtcaatgatggagttaccattgcccgcgctattgagcttgctgatcccatggagaatgctggtgcttccttgattcgtgaagttgctagcaagacgaatgactcggctggtgatggaaccacaactgcctctgttctcgctagggagatcatcaaattgggcatgttgagcattacttcaggggcaaatccagtgtccgttaagaagggcattgataagactgttcagaaattggtggaggaacttgagaagaaatcaaggccggtcaagggtagtggggatattaaagctgttgctgccatatcagctggaaatgatgaatttgttgggactatgatcgccgaagctattgacaaggttggccctgatggtgtcctctcaattgagtcgtcatcgtcgtttgagaccacagttgaagttgaagaagggatggagcttgacagaggatatatctcccctcagtttgtcactaaccttgaaaaatctattgttgagttcgaaaatgctcggattcttgtcactgatcagaagatatcatcgataaaagaaattattcctctgttggagcagacaacacagttaagagcaccacttcttataattgcagaggatgtaagtggcgaggcgctggcaacattagtcataaacaagcttagaggaattttaaatgtggctgcaatcaaagctcctggttttggtgagaggcgtaaagctcttcttcaggacattgccattgttacaggtgctgaatatcaatccaaagatcttggtctactagttgaggatacaacagtggagcagcttggcatagctcggaaagttacaatctcaagttcctcgacgaccattatagcagatgctgctagcaaagacgatatccaggccagaatcgcgcagctgaagagagagctttctcagacggactcgacgtatgactctgagaagttggcagagagaattgcaaagctttctggtggagttgctgtggttaaggttggagcatcgaccgaggcagagctagaggaccgcaagctccgcatagaggacgcgaagaatgcgacttttgcagcaatagaggaaggtattgttccaggaggcggtgcagcatatgttcatctatcgacattcgtaccggctatcaaggagacgttggatgatcctgaggagcgcctaggtgctgatatcattcagaaggctttggtggcacctgcagcgctgatagcccataatgctggggtggaaggtgaggtgattgtggataaaatccgggaaagcgagtgggagttcggttacaacgccatggcggacaagcacgagaacctggtggaggctggtgtgatcgaccctgccaaagtgactaggtgcgccctgcagaacgctgcctccgtggctggaatggtgctgactacccaagcaatcgttgtggagaagcccaagaaggctccagcagcagctgctgcagcggcaccatag

SEQ ID NO: 9837 - protein, 584 aa, Zea mays
MATIPTTDSGLVLSSSALLRRTRRAASSVTARLPAVARRRPQLLVRASTKEIAFDQGSRAALQAGVEKLAAAVGVTLGPRGRNVVLDEFGTPKVVNDGVTIARAIELADPMENAGASLIREVASKTNDSAGDGTTTASVLAREIIKLGMLSITSGANPVSVKKGIDKTVQKLVEELEKKSRPVKGSGDIKAVAAISAGNDEFVGTMIAEAIDKVGPDGVLSIESSSSFETTVEVEEGMELDRGYISPQFVTNLEKSIVEFENARILVTDQKISSIKEIIPLLEQTTQLRAPLLIIAEDVSGEALATLVINKLRGILNVAAIKAPGFGERRKALLQDIAIVTGAEYQSKDLGLLVEDTTVEQLGIARKVTISSSSTTIIADAASKDDIQARIAQLKRELSQTDSTYDSEKLAERIAKLSGGVAVVKVGASTEAELEDRKLRIEDAKNATFAAIEEGIVPGGGAAYVHLSTFVPAIKETLDDPEERLGADIIQKALVAPAALIAHNAGVEGEVIVDKIRESEWEFGYNAMADKHENLVEAGVIDPAKVTRCALQNAASVAGMVLTTQAIVVEKPKKAPAAAAAAAP

SEQ ID NO: 9838 - DNA, 1719 bp, Zea mays
  CDS (1)..(1719)
atggcatccgcgaatgccatctccaccgcctcccccttccggcccctctctcagggcagggcgacgaggtcacagcggttcgtggtgcgtgcgaacgccaaagacattgcctttgaccagaaatccagggcagcgctgcaggccggcgtcgagaagctcgcaaacgccgtcggtgtcaccctcgggccacgagggaggaatgtggtgctcgatgagtacggcaaccccaaagttgtgaatgatggagtcactattgcccgtgctattgagctgtatgatccaatggaaaatgctggtgcagcattgattcgtgaggttgctagcaagaccaatgattcagctggtgatgggactacaactgcatgcgtccttgctcgtgaaatcatcaagctaggccttctgagtgtaacatctggtgcaaatcctgtatcactaaagaaaggaatagacaaaactgtgcagggcctaattcaggaacttgagaataagtctagaccaatcaagggtggtggtgatatcaaagctgttgcatctatctctgctggcaatgatgaatttatcggatccatgattgctgaagcaattgacaaagtggggcctgatggtgttctatcaattgaatcctcctcgtcttttgagaccactgttgaagttgaagaaggaatggagattgaccgcggttatatttccccacaatttgtgacaaaccttgagaaatcaattgtggagtttgagaattgtaaggttcttattactgatcagaagatcacaagcataaaggaaatccttccgattttggagaagaccacacagctgagagcccctctgttcattattgctgaggacattactggtgaagctttggcaactcttgttgttaacaagcttcgaggaattctcaatgttgcagcgattaaggccccaagttttggtgagcggcggaaggctgtacttcaggacattgccatcgtcacaggtgctgagttcctagcaaaagatcttggtttgttggttgaaaatgctacagaggaacaacttggcacagcaaggaaagtcacgatacatcagactacaacaaccctcatagcagatgcagccagtaaagatgagatccaggcgagaattgcacaactgaagaaggagcttgctgagactgattcagtttatgatactgagaaattggccgagagaattgctaagcttgccggtggtgttgctgttatcaaggttggagctgcaactgagactgagcttgaggaccgccagctaagaattgaggatgcaaaaaatgccacttttgcagctatagaggagggcattgttccaggaggtggtgcggcatatgtgcacctatctacggttgtccctaagatcaaagaagcaattgaggaccctgatgagcgttttggcgctgatattattcaaaaggcattggtagcacctgcttcattgattgcacacaatgctggagtagagggtgaagtagttgtcgagaagatcaaggacagcgattgggaggtgggctacaatgcaatgactgacaagtacgagaacctgatggaggctggtgtgatcgaccctgccaaggtgaccaggtgtgcgctccagaatgcggcctcagtagctggaatggtcctaaccacacaggccattgttgttgagaagccaaagccgaagcctcaagtggcagagccaccggagggagcccttaccgtttaa

SEQ ID NO: 9839 - protein, 572 aa, Zea mays
MASANAISTASPFRPLSQGRATRSQRFVVRANAKDIAFDQKSRAALQAGVEKLANAVGVTLGPRGRNVVLDEYGNPKVVNDGVTIARAIELYDPMENAGAALIREVASKTNDSAGDGTTTACVLAREIIKLGLLSVTSGANPVSLKKGIDKTVQGLIQELENKSRPIKGGGDIKAVASISAGNDEFIGSMIAEAIDKVGPDGVLSIESSSSFETTVEVEEGMEIDRGYISPQFVTNLEKSIVEFENCKVLITDQKITSIKEILPILEKTTQLRAPLFIIAEDITGEALATLVVNKLRGILNVAAIKAPSFGERRKAVLQDIAIVTGAEFLAKDLGLLVENATEEQLGTARKVTIHQTTTTLIADAASKDEIQARIAQLKKELAETDSVYDTEKLAERIAKLAGGVAVIKVGAATETELEDRQLRIEDAKNATFAAIEEGIVPGGGAAYVHLSTVVPKIKEAIEDPDERFGADIIQKALVAPASLIAHNAGVEGEVVVEKIKDSDWEVGYNAMTDKYENLMEAGVIDPAKVTRCALQNAASVAGMVLTTQAIVVEKPKPKPQVAEPPEGALTV

SEQ ID NO: 9840 - DNA, 1731 bp, Zea mays
  CDS (1)..(1731)
atgtaccgcgcggccgctagcctcgcctccaaggcgcggcaagccgggagcagctccgccgctcgccaggttggaagcaggcttgcctggagcaggaactatgctgccaaggacatcaagtttggtgttgaggcccgtgctctgatgttgaggggtgttgaggagttggcagacgctgtcaaagtgacaatgggtcctaaggggcgcaatgtggttattgagcaaagcttcggtgcaccgaaagtcacaaaggatggtgtgactgttgcgaagagcattgaatttaaggatagagtaaagaatgttggtgcgagccttgtgaaacaggttgctaatgcaactaatgacactgctggtgatggtaccacatgtgctactgttttgacaaaagcaatatttactgaggggtgcaaatctgttgcggctggaatgaatgcaatggatttaaggcgtggaatctcaatggctgttgatgctgttgtgaccaatctgaagggcatggccagaatgattagcacttcagaagaaattgcacaggtgggtacaatatcagcaaatggagaaagggaaattggtgagcttattgccaaggctatggagaaggttggcaaagagggtgtgatcactattgcggatggcaacaccctttataatgagcttgaagttgtggagggtatgaaacttgacagaggttacatctctccgtacttcattaccaactcaaaagcccagaaatgtgaactggaagacccattgatcttaattcatgacaagaaagtgacaaatatgcatgctgtggttaaggttttagaaatggctctaaagaaacaaaggcctctactgattgttgcagaagatgtggaaagtgaagcattaggtactctgattattaacaagcttcgtgcaggcatcaaggtctgtgctgtcaaagctcctggttttggggaaaacaggaaggcaaacttacaggacctcgctatccttaccggaggagaggtaataactgaagagctaggaatgaaccttgagaatgttgagcctcacatgctgggttcatgcaaaaaggtgactgtctctaaggatgacactgttattcttgatggcgctggagacaaaaagtctattgaagagagggcagaccagattagatcagcaattgagaacagcacttcagattatgacaaggaaaagctccaggaacggttggcaaagctctctggaggtgttgctgttctgaagattggaggagccagcgaagcagaagttggtgagaagaaggatagagtgacagatgcactgaatgctactaaagctgctgttgaagagggcattgtaccaggtggtggtgttgctcttctctatgcatcgaaggagctcgataagttgcagacagcaaattttgatcagaagattggtgtgcaaatcattcagaatgctttgaagacacctgtacacaccattgcctccaatgctggggtggagggagcagtagttgtgggcaagcttttggagcaaggaaacactgaccttggttatgatgctgctaaagacgaatacgttgacatggtgaaggctggtatcattgatccgctaaaggtcatcagaactgcattggtggatgctgctagtgtgtcgtccctgatgaccaccacggaatccataattgtagagatccccaaggaagaggcaccggctccagcaatgggtggcatgggtggaatggattactaa

SEQ ID NO: 9841 - protein, 576 aa, Zea mays
MYRAAASLASKARQAGSSSAARQVGSRLAWSRNYAAKDIKFGVEARALMLRGVEELADAVKVTMGPKGRNVVIEQSFGAPKVTKDGVTVAKSIEFKDRVKNVGASLVKQVANATNDTAGDGTTCATVLTKAIFTEGCKSVAAGMNAMDLRRGISMAVDAVVTNLKGMARMISTSEEIAQVGTISANGEREIGELIAKAMEKVGKEGVITIADGNTLYNELEVVEGMKLDRGYISPYFITNSKAQKCELEDPLILIHDKKVTNMHAVVKVLEMALKKQRPLLIVAEDVESEALGTLIINKLRAGIKVCAVKAPGFGENRKANLQDLAILTGGEVITEELGMNLENVEPHMLGSCKKVTVSKDDTVILDGAGDKKSIEERADQIRSAIENSTSDYDKEKLQERLAKLSGGVAVLKIGGASEAEVGEKKDRVTDALNATKAAVEEGIVPGGGVALLYASKELDKLQTANFDQKIGVQIIQNALKTPVHTIASNAGVEGAVVVGKLLEQGNTDLGYDAAKDEYVDMVKAGIIDPLKVIRTALVDAASVSSLMTTTESIIVEIPKEEAPAPAMGGMGGMDY

SEQ ID NO: 9842 - DNA, 20 bp, Artificial sequence
  primer
atggcatcaacgtttactgc

SEQ ID NO: 9843 - DNA, 22 bp, Artificial sequence
  primer
ttaatacccatatcctgagttg

SEQ ID NO: 9844 - protein, 579 aa, Artificial sequence
  consensus sequence
  Variant (2)..(4): Xaa in position 2 to 4 is any amino acid
  Variant (6)..(9): Xaa in position 6 to 9 is any amino acid
  Variant (10)..(12): Xaa in position 10 to 12 is any or no amino acid
  Variant (14)..(16): Xaa in position 14 to 16 is any amino acid
  Variant (17)..(18): Xaa in position 17 to 18 is any or no amino acid
  Variant (21)..(22): Xaa in position 21 to 22 is any amino acid
  Variant (25)..(25): Xaa in position 25 is any amino acid
  Variant (28)..(28): Xaa in position 28 is any amino acid
  Variant (31)..(31): Xaa in position 31 is any amino acid
  Variant (39)..(43): Xaa in position 39 to 43 is any amino acid
  Variant (44)..(44): Xaa in position 44 is any or no amino acid
  Variant (46)..(46): Xaa in position 46 is any amino acid
  Variant (48)..(48): Xaa in position 48 is any amino acid
  Variant (50)..(51): Xaa in position 50 to 51 is any amino acid
  Variant (52)..(52): Xaa in position 52 is any or no amino acid
  Variant (56)..(57): Xaa in position 56 to 57 is any amino acid
  Variant (59)..(60): Xaa in position 59 to 60 is any amino acid
  Variant (64)..(64): Xaa in position 64 is any amino acid
  Variant (66)..(68): Xaa in position 66 to 68 is any amino acid
  Variant (70)..(70): Xaa in position 70 is any amino acid
  Variant (73)..(78): Xaa in position 73 to 78 is any amino acid
  Variant (80)..(81): Xaa in position 80 to 81 is any amino acid
  Variant (84)..(85): Xaa in position 84 to 85 is any amino acid
  Variant (98)..(102): Xaa in position 98 to 102 is any amino acid
  Variant (105)..(107): Xaa in position 105 to 107 is any amino acid
  Variant (109)..(110): Xaa in position 109 to 110 is any amino acid
  Variant (112)..(112): Xaa in position 112 is any amino acid
  Variant (115)..(118): Xaa in position 115 to 118 is any amino acid
  Variant (121)..(143): Xaa in position 121 to 143 is any amino acid
  Variant (144)..(154): Xaa in position 144 to 154 is any or no amino acid
  Variant (157)..(157): Xaa in position 157 is any amino acid
  Variant (159)..(160): Xaa in position 159 to 160 is any amino acid
  Variant (164)..(168): Xaa in position 164 to 168 is any amino acid
  Variant (169)..(169): Xaa in position 169 is any or no amino acid
  Variant (171)..(172): Xaa in position 171 to 172 is any amino acid
  Variant (175)..(175): Xaa in position 175 is any amino acid
  Variant (178)..(178): Xaa in position 178 is any amino acid
  Variant (182)..(183): Xaa in position 182 to 183 is any amino acid
  Variant (184)..(184): Xaa in position 184 is any or no amino acid
  Variant (189)..(198): Xaa in position 189 to 198 is any amino acid
  Variant (200)..(202): Xaa in position 200 to 202 is any amino acid
  Variant (206)..(206): Xaa in position 206 is any amino acid
  Variant (210)..(210): Xaa in position 210 is any amino acid
  Variant (213)..(213): Xaa in position 213 is any amino acid
  Variant (218)..(233): Xaa in position 218 to 233 is any amino acid
  Variant (235)..(237): Xaa in position 235 to 237 is any amino acid
  Variant (241)..(247): Xaa in position 241 to 247 is any amino acid
  Variant (248)..(248): Xaa in position 248 is any or no amino acid
  Variant (250)..(250): Xaa in position 250 is any amino acid
  Variant (253)..(257): Xaa in position 253 to 257 is any amino acid
  Variant (258)..(261): Xaa in position 258 to 261 is any or no amino acid
  Variant (264)..(264): Xaa in position 264 is any amino acid
  Variant (266)..(266): Xaa in position 266 is any amino acid
  Variant (268)..(268): Xaa in position 268 is any amino acid
  Variant (271)..(273): Xaa in position 271 to 273 is any amino acid
  Variant (277)..(277): Xaa in position 277 is any amino acid
  Variant (281)..(281): Xaa in position 281 is any amino acid
  Variant (283)..(284): Xaa in position 283 to 284 is any amino acid
  Variant (287)..(291): Xaa in position 287 to 291 is any amino acid
  Variant (293)..(293): Xaa in position 293 is any amino acid
  Variant (298)..(298): Xaa in position 298 is any amino acid
  Variant (301)..(302): Xaa in position 301 to 302 is any amino acid
  Variant (305)..(306): Xaa in position 305 to 306 is any amino acid
  Variant (308)..(308): Xaa in position 308 is any amino acid
  Variant (310)..(310): Xaa in position 310 is any amino acid
  Variant (312)..(312): Xaa in position 312 is any amino acid
  Variant (317)..(326): Xaa in position 317 to 326 is any amino acid
  Variant (327)..(327): Xaa in position 327 is any or no amino acid
  Variant (329)..(335): Xaa in position 329 to 335 is any amino acid
  Variant (338)..(345): Xaa in position 338 to 345 is any amino acid
  Variant (347)..(347): Xaa in position 347 is any amino acid
  Variant (348)..(348): Xaa in position 348 is any or no amino acid
  Variant (350)..(353): Xaa in position 350 to 353 is any amino acid
  Variant (354)..(354): Xaa in position 354 is any or no amino acid
  Variant (356)..(362): Xaa in position 356 to 362 is any amino acid
  Variant (363)..(365): Xaa in position 363 to 365 is any or no amino acid
  Variant (367)..(368): Xaa in position 367 to 368 is any amino acid
  Variant (369)..(370): Xaa in position 369 to 370 is any or no amino acid
  Variant (373)..(381): Xaa in position 373 to 381 is any amino acid
  Variant (382)..(382): Xaa in position 382 is any or no amino acid
  Variant (384)..(385): Xaa in position 384 to 385 is any amino acid
  Variant (386)..(386): Xaa in position 386 is any or no amino acid
  Variant (390)..(390): Xaa in position 390 is any amino acid
  Variant (393)..(393): Xaa in position 393 is any amino acid
  Variant (397)..(397): Xaa in position 397 is any amino acid
  Variant (403)..(404): Xaa in position 403 to 404 is any amino acid
  Variant (407)..(407): Xaa in position 407 is any amino acid
  Variant (408)..(409): Xaa in position 408 to 409 is any or no amino acid
  Variant (411)..(411): Xaa in position 411 is any amino acid
  Variant (413)..(416): Xaa in position 413 to 416 is any amino acid
  Variant (418)..(418): Xaa in position 418 is any amino acid
  Variant (420)..(421): Xaa in position 420 to 421 is any amino acid
  Variant (425)..(425): Xaa in position 425 is any amino acid
  Variant (428)..(428): Xaa in position 428 is any amino acid
  Variant (437)..(437): Xaa in position 437 is any amino acid
  Variant (441)..(442): Xaa in position 441 to 442 is any amino acid
  Variant (443)..(443): Xaa in position 443 is any or no amino acid
  Variant (445)..(461): Xaa in position 445 to 461 is any amino acid
  Variant (462)..(481): Xaa in position 462 to 481 is any or no amino acid
  Variant (483)..(484): Xaa in position 483 to 484 is any amino acid
  Variant (486)..(488): Xaa in position 486 to 488 is any amino acid
  Variant (490)..(492): Xaa in position 490 to 492 is any amino acid
  Variant (494)..(496): Xaa in position 494 to 496 is any amino acid
  Variant (498)..(499): Xaa in position 498 to 499 is any amino acid
  Variant (503)..(514): Xaa in position 503 to 514 is any amino acid
  Variant (515)..(536): Xaa in position 515 to 536 is any or no amino acid
  Variant (538)..(539): Xaa in position 538 to 539 is any amino acid
  Variant (541)..(551): Xaa in position 541 to 551 is any amino acid
  Variant (552)..(552): Xaa in position 552 is any or no amino acid
  Variant (554)..(555): Xaa in position 554 to 555 is any amino acid
  Variant (558)..(558): Xaa in position 558 is any amino acid
  Variant (561)..(561): Xaa in position 561 is any amino acid
  Variant (563)..(563): Xaa in position 563 is any amino acid
  Variant (566)..(567): Xaa in position 566 to 567 is any amino acid
  Variant (569)..(571): Xaa in position 569 to 571 is any amino acid
  Variant (573)..(576): Xaa in position 573 to 576 is any amino acid
  Variant (578)..(578): Xaa in position 578 is any amino acid
KXXXFXXXXXXXRXXXXXGVXXLAXAVXVTXGPKGRNVXXXXXXGXPXIXXXDGVXXAXXIELXDXXXNXGAXXXXXXAXXTNXXAGDGTTTATVLAXXXXXEGXXXVXXGXNPXXXXRGXXXXXXXXXXXXXXXXXXXXXXXXXXXXXXXXXXIAXVXXISAXXXXXXGXXIAXAMXKVGXXXGVITXXXXXXXXXXLXXXEGMXFDRXGYXSPYFXXXXXXXXXXXXXXXXLXXXKKIXXXXXXXXPXLEXXXXXXXXXPLXIXAXEDXXXEALXTLVXNXXRGXXXXXAXKAPGXFGXXRKXXLXDXAXLTGGXXXXXXXXXXXLXXXXXXXLGXXXXXXXXKXXTXXXXXGXXXXXXXXXXRXXXXQIXXXXXXXXXXYXXXEKLXERXAKLXGGVAVXXVGXXXEXEXXXXKXRXXDALXATXAAVEEGIVXGGGXXXLXXXXXXXXXXXXXXXXXXXXXXXXXXXXXXXXXXXXXGXXIXXXAXXXPXXXIXXNAGXXXXXXXXXXXXXXXXXXXXXXXXXXXXXXXXXXGXXAXXXXXXXXXXXXGXXDPXKVXRXALXXAXXXAXXXXTXE

SEQ ID NO: 9845 - protein, 31 aa, Artificial sequence
  protein pattern
  Variant (2)..(4): Xaa in position 2 to 4 is any amino acid
  Variant (6)..(7): Xaa in position 6 to 7 is any or no amino acid
  Variant (9)..(9): Xaa in position 9 is any amino acid
  Variant (11)..(12): Xaa in position 11 to 12 is any amino acid
  Variant (15)..(16): Xaa in position 15 to 16 is any amino acid
  Variant (19)..(19): Xaa in position 19 is Lys or Arg
  Variant (23)..(23): Xaa in position 23 is Ala, Asp, Glu or Gln
  Variant (26)..(26): Xaa in position 26 is any amino acid
  Variant (27)..(27): Xaa in position 27 is Ile, Leu or Val
  Variant (28)..(28): Xaa in position 28 is any amino acid
  Variant (31)..(31): Xaa in position 31 is Cys or Gly
EXXXKXXKXRXXDAXXATXAAVXEGXXXGGX

SEQ ID NO: 9846 - protein, 25 aa, Artificial sequence
  protein pattern
  Variant (3)..(3): Xaa in position 3 is any amino acid
  Variant (4)..(4): Xaa in position 4 is Pro, Ser or Thr
  Variant (5)..(7): Xaa in position 5 to 7 is any amino acid
  Variant (8)..(8): Xaa in position 8 is Ala, Gly, Asn or Ser
  Variant (9)..(18): Xaa in position 9 to 18 is any amino acid
  Variant (22)..(22): Xaa in position 22 is any amino acid
  Variant (23)..(23): Xaa in position 23 is Phe, Ile or Leu
GVXXXXXXXXXXXXXXXXEGMXXDR

SEQ ID NO: 9847 - protein, 27 aa, Artificial sequence
  protein pattern
  Variant (2)..(2): Xaa in position 2 is any or no amino acid
  Variant (4)..(4): Xaa in position 4 is any or no amino acid
  Variant (7)..(7): Xaa in position 7 is any amino acid
  Variant (10)..(10): Xaa in position 10 is any amino acid
  Variant (12)..(12): Xaa in position 12 is any amino acid
  Variant (13)..(13): Xaa in position 13 is Ala, Cys or Gly
  Variant (14)..(14): Xaa in position 14 is Ile, Leu, Met or Val
  Variant (15)..(16): Xaa in position 15 to 16 is any amino acid
  Variant (18)..(18): Xaa in position 18 is any or no amino acid
  Variant (20)..(20): Xaa in position 20 is any amino acid
  Variant (21)..(21): Xaa in position 21 is Ala, Gly, Ser or Val
  Variant (22)..(26): Xaa in position 22 to 26 is any amino acid
  Variant (27)..(27): Xaa in position 27 is Ala, Ser or Thr
GXIXDPXKVXRXXXXXAXSXXXXXXXX

SEQ ID NO: 9848 - protein, 24 aa, Artificial sequence
  protein pattern
  Variant (2)..(3): Xaa in position 2 to 3 is any amino acid
  Variant (9)..(9): Xaa in position 9 is Asp or Glu
  Variant (10)..(10): Xaa in position 10 is Asn or Arg
  Variant (11)..(11): Xaa in position 11 is Lys or Arg
  Variant (12)..(12): Xaa in position 12 is any amino acid
  Variant (13)..(13): Xaa in position 13 is Ala, Asn, Gln or Ser
  Variant (14)..(14): Xaa in position 14 is any amino acid
  Variant (16)..(16): Xaa in position 16 is any amino acid
  Variant (18)..(18): Xaa in position 18 is Ile, Leu or Met
  Variant (19)..(19): Xaa in position 19 is Ala or Gly
  Variant (20)..(21): Xaa in position 20 to 21 is any amino acid
  Variant (22)..(22): Xaa in position 22 is Ser or Thr
  Variant (23)..(23): Xaa in position 23 is Ala, Asp, Gly, Asn or Ser
  Variant (24)..(24): Xaa in position 24 is Ala, Gly or Ser
AXXAPGFGXXXXXXLXDXXXXXXX

SEQ ID NO: 9849 - protein, 22 aa, Artificial sequence
  protein pattern
  Variant (2)..(3): Xaa in position 2 to 3 is any amino acid
  Variant (4)..(5): Xaa in position 4 to 5 is any or no amino acid
  Variant (8)..(8): Xaa in position 8 is Ile, Leu, Met or Val
  Variant (12)..(12): Xaa in position 12 is Ala, Ser, Thr or Val
  Variant (16)..(17): Xaa in position 16 to 17 is any amino acid
  Variant (18)..(18): Xaa in position 18 is Ala, Ile, Leu or Val
  Variant (19)..(19): Xaa in position 19 is any amino acid
  Variant (20)..(20): Xaa in position 20 is Ala, Ile or Val
  Variant (22)..(22): Xaa in position 22 is Ala or Gly
KXXXXERXAKLXGGVXXXXXGX

SEQ ID NO: 9850 - protein, 23 aa, Artificial sequence
  protein pattern
  Variant (2)..(3): Xaa in position 2 to 3 is any or no amino acid
  Variant (6)..(6): Xaa in position 6 is Ile, Met or Val
  Variant (7)..(7): Xaa in position 7 is any amino acid
  Variant (8)..(8): Xaa in position 8 is Ile, Leu or Val
  Variant (9)..(9): Xaa in position 9 is any amino acid
  Variant (10)..(10): Xaa in position 10 is Lys or Arg
  Variant (12)..(14): Xaa in position 12 to 14 is any amino acid
  Variant (15)..(15): Xaa in position 15 is Ala, Glu, Gly, Ser or Thr
  Variant (16)..(22): Xaa in position 16 to 22 is any amino acid
  Variant (23)..(23): Xaa in position 23 is Ile, Leu or Val
AXXNPXXXXXGXXXXXXXXXXXX

SEQ ID NO: 9851 - protein, 9 aa, Artificial sequence
  protein pattern
  Variant (3)..(3): Xaa in position 3 is Ala, Ile, Leu or Val
  Variant (7)..(7): Xaa in position 7 is Phe or Met
  Variant (8)..(8): Xaa in position 8 is Ala, Ile or Val
  Variant (9)..(9): Xaa in position 9 is Asn, Ser or Thr
GYXSPYXXX

SEQ ID NO: 9852 - protein, 12 aa, Artificial sequence
  protein pattern
  Variant (4)..(4): Xaa in position 4 is Ile, Leu or Val
  Variant (5)..(5): Xaa in position 5 is Ile or Leu
  Variant (6)..(6): Xaa in position 6 is Asp or Glu
  Variant (7)..(8): Xaa in position 7 to 8 is any amino acid
  Variant (9)..(9): Xaa in position 9 is Phe, Trp or Tyr
  Variant (11)..(11): Xaa in position 11 is Ala, Gly or Ser
RNVXXXXXXGXP

SEQ ID NO: 9853 - protein, 20 aa, Artificial sequence
  protein pattern
  Variant (2)..(2): Xaa in position 2 is Ile, Leu, Met or Val
  Variant (3)..(4): Xaa in position 3 to 4 is any amino acid
  Variant (6)..(8): Xaa in position 6 to 8 is any amino acid
  Variant (10)..(11): Xaa in position 10 to 11 is any amino acid
  Variant (15)..(15): Xaa in position 15 is any amino acid
  Variant (16)..(16): Xaa in position 16 is Asp, Glu or Asn
  Variant (17)..(17): Xaa in position 17 is Ala, Gly, Pro or Ser
  Variant (18)..(19): Xaa in position 18 to 19 is any amino acid
  Variant (20)..(20): Xaa in position 20 is Ile or Val
AXXXPXXXIXXNAGXXXXXX

SEQ ID NO: 9854 - DNA, 2241 bp, Oryza sativa
  CDS (1)..(2241)
atgtcgggtgctgctctcgtcgcaatcgcggcctccatcggcaacctgctgcagggatgggacaatgccaccattgcaggtgctgtactatacataaagaaggaattcaagctagaaagtgagcccactgtggaggggctaatcgtggccatgtcactgattggtgcaaccatcatcacaacattctcagggccggtatcagactggatcggccggcgccctatgctcattctctcttcaattctctacttcctcagcagcctcatcatgctatggtccccgaatgtctatgtgttactgctcgcacgccttatagatggattcggcatcggcttggctgtcacacttgtacctttgtacatctcagagacagctccttcagagatcaggggtttgctgaatacactgccacagttcagtgggtcaggagggatgttcttgtcctactgcatggtgtttgggatgtcactgttgccgtcacctgactggagaattatgcttggtgttctcgcaatcccttcgttgtttttcttcggattgacaatattctatctgccagaatcaccaagatggcttgtcagcaaagggcggatggctgaggcaaagaaggtattacaaaaattacgtgggagagaggatgtctcaggagaaatggctcttcttgttgaaggtttggaggttggagctgacacttccattgaagagtacatcatcggaccggctatagagccagctgatgagcatgttgttgatggcgataaggaccaaataacactgtacgggcctgaagagggccaatcatggattgctcgaccttccaagggacccagcattcttggaagtgtgctttctcttacatctcgtcatggcagcatggtgaaccagagcgtgccacttatggatcctatagtcacgcttttcggcagtgtccatgagaacatgcctcatgctggaggaagcatgcggagtacattgtttcccaactttggtagtatgtttagtgtgacagatcagcaccccaaggttgatcaatgggatgaggagaaccttcatagggatgatgaggaatacgcgtctgatggtgctggaggtgactatgaagacaatgtccacagcccgttgctgtcccgacagaccacgagcgcagaagggaaggacattgcacaccatgctcatcgtggaagtgctctgagtatgagaagaagaagcctcttggaagagggtggcgaggcggtgagcagcactggcattggtgggggatggcagcttgcatggaaatggtcagagcgagaaggcgaggatggtaagaaggaaggaggatttaaaaggatctacttgcaccaagaggaagtgccaggatcaagaaggggctcagttatttcacttcctggtggaggggacgctcctgaaggcagcgaattcatacatgctgccgctttggtaagccaaccagcactttactccaaggatatcattgaacagcgtatgtccggtccagccatgattcatccatcagaggcagctgccaaaggttcaagctggaaagatttgtttgaacctggagtgaggcgtgcgttgttagtcggtgttggaattcaaatccttcaacagtttgctggaataaatggggttctctattacactccacaaatacttgagcaagcgggggtggcagttctcctttccaatcttggcctcagttcagcatcagcttccatcttgatcagttctctgaccaccctactgatgcttcctagcattggtttagccatgagacttatggacatctctggaagaaggtttctgcttctgggcacaattccagtcttgatagcatctctagttgtcttggttgtgtccaatgttatcgacctgggtacagtggcccacgccgcactctccacaatcagcgtcatcatctacttctgctgcttcgtcatgggattcggtccgatccccaacattctgtgtgcggagatcttccccactagggtccgcggcatctgcattgccatctgcgccctgacattctggattggtgatatcatagtcacctacagcctccctgtgatgctgaatgccatcggcctagcaggtgtctttggtatatacgcagttgtttgctcgattgccttcgtgttcgtcttcctcaaggtccccgagacgaagggcatgccgctcgaagtcatcaccgagttcttcgctgttggtgcaaagcaaatgcaggctacaaaggcctaa

SEQ ID NO: 9855 - protein, 746 aa, Oryza sativa
MSGAALVAIAASIGNLLQGWDNATIAGAVLYIKKEFKLESEPTVEGLIVAMSLIGATIITTFSGPVSDWIGRRPMLILSSILYFLSSLIMLWSPNVYVLLLARLIDGFGIGLAVTLVPLYISETAPSEIRGLLNTLPQFSGSGGMFLSYCMVFGMSLLPSPDWRIMLGVLAIPSLFFFGLTIFYLPESPRWLVSKGRMAEAKKVLQKLRGREDVSGEMALLVEGLEVGADTSIEEYIIGPAIEPADEHVVDGDKDQITLYGPEEGQSWIARPSKGPSILGSVLSLTSRHGSMVNQSVPLMDPIVTLFGSVHENMPHAGGSMRSTLFPNFGSMFSVTDQHPKVDQWDEENLHRDDEEYASDGAGGDYEDNVHSPLLSRQTTSAEGKDIAHHAHRGSALSMRRRSLLEEGGEAVSSTGIGGGWQLAWKWSEREGEDGKKEGGFKRIYLHQEEVPGSRRGSVISLPGGGDAPEGSEFIHAAALVSQPALYSKDIIEQRMSGPAMIHPSEAAAKGSSWKDLFEPGVRRALLVGVGIQILQQFAGINGVLYYTPQILEQAGVAVLLSNLGLSSASASILISSLTTLLMLPSIGLAMRLMDISGRRFLLLGTIPVLIASLVVLVVSNVIDLGTVAHAALSTISVIIYFCCFVMGFGPIPNILCAEIFPTRVRGICIAICALTFWIGDIIVTYSLPVMLNAIGLAGVFGIYAVVCSIAFVFVFLKVPETKGMPLEVITEFFAVGAKQMQATKA

SEQ ID NO: 9856 - DNA, 2235 bp, Triticum aestivum
  CDS (1)..(2235)
atgtcgggtgctgcactggtcgcgattgcggcttccattggcaatctgctgcaggggtgggacaatgccaccatcgctggtgctgttctgtacatcaagaaggaattccagctcgaaaataatccgactgtggaggggctcatcgtggccatgtcgctcatcggtgcaaccatcatcaccacattctccgggccagtatcagactgggttggccggcgccctatgctcattctctcttcgcttctctacttcctcagcggcttaatcatgctatggtcacccaatgtctatgtgctgctcctggcacgccttgtcgatggctttggtatcggcttggctgtcacactggtgcctttgtacatctcagagacggctccttcggagatcaggggaaggctcaacacgcttccacagttcagtgggtcaggagggatgttcttgtcatactgcatggtgttcgggatgtcactcttgccatcacctgattggagaattatgctcggggttctctcagttccgtcgttgtttttcttcgtcttgacggtattttacctgccagaatctccgagatggcttgtcagcaagggccgaatggcagaggcaaagaaggtgctgcaaagattacggggaagggaggatgtctcaggagaaatggcccttcttgttgaaggtttggaggttggaggagacacctccattgaggagtacataataggaccagctaatgacccagctgatgatcatgttgttgatggcgataatgaccaaataacactatatgggcctgaagagggccaatcatggattgctcgaccttccaagggacccagcatgcttggaagtgtgctttctcttgcatctcgtcatggtagcatggtgaaccagagtgtgccccttatggatcctctagtcacgcttttcggaagtgttcatgagaacatgcctcaagttggaggaagcatgcggagcacattgtttcctaactttggcagcatgctcagtgtggcagatcagcacccaaaaactgagcactgggatgaggagaacgttcatagggacgatgaagaatatgcatctgatgctggaggcgactacgaagataatgtccatagcccgctgctgtcacgacagaccacaaacacggatgggaaggaccatggtcaccatggaagcactttgggcatgagaaggagaagtctcttggaagagggtggggaggcagtcagcagcactggtattggtggggggtggcaactcacatggaaatggtcggagcgacaaggcgaggatggcaagaaggaaggaggcttcaaaagaatctacttgcaccaagagggggtggccgactcaagaaggggctctgttgtttcacttcctggtgggggtgatgccacgcaagggggcagtgggtttatacacgcagctgctttggtaagccactcggctctttactccaaggatcttatggaagagcgtatggcggctggtccagccatgattcatccattggaggcagctcccaaaggttcaatctggaaagatctgtttgaacctggtgtgaggcgtgcattgttcgtcggcgttggaattcagatgcttcagcagtttgctggaataaatggagttctctactatactcctcaaattctggagcaagctggtgtggcggttcttctttccaatcttggcctcagttcagcatcagcatccatcttgatcagttctctcaccaccttactcatgctcccaagcattggtgtagccatgagacttatggatatatctggaagaaggtttctgctactaggcacaattcccatcttgatagcatccctaattgttttggttgtgtccaatgttatcaacttgagtacggtgccccacgctgtgctctccacagttagcgtcattgtctacttctgctgctttgtcatgggctttggcccgatccccaacattctatgtgcagagattttccccaccagagcccgtggtgtctgcatcgctatttgcgccctcacattctggatttgtgacattattgttacctacagcctgcctgtgatgctgaatgctattggtctagcaggtgtctttggtatatatgcagtcgtttgctgcatcgcctttgtgttcgtctacctaaaggtcccagagacaaagggcatgcccctcgaggtcatcaccgagttctttgcggttggggcgaagcaagcgcagaccaccattgcctga

SEQ ID NO: 9857 - protein, 744 aa, Triticum aestivum
MSGAALVAIAASIGNLLQGWDNATIAGAVLYIKKEFQLENNPTVEGLIVAMSLIGATIITTFSGPVSDWVGRRPMLILSSLLYFLSGLIMLWSPNVYVLLLARLVDGFGIGLAVTLVPLYISETAPSEIRGRLNTLPQFSGSGGMFLSYCMVFGMSLLPSPDWRIMLGVLSVPSLFFFVLTVFYLPESPRWLVSKGRMAEAKKVLQRLRGREDVSGEMALLVEGLEVGGDTSIEEYIIGPANDPADDHVVDGDNDQITLYGPEEGQSWIARPSKGPSMLGSVLSLASRHGSMVNQSVPLMDPLVTLFGSVHENMPQVGGSMRSTLFPNFGSMLSVADQHPKTEHWDEENVHRDDEEYASDAGGDYEDNVHSPLLSRQTTNTDGKDHGHHGSTLGMRRRSLLEEGGEAVSSTGIGGGWQLTWKWSERQGEDGKKEGGFKRIYLHQEGVADSRRGSVVSLPGGGDATQGGSGFIHAAALVSHSALYSKDLMEERMAAGPAMIHPLEAAPKGSIWKDLFEPGVRRALFVGVGIQMLQQFAGINGVLYYTPQILEQAGVAVLLSNLGLSSASASILISSLTTLLMLPSIGVAMRLMDISGRRFLLLGTIPILIASLIVLVVSNVINLSTVPHAVLSTVSVIVYFCCFVMGFGPIPNILCAEIFPTRARGVCIAICALTFWICDIIVTYSLPVMLNAIGLAGVFGIYAVVCCIAFVFVYLKVPETKGMPLEVITEFFAVGAKQAQTTIA

SEQ ID NO: 9858 - DNA, 2247 bp, Zea mays
  CDS (1)..(2247)
atggggggcgccgtgatggtcgccatcgcggcctctatcggcaacttgctgcagggctgggacaatgcgacaattgctggagccgtcctgtacataaagaaggaattcaacctgcagagcgagcctctgatcgagggcctcatcgtcgccatgtccctcattggggcaacagtcatcacgacgttctccggggcagcggccgactgcgttggtaggaggcccatgctggtcgcctcggctgtcctctacttcgtcagtgggctggtgatgctctgggcgccaagtgtgtacatcttgctcctcgcaaggctcattgatgggttcggtatcggtttggcggtcacacttgttcctctctacatctccgagactgcgccgacagacattcgtgggctgttgaacacgttgccgcagttcagtgggtcaggagggatgttcctctcctactgcatggtgtttgggatgtccctcatgcccaaacctgattggaggctcatgcttggagttctgtcgatcccgtcacttatttactttggactgactgtcttctacttgcctgaatcaccaaggtggcttgtgagcaaaggaaggatggcggaggcgaagagagtgttgcaaaggctgcggggaagagaagatgtctcaggggagatggctcttctagttgaaggtttgggggtcggtaaagatacacgtattgaagaatacataattggtcccgatgatgaacttgctgatgaagggctggctccagatccagagaagatcaaactatatggacctgaagaaggcctatcttgggttgcccgacctgttcggggacaaagtgctcttggaagcgcgttaggtctcatctctcgtcatgggagtatggcggctagtcagggtaagcccctcgtggatcctatggtcactcttttcggaagtgttcatgaaaagatgcctgagatcatggggagcatgaggagcacattgtttcccaactttggcagcatgtttagtgttgccgaccagcagcaggtgaaagctgactgggacgccgagagtcaaagggaaggtgaagattatgcttcggatcatggtggcgatgacattgaggataacctccaaagcccacttatttctcgtcaggcaacaagtgtggaaggaaaggagatcgctgcacctcatggtagcatattgggtgctgtgggaaggagcagtagcttgcagggaggggaggcagtaagcagcatgggcattggcggaggatggcagttggcgtggaaatggaccgagagagagggcgaagatgggcaaaaggaaggtggcttccagcgtatttacttgcatgaggagggcgtacaaggcaacaggggttctatattgtcattaccaggcggggatgttcctcctggtggtgagttcatccaggctgcagctcttgtgagccaaccagctctttactctaaggaactgctggagcaacgtgctgctggtcctgcgatgatgcatccatctgaagcagttactaaaggtccaagatgggccgacctatttgagcctggggtgaagcatgcactgtttgttggcataggaatacagatcctgcaacagtttgctggcatcaacggcgttctctactacactcctcaaattcttgagcaagcaggcgtcggtgttcttctgtcgaacctcggccttaacgcttcttcggcatcaatcctcattagcgccctgacgaccttactgatgctcccaagcatcggcattgcgatgaggctcatggatatgtccggaaggaggtttctcctcctcgcgacgatcccagtcctaatagtcgcgctactcgtcctggtggtgtccaacatcgtggacgtgggggacgtggcgcacgcggcgctctccacggccagcgtcatagtctacttctgcttcttcgtcatggggttcgggcccgtccccaacatcctctgcgcagagatcttccccaccacggtccgcggtgtctgcatcgccatctgcgccctggccttctgggtcggcgacatcatcgtgacgtacactctccccgtgatgctgaacgtcgtcgggctcgccggcgtctttggggtgtacgccgtcgtgtgcgtcctagccctcgcgttcgtgttcatcaaggtgcccgagacgaagggcatgcctctcgaggtcatcaccgagttcttctccgttggggcaaagcaagccaaggaagaggaggaggaggaggaggccagggaaggttga

SEQ ID NO: 9859 - protein, 748 aa, Zea mays
MGGAVMVAIAASIGNLLQGWDNATIAGAVLYIKKEFNLQSEPLIEGLIVAMSLIGATVITTFSGAAADCVGRRPMLVASAVLYFVSGLVMLWAPSVYILLLARLIDGFGIGLAVTLVPLYISETAPTDIRGLLNTLPQFSGSGGMFLSYCMVFGMSLMPKPDWRLMLGVLSIPSLIYFGLTVFYLPESPRWLVSKGRMAEAKRVLQRLRGREDVSGEMALLVEGLGVGKDTRIEEYIIGPDDELADEGLAPDPEKIKLYGPEEGLSWVARPVRGQSALGSALGLISRHGSMAASQGKPLVDPMVTLFGSVHEKMPEIMGSMRSTLFPNFGSMFSVADQQQVKADWDAESQREGEDYASDHGGDDIEDNLQSPLISRQATSVEGKEIAAPHGSILGAVGRSSSLQGGEAVSSMGIGGGWQLAWKWTEREGEDGQKEGGFQRIYLHEEGVQGNRGSILSLPGGDVPPGGEFIQAAALVSQPALYSKELLEQRAAGPAMMHPSEAVTKGPRWADLFEPGVKHALFVGIGIQILQQFAGINGVLYYTPQILEQAGVGVLLSNLGLNASSASILISALTTLLMLPSIGIAMRLMDMSGRRFLLLATIPVLIVALLVLVVSNIVDVGDVAHAALSTASVIVYFCFFVMGFGPVPNILCAEIFPTTVRGVCIAICALAFWVGDIIVTYTLPVMLNVVGLAGVFGVYAVVCVLALAFVFIKVPETKGMPLEVITEFFSVGAKQAKEEEEEEEAREG

SEQ ID NO: 9860 - DNA, 2238 bp, Zea mays
  CDS (1)..(2238)
atgtcgggggctgttcttgtcgccatcgtcgcctccatcggcaatctgttgcaggggtgggacaatgccaccatcgcagctgctgttctgtatataaagaaggaatttcaattgcaaaatgagcccactgtggagggactaattgtgtcaatgtcacttatcggcgccaccattgttactacattctccgggccattatcagactcgattggccgacgccctatgcttattctctcttcaattctgtacttcttcagcggcctcatcatgctatggtctcctaatgtctatgtcctgctgttggcacgcttcgtagatggatttggtattggcttggctgtcacgcttgtgcctttgtacatttcagaaatagccccttcggagattagaggtttgctgaatacactaccacaattcagtggatcaggaggaatgttcttgtcatactgcatggtgtttgggatgtccctgtcgccatcacccgattggagaattatgcttggtgtgctcgcgataccttcattgttcttctttggtttgacaatattttatcttcctgaatctccaagatggctcgttagcaaaggtcggatggcagaggcaaaaaaggtgttgcaaaagttacgggggaaagacgatgtctcaggtgaattgtcccttcttctcgaagggttggaggttggaggagacacttccattgaagagtacatcattggacctgccaccgaggcagccgatgatcttgttactgacggtgataaggaacaaatcacactttatgggcctgaagaaggccagtcatggattgctcgaccttccaagggacccagcatgcttggaagtgtgctttctcttgcatctcgtcatgggagcatggtgaaccagagtgtaccccttatggatccgattgtgacactttttggtagtgtccatgagaatatgcctcaagctggaggaagtatgaggagcacattgtttccaaactttggaagtatgttcagtgtcacagatcagcatgccaaaaatgagcagtgggatgaagagaatcttcatagggatgacgaggagtacgcatctgatggtgcaggaggtgactatgaggacaatctccatagcccattgctgtccaggcaggcaacaggtgcggaagggaaggacattgtgcaccatggtcaccgtggaagtgctttgagcatgagaaggcaaaccctcttaggggagggtggagatggtgtgagcagcactgatatcggtgggggatggcagcttgcttggaaatggtcagagaaggaaggtgagaatggtagaaaggaaggtggtttcaaaagagtctacttgcaccaagagggagttcctggctcaagaaggggctcaattgtttcacttcccggtggtggcgatgttcttgagggtagtgagtttgtacatgctgctgctttagtaagtcagtcagcacttttctcaaagggtcttgctgaaccacgcatgtcagatgctgccatggttcacccatctgaggtagctgccaaaggttcacgttggaaagatttgtttgaacctggagtgaggcgtgccctgttagtcggtgttggaattcagatccttcaacagtttgctggaataaacggtgttctgtactataccccacaaattcttgagcaagctggtgtggcagttattctttccaaatttggtctcagctcggcatcagcatccatcttgatcagttctctcactaccttactaatgcttccttgcattggctttgccatgctgcttatggatctttccggaagaaggtttttgctgctaggcacaattccaatcttgatagcatctctagttatcctggttgtgtccaatctaattgatttgggtacactagcccatgctttgctctccacagtcagtgttatcgtctacttctgctgcttcgttatgggatttggtcccatccccaacattttatgtgcagagatctttccaaccagggttcgtggcctctgtattgccatttgtgcctttacattctggatcggagatatcatcgtcacctacagccttcctgtgatgctgaatgctattggactggcgggtgttttcagcatatatgcagtcgtatgcttgatttcctttgtgttcgtcttccttaaggtccctgagacaaaggggatgccccttgaggtcattaccgaattctttgcagttggtgcgaagcaagcggctgcaaaagcctaa

SEQ ID NO: 9861 - protein, 745 aa, Zea mays
MSGAVLVAIVASIGNLLQGWDNATIAAAVLYIKKEFQLQNEPTVEGLIVSMSLIGATIVTTFSGPLSDSIGRRPMLILSSILYFFSGLIMLWSPNVYVLLLARFVDGFGIGLAVTLVPLYISEIAPSEIRGLLNTLPQFSGSGGMFLSYCMVFGMSLSPSPDWRIMLGVLAIPSLFFFGLTIFYLPESPRWLVSKGRMAEAKKVLQKLRGKDDVSGELSLLLEGLEVGGDTSIEEYIIGPATEAADDLVTDGDKEQITLYGPEEGQSWIARPSKGPSMLGSVLSLASRHGSMVNQSVPLMDPIVTLFGSVHENMPQAGGSMRSTLFPNFGSMFSVTDQHAKNEQWDEENLHRDDEEYASDGAGGDYEDNLHSPLLSRQATGAEGKDIVHHGHRGSALSMRRQTLLGEGGDGVSSTDIGGGWQLAWKWSEKEGENGRKEGGFKRVYLHQEGVPGSRRGSIVSLPGGGDVLEGSEFVHAAALVSQSALFSKGLAEPRMSDAAMVHPSEVAAKGSRWKDLFEPGVRRALLVGVGIQILQQFAGINGVLYYTPQILEQAGVAVILSKFGLSSASASILISSLTTLLMLPCIGFAMLLMDLSGRRFLLLGTIPILIASLVILVVSNLIDLGTLAHALLSTVSVIVYFCCFVMGFGPIPNILCAEIFPTRVRGLCIAICAFTFWIGDIIVTYSLPVMLNAIGLAGVFSIYAVVCLISFVFVFLKVPETKGMPLEVITEFFAVGAKQAAAKA

SEQ ID NO: 9862 - DNA, 1959 bp, Oryza sativa
  CDS (1)..(1959)
atgagaggcgcggtggtggcggcggcggcggcggcggtcggcaacatgcttcagggatgggacaacgccaccatcgccggcgctctcctctacatgaggagggacttgccggcgctccaagcccaccccgcactccagggtctggtcgtcgccacctccctcatcggcgccaccatcgtcaccaccttctccggcccgctctccgactcccgaggccgacgccccatgctcatcgcctccgcgctgctctactccctcgccggcctcctcatgctatggtctcccaacgtccccatcctcctactcgcgcgccttgtcgacggcttcgccatcggcctcgccgtcacgctcgtccccgtctacatctccgagacggcgccgcccgacacccgcggcctgctcaacacgctgccgcagctcaccggctccaccggcatgttcctctcctactgcatggtcttcctcatcacgctcgcgcccatccccaactggcgcctcatgctcggtgtcctcctcctgcctgctctcctctacctcctcctcaccatcttcttcctgccggagtcgccgcgctggctcgtcagcaagggaaggatgaaggaggccaggaccgtgctccagatgctcaggggacgccaggacgtgtccgccgagatggcgctcctcgtcgaggggctcaccaccggacgcgacacggccatcgaggagtacgtcgtcggcccaacggacgaggccaaggtcacgctctacggcgggatgtcctcgggattggcgccaggcagcatgttcggcagcgccgtcacgctggcatcgcgacagggcagcatgctcgaccacctcaaggaccccgtcgtcgccctcctcgacagcctccacgacatgaacccccccgccggtggcactactgacgtccccaacctcggcagcatgatcggcgtccacgacaggccgcccatcgactgggacgaggagaactccggggacgacgacggtgacatcgccgcgccgctgctaaccatggagggcgaggccgcgacgagcacggtgggcatcggcggcgggtggcagctggcgtggaagtggacggagggcgtcgcggcggacgggacgaggcagagcacggtgaagaggatgtacctgcacgaggagcaggcggagggggtgcacgcggcggcgctggtgagccagtcggcgttgtgcaccaagaaggaggcggaggcggaggtggagggtgggtggcgggaggtgctggagcccggcggcgtccggcacgcgctggtgtgcggcgtggcgatccagatcctgcagcagttctcgggcatcagcggcgtgctcttgtacacgccgcagatactggagcaggccggcgtgggcgtgctgctctccaggctgggcctgcgcgacgactccgcctccatcctcatcagcggcgtcaccacgctgctgatgctgcccagcatcggcgtggccatgcggctcatggacgtgtccgggcggcggagcctgctcctgtggacgatcccgctgctggtggcgtcgctggcggtgctggtggcggcgagcgtggcgccgatggcggcggcggcgcacgcggcggtgtgcacggggagcgtggtggtgtacctgtgctgcttcgtcatggggttcggccccatccccaacatcctgtgcgccgagatattccccacgcgcgtgcgtggcctctgcatcgccatctgctcgctcgccttctggctcgccgacatcgccgtcacctacaccctccccgtcatgctcgcctccctcggcctcgccggcctcttcgccatctacgccgccgtctgctgcgtcgcgctcgtcttcgttgcgctgcgggtgcccgagaccaagggcctcccgctcgaggtcatcatcgacttcttcaacgtcggagccaaagggaccctaccaaacctccacgacgatgacgaccactattaa

SEQ ID NO: 9863 - protein, 652 aa, Oryza sativa
MRGAVVAAAAAAVGNMLQGWDNATIAGALLYMRRDLPALQAHPALQGLVVATSLIGATIVTTFSGPLSDSRGRRPMLIASALLYSLAGLLMLWSPNVPILLLARLVDGFAIGLAVTLVPVYISETAPPDTRGLLNTLPQLTGSTGMFLSYCMVFLITLAPIPNWRLMLGVLLLPALLYLLLTIFFLPESPRWLVSKGRMKEARTVLQMLRGRQDVSAEMALLVEGLTTGRDTAIEEYVVGPTDEAKVTLYGGMSSGLAPGSMFGSAVTLASRQGSMLDHLKDPVVALLDSLHDMNPPAGGTTDVPNLGSMIGVHDRPPIDWDEENSGDDDGDIAAPLLTMEGEAATSTVGIGGGWQLAWKWTEGVAADGTRQSTVKRMYLHEEQAEGVHAAALVSQSALCTKKEAEAEVEGGWREVLEPGGVRHALVCGVAIQILQQFSGISGVLLYTPQILEQAGVGVLLSRLGLRDDSASILISGVTTLLMLPSIGVAMRLMDVSGRRSLLLWTIPLLVASLAVLVAASVAPMAAAAHAAVCTGSVVVYLCCFVMGFGPIPNILCAEIFPTRVRGLCIAICSLAFWLADIAVTYTLPVMLASLGLAGLFAIYAAVCCVALVFVALRVPETKGLPLEVIIDFFNVGAKGTLPNLHDDDDHY

SEQ ID NO: 9864 - DNA, 2145 bp, Oryza sativa
  CDS (1)..(2145)
atggggtatgcagcagcggacttgggtgcctggaagaacacgcggcaacaatactctccatcctcgccgatcagcttagggtcttccgtcttctccgaatcaagtctggaactttcgacaacaacagcggatggctcgacggctaatgcagtgctcgctgctattgtggcatctattggcaatctactacaaggatgggacaatgcagccattgcaggtgctattatgtacataaagaacgaattcaacctacaaaacgatccaatgatggagggacttatcctagcaatgtcactaattggtgcaactataatcactgcactatcagggatgattaccaattctattgggaagaggccattgctttctgttgcggcaattctatactctatcagtgcattgatcatgtttcaggcttcaaatgaatatatgctactgttggcgagacttatttatggctttggttcaggcttggtggtgacatatgccccactttatatctcagagactgcgcctacaaatatgcgagggttattaaatacattgccacaattcaatgggtctcttggaatgttgctatcttacattatggtatttttaatgtcacttacactaaatcccaactggagaatcatgcttggctccttatcaattccttcatttgtctttttactactgtgcatcttctatttaccggagtctcctgtattccttgtgagcaaaggaaagatagaagaagcaaaaaatgttatgaaaagactaagaggaacaaatgaagtctcaagtgaaatagcctttcttattcaaggcttgacagttgaccaagataattatatcgaagattacatgattggtcataataatgatgaatttgatgatcaatcaatttcaaacacagaaacaaccaaattgtatggccatgaagaaggtgtgacttggtttgcacgtccattcaagggaaaaaatgttgttgaaagtgaccatagtcctatacctaatttgcttgatcctattgtcacactttttgatagtatccatggtaatatattgaatacacctgaattcactagttctggaaacatgtcaaatgatatagaacaacctaaaacagatttggagagccaagaagatcttgatactgattatgaagatgacctcggccatccacttctatttcaccaaggatcttatatggaaggaatagatgatgcatgtgttaatggaggatggcacatagcttggaaatttgttcaaagagagaatgaatttgggcaaacacaagatgacttccaacaaatttttctacaaggtgatattcttcaagctggccgtgtttcccatgcaaccgctttggttagcacaccttcttttcaccattctattggacctgcaatggtgcatccatccaaattcaacttgtctaccgaaggacaaagttggtctgatcttttacaacccggggtaaagcagggattgattgtgggtgtcacaatacaaattcttcaacagcttgctggaattagtggcattctttattacactcctcaaatacttgagcaagctggagctggaattttgttaaaatggtttaatgttagttcttcctcatcatctattttgacgagtgctctaaccacctttacgatgcttccttctattggtattgcaatgaaatgcatggatcgttatggaagaagatcactccttctttacacaataccaatgttgatagtatcacttattatattgatcgtggtcaatgttatgaacttagaagcaatttttggagctattttatccacatttggtgttatcatctatgtttgttgcttcgttatgggatttggaccaattcccaatgttctttgctcagagctttttcctcctagttgtcgtaaccgttgtatgtctatttgtacattgacattttggattgtttccattattgtcacttatgcatttcctgttatgctaagctccataggtctaattggtgtttgtgggatatatgctgttgtctgcatagtctcctttatattcgtgttaattaaggtgcctgaaacgaaaggcatgcctcttgcggttatcgcaaattccttagctgttggagcaaggctatcagttaaacggaatgagaacatctaa

SEQ ID NO: 9865 - protein, 714 aa, Oryza sativa
MGYAAADLGAWKNTRQQYSPSSPISLGSSVFSESSLELSTTTADGSTANAVLAAIVASIGNLLQGWDNAAIAGAIMYIKNEFNLQNDPMMEGLILAMSLIGATIITALSGMITNSIGKRPLLSVAAILYSISALIMFQASNEYMLLLARLIYGFGSGLVVTYAPLYISETAPTNMRGLLNTLPQFNGSLGMLLSYIMVFLMSLTLNPNWRIMLGSLSIPSFVFLLLCIFYLPESPVFLVSKGKIEEAKNVMKRLRGTNEVSSEIAFLIQGLTVDQDNYIEDYMIGHNNDEFDDQSISNTETTKLYGHEEGVTWFARPFKGKNVVESDHSPIPNLLDPIVTLFDSIHGNILNTPEFTSSGNMSNDIEQPKTDLESQEDLDTDYEDDLGHPLLFHQGSYMEGIDDACVNGGWHIAWKFVQRENEFGQTQDDFQQIFLQGDILQAGRVSHATALVSTPSFHHSIGPAMVHPSKFNLSTEGQSWSDLLQPGVKQGLIVGVTIQILQQLAGISGILYYTPQILEQAGAGILLKWFNVSSSSSSILTSALTTFTMLPSIGIAMKCMDRYGRRSLLLYTIPMLIVSLIILIVVNVMNLEAIFGAILSTFGVIIYVCCFVMGFGPIPNVLCSELFPPSCRNRCMSICTLTFWIVSIIVTYAFPVMLSSIGLIGVCGIYAVVCIVSFIFVLIKVPETKGMPLAVIANSLAVGARLSVKRNENI

SEQ ID NO: 9866 - DNA, 2223 bp, Oryza sativa
  CDS (1)..(2223)
atggcgggcgccgtgctggtcgccatcgcggcctccatcggcaacttgctgcagggctgggataatgcaaccattgcaggtgcggtactgtacatcaagaaggaattcaacttgcagagcgagccccttatcgaaggcctgatcgtggccatgtcgctcattggggcgacgatcatcacgacgttctctggagcagtggctgattcttttggtaggcggcccatgctgatcgcgtcggctgtcctctactttgttagtgggctagtgatgctttgggcgccaaatgtgtatgtgttgctcttggcgaggctcattgacgggttcgggatcggtttggctgtcacgcttgtaccattgtacatctctgagactgccccgacggacatcagaggactgctaaacacgctgccgcagttcagtgggtctggagggatgttcctttcatactgcatggtatttggcatgtccctcatgccacagccagattggaggatcatgcttggcgttctatcaataccatcacttatatactttgcattgaccatcttttacttacctgaatcgccgaggtggctcgtgagcaaaggaagaatggctgaggccaagcgtgtgttgcaaggcctgcgtggaagagaagatgtttcaggagaaatggcccttctcgttgaaggtctgggggttgggaaagacacaaaaattgaggaatacataattggacctgatgatgagcttgctgatgaagggctggctccagatccagagaagatcaaactgtatggtcctgaagaaggcttatcgtgggttgcccgtcctgttcacgggcaaagtgcacttggaagtgcattaggtctcatctctcgtcatggtagtatggtcagtcagggtaagccccttgtggatcctgttgtcaccctttttggaagtgtccatgagaagatgcctgagataatgggaagcatgcggagcacattgtttcctaactttggcagcatgtttagtgtggcggaacagcagcaagctaaaggtgattgggatgctgagagtcaacgggagggtgaagattatggatcagaccatggtggggatgacattgaagatagcctccaaagcccacttatttctcgtcaagcgacaagcgtggaaggaaaggagatcgctgcacctcatggcagtataatgggtgctgtgggaagaagtagtagtctcatgcagggcggggaggcagtaagcagcatgggcattggtgggggatggcagttggcttggaaatggactgagagagaaggtgcagatggcgaaaaagaaggtggcttccaacgtatctacttgcatgaagagggtgtgacaggtgatcgcaggggctctatactgtcattgcctggaggtgatgttcctcctggtggtgagttcgtccaggcagctgctcttgtcagccaacctgctctttactctaaggaattgatggagcaacgccttgctggccctgctatggtgcatccatctcaggcagttgctaaaggtccaaaatgggcagacttattcgaacctggagtgaagcatgctctgtttgttggcatagggatacaaatcctgcaacagtttgctggcattaatggagttctgtactacactccacaaattcttgagcaagctggtgttggtgttcttcttgcaaacattggacttagctcctcatctgcatctattcttattagcggactgacaaccttgctgatgcttcccagcattggtattgctatgaggctcatggatatgtctggaagaaggtttcttctccttgcaacaatccctatcctgatagtagcactagctatcttgattctggtcaatattctggatgtggggaccatggttcatgcctcactgtccacagtcagtgtcatactctacttctgcttctttgtcatggggttcgggcctattccaaacattctctgtgcagagattttcccgaccaccgttcgtggcatctgcatagccatctgtgccctaacattctggatcggtgatatcattgtgacatacaccctccccgtgatgctcaacgccattggactcgctggagtgtttggaatctacgcagtggtctgcatactggctttcctgtttgtcttcatgaaggtgccggagacaaagggcatgcctcttgaagtcatcaccgagttcttctctgtcggagcaaagcaggccaaggaggactag

SEQ ID NO: 9867 - protein, 740 aa, Oryza sativa
MAGAVLVAIAASIGNLLQGWDNATIAGAVLYIKKEFNLQSEPLIEGLIVAMSLIGATIITTFSGAVADSFGRRPMLIASAVLYFVSGLVMLWAPNVYVLLLARLIDGFGIGLAVTLVPLYISETAPTDIRGLLNTLPQFSGSGGMFLSYCMVFGMSLMPQPDWRIMLGVLSIPSLIYFALTIFYLPESPRWLVSKGRMAEAKRVLQGLRGREDVSGEMALLVEGLGVGKDTKIEEYIIGPDDELADEGLAPDPEKIKLYGPEEGLSWVARPVHGQSALGSALGLISRHGSMVSQGKPLVDPVVTLFGSVHEKMPEIMGSMRSTLFPNFGSMFSVAEQQQAKGDWDAESQREGEDYGSDHGGDDIEDSLQSPLISRQATSVEGKEIAAPHGSIMGAVGRSSSLMQGGEAVSSMGIGGGWQLAWKWTEREGADGEKEGGFQRIYLHEEGVTGDRRGSILSLPGGDVPPGGEFVQAAALVSQPALYSKELMEQRLAGPAMVHPSQAVAKGPKWADLFEPGVKHALFVGIGIQILQQFAGINGVLYYTPQILEQAGVGVLLANIGLSSSSASILISGLTTLLMLPSIGIAMRLMDMSGRRFLLLATIPILIVALAILILVNILDVGTMVHASLSTVSVILYFCFFVMGFGPIPNILCAEIFPTTVRGICIAICALTFWIGDIIVTYTLPVMLNAIGLAGVFGIYAVVCILAFLFVFMKVPETKGMPLEVITEFFSVGAKQAKED

SEQ ID NO: 9868 - DNA, 2274 bp, Oryza sativa
  CDS (1)..(2274)
atgagaggcgccgtgttggtggccgtggcggccgccatcggcaactacctgcagggatgggacaacgccaccatcgccggcgccgtgctgtacatcaagcgggagttcgccctcgagacccagcccgccgtggagggcctcgtcgtcgccatgtccctcatcggcgccaccatcatcaccaccttctccggccccgtctccgacctcgtcggccgccgccccatgctcatcgcctcctccctcctctacttcgccggcggcctcatcatgctctggtcccccaacgtctacgtcctcctcctcgcccgcctcgtcgacggcttcggcgtcggcctcgccgtcaccctcgtccccgtctacatctccgagacctccccgccggagatccgcggccgcctcaacacgctgccgcagttcaccggctccggcggcatgttcatgtcctactgcatgatcttcgccatgacgctctcgccctcgcccaactggcgcatcatgctcggcgtcctcttcgtcccctcgctgctctacctgttcgtcaccgtcttctacctcccggagtcgccgcggtggctcgtcagcaaggggcgcatgaaggaggccagggttgtgctcgagatgctgcgcggccgcgaggacgtctccggcgagatggcgctgctcgtcgagggcctcggcaccggcggcgacaccgagatcgaggactacgtcgtcggcccgtccgagggcgacgccggcgagaacgagcaggcgagggacaccgtcacgctgtacgggccggagcaggggctttcgtgggtggcgcagccggtcgccggcggccgcggcagcatgctggggagctcgctggggctgcaggcgtcgcgccatggcagcatgtacgagcagatgaaggaccccgtggtggcgcttctcgggagcgtccacgagcggctgccggagtccggcggcggcgccaccggcagcatgagggggagcacgctgttccccaacctcgggagcatgcttagcgtcaacgataggcccggcggcagcagctgggacgaggagaacgtgcagcctggcgacgacgacctcgacgaggaggaggaggagtacctctccgacgacggcaaggacgacgacgacggcggcggcctgcaggcaccgctgctgtcgcggcagagcaccgacgtggagaccaagaacgagcccgcctccggccaggtggcgatgcagcggcacagcagcatcggcggcggcggcggcgtcgagacggcgagcaccatgggcatcggcggcgggtggcagctggcgtggaagtggacggagaacgtgggccccgacggcgtcaagcgcggcgcggtgaagcgcatgtacctgcacgaggagtccgaggccgcgcccggcggtgactcgggcgccgccggcgacgcgcagtccacggcgtacgtccacgcggcggcgctggtgagccggtcgatgctgtacaccaaggacgtcctgatcgggcagagccccaccgagccggcgttcgcgaacccgccggaggcggtggcggcggcggcgtcgacgggcccggcgtggcgcgagctgctcgagccgggcgtccgccacgccctcttctgcggcgtcaccatccagatcctccagcaattctccggcatcaacggcgtgctctactacaccccgcagatcctcgaccaggccggcgtcagcgtcctcctcgccagcctcggcctctccggcgactccacctccatcctcatcagcggcctcaccacgctcctcatgctcccgtccatcggcgtcgccatgcgcctcatggacgcctcgggccgccgcgccctcctcctctggacgctgcccgtcctcgtcgcgtccctcgccgtgctcgtggtggcgaacgtcgtgcccatggcggcgaccgcgcacgcggcgctgtcgacggggagcgtcatcgtctacttctgctgcttcgtcatggggttcggccccatccccaacatcctctgcgccgagatcttcccgacgagggtgaggggactctgcattgccatctgctcgctgacgttctggctcggcgacatcgccgtcacgtacagcctccccgtcatgctcagctccgtggggctcgccggcgtgttctccttctacgccgccgtgtgctgcgtcgcgctcgtgttcgtggcgctcaaggtgcccgagaccaagggcctcccgctcgaggtcatcatcgagttcttcaacgtcggcgccaaggccggcacgttgcctgacgaagagttccactga

SEQ ID NO: 9869 - protein, 757 aa, Oryza sativa
MRGAVLVAVAAAIGNYLQGWDNATIAGAVLYIKREFALETQPAVEGLVVAMSLIGATIITTFSGPVSDLVGRRPMLIASSLLYFAGGLIMLWSPNVYVLLLARLVDGFGVGLAVTLVPVYISETSPPEIRGRLNTLPQFTGSGGMFMSYCMIFAMTLSPSPNWRIMLGVLFVPSLLYLFVTVFYLPESPRWLVSKGRMKEARVVLEMLRGREDVSGEMALLVEGLGTGGDTEIEDYVVGPSEGDAGENEQARDTVTLYGPEQGLSWVAQPVAGGRGSMLGSSLGLQASRHGSMYEQMKDPVVALLGSVHERLPESGGGATGSMRGSTLFPNLGSMLSVNDRPGGSSWDEENVQPGDDDLDEEEEEYLSDDGKDDDDGGGLQAPLLSRQSTDVETKNEPASGQVAMQRHSSIGGGGGVETASTMGIGGGWQLAWKWTENVGPDGVKRGAVKRMYLHEESEAAPGGDSGAAGDAQSTAYVHAAALVSRSMLYTKDVLIGQSPTEPAFANPPEAVAAAASTGPAWRELLEPGVRHALFCGVTIQILQQFSGINGVLYYTPQILDQAGVSVLLASLGLSGDSTSILISGLTTLLMLPSIGVAMRLMDASGRRALLLWTLPVLVASLAVLVVANVVPMAATAHAALSTGSVIVYFCCFVMGFGPIPNILCAEIFPTRVRGLCIAICSLTFWLGDIAVTYSLPVMLSSVGLAGVFSFYAAVCCVALVFVALKVPETKGLPLEVIIEFFNVGAKAGTLPDEEFH

SEQ ID NO: 9870 - DNA, 1977 bp, Oryza sativa
  CDS (1)..(1977)
atgatgaagtcaacggtattttctgcggttgctgtttctattggttatacattacttggatgggattttacaaccgttttggaggctaatatccacatgaagaaggaatttggtttgaacaacggaccttctattgatggaataattttagcagtttcagttttcgggtctatcgcaatcacagtattctctggatcgctattagattggcttggcagacgtgctgcactgatttactcttctctgctattgatttccggtggccttctaatggtgtggtctcctaacatatacattttacttctagctaggcttattgttggatcaggaagtggtctggttttcacctgtgttccgatttatatatctgaaacatctcctccaaatatgaggggatcactgggaactatgccacagttcatgttctttgtaggaatagtattctcctattgcctgatattctggatgacactgataccttcacctaactggagaattatgatcggcgcaatctttgctccttccttggtctactttgctttattggtgttctacttgccagagtcacctagatggcttgtaagtgatggaaaaattagtgaggcccgaatttccttacagtggcttagagggaaagatgatgtatcagatagatctgcaggagaaatagctcttattgcggatggtatgaacatgataacggaaacagctgttggaggacatgctgttggtgctgttcgaagtcaaagttttcttggaactagcacaaaccagatgtcgcgccacagtactttctattggcacctgtcagatccattagttgatcttcttggaagcatccatgagagtatgtcggaattaggagctgggcgaaacagctacttccctgtcttcaacagttttaatattgtggaacaagaacagacgagtgagcagagggggaatgatagtcttcaacaatctagggaggcatattctgctgaagaaggcaataatggagataatttgcaagcttctctactttcccaagtagcaagtgctgaaacaaacgatataaatacatcattcacctctgaagggagctcgtcatatttgagaagacatggtacatcaacatcagggcttgcgcaagatttaatatcttctttgcatgatcatgacattgaagaagatgacgaagaaattcatatagcagcattatctagccagcctgcacttggtgcaggactgcatccatttcgacaacaaatggttcggttgtctgaaacagctgacataaagcctaaatggagggtacttcttcagccaggagtcaggcatgccttgtgttatggaatgctgattcaagctcttcaacagtccgcaggaatcagtggccttctccgatacactcctcaaattcttgaacaggtcggagtaattagtttgttttcagacattggacttgattcccattcagcatcgatcctcataagtgcccttaatgcttcgctgatgctcccctgtataactgctgcaatgatactgatggatgtctgtggaagaagggttcttctcctggtcagtatccccttcctaacattatcagttggtgccatatctttgtccaacatcgtgaagatgggatctttgccacatgaaatcctcttccagctctcattaaccatttgcttctgctcatatgtcatcggtctggggccaatacccaatattctctgctccgagatgttcccaacaagggcccgtgcaacatgtgcaagtttttgctcacttgccttctggtttggcagactactttcaatttactgcttcccggtgatgctaagtaccattgggctcagtggggcatgtgcgatttatgcattcgtgtgctgcttggttctcgtgttcgtctacttaagagttccagagacgaagggtcttcccttggagctcatagctgagattttcaagttttcaagacaagaatgtctatag

SEQ ID NO: 9871 - protein, 658 aa, Oryza sativa
MMKSTVFSAVAVSIGYTLLGWDFTTVLEANIHMKKEFGLNNGPSIDGIILAVSVFGSIAITVFSGSLLDWLGRRAALIYSSLLLISGGLLMVWSPNIYILLLARLIVGSGSGLVFTCVPIYISETSPPNMRGSLGTMPQFMFFVGIVFSYCLIFWMTLIPSPNWRIMIGAIFAPSLVYFALLVFYLPESPRWLVSDGKISEARISLQWLRGKDDVSDRSAGEIALIADGMNMITETAVGGHAVGAVRSQSFLGTSTNQMSRHSTFYWHLSDPLVDLLGSIHESMSELGAGRNSYFPVFNSFNIVEQEQTSEQRGNDSLQQSREAYSAEEGNNGDNLQASLLSQVASAETNDINTSFTSEGSSSYLRRHGTSTSGLAQDLISSLHDHDIEEDDEEIHIAALSSQPALGAGLHPFRQQMVRLSETADIKPKWRVLLQPGVRHALCYGMLIQALQQSAGISGLLRYTPQILEQVGVISLFSDIGLDSHSASILISALNASLMLPCITAAMILMDVCGRRVLLLVSIPFLTLSVGAISLSNIVKMGSLPHEILFQLSLTICFCSYVIGLGPIPNILCSEMFPTRARATCASFCSLAFWFGRLLSIYCFPVMLSTIGLSGACAIYAFVCCLVLVFVYLRVPETKGLPLELIAEIFKFSRQECL

SEQ ID NO: 9872 - DNA, 1965 bp, Oryza sativa
  CDS (1)..(1965)
atgatgaagtcaacggtattttctgcggttgctgtttctattggttatacattacttggatgggattttacaaccgttttggaggctaatatccacatgaagaaggaatttggtttgaacaacggaccttctattgatggaataattttagcagtttcagttttcgggtctatcgcaatcacagtattctctggatcgctattagattggcttggcagacgtgctgcactgatttactcttctctgctattgatttccggtggccttctaatggtgtggtctcctaacatatacattttacttctagctaggcttattgttggatcaggaagtggtctggttttcacctgtgttccgatttatatatctgaaacatctcctccaaatatgaggggatcactgggaactatgccacagttcatgttctttgtaggaatagtattctcctattgcctgatattctggatgacactgataccttcacctaactggagaattatgatcggcgcaatctttgctccttccttggtctactttgctttattggtgttctacttgccagagtcacctagatggcttgtaagtgatggaaaaattagtgaggcccgaatttccttacagtggcttagagggaaagatgatgtatcaggagaaatagctcttattgcggatggtatgaacatgataacggaaacagctgttggaggacatgctgttggtgctgttcgaagtcaaagttttcttggaactagcacaaaccagatgtcgcgccacagtactttctattggcacctgtcagatccattagttgatcttcttggaagcatccatgagagtatgtcggaattaggagctgggcgaaacagctacttccctgtcttcaacagttttaatattgtggaacaagaacagacgagtgagcagagggggaatgatagtcttcaacaatctagggaggcatattctgctgaagaaggcaataatggagataatttgcaagcttctctactttcccaagtagcaagtgctgaaacaaacgatataaatacatcattcacctctgaagggagctcgtcatatttgagaagacatggtacatcaacatcagggcttgcgcaagatttaatatcttctttgcatgatcatgacattgaagaagatgacgaagaaattcatatagcagcattatctagccagcctgcacttggtgcaggactgcatccatttcgacaacaaatggttcggttgtctgaaacagctgacataaagcctaaatggagggtacttcttcagccaggagtcaggcatgccttgtgttatggaatgctgattcaagctcttcaacagtccgcaggaatcagtggccttctccgatacactcctcaaattcttgaacaggtcggagtaattagtttgttttcagacattggacttgattcccattcagcatcgatcctcataagtgcccttaatgcttcgctgatgctcccctgtataactgctgcaatgatactgatggatgtctgtggaagaagggttcttctcctggtcagtatccccttcctaacattatcagttggtgccatatctttgtccaacatcgtgaagatgggatctttgccacatgaaatcctcttccagctctcattaaccatttgcttctgctcatatgtcatcggtctggggccaatacccaatattctctgctccgagatgttcccaacaagggcccgtgcaacatgtgcaagtttttgctcacttgccttctggtttggcagactactttcaatttactgcttcccggtgatgctaagtaccattgggctcagtggggcatgtgcgatttatgcattcgtgtgctgcttggttctcgtgttcgtctacttaagagttccagagacgaagggtcttcccttggagctcatagctgagattttcaagttttcaagacaagaatgtctatag

SEQ ID NO: 9873 - protein, 654 aa, Oryza sativa
MMKSTVFSAVAVSIGYTLLGWDFTTVLEANIHMKKEFGLNNGPSIDGIILAVSVFGSIAITVFSGSLLDWLGRRAALIYSSLLLISGGLLMVWSPNIYILLLARLIVGSGSGLVFTCVPIYISETSPPNMRGSLGTMPQFMFFVGIVFSYCLIFWMTLIPSPNWRIMIGAIFAPSLVYFALLVFYLPESPRWLVSDGKISEARISLQWLRGKDDVSGEIALIADGMNMITETAVGGHAVGAVRSQSFLGTSTNQMSRHSTFYWHLSDPLVDLLGSIHESMSELGAGRNSYFPVFNSFNIVEQEQTSEQRGNDSLQQSREAYSAEEGNNGDNLQASLLSQVASAETNDINTSFTSEGSSSYLRRHGTSTSGLAQDLISSLHDHDIEEDDEEIHIAALSSQPALGAGLHPFRQQMVRLSETADIKPKWRVLLQPGVRHALCYGMLIQALQQSAGISGLLRYTPQILEQVGVISLFSDIGLDSHSASILISALNASLMLPCITAAMILMDVCGRRVLLLVSIPFLTLSVGAISLSNIVKMGSLPHEILFQLSLTICFCSYVIGLGPIPNILCSEMFPTRARATCASFCSLAFWFGRLLSIYCFPVMLSTIGLSGACAIYAFVCCLVLVFVYLRVPETKGLPLELIAEIFKFSRQECL

SEQ ID NO: 9874 - DNA, 2214 bp, Glycine max
  CDS (1)..(2214)
atgaaaggtgccgtccttgttgctattgccgcttccattggtaatttcctccagggatgggataatgctaccatcgccggggctattgtttacattaagaaagaccttgctttggaaacaactatggaagggcttgtggtggccatgtccctgattggggcaacggtaatcaccacatgctctggtcccgtagccgattggctcggtcgacgacccatgatgataatctcatctgtgctctatttcttgggtggtttggtgatgctgtggtccccaaatgtgtatgtgttgtgcctagcgaggctacttgatggatttgggattgggcttgctgtgacccttgtcccggtctatatatctgaaacagcgccgtctgagataagagggtcgttgaacacgcttcctcagttcagtggctctggtggaatgtttttgtcctactgtatggtttttggcatgtcattgagtcccgcccctagctggaggctcatgcttggggttctgtctattccttcgctcttgtattttgcattgaccatttttttcttgcccgagtctcctcgctggctggtcagcaaaggaaggatgctcgaggctaagaaagtgctccaaagattgcgcggacgggaggatgtgtcgggcgagatggcgttgctggttgaaggtctcgggattgggggtgatacatctatagaagagtacataattggccctgctgacaaggtggctgatggtcatgaacatgcaacagagaaagataaaattcgattatatggatcccaagcaggcctctcttggttagcaaaacctgtcactggacagagttctattggccttgcatcacgccatggaagcatcatcaaccaaagcatgccactcatggatcctctagtgacactgtttggtagcattcatgagaagctccccgagacaggagcaggaggaagcatgcgaagcactctgtttccaaattttggaagcatgttcagcacagctgagccgcatgttaaaaatgaacagtgggatgaagagagcttacaaagggaaggtgaggactacatgtcagatgcagctgatggggactctgatgataatttgcatagtcctttaatctcacgtcaaacaacaagccttgaaaaagacttgcctccccctccttcccatggcagtatcctaggcagcatgaggcgtcacagtagtctcatgcaagggtcaggtgagcaaggtggtagtacaggcattggtggtggctggcaacttgcatggaaatggactgataaagatgaggatggaaaacatcaaggagggtttaaaaggatttatttacatgaggagggagtttctgcatctcatcgtggatccattgtatcaattcctggtgaaggtgaatttgtccaggctgctgccttagtaagccaacctgctctttactccaaggagcttatcgatggacatccagttgggcctgcaatggttcacccatctgagaccgcttcaaaagggccaagttggaaagctcttcttgaaccaggggttaagcatgcattgattgttggagttggaatacaaatacttcagcagttttcagggataaatggggttctatattacacacctcaaatccttgaagaggctggtgttgaagttcttctttcagatataggcattggctcagagtctgcatcattccttatcagtgctttcacaaccttcttgatgcttccatgtataggcgtagccatgaagctcatggatgtttcaggcagaaggcagttgctacttactacaatccccgtgttgattgtgtcactcattattttggtcattggaagcctggtaaattttgggaatgttgcccatgcagcaatctcaacagtatgcgttgtggtttatttctgctgctttgtgatgggttatggaccaattccaaacatcctttgctcagagattttccccactagagtgcgtggcctctgcattgctatctgtgcattagtattctggattggagacatcatcatcacatattcgctgcctgtgatgctcagctctttaggacttggtggtgtattcgccatttacgcagttgtttgtttcatctcgtggatatttgtgtttttgaaggttccagaaacaaagggcatgccccttgaagtcatctctgaattcttttctgttggtgcaaagcaggctgcttctgccaagaacgagtga

SEQ ID NO: 9875 - protein, 737 aa, Glycine max
MKGAVLVAIAASIGNFLQGWDNATIAGAIVYIKKDLALETTMEGLVVAMSLIGATVITTCSGPVADWLGRRPMMIISSVLYFLGGLVMLWSPNVYVLCLARLLDGFGIGLAVTLVPVYISETAPSEIRGSLNTLPQFSGSGGMFLSYCMVFGMSLSPAPSWRLMLGVLSIPSLLYFALTIFFLPESPRWLVSKGRMLEAKKVLQRLRGREDVSGEMALLVEGLGIGGDTSIEEYIIGPADKVADGHEHATEKDKIRLYGSQAGLSWLAKPVTGQSSIGLASRHGSIINQSMPLMDPLVTLFGSIHEKLPETGAGGSMRSTLFPNFGSMFSTAEPHVKNEQWDEESLQREGEDYMSDAADGDSDDNLHSPLISRQTTSLEKDLPPPPSHGSILGSMRRHSSLMQGSGEQGGSTGIGGGWQLAWKWTDKDEDGKHQGGFKRIYLHEEGVSASHRGSIVSIPGEGEFVQAAALVSQPALYSKELIDGHPVGPAMVHPSETASKGPSWKALLEPGVKHALIVGVGIQILQQFSGINGVLYYTPQILEEAGVEVLLSDIGIGSESASFLISAFTTFLMLPCIGVAMKLMDVSGRRQLLLTTIPVLIVSLIILVIGSLVNFGNVAHAAISTVCVVVYFCCFVMGYGPIPNILCSEIFPTRVRGLCIAICALVFWIGDIIITYSLPVMLSSLGLGGVFAIYAVVCFISWIFVFLKVPETKGMPLEVISEFFSVGAKQAASAKNE

SEQ ID NO: 9876 - DNA, 2058 bp, Glycine max
  CDS (1)..(2058)
atgagggaggttgtgattgttgcaattgctgctacacttgggaatcttctggttggatgggatagttcaaccattgcaggggggctgagttacatcaaacaagagttccacttggaaacagaccccaccctagagggtctaattgtgtccacatcgtttctcactggcactgttgtcacaatattctctgggacagtctccgacatgctcggaaggcgtcctatgctgataacatcatcgatcatgtttttcctcagcggtttggtgatgctgtgggcacctaatgttctcgtggttctgttgtcgaggctgttggatggaatagccattgcactgactataacactcactcccctctacatatcagagattgcaccacctgacatcagaggcactctcaacactctccctcagttttcgtgttccgggggaatgtttgtggcgtacatcatggtgttctggttgtccctgatggagaatccaagttggagagcaatgcttggcgttgtgtctgttcctgctgttgcttatttttttctggctgtgctttacctccctgaatctcctccttggcttgtgagtaaagggagaatcactgaggctaagaaagttttgcaaagaattcgcggcactgacgatgtttcaggggaattggctctgctggctgagggtatgaatccagggggtgaaaacaccaccatagaagagtacatagtagcccccgccggtgacctcatagccaacaaggaagcaggaagggattgcataaagctctatggaccccaccaaggaggagtttcaatggttgcacaaccattgagtggacaaggtagcatggtatctcgcagcatgttaaccttgtctcgccaaggaagcattgttgcacaggctgcaaatctcaaagaccctctagtcaatctctttgggagcatgcatgagaatgttaccccccttgaagctggtgcaggttcaagaagcatgctaatgggggagccagatcagagcccctatggcaacagtgagaacctgcatgctccattgctttcagcacaagggagcactgtggagagggttggatccaaagacatgttaaaagttgggagcaataacactgacattggtggaggttggaaattggtttataaatcaactgaccagggtgggaaaagggaaggggcacgccaaagggtgtatctgcgtgcagatcctaatgctgcagtattgtctcagcaaggatcttttgtttctggctatgatttgcatgcagatggtagtactgaggcttttccagcagctgcacttgttagtcactcagttatcagccctaaggatatgagcatcaaaccagaagttgctgccaaacgtactggttggggaggtttgttggatttaggagtcaggcgcgcattggttgttggaattggactgcaagttcttcagcaggctgctggcataaatggatttctatactatgctccccagattcttgaacaggcaggtgttgggccacttctgtcaaatttgggtattagttcaagatctgcttcattacttgtaaatgtcattacaacattcactatgctcccttgtatagccgtttccatgaggctcatggatattgctggcaggaggtcaataatgctatacacaatacccattctggtagtgtctctcatggtactagtacttcgggactcatttcacatgggttccacccttaatgcaacaatcactgcagtgagtgttatggtatacgaaagctgcttctgcatgggacttggtgtgattccaaacatcttgtgttcagaaatcttcccaacaagtgttcgcggaatatgcatttctatttgctccctcacattttggatctgcacattgatagtcacttctttatttcccttcttgctccatctccttggtcttactggggtctttggattattcgttgttgggtgcatcattgcatggatatttgtctacttgaaagttcctgaaacaaagggcatgcctcttgaagtcatcattgagttcttctctattggtgcgaagcctgaatga

SEQ ID NO: 9877 - protein, 685 aa, Glycine max
MREVVIVAIAATLGNLLVGWDSSTIAGGLSYIKQEFHLETDPTLEGLIVSTSFLTGTVVTIFSGTVSDMLGRRPMLITSSIMFFLSGLVMLWAPNVLVVLLSRLLDGIAIALTITLTPLYISEIAPPDIRGTLNTLPQFSCSGGMFVAYIMVFWLSLMENPSWRAMLGVVSVPAVAYFFLAVLYLPESPPWLVSKGRITEAKKVLQRIRGTDDVSGELALLAEGMNPGGENTTIEEYIVAPAGDLIANKEAGRDCIKLYGPHQGGVSMVAQPLSGQGSMVSRSMLTLSRQGSIVAQAANLKDPLVNLFGSMHENVTPLEAGAGSRSMLMGEPDQSPYGNSENLHAPLLSAQGSTVERVGSKDMLKVGSNNTDIGGGWKLVYKSTDQGGKREGARQRVYLRADPNAAVLSQQGSFVSGYDLHADGSTEAFPAAALVSHSVISPKDMSIKPEVAAKRTGWGGLLDLGVRRALVVGIGLQVLQQAAGINGFLYYAPQILEQAGVGPLLSNLGISSRSASLLVNVITTFTMLPCIAVSMRLMDIAGRRSIMLYTIPILVVSLMVLVLRDSFHMGSTLNATITAVSVMVYESCFCMGLGVIPNILCSEIFPTSVRGICISICSLTFWICTLIVTSLFPFLLHLLGLTGVFGLFVVGCIIAWIFVYLKVPETKGMPLEVIIEFFSIGAKPE

SEQ ID NO: 9878 - DNA, 2130 bp, Glycine max
  CDS (1)..(2130)
atgagcggagctgttcttgttgctgtggctgctgctatcggcaacttgctgcaaggatgggataatgccaccattgcaggatctattttgtacataaagagggagtttaatttacaaagtgaacccacaatagaaggtctaattgtggccatgtcacttattggagccactgtcgttacgacatgctctggacccttatcagacttgctaggccggcgtcctatgttgatcatctcctctatcctttattttgttggttctctggtcatgctatggtctccaaatgtttatattctcctctttgcaaggcttttagatggattaggcattggtttggcggtcaccttggtacctctttacatatccgagacagctccacctgagattaggggattactaaatactcttccgcagttcactggttctgctggaatgttcttttcctactgtatggtctttgctatatcactcaccaaggccccaaactggagactcatgttaggtgttctttcaattccctctctcatttattttgcactcacactattcttcttgcctgaatctccaagatggcttgtcagcaaaggccggatgctagaggccaagaaggttttgcaacgacttcgcggcagacaagatgtcgctggtgagatggctttactagttgagggtcttggagttgggggtgataccgttatagaagatgatgcagagcagatcaaattgtatgggacagcagaaggtcaatcctggattgccaaacctgtcactggacaaagttccattggccttgtatctcggaagggaagcatggcaaatcaaagtgctctagtggaccctctagtgaagctctttggtagtgtccatgagaagctcccagaaacaggaagcacacttttcccacactttggaagcatgtttagtgttgggggaaatcaacctaggaatgaagattgggatgaagaaagcattgccagagagggagatgattatgtatctgatgctgctgacaccgacgattctgatgacaatttgcagagtccattgatctcacgtcaagcaacaagtgcggaaagggacatgcctgctcctgcccagggaagcatgaggcaaggtagtcttttgcaaggagaacctgctggaaactcagggattggtggtggatggcagctagcatggaaatggtctgaaacagaaggtgttttcaagagaatatatttgcaccaagaaggtggtcctggatctagacgtgggtccatcatttcacttccaggctgtgatgcgccgacactaacagatggtgagattgtccaggctgccgctctagtgagtcaatcagccctttacaacaaggagcttatgcatcagcagccagttggaccagccatgattcatccatcccaaacagctgcaaaagggccgagttggagtgaccttttagagcctggagtgaagcatgcactgattgtgggggtggggattcaaattcttcaacagttctctggtataaatgtggtgctctactatacacctcaaattcttgagcaggcaggtgttggttatcttctttcaaacctgggcctcggttctacttctgcgtcttttcttatcagcagcgtgacaaccttgttgatgttaccctgtatagctgtggccatgaggctcatggatatatctggcagaagaaccttgctgctgactacaatccccgtcttgatagtatcacttctcatattagtaatagggagtcttgtggaattggacagtactataaatgcttttatctcaacttcgagtgttattgtctacttctgttgtttcgtcatgggctttgggccaattcctaatatcctttgttcagagatcttccctactcgagttcgtggtctatgcatagctatatgtgctcttacattttggatatgtgacatcatagtcacctactcgctcccagttatgcttaattctgtgggccttggtggtgtctttggtatgtatgcggttgtgtgcatcatagcttgggtgtttgtcttcttaaaagttccagaaaccaagggcatgccactggaagttatcattgagttcttctctgtcggggcaaagcaagctcaagttgccaataatacctga

SEQ ID NO: 9879 - protein, 709 aa, Glycine max
MSGAVLVAVAAAIGNLLQGWDNATIAGSILYIKREFNLQSEPTIEGLIVAMSLIGATVVTTCSGPLSDLLGRRPMLIISSILYFVGSLVMLWSPNVYILLFARLLDGLGIGLAVTLVPLYISETAPPEIRGLLNTLPQFTGSAGMFFSYCMVFAISLTKAPNWRLMLGVLSIPSLIYFALTLFFLPESPRWLVSKGRMLEAKKVLQRLRGRQDVAGEMALLVEGLGVGGDTVIEDDAEQIKLYGTAEGQSWIAKPVTGQSSIGLVSRKGSMANQSALVDPLVKLFGSVHEKLPETGSTLFPHFGSMFSVGGNQPRNEDWDEESIAREGDDYVSDAADTDDSDDNLQSPLISRQATSAERDMPAPAQGSMRQGSLLQGEPAGNSGIGGGWQLAWKWSETEGVFKRIYLHQEGGPGSRRGSIISLPGCDAPTLTDGEIVQAAALVSQSALYNKELMHQQPVGPAMIHPSQTAAKGPSWSDLLEPGVKHALIVGVGIQILQQFSGINVVLYYTPQILEQAGVGYLLSNLGLGSTSASFLISSVTTLLMLPCIAVAMRLMDISGRRTLLLTTIPVLIVSLLILVIGSLVELDSTINAFISTSSVIVYFCCFVMGFGPIPNILCSEIFPTRVRGLCIAICALTFWICDIIVTYSLPVMLNSVGLGGVFGMYAVVCIIAWVFVFLKVPETKGMPLEVIIEFFSVGAKQAQVANNT

SEQ ID NO: 9880 - DNA, 2217 bp, Glycine max
  CDS (1)..(2217)
atgaaaggtgccgtcctcgtcgccattgccgcttccatcggcaatttcctccagggatgggataatgctaccatcgccggggccattgtttacattaagaaagaccttgcgttgcaaacaactatggaagggcttgtggtggccatgtccctgattggagcaacggtaatcaccacatgctctggtcctatagcggattggctcggtcggcgacccatgatgataatctcatctgtgctctatttcttgggtggtttggtgatgctgtggtccccaaatgtgtatgtgttgtgcttggcgaggctacttgatggatttgggattggccttgctgtgactcttgtcccggtctatatatctgaaacggcgccgtctgaaataagggggtcgttgaatacgcttcctcagttcagtggctctggaggaatgtttttgtcgtactgtatggtttttggcatgtcattgagtcccgcgcctagctggaggctcatgcttggggttctgtctattccttctctcttgtattttgcattgaccatttttttcttgcccgagtctcctcggtggctggtcagcaaaggaaggatgctcgaggctaagaaggtgctccaaagattgcgcggaagggaggatgtgtcaggcgagatggcattgctggttgaaggtctcgggattgggggtgatacatctatcgaagagtacataattggccctgctgacgaggtggctgatggtcatgaacatgcaacagagaaagataaaattcgattatatggatcccaagcaggcctttcttggttagcaaaacctgtcactggacagagttctattggccttgcgtcacgccatggaagcatcatcaaccaaagcatgcccctcatggatcctctggtgacactgtttggtagcattcatgagaagctccccgagacaggagcaggaggaagcatgcgaagcactctgtttccaaattttggaagcatgttcagcactgctgagccgcatgctaaaaatgaacagtgggatgaagagagcttacaaagggaaggtgaggactacatgtcagatgcagccggtggggactctgatgataatttgcacagtcctttaatctcacgccaaacaacaagccttgaaaaagacttgcctcctcctcctccttcccatggcagtatccttggcagcatgaggcgtcacagtagtctcatgcaagggtcaggtgagcaaggtggtagtacaggtattggtggtggctggcaactggcatggaaatggactgataaaggtgaggatggaaaacaacaaggagggtttaaaaggatttatttacatgaggagggagtttctgcatctcgtcgtggatccattgtatcgattcccggtgaaggcgaatttgtccaggctgctgccttggtaagccaacccgctctttactccaaggagcttattgatggacacccagttgggcctgcaatggttcacccatctgagacagcttcaaaggggccaagttggaaagctcttcttgaaccaggggttaagcatgcattggttgttggagttggaatacaaatacttcagcagttttcagggataaatggggttctatattacacacctcaaatccttgaagaggccggtgttgaagttcttctttcagatataggcattggctcagagtcggcatcattccttatcagtgctttcacaaccttcttgatgcttccctgtataggcgtagccatgaagctcatggatgtttcaggcagaaggcagttgttacttactacaatccccgtgctgattgggtcactcattattttggtcattggaagcctggtaaattttggcaatgtcgcccatgcagcaatctcaacagtatgcgttgtggtttatttctgctgctttgtgatgggttatggaccaattccaaacatcctttgctcagagattttccccactagggtgcgtggcctctgcattgctatctgtgcattagtgttctggattggagacatcatcatcacatactcgctgcctgtgatgctgggctctttaggacttggtggtgtattcgccatttacgcagttgtttgtttcatctcgtggatatttgtgtttttgaaggttccagaaacaaagggcatgccccttgaagtcatctctgaattcttttctgttggagcaaagcaggctgcttctgccaagaatgagtga

SEQ ID NO: 9881 - protein, 738 aa, Glycine max
MKGAVLVAIAASIGNFLQGWDNATIAGAIVYIKKDLALQTTMEGLVVAMSLIGATVITTCSGPIADWLGRRPMMIISSVLYFLGGLVMLWSPNVYVLCLARLLDGFGIGLAVTLVPVYISETAPSEIRGSLNTLPQFSGSGGMFLSYCMVFGMSLSPAPSWRLMLGVLSIPSLLYFALTIFFLPESPRWLVSKGRMLEAKKVLQRLRGREDVSGEMALLVEGLGIGGDTSIEEYIIGPADEVADGHEHATEKDKIRLYGSQAGLSWLAKPVTGQSSIGLASRHGSIINQSMPLMDPLVTLFGSIHEKLPETGAGGSMRSTLFPNFGSMFSTAEPHAKNEQWDEESLQREGEDYMSDAAGGDSDDNLHSPLISRQTTSLEKDLPPPPPSHGSILGSMRRHSSLMQGSGEQGGSTGIGGGWQLAWKWTDKGEDGKQQGGFKRIYLHEEGVSASRRGSIVSIPGEGEFVQAAALVSQPALYSKELIDGHPVGPAMVHPSETASKGPSWKALLEPGVKHALVVGVGIQILQQFSGINGVLYYTPQILEEAGVEVLLSDIGIGSESASFLISAFTTFLMLPCIGVAMKLMDVSGRRQLLLTTIPVLIGSLIILVIGSLVNFGNVAHAAISTVCVVVYFCCFVMGYGPIPNILCSEIFPTRVRGLCIAICALVFWIGDIIITYSLPVMLGSLGLGGVFAIYAVVCFISWIFVFLKVPETKGMPLEVISEFFSVGAKQAASAKNE

SEQ ID NO: 9882 - DNA, 2205 bp, Glycine max
  CDS (1)..(2205)
atgagtggagctgttcttgttgctgttgctgctgccatcggtaacttactacaaggatgggataatgcgactattgcaggatctatcttgtacataaaaagggagtttcaattacaaagtgaacccacagttgaaggtctaattgtggctatgtcacttattggagccaccgtggttactacatgctctggtgccctatcagacttgcttggccgacgtccaatgttgattatctcctctatgctttattttgttagttctcttgtcatgctatggtctccaaatgtttatatcctcctctttgctagacttttagatggtctgggaattggtttggcagttaccttggtacctctttacatatctgagacagctccttctgagattaggggattactcaatacacttccacagttcactggttctgcgggaatgtttttctcctactgtatggtgtttgggatgtcactgatgaaggcgccaagctggagaatcatgttgggtgttctttcaatcccttctcttatttactttgcactcacactgttgttcttgcctgagtctcccagatggctcgtcagtaagggccgaatgcttgaggccaagaaggttttgcagcgccttcgtggaagggaagatgtttccggtgaaatggctttactggttgagggtcttggagttgggggtgatacagccatagaagactatataattggtccagccaatgaacttgctgatgaagaggatccgtccagagaaaaagatcaaattaagttgtatggaccagaacaaggccagtcctgggttgctagacctgttgctggaccaaattctgttggccttgtatctaggaaaggaagcatggcaaatccaagcagtctagtggaccctctagtgaccctctttggtagtgtacatgagaagctcccagaaacaggaagcaccctttttccacactttgggagtatgttcagtgttgggggaaatcagccaaggaatgaagattgggatgaggaaagcctagccagagagggtgatgattatgtctctgatgctggtgattctgatgacaatttgcagagtccattgatctcacgtcaaacaacgagtctggataaggacatacctcctcatgcccatagtaaccttgcaagcatgaggcaaggtagtcttttacatggaaattcaggagaacccactggtagtactgggattggtggtggttggcagctagcatggaaatggtctgaaagagagggcccagatggaaagaaggaaggtggcttcaagagaatatatttacaccaagatggtggttctggatctagacgtgggtctgtggtttcactccctggcggtgatttaccaactgacagtgaggttgtacaggctgctgctctggtgagtcagcctgccctttataatgaggaccttatgcgtcaacggccagttggaccagctatgattcatccctctgaaacaattgcaaaagggccaagttggagtgatctttttgaacctggggtgaagcatgcattgattgtgggggtgggaatgcaaattcttcagcagttctctggtataaatggggtcctctactatacgcctcaaattcttgagcaggcaggtgttggttatcttctttcaagcctaggccttggttctacttcttcatcctttcttattagtgcggtgacaaccttgttgatgcttccttgtatagccattgccatgaggctcatggatatttcaggcagaaggactttgctgctcagtacaatccccgtcctaatagcagctcttctcatattagtcctgggaagtcttgtggatttgggatccactgcaaatgcatcaatctcaaccattagtgttattgtctatttctgtttctttgtcatgggatttggaccaattcctaatatactttgtgcagagatcttccccactcgagttcgtggtctctgcattgctatttgtgcccttaccttttggatctgtgatatcattgtcacctacacactcccagttatgctcaattctgtaggcctcgctggtgtttttggtatttatgctgtcgtgtgcttcatagcatgggtgtttgtctttttgaaagttccagaaaccaagggcatgccactggaagtgatcattgagttcttctctgtcggagcaaaacagtttgacgatgccaagcacaactga

SEQ ID NO: 9883 - protein, 734 aa, Glycine max
MSGAVLVAVAAAIGNLLQGWDNATIAGSILYIKREFQLQSEPTVEGLIVAMSLIGATVVTTCSGALSDLLGRRPMLIISSMLYFVSSLVMLWSPNVYILLFARLLDGLGIGLAVTLVPLYISETAPSEIRGLLNTLPQFTGSAGMFFSYCMVFGMSLMKAPSWRIMLGVLSIPSLIYFALTLLFLPESPRWLVSKGRMLEAKKVLQRLRGREDVSGEMALLVEGLGVGGDTAIEDYIIGPANELADEEDPSREKDQIKLYGPEQGQSWVARPVAGPNSVGLVSRKGSMANPSSLVDPLVTLFGSVHEKLPETGSTLFPHFGSMFSVGGNQPRNEDWDEESLAREGDDYVSDAGDSDDNLQSPLISRQTTSLDKDIPPHAHSNLASMRQGSLLHGNSGEPTGSTGIGGGWQLAWKWSEREGPDGKKEGGFKRIYLHQDGGSGSRRGSVVSLPGGDLPTDSEVVQAAALVSQPALYNEDLMRQRPVGPAMIHPSETIAKGPSWSDLFEPGVKHALIVGVGMQILQQFSGINGVLYYTPQILEQAGVGYLLSSLGLGSTSSSFLISAVTTLLMLPCIAIAMRLMDISGRRTLLLSTIPVLIAALLILVLGSLVDLGSTANASISTISVIVYFCFFVMGFGPIPNILCAEIFPTRVRGLCIAICALTFWICDIIVTYTLPVMLNSVGLAGVFGIYAVVCFIAWVFVFLKVPETKGMPLEVIIEFFSVGAKQFDDAKHN

SEQ ID NO: 9884 - DNA, 2217 bp, Glycine max
  CDS (1)..(2217)
atgagtggagctgttcttgttgctgttgctgctgccatcggtaacttactacaaggatgggataatgcgactattgcaggatctatcctgtacataaaaaaggaatttcaattagaaaatgaacccacagttgaaggtctaattgtggctatgtcacttattggagccaccgtggttactacatgctctggggccctatcagacttgctaggccgacgtccaatgttgattatctcctctatgctttattttgttagttctctcgtgatgctgtggtctccaaatgtttatatcctcctctttgctagacttttagatggtttgggaattggtttagcagttaccttggttcctctttacatatctgagacagctcctcctgagattaggggattactcaatacacttccacagttcactggttctttgggaatgtttttctcctactgtatggtgtttgggatgtcactgatgaaggcgcctagctggagaatcatgttgggtgttctttcaatcccttctcttattttctttgcactcacactgttgttcttgcctgagtctcccagatggcttgtcagtaagggccgaatgcttgaggccaagaaggttttgcagcggcttcgtggaagggaagatgtttccggtgaaatggctctactggttgagggtcttggagttgggggtgatacagccatagaagagtatataattggtccagccaatgaacttgatgaagaggatcaatccagagaaaaagatcaaattaagttgtatggaccggaacaaggtcagtcctgggttgctagacctgttgctggacaaaattctgttggccttgtatctaggaaaggaagcatggtaaatcagagcggtctagtggaccctctagtgaccctctttggtagtatccatgagaagcacccggaaacaggaagcatgcgaagcaccctttttccacactttgggagtatgtttagtgttgggggaaatcagccaaggaatgaagattgggatgaggaaagcctagccagagagggtgatgattatgtctctgatgctgctgctggtgattctgatgacaatttgcagagtccattgatctctcgtcaaacaacaagtatggataaggacataactcctcctgcccatagtaacctttcaagcatgaggcaaggtagtcttttacatggaaatgcaggagaacccactggtagtactgggattggtggtggttggcagctagcatggaaatggtctgaaagagagagcccagatggaaagaaggaaggtggattccagagaatatatttacaccaagatggtggttctggatctagacgtgggtctgtggtttcactccctggtggtgatttaccaactgatggtgaggttgtacaggctgctgctctggtgagtcggtcagccctttataacaaggaccttatgtgtcaacggccagttggaccagctatgattcatccgtctgaaacaattgcaaaagggccaagttggagtgacctttttgaacctggagtaaagcatgcattaattgtgggggtgggaatgcaaattcttcagcagttctctggtataaatggggtcctctactatacacctcaaattcttgagcaggcaggtgttggttatcttctttcaagtctaggccttggttctacttcttcgtcctttcttattagtgcggtgacaaccttgttgatgcttccttgtatagccattgccatgaggctcatggatatttcgggcagaaggactttgctgctcagtacaatccccgtcctaatagtagctcttctcatattagtcctggggagtcttgtggatttgggaaccactgcaaatgcatcaatctcaaccattagtgttattgtctatttctgtttctttgtcatgggatttgggccaattcctaatatactttgtgcagagatcttccccactcgagttcgtggcctctgcattgccatttgtgctcttaccttttggatctgtgatatcattgtcacctacacactcccagttatgctcaattctttaggcctcgctggtgtttttggtatttatgctgtcgcgtgcttcatagcatgggtgtttgtctttttgaaagttccagaaaccaagggcatgccactggaagtgatcattgagttcttctctgttggagcaaaacaggttgacgatgccaagcacaactga

SEQ ID NO: 9885 - protein, 738 aa, Glycine max
MSGAVLVAVAAAIGNLLQGWDNATIAGSILYIKKEFQLENEPTVEGLIVAMSLIGATVVTTCSGALSDLLGRRPMLIISSMLYFVSSLVMLWSPNVYILLFARLLDGLGIGLAVTLVPLYISETAPPEIRGLLNTLPQFTGSLGMFFSYCMVFGMSLMKAPSWRIMLGVLSIPSLIFFALTLLFLPESPRWLVSKGRMLEAKKVLQRLRGREDVSGEMALLVEGLGVGGDTAIEEYIIGPANELDEEDQSREKDQIKLYGPEQGQSWVARPVAGQNSVGLVSRKGSMVNQSGLVDPLVTLFGSIHEKHPETGSMRSTLFPHFGSMFSVGGNQPRNEDWDEESLAREGDDYVSDAAAGDSDDNLQSPLISRQTTSMDKDITPPAHSNLSSMRQGSLLHGNAGEPTGSTGIGGGWQLAWKWSERESPDGKKEGGFQRIYLHQDGGSGSRRGSVVSLPGGDLPTDGEVVQAAALVSRSALYNKDLMCQRPVGPAMIHPSETIAKGPSWSDLFEPGVKHALIVGVGMQILQQFSGINGVLYYTPQILEQAGVGYLLSSLGLGSTSSSFLISAVTTLLMLPCIAIAMRLMDISGRRTLLLSTIPVLIVALLILVLGSLVDLGTTANASISTISVIVYFCFFVMGFGPIPNILCAEIFPTRVRGLCIAICALTFWICDIIVTYTLPVMLNSLGLAGVFGIYAVACFIAWVFVFLKVPETKGMPLEVIIEFFSVGAKQVDDAKHN

SEQ ID NO: 9886 - DNA, 3401 bp, Zea mays
  CDS (740)..(2980)
gccggccgggtcgggatttctcagcgaagcagccacgcccacgcacacgcagtctggaagcgtttacatgacacgtccacccatcctgacctatcgccaagccaagagctacagttcccaagcgccgaggaaaagccggcccgaattccatcgtttcatcgaccgcccgctgcaatgaaccgcgcttcttggttgctccttgttctggtgcagctctcttgcttgcactgctactcagccacccgccatggccgctgccgttagcacggacgtccttggacctgccccccaggcagccgctgcgccggctccgttctcttcttgggaccaggctgccctgtgagtacctcaatcgtggttgtcaaggtgaacctgctcctgcgcgcaagtcgcaacggtggtggctgcagctgcggcgtgctccttcgctggaaagtggggcagtatcttttcgcatctcctcgactccgcctctctcggatctcgccgaaggacgagcaaaggcccctgatcgcccgcttctactacaactatattctgtcgccagcgcacaagcggcgggggcacggggtagattcggagcggctcttggcttgcagtccagacgcccttcacccctgatctggaccggagggagcggctccttccgtcagttgttcttgctttgcctgggcctcttccgcctgcttcgtgttcttcacaggagccggtgacctcggacgatatcttggaggacaagatgtcgggggctgttcttgtcgccatagtcgcctccatcggcaatctattgcaggggtgggacaatgccaccatcgcagctgctgttctgtatataaagaaggaatttcaattgcaaaatgagcccactgtggagggactaattgtgtcaatgtcacttatcggcgccaccattgttactacattctccgggccattatcagactcgattggccgacgccctatgcttattctctcttcaattctgtacttcttcagcggcctcatcatgctatggtctcctaatgtctatgtcctgctgttggcacgcttcgtagatggatttggtattggcttggctgtcacgcttgtgcctttgtacatttcagaaatagccccttcggagattagaggtttgctgaatacactaccacaattcagtggatcaggaggaatgttcttgtcatactgcatggtgtttgggatgtccctgtcgccatcacccgattggagaattatgcttggtgtgctcgcgataccttcattgttcttctttggtttgacaatattttatcttcctgaatctccaagatggctcgttagcaaaggtcggatggcagaggcaaaaaaggtgttgcaaaagttacgggggaaagacgatgtctcaggtgaattgtcccttcttctcgaagggttggaggttggaggagacacttccattgaagagtacatcattggacctgccaccgaggcagccgatgatcttgttactgacggtgataaggaacaaatcacactttatgggcctgaagaaggccagtcatggattgctcgaccttctaagggacccagcatgcttggaagtgtgctttctcttgcatctcgtcatgggagcatggtgaaccagagtgtaccccttatggatccgattgtgacactttttggtagtgtccatgagaatatgcctcaagctggaggaagtatgaggagcacattgtttccaaactttggaagtatgttcagtgtcacagatcagcatgccaaaaatgagcagtgggatgaagagaatcttcatagggatgacgaggagtatgcatctgatggtgcaggaggtgactatgaggacaatctccatagtccattgctgtccaggcaggcaacaggtgcggaagggaaggacattgtgcaccatggtcaccgtggaagtgctttgagcatgagaaggcaaagcctcttaggggagggtggagatggtgtgagcagcactgatatcggtgggggatggcagcttgcttggaaatggtcagagaaggaaggtgagaatggtagaaaggaaggtggtttcaaaagagtctacttgcaccaagagggagttcctggctcaagaaggggctcaattgtttcacttcccggtggtggcgatgttcttgagggtagtgagtttgtacatgctgctgctttagtaagtcagtcagcacttttctcaaagggtcttgctgaaccacgcatgtcagatgctgccatggttcacccatctgaggtagctgccaaaggttcacgttggaaagatttgtttgaacctggagtgaggcgtgccctgttagtcggtgttggaattcagatccttcaacagtttgctggaataaacggtgttctgtactataccccacaaattcttgagcaagctggtgtggcagttattctttccaaatttggtctcagctcggcatcagcatccatcttgatcagttctctcactaccttactaatgcttccttgcattggctttgccatgctgcttatggatctttccggaagaaggtttttgctgctaggcacaattccaatcttgatagcatctctagttatcctggttgtgtccaatctaattgatttgggtacactagcccatgctttgctctccaccgtcagtgttatcgtctacttctgctgcttcgttatgggatttggtcccatccccaacattttatgtgcagagatctttccaaccagggttcgtggcctctgtattgccatttgtgcctttacattctggatcggagatatcatcgtcacctacgggagccttcctgtgatgctgaatgctattggactggcgggtgttttcagcatatatgcagtcgtatgcttgatttcctttgtgttcgtcttccttaaggtccctgagacaaaggggatgccccttgaggttattaccgaattctttgcagttggtgcgaagcaagcggctgcaaaagcctaatttctttggtacctttgcgtgcaactattgcactgtaagttagaaacttgaaggggtttcaccaagaagctcggagaattactttggatttgtgtaaatgttaagggaacgaacatctgctcatgctcctcaaacggtaaaaaagagtccctcaatggcaaataggagtcgttaagttgtcaatgtcatttaccatatgttttacctatttgtactgtattataagtcaagctattcaacgctggttgttgctagaaatctttagaacaaagatgataatgatctgatctgatgttataatattcaaatctcaaataaagaaaatatcgtttctcatgttgtctttgcaagcttttgcactgttcaatatgaaaaaaaaaaaaaaaaaaaaaagctagggcggccgccgactgataagctc

SEQ ID NO: 9887 - protein, 746 aa, Zea mays
MSGAVLVAIVASIGNLLQGWDNATIAAAVLYIKKEFQLQNEPTVEGLIVSMSLIGATIVTTFSGPLSDSIGRRPMLILSSILYFFSGLIMLWSPNVYVLLLARFVDGFGIGLAVTLVPLYISEIAPSEIRGLLNTLPQFSGSGGMFLSYCMVFGMSLSPSPDWRIMLGVLAIPSLFFFGLTIFYLPESPRWLVSKGRMAEAKKVLQKLRGKDDVSGELSLLLEGLEVGGDTSIEEYIIGPATEAADDLVTDGDKEQITLYGPEEGQSWIARPSKGPSMLGSVLSLASRHGSMVNQSVPLMDPIVTLFGSVHENMPQAGGSMRSTLFPNFGSMFSVTDQHAKNEQWDEENLHRDDEEYASDGAGGDYEDNLHSPLLSRQATGAEGKDIVHHGHRGSALSMRRQSLLGEGGDGVSSTDIGGGWQLAWKWSEKEGENGRKEGGFKRVYLHQEGVPGSRRGSIVSLPGGGDVLEGSEFVHAAALVSQSALFSKGLAEPRMSDAAMVHPSEVAAKGSRWKDLFEPGVRRALLVGVGIQILQQFAGINGVLYYTPQILEQAGVAVILSKFGLSSASASILISSLTTLLMLPCIGFAMLLMDLSGRRFLLLGTIPILIASLVILVVSNLIDLGTLAHALLSTVSVIVYFCCFVMGFGPIPNILCAEIFPTRVRGLCIAICAFTFWIGDIIVTYGSLPVMLNAIGLAGVFSIYAVVCLISFVFVFLKVPETKGMPLEVITEFFAVGAKQAAAKA

SEQ ID NO: 9888 - DNA, 2378 bp, Oryza sativa
  CDS (22)..(2040)
gactggatcggccggcgccctatgctcattctctcttcaattctctacttcctcagcagcctcatcatgctatggtccccgaatgtctatgtgttactgctcgcacgccttatagatggattcggcatcggcttggctgtcacacttgtacctttgtacatctcagagacagctccttcagagatcaggggtttgctgaatacactgccacagttcagtgggtcaggagggatgttcttgtcctactgcatggtgtttgggatgtcactgttgccgtcacctgactggagaattatgcttggtgttctcgcaatcccttcgttgtttttcttcggattgacaatattctatctgccagaatcaccaagatggcttgtcagcaaagggcggatggctgaggcaaagaaggtattacaaaaattacgtgggagagaggatgtctcaggagaaatggctcttcttgttgaaggtttggaggttggagctgacacttccattgaagagtacatcatcggaccggctatagagccagctgatgagcatgttgttgatggcgataaggaccaaataacactgtacgggcctgaagagggccaatcatggattgctcgaccttccaagggacccagcattcttggaagtgtgctttctcttacatctcgtcatggcagcatggtgaaccagagcgtgccacttatggatcctatagtcacgcttttcggcagtgtccatgagaacatgcctcatgctggaggaagcatgcggagtacattgtttcccaactttggtagtatgtttagtgtgacagatcagcaccccaaggttgatcaatgggatgaggagaaccttcatagggatgatgaggaatacgcgtctgatggtgctggaggtgactatgaagacaatgtccacagcccgttgctgtcccgacagaccacgagcgcagaagggaaggacattgcacaccatgctcatcgtggaagtgctctgagtatgagaagaagaagcctcttggaagagggtggcgaggcggtgagcagcactggcattggtgggggatggcagcttgcatggaaatggtcagagcgagaaggcgaggatggtaagaaggaaggaggatttaaaaggatctacttgcaccaagaggaagtgccaggatcaagaaggggctcagttatttcacttcctggtggaggggacgctcctgaaggcagcgaattcatacatgctgccgctttggtaagccaaccagcactttactccaaggatatcattgaacagcgtatgtccggtccagccatgattcatacatcagaggcagctgccaaaggttcaagctggaaagatttgtttgaacctggagtgaggcgtgcgttgttagtcggtgttggaattcaaatccttcaacagtttgctggaataaatggggttctctattacactccacaaatacttgagcaagcgggggtggcagttctcctttccaatcttggcctcagttcagcatcagcttccatcttgatcagttctctgaccaccctactgatgcttcctagcattggtttagccatgagacttatggacatctctggaagaaggtttctgcttctgggcacaattccagtcttgatagcatctctagttgtcttggttgtgtccaatgttatcgacctgggtacagtggcccacgccgcactctccacaatcagcgtcatcatctacttctgctgcttcgtcatgggattcggtccgatccccaacattctgtgtgcggagatcttccccactagggtccgcggcatctgcattgccatctgcgccctgacattctggattggtgatatcatagtcacctacagcctccctgtgatgctgaatgccatcggcctagcaggtgtctttggtatatacgcagttgtttgctcgattgccttcgtgttcgtcttcctcaaggtccccgagacgaagggcatgccgctcgaagtcatcaccgagttcttcgctgttggtgcaaagcaaatgcaggctacaaaggcctaattcttcagcaactctgctttcaatctttatataacactgtaaattggaatctgcaagatcacaccatgaggctggaggagctttttgagttgtaaatgagagaagaggattgctattcatgctccttatgcaagggaaaagagttcattactggcacagggcagctgtaaagtaggaaattttcatgttattcatgtccacttcttgtttatttagtactgtgttaggtaatgttgttattcatcagtagttgctgctagggatgttcaaaaataagcttgctaatctgattttgagctactatgttggggttcataataaagtaaattttctgtgtc

SEQ ID NO: 9889 - protein, 672 aa, Oryza sativa
MLILSSILYFLSSLIMLWSPNVYVLLLARLIDGFGIGLAVTLVPLYISETAPSEIRGLLNTLPQFSGSGGMFLSYCMVFGMSLLPSPDWRIMLGVLAIPSLFFFGLTIFYLPESPRWLVSKGRMAEAKKVLQKLRGREDVSGEMALLVEGLEVGADTSIEEYIIGPAIEPADEHVVDGDKDQITLYGPEEGQSWIARPSKGPSILGSVLSLTSRHGSMVNQSVPLMDPIVTLFGSVHENMPHAGGSMRSTLFPNFGSMFSVTDQHPKVDQWDEENLHRDDEEYASDGAGGDYEDNVHSPLLSRQTTSAEGKDIAHHAHRGSALSMRRRSLLEEGGEAVSSTGIGGGWQLAWKWSEREGEDGKKEGGFKRIYLHQEEVPGSRRGSVISLPGGGDAPEGSEFIHAAALVSQPALYSKDIIEQRMSGPAMIHTSEAAAKGSSWKDLFEPGVRRALLVGVGIQILQQFAGINGVLYYTPQILEQAGVAVLLSNLGLSSASASILISSLTTLLMLPSIGLAMRLMDISGRRFLLLGTIPVLIASLVVLVVSNVIDLGTVAHAALSTISVIIYFCCFVMGFGPIPNILCAEIFPTRVRGICIAICALTFWIGDIIVTYSLPVMLNAIGLAGVFGIYAVVCSIAFVFVFLKVPETKGMPLEVITEFFAVGAKQMQATKA

SEQ ID NO: 9890 - DNA, 2908 bp, Zea mays
  CDS (331)..(2568)
gctgcggcgtgctccttcgctggaaagtggggcagtatcttttcgcatctcctcgactccgcctctctcggatctcgccgaaggacgagcaaaggcccctgatcgcccgcttctactacaactatattctgtcgccagcgcacaagcggcgggggcacggggtagattcggagcggctcttggcttgcagtccagacgcccttcacccctgatctggaccggagggagcggctccttccgtcagttgttcttgctttgcctgggcctcttccgcctgcttcgtgttcttcacaggagccggtgacctcggacgatatcttggaggacaagatgtcgggggctgttcttgtcgccatagtcgcctccatcggcaatctattgcaggggtgggacaatgccaccatcgcagctgctgttctgtatataaagaaggaatttcaattgcaaaatgagcccactgtggagggactaattgtgtcaatgtcacttatcggcgccaccatcgttactacattctccgggccattatcagactcgattggccgacgccctatgcttattctctcttcaattctgtacttcttcagcggcctcatcatgctatggtctcctaatgtctatgtcctgctgttggcacgcttcgtagatggatttggtattggcttggctgtcacgcttgtgcctttgtacatttcagaaatagccccttcggagattagaggtttgctgaatacactaccacaattcagtggatcaggaggaatgttcttgtcatactgcatggtgtttgggatgtccctgtcgccatcacccgattggagaattatgcttggtgtgctcgcgataccttcattgttcttctttggtttgacaatattttatcttcctgaatctccaagatggctcgttagcaaaggtcggatggcagaggcaaaaaaggtgttgcaaaagttacgggggaaagacgatgtctcaggtgaattgtcccttcttctcgaagggttggaggttggaggagacacttccattgaagagtacatcattggacctgccaccgaggcagccgatgatcttgttactgacggtgataaggaacaaatcacactttatgggcctgaagaaggccagtcatggattgctcgaccttccaagggacccagcatgcttggaagtgtgctttctcttgcatctcgtcatgggagcatggtgaaccagagtgtaccccttatggatccgattgtgacactttttggtagtgtccatgagaatatgcctcaagctggaggaagtatgaggagcacattgtttccaaactttggaagtatgttcagtgtcacagatcagcatgccaaaaatgagcagtgggatgaagagaatcttcatagggatgacgaggagtacgcatctgatggtgcaggaggtgactatgaggacaatctccatagcccattgctgtccaggcaggcaacaggtgcggaagggaaggacattgtgcaccatggtcaccgtggaagtgctttgagcatgagaaggcaaagcctcttaggggagggtggagatggtgtgagcagcactgatatcggtgggggatggcagcttgcttggaaatggtcagagaaggaaggtgagaatggtagaaaggaaggtggtttcaaaagagtctacttgcaccaagagggagttcctggctcaagaaggggctcaattgtttcacttcccggtggtggcgatgttcttgagggtagtgagtttgtacatgctgctgctttagtaagtcagtcagcacttttctcaaagggtcttgctgaaccacgcatgtcagatgctgccatggttcacccatctgaggtagctgccaaaggttcacgttggaaagatttgtttgaacctggagtgaggcgtgccctgttagtcggtgttggaattcagatccttcaacagtttgctggaataaacggtgttctgtactataccccacaaattcttgagcaagctggtgtggcagttattctttccaaatttggtctcagctcggcatcagcatccatcttgatcagttctctcactaccttactaatgcttccttgcattggctttgccatgctgcttatggatctttccggaagaaggtttttgctgctaggcacaattccaatcttgatagcatctctagttatcctggttgtgtccaatctaattgatttgggtacactagcccatgctttgctctccaccgtcagtgttatcgtctacttctgctgcttcgttatgggatttggtcccatccccaacattttatgtgcagagatctttccaaccagggttcgtggcctctgtattgccatttgtgcctttacattctggatcggagatatcatcgtcacctacagccttcctgtgatgctgaatgctattggactggcgggtgttttcagcatatatgcagtcgtatgcttgatttcctttgtgttcgtcttccttaaggtccctgagacaaaggggatgccccttgaggttattaccgaattctttgcagttggtgcgaagcaagcggctgcaaaagcctaatttctttggtacctttgtgtgcaactattgcactgtaagttagaaacttgaaggggtttcaccaagaagctcggagaattactttggatttgtgtaaatgttaagggaacgaacatctgctcatgctcctcaaacggtaaaaaagagtccctcaatggcaaataggagtcgttaagttgtcaatgtcatttaccatatgttttacctatttgtactgtattataagtcaagctattcaacgctggttgttgctagaaatctttagaacaaagatgataatgatctgatctgatgttataatattcaaatctcaaataaagaaaatatcgtttctcaaaaa

SEQ ID NO: 9891 - protein, 745 aa, Zea mays
MSGAVLVAIVASIGNLLQGWDNATIAAAVLYIKKEFQLQNEPTVEGLIVSMSLIGATIVTTFSGPLSDSIGRRPMLILSSILYFFSGLIMLWSPNVYVLLLARFVDGFGIGLAVTLVPLYISEIAPSEIRGLLNTLPQFSGSGGMFLSYCMVFGMSLSPSPDWRIMLGVLAIPSLFFFGLTIFYLPESPRWLVSKGRMAEAKKVLQKLRGKDDVSGELSLLLEGLEVGGDTSIEEYIIGPATEAADDLVTDGDKEQITLYGPEEGQSWIARPSKGPSMLGSVLSLASRHGSMVNQSVPLMDPIVTLFGSVHENMPQAGGSMRSTLFPNFGSMFSVTDQHAKNEQWDEENLHRDDEEYASDGAGGDYEDNLHSPLLSRQATGAEGKDIVHHGHRGSALSMRRQSLLGEGGDGVSSTDIGGGWQLAWKWSEKEGENGRKEGGFKRVYLHQEGVPGSRRGSIVSLPGGGDVLEGSEFVHAAALVSQSALFSKGLAEPRMSDAAMVHPSEVAAKGSRWKDLFEPGVRRALLVGVGIQILQQFAGINGVLYYTPQILEQAGVAVILSKFGLSSASASILISSLTTLLMLPCIGFAMLLMDLSGRRFLLLGTIPILIASLVILVVSNLIDLGTLAHALLSTVSVIVYFCCFVMGFGPIPNILCAEIFPTRVRGLCIAICAFTFWIGDIIVTYSLPVMLNAIGLAGVFSIYAVVCLISFVFVFLKVPETKGMPLEVITEFFAVGAKQAAAKA

SEQ ID NO: 9892 - DNA, 2292 bp, Zea mays
  CDS (1)..(2292)
atgcaaggggccgtgttggtggccatcgcggctgccatcggcaacctcttgcaggggttggacaacgcggccatcgccgccgcggtgctctacatcaagcgcgagttccacctggagacagatccagcactcgagggcgtcgtggttgccacctccctcttcggggcaacgatcgtcaccatcttctccggccccgtctccgacgtcatcggtcgccgcccgatgctcatcgtgtcctcgctgctctacttcgccggcgggctcctcatgctatggtccccgagtgtgccggtgctcctcgtggcgcgccttgtggacggcttcggcgtcgggctcgccgtcacgctcgtccccgtctacatctccgagacggcgccccctgaaatccggggtttcctcaacacactgccgcagttaacgggatccttgggcatgttcctttcctattgcatgatcttctacatgacgctgggcgatagccccagttggcggttcatgctcggcgtcctctccgtgccctccctcgcctacctcgcgctcaccgtgctctacctccccgagtcgccgcgctggctcgtcagcaagggccggatgaaggaggccagggccattctccagatgttgcgcggcagggaggacgtgtctggcgagatggcgctcctcgtcgagggcctcggcagcagcgacgacaccgtcatcgaggagtacgtgttgggcccggcggcagccggggacgagtcggagcacgagaccagggaccaggtcacgctgtatgggcccgagcaggggctgtcgtgggtggcgcagcaggtgcagggcgcgcgcagcagcgtgctcggcagcgccgtcgggctcgcgtcgcgccaggggagcatgtacgagcagatgaaggaccccgtggtgacgctgctggggagcgtccacgacaagatgcccgactctggcgccagtgccagggccagcacgctcttccccaacctcggcagcatgctcagcgtgacggagcggcacggtggcgactgggacgaggagaacgtgccgcccaacgacgacctcgacgacgatgaggacgaggaggagtacctctccgacgatgaggacgctggcgccggagcagcagcacgaggagggggaggaggaggaggcgcgctgcacgcgccgctgctgtcgaggcagagcacggacgttgacgtcaccagcggcacgagcaagaaggacggcagccacccgcctgagagcagccccatgcagaggtacagcagcattaccagcggggaggccgcgagcaccatgggcatcggcggtggctggcagctggcgtggaagtggacagagatggtcggggccgacggcgtgagacgcggtggcgtcaagaggatgtacctacatgaggaaggcggcggcgatggggactcatcggacccggcagggggttacgtgcacgcggcggcgctggtgagcccgtccatcctctacaccaaggacgtgctcatcgggcagagcccgaccccggcgttcgacagcccgccgccggagacggtggccaacaaggcaggcggggggccctgttggagagagctcctggagccgggtgtcaggcgcgcgctcttctgtggcgtcatgattcagatcctgcagcagttgtctggcatcaatggtgtgatgtactacacgccccagatccttgaccaggccggtgtgagcgtcctgctctctagcctgggccttagcgccgactccgcgtccatcctcctcagcggcgtcaccatgctgatgatgctcccttgcatcgtcgtggccatgcgcctcatggacgtggccggccggcgctcgctgctgctgcggaccatcccggtgctgatcgtgtcgctggcggtgctggtgctggcgaacgtggtgcccatggcggccaaggtgcacgcgctgctttcaacggcctgcgtggtcgtgtacttctgctgcttcgtcatggggttcgggcccatccccaacatcctatgcgcggagatcttccccacgcgtgtcagggggatctgcatcgccgtgtgctccctcaccttctggatctgcgacatcatcgtcaccaactctctccctgtgatgctcagaaccatcggcctcgcgggtgtatttggctcctacgccttcgtctgctgcttgtcgctcgtcttcgtgtacctcagggtgcccgagaccaaggggttcccgctcgaggtcataatcgagttcttcaacgtgggtgccaaagctcagaagccggagcagcatgaagaggaggagaaccacgactaa

SEQ ID NO: 9893 - protein, 763 aa, Zea mays
MQGAVLVAIAAAIGNLLQGLDNAAIAAAVLYIKREFHLETDPALEGVVVATSLFGATIVTIFSGPVSDVIGRRPMLIVSSLLYFAGGLLMLWSPSVPVLLVARLVDGFGVGLAVTLVPVYISETAPPEIRGFLNTLPQLTGSLGMFLSYCMIFYMTLGDSPSWRFMLGVLSVPSLAYLALTVLYLPESPRWLVSKGRMKEARAILQMLRGREDVSGEMALLVEGLGSSDDTVIEEYVLGPAAAGDESEHETRDQVTLYGPEQGLSWVAQQVQGARSSVLGSAVGLASRQGSMYEQMKDPVVTLLGSVHDKMPDSGASARASTLFPNLGSMLSVTERHGGDWDEENVPPNDDLDDDEDEEEYLSDDEDAGAGAAARGGGGGGGALHAPLLSRQSTDVDVTSGTSKKDGSHPPESSPMQRYSSITSGEAASTMGIGGGWQLAWKWTEMVGADGVRRGGVKRMYLHEEGGGDGDSSDPAGGYVHAAALVSPSILYTKDVLIGQSPTPAFDSPPPETVANKAGGGPCWRELLEPGVRRALFCGVMIQILQQLSGINGVMYYTPQILDQAGVSVLLSSLGLSADSASILLSGVTMLMMLPCIVVAMRLMDVAGRRSLLLRTIPVLIVSLAVLVLANVVPMAAKVHALLSTACVVVYFCCFVMGFGPIPNILCAEIFPTRVRGICIAVCSLTFWICDIIVTNSLPVMLRTIGLAGVFGSYAFVCCLSLVFVYLRVPETKGFPLEVIIEFFNVGAKAQKPEQHEEEENHD

SEQ ID NO: 9894 - DNA, 2244 bp, Zea mays
  CDS (1)..(2244)
atggggggcgccgtgatggtcgccatcgcggcctctatcggcaacttgctgcagggctgggacaatgcgacaattgctggagccgtcctgtacataaagaaggaattcaacctgcagagcgagcctctgatcgagggcctcatcgtcgccatgtccctcattggggcaacagtcatcacgacgttctccggggcagcggccgactgcgttggtaggaggcccatgctggtcgcctcggctgtcctctacttcgtcagtgggctggtgatgctttgggcgccaagtgtgtacatcttgctcctcgcaaggctcattgatgggttcggtatcggtttggcggtcacacttgttcctctctacatctccgagactgcaccgacagacattcgtgggctgttgaacacgttgccgcagttcagtgggtcaggagggatgttcctctcctactgcatggtgtttgggatgtccctcatgcccaaacctgattggaggctcatgcttggagttctgtcgatcccgtcacttatttactttggactgactgtcttctacttgcctgaatcaccaaggtggcttgtgagcaaaggaaggatggcggaggcgaagagagtgttgcaaaggctgcggggaagagaagatgtctcaggggagatggctcttctagttgaaggtttgggggtcggtaaagatacacgtattgaagaatacataattggtcccgatgatgaacttgctgatgaagggctggctccagatccagagaagatcaaactatatggacctgaagaaggcctatcttgggttgcccgacctgttcggggacaaagtgctcttggaagcgcgttaggtctcatctctcgtcatgggagtatggcggctagtcagggtaagcccctcgtggatcctatggtcactcttttcggaagtgttcatgaaaagatgcctgagatcatggggagcatgaggagcacattgtttcccaactttggcagcatgtttagtgttgccgaccagcagcaggtgaaagctgactgggacgccgagagtcaaagggaaggtgaagattatgcttcggatcatggtggcgatgacatcgaggataacctccaaagcccacttatttctcgtcaggcaacaagtgtggaaggaaaggagatcgctgcacctcatggtagcatattgggtgctgtgggaaggagcagtagcttgcagggaggggaggcagtaagcagcatgggcattggcggaggatggcagttggcgtggaaatggaccgagagagagggcgaagatgggcaaaaggaaggtggcttccagcgtatttacttgcatgaggagggcgtacaaggcaacaggggttctatattgtcattaccaggcggggatgttcctcctggtggtgagttcatccaggctgcagctcttgtgagccaaccagctctttactctaaggaactgctggagcaacgtgctgctggtcctgcgatgatgcatccatctgaagcagttactaaaggtccaagatgggccgacctatttgagcctggggtgaagcatgcactgtttgttggcataggaatacagatcctgcaacagtttgctggcatcaacggcgttctctactacactcctcaaattcttgagcaagcaggcgttggtgttcttctgtcgaacctcggccttaacgcttcttcggcatcaatcctcattagcgccctgacgaccttactgatgctcccaagcatcggcattgcgatgaggctcatggatatgtccggaaggaggtttctcctcctcgcgacgatcccagtcctaatagtcgcgctactcgtcctggtggtgtccaacatcgtggacgtgggggacgtggcgcacgcggcgctctccacggccagcgtcatagtctacttctgcttcttcgtcatggggttcgggcccgtccccaacatcctctgcgcagagatcttccccaccacggtccgcggtgtctgcatcgccatctgcgccctggccttctggctcggtgacatcatcgtgacgtacactctccccgtgatgctgaacgtcgtcgggctcgccggcgtctttggggtgtacgccgtcgtgtgcgtcctagccctcgcgttcgtgttcgtcaaggtgcccgagacgaagggcatgcctctcgaggtcatcaccgagttcttctccgttggggcaaagcaagccaaggaagaggaggaggaggaggccagggaaggttga

SEQ ID NO: 9895 - protein, 747 aa, Zea mays
MGGAVMVAIAASIGNLLQGWDNATIAGAVLYIKKEFNLQSEPLIEGLIVAMSLIGATVITTFSGAAADCVGRRPMLVASAVLYFVSGLVMLWAPSVYILLLARLIDGFGIGLAVTLVPLYISETAPTDIRGLLNTLPQFSGSGGMFLSYCMVFGMSLMPKPDWRLMLGVLSIPSLIYFGLTVFYLPESPRWLVSKGRMAEAKRVLQRLRGREDVSGEMALLVEGLGVGKDTRIEEYIIGPDDELADEGLAPDPEKIKLYGPEEGLSWVARPVRGQSALGSALGLISRHGSMAASQGKPLVDPMVTLFGSVHEKMPEIMGSMRSTLFPNFGSMFSVADQQQVKADWDAESQREGEDYASDHGGDDIEDNLQSPLISRQATSVEGKEIAAPHGSILGAVGRSSSLQGGEAVSSMGIGGGWQLAWKWTEREGEDGQKEGGFQRIYLHEEGVQGNRGSILSLPGGDVPPGGEFIQAAALVSQPALYSKELLEQRAAGPAMMHPSEAVTKGPRWADLFEPGVKHALFVGIGIQILQQFAGINGVLYYTPQILEQAGVGVLLSNLGLNASSASILISALTTLLMLPSIGIAMRLMDMSGRRFLLLATIPVLIVALLVLVVSNIVDVGDVAHAALSTASVIVYFCFFVMGFGPVPNILCAEIFPTTVRGVCIAICALAFWLGDIIVTYTLPVMLNVVGLAGVFGVYAVVCVLALAFVFVKVPETKGMPLEVITEFFSVGAKQAKEEEEEEAREG

SEQ ID NO: 9896 - DNA, 2205 bp, Arabidopsis thaliana
  CDS (1)..(2205)
atgaagggagcgactctcgttgctctcgccgccacaatcggcaatttcttacaaggatgggacaatgccaccattgctggagctatggtttatatcaacaaagacttgaatctaccaacctctgttcaaggtcttgtcgttgctatgtcattgatcggtgcaacggtcatcacgacttgctcaggaccgatatctgattggctcggcagacgccccatgctcattttatcatcagttatgtatttcgtctgcggtttgataatgttgtggtctcccaatgtctatgttctgtgctttgctaggcttcttaatgggtttggtgccgggctcgcggttacacttgtccctgtttacatttctgaaaccgctcctccggagatcagaggacagttaaatactctccctcagtttcttggctctggtggaatgtttttgtcatactgtatggttttcactatgtccctgagtgactcccctagctggagagccatgctcggtgtcctctcgatcccttctcttctttatttgtttctcacggtgttttatttgcccgagtctcctcgttggctggttagtaaaggaagaatggacgaggctaagcgagttcttcaacagttatgtggcagagaagatgttaccgatgagatggctttactagttgaaggactagatataggaggagaaaaaacaatggaagatctcttagtaactttggaggatcatgaaggtgatgatacacttgaaaccgttgatgaggatggacaaatgcggctttatggaacccacgagaatcaatcgtaccttgctagacctgtcccagaacaaaatagctcacttgggctacgctctcgccacggaagcttagcaaaccaaagcatgatccttaaagatccgctcgtcaatctttttggcagtctccacgagaagatgccagaagcaggcggaaacactcggagtgggattttccctcatttcggaagcatgttcagtactactgccgatgcgcctcacggtaaaccggctcattgggaaaaggacatagagagccattacaacaaagacaatgatgactatgcgactgatgatggtgcgggtgatgatgatgactcggacaacgatttgcgtagccccttaatgtcgcgccagaccacaagcatggacaaggatatgatcccacatcctacaagtggaagcactttaagcatgagacgacacagtacgcttatgcaaggcaacggcgaaagtagcatgggaattggtggtggttggcatatgggatatagatacgaaaacgatgaatacaagaggtattatcttaaagaagatggagctgaatctcgccgtggctcgatcatctctattcccggaggtccggatggtggaggcagctacattcacgcttctgcccttgtaagcagatctgttcttggtcctaaatcagttcatggatccgccatggttcccccggagaaaattgctgcctctggaccactctggtctgctcttcttgaacctggtgttaagcgtgccttggttgttggtgtcggcattcaaatactgcagcagttttcaggtatcaatggagttctctactacactcctcagattctcgaacgggctggcgtagatattcttctttcgagcctcggactaagttccatctctgcgtcattcctcatcagcggtttaacaacattactcatgctcccagccattgtcgttgccatgagactcatggatgtatccggaagaaggtcattacttctctggacaatcccagttctcattgtctcacttgtcgtccttgtcatcagcgagctcatccacatcagcaaagtcgtgaacgcagcactctccacaggttgtgtcgtgctctacttctgcttcttcgtgatgggttacggtcccattccaaacatcctctgttctgaaatcttcccaacaagagtccgtggtctctgcatcgccatatgtgctatggtcttttggattggagacattattgtcacgtactcacttcccgttctcctcagctcgatcggactagttggtgttttcagcatttacgctgcggtttgcgttatctcatggatcttcgtttacatgaaagtcccggagactaaaggcatgcctttggaagttatcacagactactttgcctttggagctcaagctcaagcttctgctccttctaaggatatataa

SEQ ID NO: 9897 - protein, 734 aa, Arabidopsis thaliana
MKGATLVALAATIGNFLQGWDNATIAGAMVYINKDLNLPTSVQGLVVAMSLIGATVITTCSGPISDWLGRRPMLILSSVMYFVCGLIMLWSPNVYVLCFARLLNGFGAGLAVTLVPVYISETAPPEIRGQLNTLPQFLGSGGMFLSYCMVFTMSLSDSPSWRAMLGVLSIPSLLYLFLTVFYLPESPRWLVSKGRMDEAKRVLQQLCGREDVTDEMALLVEGLDIGGEKTMEDLLVTLEDHEGDDTLETVDEDGQMRLYGTHENQSYLARPVPEQNSSLGLRSRHGSLANQSMILKDPLVNLFGSLHEKMPEAGGNTRSGIFPHFGSMFSTTADAPHGKPAHWEKDIESHYNKDNDDYATDDGAGDDDDSDNDLRSPLMSRQTTSMDKDMIPHPTSGSTLSMRRHSTLMQGNGESSMGIGGGWHMGYRYENDEYKRYYLKEDGAESRRGSIISIPGGPDGGGSYIHASALVSRSVLGPKSVHGSAMVPPEKIAASGPLWSALLEPGVKRALVVGVGIQILQQFSGINGVLYYTPQILERAGVDILLSSLGLSSISASFLISGLTTLLMLPAIVVAMRLMDVSGRRSLLLWTIPVLIVSLVVLVISELIHISKVVNAALSTGCVVLYFCFFVMGYGPIPNILCSEIFPTRVRGLCIAICAMVFWIGDIIVTYSLPVLLSSIGLVGVFSIYAAVCVISWIFVYMKVPETKGMPLEVITDYFAFGAQAQASAPSKDI

SEQ ID NO: 9898 - DNA, 2190 bp, Arabidopsis thaliana
  CDS (1)..(2190)
atgaggagtgtagtgcttgttgctttagccgctgcgatagggaatatgttgcagggctgggacaatgccaccattgcaggagctgtaatttacattaagaaagaatttcatttggagaaagaaccaaagatagaaggactgatcgtggcaatgtctctcattggagccactttgatcacaactttctctggtcctgtctctgacaaagtaggaaggcgatcaatgcttatactctcctctgttctctattttctgagtagcattgttatgttttggtctcccaatgtctacgttctccttttcgcaaggcttcttgatggttttgggatcggtttagctgtcactctcgtcccaatctacatctctgagaccgcaccttctgagatcagaggattactcaacactttcccgcagttttgtggatccggtgggatgtttttgtcgtattgtcttgtgtttgggatgtcgcttcaagaatcaccaagctggaggctgatgcttggtgttttgtcaattccgtccattgcctactttgtacttgcggctttcttcttgcctgaatctccaaggtggcttgtcagcaaaggccgtatggatgaagctagacaggttctgcagagactccgtggcagagaagatgtttcaggcgagcttgctctgctggttgaagggcttggggtgggaaaagacacgtcgatagaagaatatgtgattggaccagacaacgaggaaaacgagggtggaaatgaactgccgaggaaagatcagataaaactatatggtccagaggatggacagtcatggatggctaagccagtgaaaggacagagttctctcgcattggcttcccgacaaggcagcatgttaccgcgtggcggatccctcatggacccacttgtcactctctttggtagcattcatgagaatctcccttccgagaacatgaacgcatcatcccgcagcatgctcttccccaatatgggaagtatactgggaatgatgggaaggcaggagtcccagtgggatccagagagaaacaatgaagatagttctgaccaagatgaaaacttaaacagtcctctgctttctccgcaaaccactgagccggatgactaccaccagcggaccgttggtaccatgcataggcgacagagcagcttgtttatggcaaacgtgggtgagacagcgacggctacaagcataggcggtggatggcaattggcgtggaagtataatgacaaggttggtgcagatggtaagagagtcaatggagggttacagagaatgtatattcacgaggaaaccgccaacaacaacaccaacaacattcctttttcgcgacgtggatcacttctctccttccacccagagggtgatggtcatgatcaggtgaatggatacgttcaggctgctgcacttgtgagccaagcttcgatgatgccaggaggtaaaggcgagaccgcaatgttgccaaaggaggttaaggatggtccaggctggagggagctgaaagaaccaggggttaagagagctttgatggttggagttgggcttcagatactgcaacagtttgcaggaataaatggagtgatgtattatacacctcaaatattggaagaaacaggtgtgtcaagtcttttgacaaaccttggaataagtgcagagtctgcatcgcttctcataagcgccttaaccacactcttgatgcttccctgcattcttgtctccatgaggtctctgatgctttcgactatccccattctaatactgtcgctggtaacactggtgataggaagcttagtgaatcttggaggttcaataaacgcgttgatatcgacagcaagtgttacggtgtacctaagctgtttcgtgatgggttttggggcaattccaaacatcctctgctcagagatattccctacttctgtgcgcggtctctgcatcaccatatgtgccctcactttctggatctgtgacataatcgtcacttacactctcccagtcatgctcaaatccattggcatcgcaggagtctttggcatttatgcaatcgtctgtgctgtcgcgtgggtttttgtgtacctcaaggtaccagagacaaagggaatgccccttgaagttatctctgagttcttctccgtcggtgcaaaacagcaagacgctgcagcttcatttctctctgatggatga

SEQ ID NO: 9899 - protein, 729 aa, Arabidopsis thaliana
MRSVVLVALAAAIGNMLQGWDNATIAGAVIYIKKEFHLEKEPKIEGLIVAMSLIGATLITTFSGPVSDKVGRRSMLILSSVLYFLSSIVMFWSPNVYVLLFARLLDGFGIGLAVTLVPIYISETAPSEIRGLLNTFPQFCGSGGMFLSYCLVFGMSLQESPSWRLMLGVLSIPSIAYFVLAAFFLPESPRWLVSKGRMDEARQVLQRLRGREDVSGELALLVEGLGVGKDTSIEEYVIGPDNEENEGGNELPRKDQIKLYGPEDGQSWMAKPVKGQSSLALASRQGSMLPRGGSLMDPLVTLFGSIHENLPSENMNASSRSMLFPNMGSILGMMGRQESQWDPERNNEDSSDQDENLNSPLLSPQTTEPDDYHQRTVGTMHRRQSSLFMANVGETATATSIGGGWQLAWKYNDKVGADGKRVNGGLQRMYIHEETANNNTNNIPFSRRGSLLSFHPEGDGHDQVNGYVQAAALVSQASMMPGGKGETAMLPKEVKDGPGWRELKEPGVKRALMVGVGLQILQQFAGINGVMYYTPQILEETGVSSLLTNLGISAESASLLISALTTLLMLPCILVSMRSLMLSTIPILILSLVTLVIGSLVNLGGSINALISTASVTVYLSCFVMGFGAIPNILCSEIFPTSVRGLCITICALTFWICDIIVTYTLPVMLKSIGIAGVFGIYAIVCAVAWVFVYLKVPETKGMPLEVISEFFSVGAKQQDAAASFLSDG

SEQ ID NO: 9900 - DNA, 2190 bp, Arabidopsis thaliana
  CDS (1)..(2190)
atgagtggagctgtgcttgttgctattgctgctgctgttggcaacttgttacaaggatgggataacgcaactattgcaggagctgtgttgtacataaaaaaggagtttaatttggagagtaatccatcagtggaaggtctaattgtggcgatgtcacttattggtgctactctgattacaacatgctctggaggggtagctgattggcttggtcgccgtcccatgctaatattgtcctcaattctctactttgttggttctctagtaatgctatggtctccgaatgtttatgtgttgctcttaggaaggttgttagatggatttggggttggtcttgtggtcacacttgttcctatttatatatctgagactgcaccacctgagattaggggactgttgaatacgctaccgcagttcactggctctggagggatgttcttatcttactgtatggttttcggaatgtcgttgatgccatcacctagctggagattgatgcttggtgtccttttcatcccttcccttgtctttttcttcctcacggtcttcttcttgcccgagtccccaaggtggctcgtgagcaaaggtcgaatgcttgaagcaaagcgggttcttcagagactgcgtggtcgcgaagatgtgtctggtgagatggctttgttggttgagggtcttggaattggaggtgaaacaaccatagaggaatatataattggtcccgcggatgaagttactgatgatcatgatatagctgtggataaggatcaaattaagttatatggtgcagaagaagggctgagttgggttgctaggccagtcaaaggaggaagcactatgagtgttttgtctcgccatggaagtacaatgagcaggaggcaaggctcattgattgatcctcttgtcacactgtttgggagcgttcacgagaagatgccggacactggaagcatgaggagtgccttgttcccacattttgggagtatgttcagtgttggagggaatcaaccaagacatgaagattgggatgaagagaatcttgttggagaaggtgaggattatccatccgaccatggagatgattctgaagatgatcttcattctccgttgatctcacgtcaaacgacaagcatggagaaagacatgcctcacactgctcatggaactctttctaccttcagacatggaagtcaagtgcagggagctcaaggggaaggagcgggtagtatggggattggaggtggatggcaagtggcatggaaatggacggaaagagaagatgaatcgggacagaaagaagaaggtttcccaggatctcgacgtggctcaattgtttcattgcctggtggtgatggaaccggtgaggcagattttgtacaagcgtctgctttggttagccaaccagctctttattccaaagaccttctcaaagaacatacaattggtcctgctatggtacatccatccgaaacaactaaagggtcaatttggcatgatcttcatgatcctggagtcaagcgtgcattagtcgtaggagttggacttcaaatacttcagcagttctcaggcatcaacggagttctttactacacaccgcaaatccttgagcaggcgggtgtcgggatcctactatcgaacatggggattagttcttcctcagcatccttacttataagtgcattgacaacctttgtgatgttacctgcaatagctgttgcaatgaggctcatggatctttctggtcgaaggaccttgcttctcaccacgataccaatcctgatagcatctctattggttttagtaatctcaaatcttgttcacatgaacagcattgtgcacgcggtcttatcaaccgtaagcgttgtgctctacttctgcttcttcgtgatgggtttcggtcctgctccaaacatcctctgttcagagatttttccaactcgagtccgcggaatctgcatcgccatctgcgcactcaccttctggatctgtgacataatcgtcacttacagtctccccgtgctgctcaaatccattggactagctggtgtgtttggaatgtacgcaatcgtatgttgcatttcatgggtctttgtgttcattaaagtcccggaaactaaaggcatgccacttgaagtcatcacagagttcttttctgttggagctagacaagctgaagctgctaaaaacgagtga

SEQ ID NO: 9901 - protein, 729 aa, Arabidopsis thaliana
MSGAVLVAIAAAVGNLLQGWDNATIAGAVLYIKKEFNLESNPSVEGLIVAMSLIGATLITTCSGGVADWLGRRPMLILSSILYFVGSLVMLWSPNVYVLLLGRLLDGFGVGLVVTLVPIYISETAPPEIRGLLNTLPQFTGSGGMFLSYCMVFGMSLMPSPSWRLMLGVLFIPSLVFFFLTVFFLPESPRWLVSKGRMLEAKRVLQRLRGREDVSGEMALLVEGLGIGGETTIEEYIIGPADEVTDDHDIAVDKDQIKLYGAEEGLSWVARPVKGGSTMSVLSRHGSTMSRRQGSLIDPLVTLFGSVHEKMPDTGSMRSALFPHFGSMFSVGGNQPRHEDWDEENLVGEGEDYPSDHGDDSEDDLHSPLISRQTTSMEKDMPHTAHGTLSTFRHGSQVQGAQGEGAGSMGIGGGWQVAWKWTEREDESGQKEEGFPGSRRGSIVSLPGGDGTGEADFVQASALVSQPALYSKDLLKEHTIGPAMVHPSETTKGSIWHDLHDPGVKRALVVGVGLQILQQFSGINGVLYYTPQILEQAGVGILLSNMGISSSSASLLISALTTFVMLPAIAVAMRLMDLSGRRTLLLTTIPILIASLLVLVISNLVHMNSIVHAVLSTVSVVLYFCFFVMGFGPAPNILCSEIFPTRVRGICIAICALTFWICDIIVTYSLPVLLKSIGLAGVFGMYAIVCCISWVFVFIKVPETKGMPLEVITEFFSVGARQAEAAKNE

SEQ ID NO: 9902 - DNA, 2220 bp, Arabidopsis thaliana
  CDS (1)..(2220)
atgagtggagctgtgcttgttgctattgctgctgctgttggcaacttgttacaaggatgggataacgcaactattgcaggagctgtgttgtacataaaaaaggagtttaatttggagagtaatccatcagtggaaggtctaattgtggcgatgtcacttattggtgctactctgattacaacatgctctggaggggtagctgattggcttggtcgccgtcccatgctaatattgtcctcaattctctactttgttggttctctagtaatgctatggtctccgaatgtttatgtgttgctcttaggaaggttgttagatggatttggggttggtcttgtggtcacacttgttcctatttatatatctgagactgcaccacctgagattaggggactgttgaatacgctaccgcagttcactggctctggagggatgttcttatcttactgtatggttttcggaatgtcgttgatgccatcacctagctggagattgatgcttggtgtccttttcatcccttcccttgtctttttcttcctcacggtcttcttcttgcccgagtccccaaggtggctcgtgagcaaaggtcgaatgcttgaagcaaagcgggttcttcagagactgcgtggtcgcgaagatgtgtctggtgagatggctttgttggttgagggtcttggaattggaggtgaaacaaccatagaggaatatataattggtcccgcggatgaagttactgatgatcatgatatagctgtggataaggatcaaattaagttatatggtgcagaagaagggctgagttgggttgctaggccagtcaaaggaggaagcactatgagtgttttgtctcgccatggaagtacaatgagcaggaggcaaggctcattgattgatcctcttgtcacactgtttgggagcgttcacgagaagatgccggacactggaagcatgaggagtgccttgttcccacattttgggagtatgttcagtgttggagggaatcaaccaagacatgaagattgggatgaagagaatcttgttggagaaggtgaggattatccatccgaccatggagatgattctgaagatgatcttcattctccgttgatctcacgtcaaacgacaagcatggagaaagacatgcctcacactgctcatggaactctttctaccttcagacatggaagtcaagtgcagggagctcaaggggaaggagcgggtagtatggggattggaggtggatggcaagtggcatggaaatggacggaaagagaagatgaatcgggacagaaagaaggtgggtttaaacggatatacttgcatcaagaaggtttcccaggatctcgacgtggctcaattgtttcattgcctggtggtgatggaaccggtgaggcagattttgtacaagcgtctgctttggttagccaaccagctctttattccaaagaccttctcaaagaacatacaattggtcctgctatggtacatccatccgaaacaactaaagggtcaatttggcatgatcttcatgatcctggagtcaagcgtgcattagtcgtaggagttggacttcaaatacttcagcagttctcaggcatcaacggagttctttactacacaccgcaaatccttgagcaggcgggtgtcgggatcctactatcgaacatggggattagttcttcctcagcatccttacttataagtgcattgacaacctttgtgatgttacctgcaatagctgttgcaatgaggctcatggatctttctggtcgaaggaccttgcttctcaccacgataccaatcctgatagcatctctattggttttagtaatctcaaatcttgttcacatgaacagcattgtgcacgcggtcttatcaaccgtaagcgttgtgctctacttctgcttcttcgtgatgggtttcggtcctgctccaaacatcctctgttcagagatttttccaactcgagtccgcggaatctgcatcgccatctgcgcactcaccttctggatctgtgacataatcgtcacttacagtctccccgtgctgctcaaatccattggactagctggtgtgtttggaatgtacgcaatcgtatgttgcatttcatgggtctttgtgttcattaaagtcccggaaactaaaggcatgccacttgaagtcatcacagagttcttttctgttggagctagacaagctgaagctgctaaaaacgagtga

SEQ ID NO: 9903 - protein, 739 aa, Arabidopsis thaliana
MSGAVLVAIAAAVGNLLQGWDNATIAGAVLYIKKEFNLESNPSVEGLIVAMSLIGATLITTCSGGVADWLGRRPMLILSSILYFVGSLVMLWSPNVYVLLLGRLLDGFGVGLVVTLVPIYISETAPPEIRGLLNTLPQFTGSGGMFLSYCMVFGMSLMPSPSWRLMLGVLFIPSLVFFFLTVFFLPESPRWLVSKGRMLEAKRVLQRLRGREDVSGEMALLVEGLGIGGETTIEEYIIGPADEVTDDHDIAVDKDQIKLYGAEEGLSWVARPVKGGSTMSVLSRHGSTMSRRQGSLIDPLVTLFGSVHEKMPDTGSMRSALFPHFGSMFSVGGNQPRHEDWDEENLVGEGEDYPSDHGDDSEDDLHSPLISRQTTSMEKDMPHTAHGTLSTFRHGSQVQGAQGEGAGSMGIGGGWQVAWKWTEREDESGQKEGGFKRIYLHQEGFPGSRRGSIVSLPGGDGTGEADFVQASALVSQPALYSKDLLKEHTIGPAMVHPSETTKGSIWHDLHDPGVKRALVVGVGLQILQQFSGINGVLYYTPQILEQAGVGILLSNMGISSSSASLLISALTTFVMLPAIAVAMRLMDLSGRRTLLLTTIPILIASLLVLVISNLVHMNSIVHAVLSTVSVVLYFCFFVMGFGPAPNILCSEIFPTRVRGICIAICALTFWICDIIVTYSLPVLLKSIGLAGVFGMYAIVCCISWVFVFIKVPETKGMPLEVITEFFSVGARQAEAAKNE

SEQ ID NO: 9904 - DNA, 2223 bp, Vitis vinifera
  CDS (1)..(2223)
atgaacggagctgtgctagtggctattgcagccgcgattggtaactttctgcaaggatgggataatgctactattgcaggggctattgtttacataaagaaggagcttgatttggaaagcactgtagaagggcttgttgtggctatgtccctcattggagccacattggtcacaacatgctcaggagccatatcggattggattggtcggcgtccaatgttaatagtctcatcaatgctttattttatcagtggtttgataatgttatggtcaccaaatgtctatgttctacttatagctaggttacttgatggatttggaattggtctagcagttactcttgttcccatttatatatctgagactgccccagcagatataaggggatcattaaatactcttccacaattcactggttctggtggaatgtttttatcatactgcatggtttttgggatgtcattgttaagctcaccaagctggaggttaatgcttgggattctttcaattccatcccttctttattttgctttgacagtattttacttgcccgaatccccacggtggcttgtaagtaaaggaaggatggttgaggctaaaaaggttcttcaaagattacgtggcagggaagatgtttcagctgaaatggctttgctggttgagggtcttgggattgggggtgaaacatccatagaagagtacataatagggccaactggtgagcttactgaagatcaggatccagatgctgtgaaagaccaaatcaagttatatggacctgaagctggcctctcctgggttgccaaacctgttcctggtggacagagtacccttagtcttgtgtctcgccaaggaagcttggcaacccagactctgcctcttatggatcctctcgtcactctgttcggtagtgtccatgaaaagctccctgaaacgggaagtatgcgaagcatgctttttcccaattttggcagcatgttcagtacagcagatcctcagattaaaactgaacagtgggatgaagagagcctacagcgggaaggtgaagactacgcatcagatggtgggggagactctgaccatgatttgcaaagtccattaatatctcgccagacaagcagcatggaaaaggacatggtgccccctccttcccatagcagcataatgagcatgaggcgtcatagcagtctgatgcaaggaactgctggtgaggcagctggtggtatgggaattggtggtggttggcagttggcatggaaatggtctgagagagaaggtgaagatggaaagaaggaaggaggatttaaaaggatttatttgcatgaggagggagtccccggatcccgacgtgggtctcttgtttcacttcctggtggagatgttcctgcagagggcgattatatccaggctgctgctctagtgagtcagcctgctctttactctaaggagcttatggatcaggatccagttggacctgcaatggttcacccagctgaaactgcttcaagagggccaatgtgggctgctcttcttgaaccaggagtcaagcatgcattgtttgttggggccggaattcagatacttcagcagttctctggcatcaatggagttttgtactacactcctcagattcttgaggaggcaggtgttgaagttcttctcgagagcttggggctgggtacggagtctgcatcgttccttatcagtgcattcacaaccctcttgatgcttccttgtatagttgtcgccatgaagctcatggatattgtcggcagaaggcgcctgctgctcactacaattcctgtgctgatcgtcacacttctcgtcctagtcatcggcgaccttgtgaccacgaccacagtgatccatgcagcgatctctactgcatgtgttatcatctatttctgctgttttgtgacggcgtatggaccaatccctaacatcctctgctctgagatcttccccacaagggtccgaggcctgtgcattgccatatgcgctctagtttactggattggggacatcatcgtcacctatacgttaccggtgatgctgacttcaatcgggttgacgggtatctttggaatttatgcagttgtgtgtgtgatttcttgggtgtttgtgttcttgaaggtgcccgagacaaaaggcatgccacttgaagtgattgctgagttctttgcagttggagcaaggcaggttactgcagcaaagaatgactga

SEQ ID NO: 9905 - protein, 740 aa, Vitis vinifera
MNGAVLVAIAAAIGNFLQGWDNATIAGAIVYIKKELDLESTVEGLVVAMSLIGATLVTTCSGAISDWIGRRPMLIVSSMLYFISGLIMLWSPNVYVLLIARLLDGFGIGLAVTLVPIYISETAPADIRGSLNTLPQFTGSGGMFLSYCMVFGMSLLSSPSWRLMLGILSIPSLLYFALTVFYLPESPRWLVSKGRMVEAKKVLQRLRGREDVSAEMALLVEGLGIGGETSIEEYIIGPTGELTEDQDPDAVKDQIKLYGPEAGLSWVAKPVPGGQSTLSLVSRQGSLATQTLPLMDPLVTLFGSVHEKLPETGSMRSMLFPNFGSMFSTADPQIKTEQWDEESLQREGEDYASDGGGDSDHDLQSPLISRQTSSMEKDMVPPPSHSSIMSMRRHSSLMQGTAGEAAGGMGIGGGWQLAWKWSEREGEDGKKEGGFKRIYLHEEGVPGSRRGSLVSLPGGDVPAEGDYIQAAALVSQPALYSKELMDQDPVGPAMVHPAETASRGPMWAALLEPGVKHALFVGAGIQILQQFSGINGVLYYTPQILEEAGVEVLLESLGLGTESASFLISAFTTLLMLPCIVVAMKLMDIVGRRRLLLTTIPVLIVTLLVLVIGDLVTTTTVIHAAISTACVIIYFCCFVTAYGPIPNILCSEIFPTRVRGLCIAICALVYWIGDIIVTYTLPVMLTSIGLTGIFGIYAVVCVISWVFVFLKVPETKGMPLEVIAEFFAVGARQVTAAKND

SEQ ID NO: 9906 - DNA, 2229 bp, Vitis vinifera
  CDS (1)..(2229)
atgaacggagctgtgctggtagcgattactgcggcgatagggaacttgctgcaggggtgggataatgccactattgcaggggctgttctttacatcaaaagggagtttcatttgcaaacagaaccaactatagaagggctgattgtagccatgtcactgattggagccactgctatcacaacattctctggacctgtggcagattggcttggacggcgtccaatgctgataatctcatctgttctttattttctcagtggccttgtaatgctgtggtctcccaatgtttatgttctgcttttggcaaggctattagatggatttggaattggtctggcagttactcttgttcccgtctatatatccgagacagccccatctgaaataaggggactactaaatactcttccacagttcactggctctggtgggatgtttttgtcatactgtatggtattttggatgtcactgatggattcacccaagtggagattgatgcttggggttctttctattccttctcttctctattttgcattaactgtgttttatttgcctgaatctccacggtggcttgtgagtaaagggcggatggctgaggctaaacaggtactgcagagattgcgtggcagggaagatgttgcaggtgagatggctttgctggttgaaggtcttggagttgggggtgacacttctattgaagaatacatgattggccctgcagatgagcttgctgacaaccaagaacaaagcacagagaaagatcaaatcaagttatatgggcctgaacagggtctctcatgggttgccagacctgtcactggccagagtactctgggactagtgagccgccatggaagcatggcaaaccagagtgtgcctcttatggatcctcttgtcactctctttggcagtgtccatgaaaagttccctgagacgggaagcatgcgcagcatgctttttccaaacatgggcagcatgtttagtgtggcagaatatcaagataaaaatgaacagtgggatgaggagagccttcagagggatggtgaggactatggatctgatggtggtggggaatctgatgacaatttgcggagtccattactctctcgtcaaacttctagcacagaaaaggacatggtccctcctgcagccaatggcagcatcttaaatatgagacggcacagcagcctcatgcaaggagctgctggcgaagcaggcagtagtatggggattggtggaggttggcaactggcatggaaatggtctgagaagagaggcaaagatgggaacaaggaaagagaacttcaaagaatctatttacacccagaggatgcccctgggtctcggcgtgggtctgttgcttcacttcccgttgctgatgcccccgaagaaggtggattcgttcaggcttctgctctagtaagccagtctatgctttattccaagggtggcaaggacaagcatccaattggaccagcaatggttcaaccagcagagtctgttgcggtcggaccaagttggcaagatctttttgaaccaggaatcaagcgtgcattgtttgttggggtgggaattcaaatactccagcagttttctggcataaatggggttctctactacactcctcagattcttgagcaagcaggtgttggagttcttctgtcaaatatgggcattggctcggaatctgcatcgctgctcataagtggtctcacaaccttgttgatgcttccttctataggttttgccatgaggctaatggatgtaagtggtagaaggtggctgctgctgacgacgctacctatactgttactgtcactcatcatactagtccttggcaacatcattcccatgggttctcttgttcatgcaataatctcgactgttagcgttgtggtctacttctgctgcttcgtcatggcctttgggccgattcccaacatcctctgctcagagatattcccaacccgcgttcgaggcctctgcattgctgtatgcgctctcacattttggatctgtgacatcattgtcacctattcactccctgtgatgctctcttctgttggccttgctggagtcttcggcatctatgccatcgtctgcatcctctcctggatctttgtcttcttgaaggttcctgaaacaaaaggcatgcccctagaagtcatttcagagttctttgctgtgggtgcaaagcaggctgctactgatgccaagaacaactga

SEQ ID NO: 9907 - protein, 742 aa, Vitis vinifera
MNGAVLVAITAAIGNLLQGWDNATIAGAVLYIKREFHLQTEPTIEGLIVAMSLIGATAITTFSGPVADWLGRRPMLIISSVLYFLSGLVMLWSPNVYVLLLARLLDGFGIGLAVTLVPVYISETAPSEIRGLLNTLPQFTGSGGMFLSYCMVFWMSLMDSPKWRLMLGVLSIPSLLYFALTVFYLPESPRWLVSKGRMAEAKQVLQRLRGREDVAGEMALLVEGLGVGGDTSIEEYMIGPADELADNQEQSTEKDQIKLYGPEQGLSWVARPVTGQSTLGLVSRHGSMANQSVPLMDPLVTLFGSVHEKFPETGSMRSMLFPNMGSMFSVAEYQDKNEQWDEESLQRDGEDYGSDGGGESDDNLRSPLLSRQTSSTEKDMVPPAANGSILNMRRHSSLMQGAAGEAGSSMGIGGGWQLAWKWSEKRGKDGNKERELQRIYLHPEDAPGSRRGSVASLPVADAPEEGGFVQASALVSQSMLYSKGGKDKHPIGPAMVQPAESVAVGPSWQDLFEPGIKRALFVGVGIQILQQFSGINGVLYYTPQILEQAGVGVLLSNMGIGSESASLLISGLTTLLMLPSIGFAMRLMDVSGRRWLLLTTLPILLLSLIILVLGNIIPMGSLVHAIISTVSVVVYFCCFVMAFGPIPNILCSEIFPTRVRGLCIAVCALTFWICDIIVTYSLPVMLSSVGLAGVFGIYAIVCILSWIFVFLKVPETKGMPLEVISEFFAVGAKQAATDAKNN

SEQ ID NO: 9908 - DNA, 2220 bp, Vitis vinifera
  CDS (1)..(2220)
atgagtggagctgtgcttgtggcgattgctgctgctgtgggaaacttgttgcaaggatgggataacgctacgattgctggggctgttctatacatcaagaaggaattcaacttgcaaggtgaacccactgtagagggtctaattgtggccatgtctctcatcggagccacgttcatcactactatctctggagcagtatctgattggcttgggcgccgccctatgttgataatctcatccctattttattttgtcagtggccttgtgatgctgtggtctcccaatgtttatgtgctgctgttggcaaggcttctggatggatttggggttgggctgtcagttactattgttccggtctatatatctgagactgcaccctctgaaataaggggattgttgaataccctccctcagttcactggttctgttggaatgtttttgtcttactgcatggtttttgggatgtcactgatgaattcaccaagctggaggttaatgcttggggttctttttattccttccctcgtatatttggcattaacggtatttttgttgcctgagtctcctcggtggctagtcagtaaagggcgtatgctcgaggcgaagcatgtattgcagagactacgcggcagggaggatgtctctggtgagatggctttgctggtcgaaggtcttggagtcggtagtaaagcatctatagaggagtacataattggccctgatgatctcacagatgaccaggatccagctgctatgaatgatagaatcagattatatgggcctcaagaaggtctctcctggattgctaaacctgttactggccagagttctcttggccttgtgtctcgctgtggaagcatggaaaacaagccagtgccacttatggaccctcttgtgaccctctttggcagtgttcacgagaagcttcctgagacaggaagcatgcgaagcgtgatctttccaaactttagcagcatgttcagcatatcaggcaatcaacctaaaaatgaagaatcggatgaagagagccttgccagagatggtgaagattatccatctgatgctgctggtggtgattctgacgacaacttgcaaagtccattaatctcgcgtcaaaatacgagtttagaaaaagacttgatgcctgctccaacacagagcagcaatttaagcatgagacacagcagtctaatgcgagcagatggtggagagcaagtcagtagtagcatgggaattggtggcgggtggcagctggcatggaaatggtcagaaaaagaaggtcaagatggaaagaaggaaggaggttttaaaagaatttatttgcaccaggacagcatccctcgatctcaacgcggatctttagtttctgttccaggtggtgaggtccctgttgatggtgagatgacctgcgctgctgctttggtaagtcaacctgctctttattccaaggagcttatggatcagaatccagttggaccagctatggttcatccttctgaaactgctataaaagggccaagttggagagatctttttaaaccaggagtcaagcatgcactagttgttggggtggggattcagatacttcagcagttctctggcataaatggggttctgtactacactcctcaaattcttgagcaggcaggtgttggagttattctttcaaacataggcattagttcagcctctacatctctgcttatcagtgcaatcacaaccttgttgatgcttccttgcatagctgttgccatgaggctcatggatatttctggtagaaggagtctgctgctcagcacaatccctgtcctgataatagccctttccattcttgtccttggaagtttagtaaatatgggtgatgttgtgcatgctgcaatctcgactgctagtgtcatcatctacttctgttgctttgtcatgggatttgggccagtcccaaacatactctgtgcggagatctttcccacccgtgtccgaggcctatgcattgccatttgtgcactctcattttggattggtgacatcattgtaacctacacactgccattgatgctcacctctgttggccttgctggtgtctttggcatgtacgccgttgtgtgcctcatctcatgggtgttcgtcttcttgaaagtcccagaaaccaaaggcatgccccttgaagttatctctgagttctttgctgttggtgcaagtgctggacagaagaagaactga

SEQ ID NO: 9909 - protein, 739 aa, Vitis vinifera
MSGAVLVAIAAAVGNLLQGWDNATIAGAVLYIKKEFNLQGEPTVEGLIVAMSLIGATFITTISGAVSDWLGRRPMLIISSLFYFVSGLVMLWSPNVYVLLLARLLDGFGVGLSVTIVPVYISETAPSEIRGLLNTLPQFTGSVGMFLSYCMVFGMSLMNSPSWRLMLGVLFIPSLVYLALTVFLLPESPRWLVSKGRMLEAKHVLQRLRGREDVSGEMALLVEGLGVGSKASIEEYIIGPDDLTDDQDPAAMNDRIRLYGPQEGLSWIAKPVTGQSSLGLVSRCGSMENKPVPLMDPLVTLFGSVHEKLPETGSMRSVIFPNFSSMFSISGNQPKNEESDEESLARDGEDYPSDAAGGDSDDNLQSPLISRQNTSLEKDLMPAPTQSSNLSMRHSSLMRADGGEQVSSSMGIGGGWQLAWKWSEKEGQDGKKEGGFKRIYLHQDSIPRSQRGSLVSVPGGEVPVDGEMTCAAALVSQPALYSKELMDQNPVGPAMVHPSETAIKGPSWRDLFKPGVKHALVVGVGIQILQQFSGINGVLYYTPQILEQAGVGVILSNIGISSASTSLLISAITTLLMLPCIAVAMRLMDISGRRSLLLSTIPVLIIALSILVLGSLVNMGDVVHAAISTASVIIYFCCFVMGFGPVPNILCAEIFPTRVRGLCIAICALSFWIGDIIVTYTLPLMLTSVGLAGVFGMYAVVCLISWVFVFLKVPETKGMPLEVISEFFAVGASAGQKKN

SEQ ID NO: 9910 - DNA, 2196 bp, Vitis vinifera
  CDS (1)..(2196)
atgagtggagctgtgcttgtggcgattgctgctgctgtgggaaacttgttgcaaggatgggataacgctacgattgctggggctgttctatacatcaagaaggaattcaacttgcaaggtgaacccactgtagagggtctaattgtggccatgtctctcatcggagccacgttcatcactactatctctggagcagtatctgattggcttgggcgccgccctatgttgataatctcatccctattttattttgtcagtggccttgtgatgctgtggtctcccaatgtttatgtgctgctgttggcaaggcttctggatggatttggggttgggctgtcagttactattgttccggtctatatatctgagactgcaccctctgaaataaggggattgttgaataccctccctcagttcactggttctgttggaatgtttttgtcttactgcatggtttttgggatgtcactgatgaattcaccaagctggaggttaatgcttggggttctttttattccttccctcgtatatttggcattaacggtatttttgttgcctgagtctcctcggtggctagtcagtaaagggcgtatgctcgaggcgaagcatgtattgcagagactacgcggcagggaggatgtctctggtgagatggctttgctggtcgaaggtcttggagtcggtagtaaagcatctatagaggagtacataattggccctgatgatctcacagatgaccaggatccagctgctatgaatgatagaatcagattatatgggcctcaagaaggtctctcctggattgctaaacctgttactggccagagttctcttggccttgtgtctcgctgtggaagcatggaaaacaagccagtgccacttatggaccctcttgtgaccctctttggcagtgttcacgagaagcttcctgagacaggaagcatgcgaagcgtgatctttccaaactttagcagcatgttcagcatatcaggcaatcaacctaaaaatgaagaatcggatgaagagagccttgccagagatggtgaagattatccatctgatgctgctggtggtgattctgacgacaacttgcaaagtccattaatctcgcgtcaaaatacgagtttagaaaaagacttgatgcctgctccaacacagagcagcaatttaagcatgagacacagcagtctaatgcgagcagatggtggagagcaagtcagtagtagcatgggaattggtggcgggtggcagctggcatggaaatggtcagaaaaagaaggtcaagatggaaagaaggaaggaggttttaaaagaatttatttgcaccaggacagcatccctcgatctcaacgcggatctttagtttctgttccaggtggtgaggtccctgttgatggtgagatgacctgcgctgctgctttggtaagtcaacctgctctttattccaaggagcttatggatcagaatccagttggaccagctatggttcatccttctgaaactgctataaaagggccaagttggagagatctttttaaaccaggagtcaagcatgcactagttgttggggtggggattcagatacttcagcagttctctggcataaatggggttctgtactacactcctcaaattcttgagcaggcaggtgttggagttattctttcaaacataggcattagttcagcctctacatctctgcttatcagtgcaatcacaaccttgttgatgcttccttgcatagctgttgccatgaggagtctgctgctcagcacaatccctgtcctgataatagccctttccattcttgtccttggaagtttagtaaatatgggtgatgttgtgcatgctgcaatctcgactgctagtgtcatcatctacttctgttgctttgtcatgggatttgggccagtcccaaacatactctgtgcggagatctttcccacccgtgtccgaggcctatgcattgccatttgtgcactctcattttggattggtgacatcattgtaacctacacactgccattgatgctcacctctgttggccttgctggtgtctttggcatgtacgccgttgtgtgcctcatctcatgggtgttcgtcttcttgaaagtcccagaaaccaaaggcatgccccttgaagttatctctgagttctttgctgttggtgcaagtgctggacagaagaagaactga

SEQ ID NO: 9911 - protein, 731 aa, Vitis vinifera
MSGAVLVAIAAAVGNLLQGWDNATIAGAVLYIKKEFNLQGEPTVEGLIVAMSLIGATFITTISGAVSDWLGRRPMLIISSLFYFVSGLVMLWSPNVYVLLLARLLDGFGVGLSVTIVPVYISETAPSEIRGLLNTLPQFTGSVGMFLSYCMVFGMSLMNSPSWRLMLGVLFIPSLVYLALTVFLLPESPRWLVSKGRMLEAKHVLQRLRGREDVSGEMALLVEGLGVGSKASIEEYIIGPDDLTDDQDPAAMNDRIRLYGPQEGLSWIAKPVTGQSSLGLVSRCGSMENKPVPLMDPLVTLFGSVHEKLPETGSMRSVIFPNFSSMFSISGNQPKNEESDEESLARDGEDYPSDAAGGDSDDNLQSPLISRQNTSLEKDLMPAPTQSSNLSMRHSSLMRADGGEQVSSSMGIGGGWQLAWKWSEKEGQDGKKEGGFKRIYLHQDSIPRSQRGSLVSVPGGEVPVDGEMTCAAALVSQPALYSKELMDQNPVGPAMVHPSETAIKGPSWRDLFKPGVKHALVVGVGIQILQQFSGINGVLYYTPQILEQAGVGVILSNIGISSASTSLLISAITTLLMLPCIAVAMRSLLLSTIPVLIIALSILVLGSLVNMGDVVHAAISTASVIIYFCCFVMGFGPVPNILCAEIFPTRVRGLCIAICALSFWIGDIIVTYTLPLMLTSVGLAGVFGMYAVVCLISWVFVFLKVPETKGMPLEVISEFFAVGASAGQKKN

SEQ ID NO: 9912 - DNA, 2217 bp, Populus trichocarpa
  CDS (1)..(2217)
atgaagggagcatctctagtggctattgctgcttgcgttggtaacttcttgcaaggatgggataatgctaccattgctggcgctgtcatttacgtcaagaaagacctcaagttgcaatcgagtgtggaaggtcttgttgtggccatgtcacttattggagccgctgctatcacaacatgctcaggacccatatcagattggattggtcggcgtccaatgctaataagctcatcaattctctactttgtcagtggtttggtaatgttttggtcacccaatgtttatgtcttgtgcataggaagactgttggatggatttggcgttggtttagcagttactcttattccactctatatttctgagaccgccccatcagatataaggggaatgttaaatactctacctcagtttgccggttcaggtggcatgtttctgtcgtactgtatggtttttgggatgtcattgacaacttcacctagttggaggatgatgcttggaattctttccattccttctttactatattttgtactcacagtgttttacttgcctgaatctcctcgatggcttgtaagtaaaggaaagatgcttgaggcaaagcaggttctccagagattgcgtggcagggaagatgtttcaggcgagatggctttactggctgaaggtcttggtatcgggggtgaaacatccatagaagaatacataatagggcctgctgatgaagtcgctgatggtcaagaacccattgttgataaagacaaaatcaagttatatggacctgaagaaggcctttcctgggttgctaaacccgtaactggacagagttctcttgctcttgtatcgcgccaaggaagcatggtgaaccaaggcgtgcctcttatggaccctcttgtgactctttttggtagtgttcatgaaaagctccctgagacaggaagcatgcggagcatgcttttccctaattttggcagcatgtttagtacagcagaacctcactttaggactgagcagtgggatgaagagagtgtacaaagagaaggtgagggctacacatcagaggctggtggtgaggattctgatgacaatttgcacagtccactaatatcacgccagacgacaagcatggaaaaggatatggcccacccaacttcccatggcagtgctctgagcatgagacggcatagcagtctattgcaaggagctggggaggcagttgacggtactggcattggtgggggttggcagttggcatggaaatggtccgagagagaaggtgaggatggaaagaaggaaggggggtttaaaaggatttatttgcaccaagagggagttcctggatcccgacgcgggtctgttgtttcacttcctggtggtgatgttcctgttgaaggtgagtatatccaggctgctgctctggtaagccagccagctctttattcaaaggagcttatggatcagcatccagttggacccgcaatggttcacccatctcaaacagctacaaaagctccgatatgggccgctctgcttgaacccggagttaagcatgctttgtttgttgggatgggaattcaattgcttcagcagtttgctggtataaatggagttctttactacacgcctcaaattcttgaagacgcaggtgtttcggttcttcttgcaaacttgggcctcagcacaaactctgcatcattccttataagtgcatttacaaacctccttatgcttccatgtataggagtagcgatgaagcttatggatatctcagggagaaggacgctcctacttaccacaattcctgtgctgatactttccctcgtcgtcttaattatttttgaactagtgactgtgagcgcaatcgtcagtgctgcaatcttaactgcctgtgttatcatcttcatctgctgttttgtgtcggcttatggaccaattcctaatatcctctgctcggagatcttcccgacaagagtccgaggcctctgcattgccatttgtgccatggtttactggattggagacatcattgtcacctacacactgcctgtgatgctaacttccatcggcctagttggtatcttcagcatttacgccgctgtgtgcgtcatctcttggatctttgttttcttgaaggtcccagagaccaaaggaatgcctcttgaagtcattactgagttctttgctgtgggcgcaagacaagctgctgctgccaagaattaa

SEQ ID NO: 9913 - protein, 738 aa, Populus trichocarpa
MKGASLVAIAACVGNFLQGWDNATIAGAVIYVKKDLKLQSSVEGLVVAMSLIGAAAITTCSGPISDWIGRRPMLISSSILYFVSGLVMFWSPNVYVLCIGRLLDGFGVGLAVTLIPLYISETAPSDIRGMLNTLPQFAGSGGMFLSYCMVFGMSLTTSPSWRMMLGILSIPSLLYFVLTVFYLPESPRWLVSKGKMLEAKQVLQRLRGREDVSGEMALLAEGLGIGGETSIEEYIIGPADEVADGQEPIVDKDKIKLYGPEEGLSWVAKPVTGQSSLALVSRQGSMVNQGVPLMDPLVTLFGSVHEKLPETGSMRSMLFPNFGSMFSTAEPHFRTEQWDEESVQREGEGYTSEAGGEDSDDNLHSPLISRQTTSMEKDMAHPTSHGSALSMRRHSSLLQGAGEAVDGTGIGGGWQLAWKWSEREGEDGKKEGGFKRIYLHQEGVPGSRRGSVVSLPGGDVPVEGEYIQAAALVSQPALYSKELMDQHPVGPAMVHPSQTATKAPIWAALLEPGVKHALFVGMGIQLLQQFAGINGVLYYTPQILEDAGVSVLLANLGLSTNSASFLISAFTNLLMLPCIGVAMKLMDISGRRTLLLTTIPVLILSLVVLIIFELVTVSAIVSAAILTACVIIFICCFVSAYGPIPNILCSEIFPTRVRGLCIAICAMVYWIGDIIVTYTLPVMLTSIGLVGIFSIYAAVCVISWIFVFLKVPETKGMPLEVITEFFAVGARQAAAAKN

SEQ ID NO: 9914 - DNA, 2160 bp, Populus trichocarpa
  CDS (1)..(2160)
atgaggggagctgttcttgtagcacttgctgctacggtggggaatctgttacaaggatgggataattcaaccattgcaggatccattccttacatcaaggaggagttaaatttgcagtctcaaccagcagtagaagggctgattgtagccatgtcaattatcggtggcactactatcacaacattttctggaacagtatcagatatcttcggaagacgtccgatgctgataatgtcgtcaattctttatcttctaagcagcataattatactatgggctcccaatgtttatgtcctacttttggcgagactacttgatggttttggagttggtcttgctgtcactcttgttcctttatatatatctgaaacggctccatctgagatgagggggcaattaaatacacttccacagtttatgggttcaggaggaatgtttttgtcatattgcatggtgtttttcatgtcaatgatggattcaccaagctggcggctgatgcttgggactctgtcaatccccgctgtcatttatctagcattgacgctttttttcttgcctgaatctccaaggtggcttgtgagtaaaggaaagatgatcgaagctaaacaggttttgcagagacttcgtggtagggaagacgtttcaggtgagctggctttgctacttgaaggtcttggtgttgggaccgaaacaacaatagaagagtacattattggcccagccaatgagatcactggtgaaactgatgcgaaagaacatgttaaattatatgggcccgaggaaggtgtctcgtggattgccaaacccgtcaccgctggattcagtagtttagggatgttgtcccgtaacggcagtttggtaaaccaaaccgtgcctttgatggatccacttgtcactctatttggaagtgtccatgagaacatgcctacaacgggaagcacacgcagcttgctttttccaaacactgcaagcatggtgagtgttggagaaaatcaaggtagaaatgaacagtgggacgaagagggcgacaaggatggcgaggactcttatccagaagcttctagagctgattctgatgacaatttgcgaagcccgttactatcacaccaacattctagcatggaaaagggcatcagtcattggcgcaatagcagcctcgtaaattctggggaagaaggtgcgatgggtattggtggcggatggcagctggcatataaatggtctgagaagataggtaaagatggtagtaaggaaggagggcttcagaggatatatttgcaccaggaaggtacgattggttctcagaagcattcagttacttcctctgctggaattgacattcctgaagatgagtttgtacaagctgctgctctggttagccaacctgctgtttgttctaaggacatactgggtcaagcatcagaaggtctagcagctattcacccatcagaaattgctgctaaaggtccaagctgcggtgacctttttgaaccaggagttaagcgtgcattgattgttggagtagggcttcaaatactccagcaggttgctggcataaatggtgttctctactacacaccccagattcttgagcaagcaggggtggtagttcttctatcaagtctgggcttgagttcagcttctgcatcttacttgatgagtattctcactacattcttgatgcttccttgcatatttcttgccatgagactaatggatgtctctggcagaagatctattttgctgtacaccattcctatcttggtagcatcgctagttgcttttgtccttggcagtattgtcaacatggactcgtctttgaaagcagtgatctctactggcagtgttatgatctatttgagttgtttcgtcatgggcttcggagtaattccaaacatcctctgtgctgaaattttcccgactcgtgttcgtggcatttgcatcacaatatgttctctgacatattggattggaaacatcacgatcacgtactcgcttcctgttatgctaaacttctttggcctttctggtgtcttcacaatctatgccattggatgcgcggtgtcatggatttttgttttcttgaaggttcctgagacaaagggcatgccccttgaagtcatcaccgagttctttgctgtgggttccaagaatgattga

SEQ ID NO: 9915 - protein, 719 aa, Populus trichocarpa
MRGAVLVALAATVGNLLQGWDNSTIAGSIPYIKEELNLQSQPAVEGLIVAMSIIGGTTITTFSGTVSDIFGRRPMLIMSSILYLLSSIIILWAPNVYVLLLARLLDGFGVGLAVTLVPLYISETAPSEMRGQLNTLPQFMGSGGMFLSYCMVFFMSMMDSPSWRLMLGTLSIPAVIYLALTLFFLPESPRWLVSKGKMIEAKQVLQRLRGREDVSGELALLLEGLGVGTETTIEEYIIGPANEITGETDAKEHVKLYGPEEGVSWIAKPVTAGFSSLGMLSRNGSLVNQTVPLMDPLVTLFGSVHENMPTTGSTRSLLFPNTASMVSVGENQGRNEQWDEEGDKDGEDSYPEASRADSDDNLRSPLLSHQHSSMEKGISHWRNSSLVNSGEEGAMGIGGGWQLAYKWSEKIGKDGSKEGGLQRIYLHQEGTIGSQKHSVTSSAGIDIPEDEFVQAAALVSQPAVCSKDILGQASEGLAAIHPSEIAAKGPSCGDLFEPGVKRALIVGVGLQILQQVAGINGVLYYTPQILEQAGVVVLLSSLGLSSASASYLMSILTTFLMLPCIFLAMRLMDVSGRRSILLYTIPILVASLVAFVLGSIVNMDSSLKAVISTGSVMIYLSCFVMGFGVIPNILCAEIFPTRVRGICITICSLTYWIGNITITYSLPVMLNFFGLSGVFTIYAIGCAVSWIFVFLKVPETKGMPLEVITEFFAVGSKND

SEQ ID NO: 9916 - DNA, 2217 bp, Populus trichocarpa
  CDS (1)..(2217)
atgaagggagcagcactagtggctattgctgcttgcattggtaacttcttgcaaggatgggataatgctaccattgctggtgctatcatttacgtcaataaagacctcaagttgcaagcaagtgtggaaggtcttgttgtggccatgtcacttattggagcagctgctatcacaacatgctcaggacccatatcggattggctcggtcggcgtccaatgctaataatctcatccattctctactttgtcagtggtttggtaatgttttggtcgcccaatgtttacgtcctgtgcataggaagactgttagatggatttggcattggtttagcagttactcttgttccagtctatatatctgagactgccccatcagatataaggggaatgttaaatactctacctcagtttgctggttcaggtggcatgtttctgtcatactgtatgatttttgggatgtcattgacagcttcacctagttggaggttgatgcttggaatactttccattccttctttactatattttgcactcacagtgttttacttgcctgaatctcctcgatggcttgtgagtaaaggaaagatgcttgaggcaaagcgggttctccagagattgcgtggcagggaagatgtttcaggcgagatggctttactggctgaaggtcttggtatcgggggtgaaacatccatagaagagtacataataggccctgctgatgaactcgctaatggtcaagaacccactgttgataaagacaaaatcaagttatatggacctgaagaaggcctttcctgggttgctaaacccgttactggacagagttctcttgctcttgcatcacgccatggaagcatggtgagccaaggcgtgcctcttatggaccctcttgtgactctttttggtagtgttcatgaaaagctccctgagacaggaagcatgcgaagcatgcttttccctaattttggcagcatgtttagtacagcagaacctcactttaggactgagcaatgggatgaagagagtgtacaaagagaaggtgagggctacacatcagaggctggtggtggggattccgatgacaatttgcagagtccactaatctcacgccagacaacaagcatggaaaaggatatggcccacccaacttcccatggcagtgttctgagcatgagacggcatagcagtctaatgcaaggagttggggatgcagttgacggtactggcattggtgggggttggcagttggcatggaaatggtctgagagggaaggtgaggatggaaagaaggaagggggatttaaaaggatttatctgcaccaaggaggagttcctggatcccgacgcgggtctcttgtttcgcttcctggtggtgatgttcctgaagaaggtgagtacatccaggctgctgctctggtaagccagcctgctctttattcaaaggagcttatggaccagcatccagttggacccgcaatggttcacccatctcaaacagctacaaaagctccaatttggaccgctctgcttgaacctggagttaagcatgcattgtttgttgggattggaattcaattacttcagcagtttgctggcataaatggggttctatactacacccctcaaattcttgaaaaggcaggtgtttcggttcttcttgcaaacctgggcctcagcactacctctgcgtcattccttataagcgcatttacaaactttcttatgcttccatgcataggtgtagcgatgaggctcatggatatcgcggggagaaggacgctcctacttaccacaattcctgtgctgatactttccctcatcgtcttaattatttttgaactagtgactgtgagctcagtcgtcaacgctgcaattttaactgcttgtgttatcatattcatctgctgttttgtgtctgcttatggaccaattcctaatatcctctgctcagagatcttccccacaagagtccgaggcctctgcattgccatttgtgccatggtttactggattggagacatcattgtcacctacacactgcctgtgatgcttagctcgattggcctagtcggtatctttggcatttatgctgttgtgtgcgcaatctcttggatctttgttttcttgaaggtccctgagaccaaaggaatgcctcttgaagtcattacagagttctttgcggttggcgccaaacaagctgctgccaagaaggaatga

SEQ ID NO: 9917 - protein, 738 aa, Populus trichocarpa
MKGAALVAIAACIGNFLQGWDNATIAGAIIYVNKDLKLQASVEGLVVAMSLIGAAAITTCSGPISDWLGRRPMLIISSILYFVSGLVMFWSPNVYVLCIGRLLDGFGIGLAVTLVPVYISETAPSDIRGMLNTLPQFAGSGGMFLSYCMIFGMSLTASPSWRLMLGILSIPSLLYFALTVFYLPESPRWLVSKGKMLEAKRVLQRLRGREDVSGEMALLAEGLGIGGETSIEEYIIGPADELANGQEPTVDKDKIKLYGPEEGLSWVAKPVTGQSSLALASRHGSMVSQGVPLMDPLVTLFGSVHEKLPETGSMRSMLFPNFGSMFSTAEPHFRTEQWDEESVQREGEGYTSEAGGGDSDDNLQSPLISRQTTSMEKDMAHPTSHGSVLSMRRHSSLMQGVGDAVDGTGIGGGWQLAWKWSEREGEDGKKEGGFKRIYLHQGGVPGSRRGSLVSLPGGDVPEEGEYIQAAALVSQPALYSKELMDQHPVGPAMVHPSQTATKAPIWTALLEPGVKHALFVGIGIQLLQQFAGINGVLYYTPQILEKAGVSVLLANLGLSTTSASFLISAFTNFLMLPCIGVAMRLMDIAGRRTLLLTTIPVLILSLIVLIIFELVTVSSVVNAAILTACVIIFICCFVSAYGPIPNILCSEIFPTRVRGLCIAICAMVYWIGDIIVTYTLPVMLSSIGLVGIFGIYAVVCAISWIFVFLKVPETKGMPLEVITEFFAVGAKQAAAKKE

SEQ ID NO: 9918 - DNA, 2223 bp, Populus trichocarpa
  CDS (1)..(2223)
atgaatggagctgtgcttgtagctgttgctgctgctattggcaacttattgcaaggatgggataatgcaaccatcgcaggggctgttttatacataaaaagggaatttcatttggaaagtgaacctactattgaaggattaatcgtggctacatcacttgttggagccactttaattactacgtgttctggacccatatctgattgtctaggccgccgtcctttgttgataatctcatcaatactttattttgttagtggtcttgtaatgttatggtctcccaatgtttacgttctgcttttggcaaggcttttggatggatttggcattggtttggcagtaactcttgttccagtttatatatctgagacagcaccacctgaaataagggggttgttgaatacccttcctcagttcactggatctggtggaatgtttctgtcatattgcatggtgttcggaatgtccttgatggaggctccaagttggagagtgatgcttggagttctttttattccctcaatcatctattttctattgactgtatttttcttgcctgagtctccaaggtggcttgtaagtaaaggacggatgcttgaggccaagaaggttctgcagaggctccgtggcagagaagatgtttctggtgagctggctttactggttgagggacttggagttgggactgacatatcaatagaggagtacataattggccctgccaacgatttcaccgatgaccatgatatagctgccgacaaagatcatatcaagttatatgggcctgaacaaggtcactcctgggttgccagacctgtcagtgggcagagtgctattggtcttgcgtctaggcatggaagcatggcaaaccagagtctagctctcatggatcctcttgtcaccctctttggtagcgtccatgagaagctccctgaacaaggaagcatgagaagcatgcttttccctcactttggaagcatgttcagtgtaggagggaatcatcctagaaatgaagattgggatgaggagagccaagccagagatggtgaggattatgcatctgatggtgctgctggtgattctgatgacaatttgcagagtccattgatctcacgtcaggcaacaagcatggacaaggacatggtcccgcctgcccatggaagcatgtcaagcatgagacatgggagtctgattacaggaaatgctggagatccagttggtaacacagggattggtggtggttggcagctggcatggaaatggtccgagagagaaggtcaagatggaaagaaggaagggggctttaagagaatttatttgcatcaagagggagcccctggttctcgccgtggatctctggtttctctgactggtgctgatgcccatgcagacagtgaatacatccaggctgctgctctggtgagtcaatcagctctttatcccaaggagcttgtgaatgagaatccagctggaccagctatggtccacccatctgaaactgtagctaaaggaccaagctggagagatctttttgaaccaggagtcaagcatgccttggctgttggtgtgggaattcaaatacttcagcagttcgctggcataaatggggttctctactatactcctcaaattcttgagcaggcaggagttggagttcttctttcaaacttgggcctcagttcagcttctacatctctgcttatcagcgcccttacaacattgttgatgctcccttgtatagctgttgccatgaggctcatggatatctctgggagaaggactttgctgctcaccaccatccccgtgttgatcatatccctcattttgttagtccttggaagcttggtggatatgggcagtgttgttaatgcatcaatctcaactgttagcgttgtgctctacttctgttttttcgtcatgggttttgggccaattcccaacatattatgtgcagagatcttccctactcgtgttcgtggcctttgcatagccatatgcgcccttactttctggatttgcgacatcattgtgacgtatacgctcccagttatgcttaaatctatcggccttgctggtgtttttggcttatatgcaatcgtgtgcgtcatatcatttgtgtttgtctacttgaaagttccagagaccaagggcatgcctctggaagtgatttccgagttctttgccgttggtgcaaagcaggctgcagctgctaaggaaaactga

SEQ ID NO: 9919 - protein, 740 aa, Populus trichocarpa
MNGAVLVAVAAAIGNLLQGWDNATIAGAVLYIKREFHLESEPTIEGLIVATSLVGATLITTCSGPISDCLGRRPLLIISSILYFVSGLVMLWSPNVYVLLLARLLDGFGIGLAVTLVPVYISETAPPEIRGLLNTLPQFTGSGGMFLSYCMVFGMSLMEAPSWRVMLGVLFIPSIIYFLLTVFFLPESPRWLVSKGRMLEAKKVLQRLRGREDVSGELALLVEGLGVGTDISIEEYIIGPANDFTDDHDIAADKDHIKLYGPEQGHSWVARPVSGQSAIGLASRHGSMANQSLALMDPLVTLFGSVHEKLPEQGSMRSMLFPHFGSMFSVGGNHPRNEDWDEESQARDGEDYASDGAAGDSDDNLQSPLISRQATSMDKDMVPPAHGSMSSMRHGSLITGNAGDPVGNTGIGGGWQLAWKWSEREGQDGKKEGGFKRIYLHQEGAPGSRRGSLVSLTGADAHADSEYIQAAALVSQSALYPKELVNENPAGPAMVHPSETVAKGPSWRDLFEPGVKHALAVGVGIQILQQFAGINGVLYYTPQILEQAGVGVLLSNLGLSSASTSLLISALTTLLMLPCIAVAMRLMDISGRRTLLLTTIPVLIISLILLVLGSLVDMGSVVNASISTVSVVLYFCFFVMGFGPIPNILCAEIFPTRVRGLCIAICALTFWICDIIVTYTLPVMLKSIGLAGVFGLYAIVCVISFVFVYLKVPETKGMPLEVISEFFAVGAKQAAAAKEN

SEQ ID NO: 9920 - DNA, 2070 bp, Oryza sativa subsp. indica
  CDS (1)..(2070)
atgtggcatctgggcagcggcagctgcagcttctcctccccactgagcccttttgtcctcactcgcagggatcggagaggggtgaagatgtcgggtgctgctctcgtcgcaatcgcggcctccatcggcaacctgctgcagggatgggacaatgccaccattgcaggtgctgtactatacataaagaaggaattcaagctagaaagtgagcccactgtggaggggctaatcgtggccatgtcactgattggtgcaaccatcatcacaacattctcagggcctgtatcagactggatcggccggcgccctatgctcattctctcttcaattctctacttcctcagcagcctcatcatgctatggtccccgaatgtctatgtgttactgctcgcacgccttatagatggattcggcatcggcttggctgtcacacttgtacctttgtacatctcagagacagctccttcagagatcaggggtttgctgaatacactgccacagttcagtgggtcaggagggatgttcttgtcctactgcatggtgtttgggatgtcactgttgccgtcacctgactggagaattatgcttggtgttctcgcaatcccttcgttgtttttcttcggattgacaatattctatctgccagaatcaccaagatggcttgtcagcaaagggcggatggctgaggcaaagaaggtattacaaaaattacgtgggagagaggatgtctcaggagaaatggctcttcttgttgaaggtttggaggttggagctgacacttccattgaagagtacatcatcggaccggctatagagccagctgatgagcatgttgttgatggcgataaggaccaaataacactgtacgggcctgaagagggccaatcatggattgctcgaccttccaagggacccagcattcttggaagtgtgctttctcttacatctcgtcatggcagcatgaccacgagcgcagaagggaaggacattgcacaccatgctcatcgtggaagtgctctgagtatgagaagaagcagcctcttggaagagggtggcgaggccgtgagcagcactggcattggtgggggatggcagcttgcatggaaatggtcagagcgagaaggcgaggatggtaagaaggaaggaggatttaaaaggatctacttgcaccaagaggaagtgccaggatcaagaaggggctcagttatttcacttcctggtggaggggacgctcctgaaggcagcgaattcatacatgctgccgctttggtaagccaaccagcactttactccaaggatatcattgaacagcgtatgtccggtccagccatgattcatccatcagaggcagctgccaaaggttcaagctggaaagatttgtttgaacctggagtgaggcgtgcgttgttagtcggtgttggaattcaaatccttcaacagtttgctggaataaatggggttctctattacactccacaaatacttgagcaagcgggggtggcagttctcctttccaatcttggcctcagttcagcgtcagcttccatcttgatcagttctctgaccaccctactgatgcttcctagcattggtttagccatgagacttatggacatctctggaagaaggtttctgcttctgggcacaattccagtcttgatagcatctctagttgtcttggttgtgtccaatgttatcgacctgggtacagtggcccatgccgcactctccacaatcagcgtcatcatctacttctgctgcttcgtcatgggattcggtccgatccccaacattctgtgtgcggagatcttccccactagggtccgcggcatctgcattgccatctgcgccctgacattctggattggtgatatcatagtcacctacagcctccctgtgatgctgaatgccatcggcctagcaggtgtctttggtatatacgcagttgtttgctcgattgccttcgtgttcgtcttcctcaaggtccccgagacgaagggcatgccgctcgaagtcatcaccgagttcttcgctgttggtgcaaagcaaatgcaggctacaaaggcctaa

SEQ ID NO: 9921 - protein, 689 aa, Oryza sativa subsp. indica
MWHLGSGSCSFSSPLSPFVLTRRDRRGVKMSGAALVAIAASIGNLLQGWDNATIAGAVLYIKKEFKLESEPTVEGLIVAMSLIGATIITTFSGPVSDWIGRRPMLILSSILYFLSSLIMLWSPNVYVLLLARLIDGFGIGLAVTLVPLYISETAPSEIRGLLNTLPQFSGSGGMFLSYCMVFGMSLLPSPDWRIMLGVLAIPSLFFFGLTIFYLPESPRWLVSKGRMAEAKKVLQKLRGREDVSGEMALLVEGLEVGADTSIEEYIIGPAIEPADEHVVDGDKDQITLYGPEEGQSWIARPSKGPSILGSVLSLTSRHGSMTTSAEGKDIAHHAHRGSALSMRRSSLLEEGGEAVSSTGIGGGWQLAWKWSEREGEDGKKEGGFKRIYLHQEEVPGSRRGSVISLPGGGDAPEGSEFIHAAALVSQPALYSKDIIEQRMSGPAMIHPSEAAAKGSSWKDLFEPGVRRALLVGVGIQILQQFAGINGVLYYTPQILEQAGVAVLLSNLGLSSASASILISSLTTLLMLPSIGLAMRLMDISGRRFLLLGTIPVLIASLVVLVVSNVIDLGTVAHAALSTISVIIYFCCFVMGFGPIPNILCAEIFPTRVRGICIAICALTFWIGDIIVTYSLPVMLNAIGLAGVFGIYAVVCSIAFVFVFLKVPETKGMPLEVITEFFAVGAKQMQATKA

SEQ ID NO: 9922 - DNA, 1932 bp, Oryza sativa subsp. indica
  CDS (1)..(1932)
atgagaggcgcggtggtggcggcggcggcggcggcggtcggcaacatgcttcagggatgggacaacgccaccatcgccggcgctctcctctacatgaggagggacttgccggcgctccaagcccaccccgcactccagggtctggtcgtcgccacctccctcatcggcgccaccatcgtcaccaccttctccggcccgctctccgactcccgaggccgacgccccatgctcatcgcctccgcgctgctctactccctcgccggcctcctcatgctatggtctcccaacgtccccatcctcctactcgcgcgccttgtcgacggcttcgccatcggcctcgccgtcacgctcgtccccgtctacatctccgagacggcgccgcccgacacccgcggcctgctcaacacgctgccgcagctcaccggctccaccggcatgttcctctcctactgcatggtcttcctcatcacgctcgcgcccatccccaactggcgcctcatgctcggtgtcctcctcctgcctgctctcctctacctcctcctcaccatcttcttcctgtcggagtcgccgcgctggctcgtcagcaagggaaggatgaaggaggccaggaccgtgctccagatgctcaggggacgccaggacgtgtccgccgagatggcgctcctcgtcgaggggctcaccaccggacgcgacacggccatcgaggagtacgtcgtcggcccaacggacgaggcctcgggattggcgccaggcagcatgttcggcagcgccgtcacgctggcatcgcgacagggcagcatgctcgaccacctcaaggaccccgtcgtcgccctcctcgacagcctccacgacatgaacccccccgccggtggcactactgacgtccccaacctcggcagcatgatcggcgtccacgacaggccgcccatcgactgggacgaggagaactccggggacgacgacggtgacatcgccgcgccgctgctaaccatggagggcgaggccgcgacgagcacggtgggcatcggcggcgggtggcagctggcgtggaagtggacggagggcgtcgcggcggacgggacgaggcagagcacggtgaagaggatgtacctgcacgaggagcaggcggagggggtgcacgcggcggcgctggtgagccagtcggcgttgtgcaccaagaaggaggcggaggcggaggtggagggtgggtggcgggaggtgctggagcccggcggcgtccggcacgcgctggtgtgcggcgtggcgatccagatcctgcagcagttctcgggcatcagcggcgtgctcttgtacacgccgcagatactggagcaggccggcgtgggcgtgctgctctccaggctgggcctgcgcgacgactccgcctccatcctcatcagcggcgtcaccacgctgctgatgctgcccagcatcggcgtggccatgcggctcatggacgtgtccgggcggcggagcctgctcctgtggacgatcccgctgctggtggcgtcgctggcggtgctggtggcggcgagcgtggcgccgatggcggcggcggcgcacgcggcggtgtgcacggggagcgtggtggtgtacctgtgctgcttcgtcatggggttcggccccatccccaacatcctgtgcgccgagatattccccacgcgcgtgcgtggcctctgcatcgccatctgctcgctcgccttctggctcgccgacatcgccgtcacctacaccctccccgtcatgctcgcctccctcggcctcgccggcctcttcgccatctacgccgccgtctgctgcgtcgcgctcgtcttcgttgcgctgcgggtgcccgagaccaagggcctcccgctcgaggtcatcatcgacttcttcaacgtcggagccaaagggaccctaccaaacctccacgacgatgacgaccactattaa

SEQ ID NO: 9923 - protein, 643 aa, Oryza sativa subsp. indica
MRGAVVAAAAAAVGNMLQGWDNATIAGALLYMRRDLPALQAHPALQGLVVATSLIGATIVTTFSGPLSDSRGRRPMLIASALLYSLAGLLMLWSPNVPILLLARLVDGFAIGLAVTLVPVYISETAPPDTRGLLNTLPQLTGSTGMFLSYCMVFLITLAPIPNWRLMLGVLLLPALLYLLLTIFFLSESPRWLVSKGRMKEARTVLQMLRGRQDVSAEMALLVEGLTTGRDTAIEEYVVGPTDEASGLAPGSMFGSAVTLASRQGSMLDHLKDPVVALLDSLHDMNPPAGGTTDVPNLGSMIGVHDRPPIDWDEENSGDDDGDIAAPLLTMEGEAATSTVGIGGGWQLAWKWTEGVAADGTRQSTVKRMYLHEEQAEGVHAAALVSQSALCTKKEAEAEVEGGWREVLEPGGVRHALVCGVAIQILQQFSGISGVLLYTPQILEQAGVGVLLSRLGLRDDSASILISGVTTLLMLPSIGVAMRLMDVSGRRSLLLWTIPLLVASLAVLVAASVAPMAAAAHAAVCTGSVVVYLCCFVMGFGPIPNILCAEIFPTRVRGLCIAICSLAFWLADIAVTYTLPVMLASLGLAGLFAIYAAVCCVALVFVALRVPETKGLPLEVIIDFFNVGAKGTLPNLHDDDDHY

SEQ ID NO: 9924 - DNA, 2145 bp, Oryza sativa subsp. indica
  CDS (1)..(2145)
atggggtatgcagcagcggacttgggtgcctggaagaacacgcggcaacaatactctccatcctcgccgatcagcttagggtcttccgtcttctccgaatcaagtctggaactttcgacaacaacagcggatggctcgacggctaatgcagtgctcgctgctattgtggcatctattggcaatctactacaaggatgggacaatgcagccattgcaggtgctattatgtacataaagaacgaattcaacctacaaaacgatccaatgatggagggacttatcctagcaatgtcactaattggtgcaactataatcactgcactatcagggatgattaccaattctattgggaagaggccattgctttctgttgcggcaattctatactctatcagtgcattgatcatgtttcaggtttcaaatgaatatatgctactgttggcgagacttatttatggctttggttcaggcttggtggtgacatatgccccactttatatctcagagactgcgcctacaaatatgcgagggttattaaatacattgccacaattcaatgggtctcttggaatgttgctatcttacattatggtatttttaatgtcacttacactaaatcccaactggagaatcatgcttggctccttatcaattccttcatttgtctttttactactgtgcatcttctatttaccggagtctcctgtattccttgtgagcaaaggaaagatagaagaagcaaaaaatgttatgaaaagactaagaggaacaaatgaagtctcaagtgaaatagcctttcttattcaaggcttgacagttgaccaagataattatatcgaagattacatgattggtcataataatgatgaatttgatgatcaatcaatttcaaacacagaaacaaccaaattgtatggccatgaagaaggtgtgacttggtttgcacgtccattcaagggaaaaaatgttgttgaaagtgaccatagtcctatacctaatttgcttgatcctattgtcacactttttgatagtatccatggtaatatattgaatacacctgaattcactagttctggaaacatgtcaaatgatatagaacaacctaaaacagatttggagagccaagaagatcttgatactgattatgaagatgacctcggccatccacttctatttcaccaaggatcttatatggaaggaatagatgatgcatgtgttaatggaggatggcacatggcttggaaatttgttcaaagagagaatgaatttgggcaaacacaagatgacttccaacaaatttttctacaaggtgatattcttcaagctggccgtgtttcccatgcaaccgctttggttagcacaccttcttttcaccattctattggacctgcaatggtgcatccatccaaattcaatttgtctaccgaaggacaaagttggtctgatcttttacaacccggggtaaagcagggattgattgtgggtgtcacaatacaaattcttcaacagcttgctggaattagtggcattctttattacactcctcaaatacttgagcaagctggagctggaattttgttaaaatggtttaatgttagttcttcctcatcatctattttgacgagtgctctaaccacctttatgatgcttccttctattggtattgcaatgaaatgcatggatcgttatggaagaagatcactccttctttacacaataccaatgttgatagtatcacttattatattgatcgtggtcaatgttatgaacttagaagcaatttttggagctattttatccacatttggtgttatcatctatgtttgttgcttcgttatgggatttggaccaattcccaatgttctttgctcagagctttttcctcctagttgtcgtaaccgttgtatgtctatttgtacattgacattttggattgtttccattattgtcacttatgcatttcctgttatgctaagctccataggtctaattggtgtttgtgggatatatgctgttgtctgcatagtctcctttatattcgtgttaattaaggtgcctgaaacgaaaggcatgcctcttgcggttatcgcaaattccttagctgttggagcaaggctatcagttaaacggaatgagaacatctaa

SEQ ID NO: 9925 - protein, 714 aa, Oryza sativa subsp. indica
MGYAAADLGAWKNTRQQYSPSSPISLGSSVFSESSLELSTTTADGSTANAVLAAIVASIGNLLQGWDNAAIAGAIMYIKNEFNLQNDPMMEGLILAMSLIGATIITALSGMITNSIGKRPLLSVAAILYSISALIMFQVSNEYMLLLARLIYGFGSGLVVTYAPLYISETAPTNMRGLLNTLPQFNGSLGMLLSYIMVFLMSLTLNPNWRIMLGSLSIPSFVFLLLCIFYLPESPVFLVSKGKIEEAKNVMKRLRGTNEVSSEIAFLIQGLTVDQDNYIEDYMIGHNNDEFDDQSISNTETTKLYGHEEGVTWFARPFKGKNVVESDHSPIPNLLDPIVTLFDSIHGNILNTPEFTSSGNMSNDIEQPKTDLESQEDLDTDYEDDLGHPLLFHQGSYMEGIDDACVNGGWHMAWKFVQRENEFGQTQDDFQQIFLQGDILQAGRVSHATALVSTPSFHHSIGPAMVHPSKFNLSTEGQSWSDLLQPGVKQGLIVGVTIQILQQLAGISGILYYTPQILEQAGAGILLKWFNVSSSSSSILTSALTTFMMLPSIGIAMKCMDRYGRRSLLLYTIPMLIVSLIILIVVNVMNLEAIFGAILSTFGVIIYVCCFVMGFGPIPNVLCSELFPPSCRNRCMSICTLTFWIVSIIVTYAFPVMLSSIGLIGVCGIYAVVCIVSFIFVLIKVPETKGMPLAVIANSLAVGARLSVKRNENI

SEQ ID NO: 9926 - DNA, 2292 bp, Oryza sativa subsp. indica
  CDS (1)..(2292)
atgagaggcgccgtgttggtggctgtggcggccgccatcggcaactacctgcagggatgggacaacgccaccatcgccggcgccgtgctgtacatcaagcgggagttcgccctcgagacccagcccgccgtggagggcctcgtcgtcgccatgtccctcatcggcgccaccatcatcaccaccttctctggccccgtctccgacctcgtcggccgccgccccatgctcatcgcctcctccctcctctacttcgccggcggcctcatcatgctctggtcccccaacgtctacgtcctcctcctcgcccgcctcgtcgacggcttcggcgtcggcctcgccgtcaccctcgtccccgtctacatctccgagacctccccgccggagatccgcggccgcctcaacacactgccgcagttcaccggctccggcggcatgttcatgtcctactgcatgatcttcgccatgacgctctcgccctcgcccaactggcgcatcatgctcggcgtcctcttcgtcccctcgctgctctacctgttcgtcaccgtcttctacctcccggagtcgccgcgctggctcgtcagcaagggccgcatgaaggaggccagggttgtgctcgagatgctgcgcggccgcgaggacgtctccggcgagatggcgctgctcgtcgagggcctcggcaccggcggcgacaccgagatcgaggactacgtcgtcggcccgtccgagggcgacgccggcgagaacgagcaggcgagggacacggtcacgctgtacgggccggagcaggggctttcgtgggtggcgcagccggtcgccggcggccgcggcagcatgctggggagctcgctggggctgcaggcgtcgcgccacggcagcatgtacgagcagatgaaggaccccgtggtggcgctgctcgggagcgtccacgagcggctgccggagtccggcggcggcgccaccggcagcatgagggggagcacgctgttccccaacctcgggagcatgcttagcgtcaacgacaggcccggcggcagcagctgggacgaggagaacgtgcagcctggcgacgacgacctcgacgaggaggaggaggagtacctctccgacgacggcaaggacgacgacgacggcggcggcctgcaggcgccgctgctgtcgcggcagagcaccgacgtggagaccaagaacgagcccgcctccggccaggtggcgatgcagcggcacagcagcatcggcggcggcggcggcgtcgagacggcgagcaccatgggcatcggcggcgggtggcagctggcgtggaagtggacggagaacgtgggccccgacggcgtcaagcgcggcgcggtgaagcgcatgtacctgcacgaggagtccgaggccgcgcccggcggcgacgcgggcggcggcggcgccgccggcgccgccggcgacgcgcagtccacggcgtacgtccacgcggcggcgctggtgagccggtcgatgctgtacaccaaggacgtcctgatcgggcagagcccgaccgagccggcgttcgcgaacccgccggaggcggtggcggcggcggcgtcgacgggcccggcgtggcgcgagctgctcgagccgggcgtccgccacgccctcttctgcggcgtcaccatccagatcctccagcaattctccggcatcaacggcgtgctctactacaccccgcagatcctcgaccaggccggcgtcagcgtcctcctcgccagcctcggcctctccggcgactccacctccatcctcatcagcggcctcaccacgctcctcatgctcccgtccatcggcgtcgccatgcgcctcatggacgcctcgggccgccgcgccctcctcctctggacgctgcccgtcctcgtcgcgtccctcgccgtgctcgtggtggcgaacgtcgtgcccatggcggcgaccgcgcacgcggcgctgtcgacggggagcgtcatcgtctacttctgctgcttcgtcatggggttcggccccatccccaacatcctctgcgccgagatcttcccgacgagggtgaggggactctgcattgccatctgctcgctgacgttctggctcggcgacatcgccgtcacgtacagcctccccgtcatgctcagctccgtggggctcgccggcgtgttctccttctacgccgccgtgtgctgcgtcgcgctcgtgttcgtggcgctcaaggtgcccgagaccaagggcctcccgctcgaggtcatcatcgagttcttcaacgtcggcgccaaggccggcacgttgcctgacgaagagttccactga

SEQ ID NO: 9927 - protein, 763 aa, Oryza sativa subsp. indica
MRGAVLVAVAAAIGNYLQGWDNATIAGAVLYIKREFALETQPAVEGLVVAMSLIGATIITTFSGPVSDLVGRRPMLIASSLLYFAGGLIMLWSPNVYVLLLARLVDGFGVGLAVTLVPVYISETSPPEIRGRLNTLPQFTGSGGMFMSYCMIFAMTLSPSPNWRIMLGVLFVPSLLYLFVTVFYLPESPRWLVSKGRMKEARVVLEMLRGREDVSGEMALLVEGLGTGGDTEIEDYVVGPSEGDAGENEQARDTVTLYGPEQGLSWVAQPVAGGRGSMLGSSLGLQASRHGSMYEQMKDPVVALLGSVHERLPESGGGATGSMRGSTLFPNLGSMLSVNDRPGGSSWDEENVQPGDDDLDEEEEEYLSDDGKDDDDGGGLQAPLLSRQSTDVETKNEPASGQVAMQRHSSIGGGGGVETASTMGIGGGWQLAWKWTENVGPDGVKRGAVKRMYLHEESEAAPGGDAGGGGAAGAAGDAQSTAYVHAAALVSRSMLYTKDVLIGQSPTEPAFANPPEAVAAAASTGPAWRELLEPGVRHALFCGVTIQILQQFSGINGVLYYTPQILDQAGVSVLLASLGLSGDSTSILISGLTTLLMLPSIGVAMRLMDASGRRALLLWTLPVLVASLAVLVVANVVPMAATAHAALSTGSVIVYFCCFVMGFGPIPNILCAEIFPTRVRGLCIAICSLTFWLGDIAVTYSLPVMLSSVGLAGVFSFYAAVCCVALVFVALKVPETKGLPLEVIIEFFNVGAKAGTLPDEEFH

SEQ ID NO: 9928 - DNA, 2742 bp, Oryza sativa subsp. japonica
  CDS (8)..(2335)
ccgggctatgtggcatctgggcagcggcagctgcagcttctcctccccactgagcccttttgtcctcactcgcagggatcggagaggggtgaagatgtcgggtgctgctctcgtcgcaatcgcggcctccatcggcaacctgctgcagggatgggacaatgccaccattgcaggtgctgtactatacataaagaaggaattcaagctagaaagtgagcccactgtggaggggctaatcgtggccatgtcactgattggtgcaaccatcatcacaacattctcagggccggtatcagactggatcggccggcgccctatgctcattctctcttcaattctctacttcctcagcagcctcatcatgctatggtccccgaatgtctatgtgttactgctcgcacgccttatagatggattcggcatcggcttggctgtcacacttgtacctttgtacatctcagagacagctccttcagagatcaggggtttgctgaatacactgccacagttcagtgggtcaggagggatgttcttgtcctactgcatggtgtttgggatgtcactgttgccgtcacctgactggagaattatgcttggtgttctcgcaatcccttcgttgtttttcttcggattgacaatattctatctgccagaatcaccaagatggcttgtcagcaaagggcggatggctgaggcaaagaaggtattacaaaaattacgtgggagagaggatgtctcaggagaaatggctcttcttgttgaaggtttggaggttggagctgacacttccattgaagagtacatcatcggaccggctatagagccagctgatgagcatgttgttgatggcgataaggaccaaataacactgtacgggcctgaagagggccaatcatggattgctcgaccttccaagggacccagcattcttggaagtgtgctttctcttacatctcgtcatggcagcatggtgaaccagagcgtgccacttatggatcctatagtcacgcttttcggcagtgtccatgagaacatgcctcatgctggaggaagcatgcggagtacattgtttcccaactttggtagtatgtttagtgtgacagatcagcaccccaaggttgatcaatgggatgaggagaaccttcatagggatgatgaggaatacgcgtctgatggtgctggaggtgactatgaagacaatgtccacagcccgttgctgtcccgacagaccacgagcgcagaagggaaggacattgcacaccatgctcatcgtggaagtgctctgagtatgagaagaagaagcctcttggaagagggtggcgaggcggtgagcagcactggcattggtgggggatggcagcttgcatggaaatggtcagagcgagaaggcgaggatggtaagaaggaaggaggatttaaaaggatctacttgcaccaagaggaagtgccaggatcaagaaggggctcagttatttcacttcctggtggaggggacgctcctgaaggcagcgaattcatacatgctgccgctttggtaagccaaccagcactttactccaaggatatcattgaacagcgtatgtccggtccagccatgattcatccatcagaggcagctgccaaaggttcaagctggaaagatttgtttgaacctggagtgaggcgtgcgttgttagtcggtgttggaattcaaatccttcaacagtttgctggaataaatggggttctctattacactccacaaatacttgagcaagcgggggtggcagttctcctttccaatcttggcctcagttcagcatcagcttccatcttgatcagttctctgaccaccctactgatgcttcctagcattggtttagccatgagacttatggacatctctggaagaaggtttctgcttctgggcacaattccagtcttgatagcatctctagttgtcttggttgtgtccaatgttatcgacctgggtacagtggcccacgccgcactctccacaatcagcgtcatcatctacttctgctgcttcgtcatgggattcggtccgatccccaacattctgtgtgcggagatcttccccactagggtccgcggcatctgcattgccatctgcgccctgacattctggattggtgatatcatagtcacctacagcctccctgtgatgctgaatgccatcggcctagcaggtgtctttggtatatacgcagttgtttgctcgattgccttcgtgttcgtcttcctcaaggtccccgagacgaagggcatgccgctcgaagtcatcaccgagttcttcgctgttggtgcaaagcaaatgcaggctacaaaggcctaattcttcagcaactctgctttcaatctttatataacactgtaaattggaatctgcaagatcacaccatgaggctggaggagctttttgagttgtaaatgagagaagaggattgctattcatgctccttatgcaagggaaaagagttcattactggcacagggcagctgtaaagtaggaaattttcatgttattcatgtccacttcttgtttatttagtactgtgttaggtaatgttgttattcatcagtagttgctgctagggatgttcaaaaataagcttgctaatctgattttgagctactatgttggggttcataataaagtaaattttctgtgtcacaaaaaaaaaagtagcactttgttgtaaattgtatggggaagttaatttattaatgttcccgctcttt

SEQ ID NO: 9929 - protein, 775 aa, Oryza sativa subsp. japonica
MWHLGSGSCSFSSPLSPFVLTRRDRRGVKMSGAALVAIAASIGNLLQGWDNATIAGAVLYIKKEFKLESEPTVEGLIVAMSLIGATIITTFSGPVSDWIGRRPMLILSSILYFLSSLIMLWSPNVYVLLLARLIDGFGIGLAVTLVPLYISETAPSEIRGLLNTLPQFSGSGGMFLSYCMVFGMSLLPSPDWRIMLGVLAIPSLFFFGLTIFYLPESPRWLVSKGRMAEAKKVLQKLRGREDVSGEMALLVEGLEVGADTSIEEYIIGPAIEPADEHVVDGDKDQITLYGPEEGQSWIARPSKGPSILGSVLSLTSRHGSMVNQSVPLMDPIVTLFGSVHENMPHAGGSMRSTLFPNFGSMFSVTDQHPKVDQWDEENLHRDDEEYASDGAGGDYEDNVHSPLLSRQTTSAEGKDIAHHAHRGSALSMRRRSLLEEGGEAVSSTGIGGGWQLAWKWSEREGEDGKKEGGFKRIYLHQEEVPGSRRGSVISLPGGGDAPEGSEFIHAAALVSQPALYSKDIIEQRMSGPAMIHPSEAAAKGSSWKDLFEPGVRRALLVGVGIQILQQFAGINGVLYYTPQILEQAGVAVLLSNLGLSSASASILISSLTTLLMLPSIGLAMRLMDISGRRFLLLGTIPVLIASLVVLVVSNVIDLGTVAHAALSTISVIIYFCCFVMGFGPIPNILCAEIFPTRVRGICIAICALTFWIGDIIVTYSLPVMLNAIGLAGVFGIYAVVCSIAFVFVFLKVPETKGMPLEVITEFFAVGAKQMQATKA

SEQ ID NO: 9930 - DNA, 2220 bp, Vitis vinifera
  CDS (1)..(2220)
  misc_feature (536)..(536): y is t or c
  misc_feature (1278)..(1278): w is a or t
  misc_feature (2067)..(2067): y is t or c
  misc_feature (2098)..(2098): r is g or a
  misc_feature (2194)..(2194): k is g or t
  misc_feature (2199)..(2199): y is t or c
atgagtggagctgtgcttgtggcgattgctgctgctgtgggaaacttgttgcaaggatgggataacgctacgattgctggggctgttctatacatcaagaaggaattcaacttgcaaggtgaacccactgtagagggtctaattgtggccatgtctctcatcggagccacgttcatcactactatctctggagcagtatctgattggcttgggcgccgccctatgttgataatctcatccctattttattttgtcagtggccttgtgatgctgtggtctcccaatgtttatgtgctgctgttggcaaggcttctggatggatttggggttgggctgtcagttactattgttccggtctatatatctgagactgcaccctctgaaataaggggattgttgaataccctccctcagttcactggttctgttggaatgtttttgtcttactgcatggtttttgggatgtcactgatgaattcaccaagctggaggttaatgcttggggttctttttattccttccctcgtatatttggygttaacggtatttttgttgcctgagtctcctcggtggctagtcagtaaagggcgtatgctcgaggcgaagcatgtattgcagagactacgcggcagggaggatgtctctggtgagatggctttgctggtcgaaggtcttggagtcggtagtaaagcatctatagaggagtacataattggccctgatgatctcacagatgaccaggatccagctgctatgaatgatagaatcagattatatgggcctcaagaaggtctctcctggattgctaaacctgttactggccagagttctcttggccttgtgtctcgctgtggaagcatggaaaacaagccagtgccacttatggaccctcttgtgaccctctttggcagtgttcacgagaagcttcctgagacaggaagcatgcgaagcgtgatctttccaaactttagcagcatgttcagcatatcaggcaatcaacctaaaaatgaagaatcggatgaagagagccttgccagagatggtgaagattatccatctgatgctgctggtggtgattctgacgacaacttgcaaagtccattaatctcgcgtcaaaatactagtttagaaaaagacttgatgcctgctccaacacagagcagcaatttaagcatgagacacagcagtctaatgcgagcagatggtggagagcaagtcagtagtagcatgggaattggtggtgggtggcagctggcatggaaatggtccgaaaaagawggtcaagatggaaagaaggaaggaggttttaaaagaatttatttgcaccaggacagcatccctcgatctcaacgcggatctttagtttctgttccaggtggtgaggtccctgttgatggtgagatgacctgcgctgctgctttggtaagtcaacctgctctttattccaaggagcttatggatcagaatccagttggaccagctatggttcatccttctgaaactgctataaaagggccaagttggagagatctttttaaaccaggagtcaagcatgcactagttgttggggtggggattcagatacttcagcagttctctggcataaatggggttctgtactacactcctcaaattcttgagcaggcaggtgttggagttattctttcaaacataggcattagttcagcctctacatctctgcttatcagtgcaatcacaaccttgttgatgcttccttgcatagctgttgccatgaggctcatggatatttctggtagaaggagtctgctgctcagcacaatccctgtcctgataatagcccttgccattcttgtcctcggaagtttagtaaatatgggtgatgttgtgcatgctgcaatctcgactgctagtgtcatcatctacttctgttgctttgtcatgggatttggcccagtcccaaacatactctgtgcggagatctttcccacccgtgtccgaggcctatgcattgccatttgtgcactctcattttggattggtgacatcattgtaacctacacactgccattgatgctcacctctgtyggccttgctggtgtctttggcatgtacgccrttgtgtgcctcatctcatgggtgttcgtcttcttgaaagtcccagaaaccaaaggcatgccccttgaagttatctctgagttctttgctgttggtkcaagygctggacagaagaagaactga

SEQ ID NO: 9931 - protein, 739 aa, Vitis vinifera
  misc_feature (179)..(179): The Xaa at location 179 stands for Ala, or Val.
  misc_feature (426)..(426): The Xaa at location 426 stands for Asp, or Glu.
  misc_feature (700)..(700): The Xaa at location 700 stands for Ile, or Val.
  misc_feature (732)..(732): The Xaa at location 732 stands for Ala, or Ser.
MSGAVLVAIAAAVGNLLQGWDNATIAGAVLYIKKEFNLQGEPTVEGLIVAMSLIGATFITTISGAVSDWLGRRPMLIISSLFYFVSGLVMLWSPNVYVLLLARLLDGFGVGLSVTIVPVYISETAPSEIRGLLNTLPQFTGSVGMFLSYCMVFGMSLMNSPSWRLMLGVLFIPSLVYLXLTVFLLPESPRWLVSKGRMLEAKHVLQRLRGREDVSGEMALLVEGLGVGSKASIEEYIIGPDDLTDDQDPAAMNDRIRLYGPQEGLSWIAKPVTGQSSLGLVSRCGSMENKPVPLMDPLVTLFGSVHEKLPETGSMRSVIFPNFSSMFSISGNQPKNEESDEESLARDGEDYPSDAAGGDSDDNLQSPLISRQNTSLEKDLMPAPTQSSNLSMRHSSLMRADGGEQVSSSMGIGGGWQLAWKWSEKXGQDGKKEGGFKRIYLHQDSIPRSQRGSLVSVPGGEVPVDGEMTCAAALVSQPALYSKELMDQNPVGPAMVHPSETAIKGPSWRDLFKPGVKHALVVGVGIQILQQFSGINGVLYYTPQILEQAGVGVILSNIGISSASTSLLISAITTLLMLPCIAVAMRLMDISGRRSLLLSTIPVLIIALAILVLGSLVNMGDVVHAAISTASVIIYFCCFVMGFGPVPNILCAEIFPTRVRGLCIAICALSFWIGDIIVTYTLPLMLTSVGLAGVFGMYAXVCLISWVFVFLKVPETKGMPLEVISEFFAVGXSAGQKKN

SEQ ID NO: 9932 - DNA, 2223 bp, Vitis vinifera
  CDS (1)..(2223)
  misc_feature (1197)..(1197): r is g or a
  misc_feature (1767)..(1767): y is t or c
  misc_feature (1770)..(1770): y is t or c
  misc_feature (2001)..(2001): k is g or t
atgaacggagctgtgctagtggctattgcagccgcgattggtaactttctgcaaggatgggataatgctactattgcaggggctattgtttacataaagaaggagcttgatttggaaagcactgtagaagggcttgttgtggctatgtccctcattggagccacattggtcacaacatgctcaggagccatatcggattggattggtcggcgtccaatgttaatagtctcatcaatgctttattttatcagtggtttgataatgttatggtcaccaaatgtctatgttctacttatagctaggttacttgatggatttggaattggtctagcagttactcttgttcccatttatatatctgagactgccccagcagatataaggggatcattaaatactcttccacaattcactggttctggtggaatgtttttatcatactgcatggtttttgggatgtcattgttaagctcaccaagctggaggttaatgcttgggattctttcaattccatcccttctttattttgctttgacagtattttacttgcccgaatccccacggtggcttgtaagtaaaggaaggatggttgaggctaaaaaggttcttcaaagattacgtggcagggaagatgtttcagctgaaatggctttgctggttgagggtcttgggattgggggtgaaacatccatagaagagtacataatagggccaactggtgagcttactgaagatcaggatccagatgctgtgaaagaccaaatcaagttatatggacctgaagctggcctctcctgggttgccaaacctgttcctggtggacagagtacccttagtcttgtgtctcgccaaggaagcttggcaacccagactctgcctcttatggatcctctcgtcactctgttcggtagtgtccatgaaaagctccctgaaacgggaagtatgcgaagcatgctttttcccaattttggcagcatgttcagtacagcagatcctcagattaaaactgaacagtgggatgaagagagcctacagcaggaaggtgaagactacgcatcagatggtgggggagactctgaccatgatttgcaaagtccattaatatctcgccagacaagcagcatggaaaaggacatggtgccccctccttcccatagcagcataatgagcatgaggcgtcatagcagtctgatgcarggaactgctggtgaggcagctggtggtatgggaattggtggtggttggcagttggcatggaaatggtctgagagagaaggtgaagatggaaagaaggaaggaggatttaaaaggatttatttgcatgaggagggagtccccggatcccgacgtgggtctcttgtttcacttcctggtggagatgttcctgcagagggcgattatatccaggctgctgctctagtgagtcagcctgctctttactctaaggagcttatggatcaggatccagttggacctgcaatggttcacccagctgaaactgcttcaagagggccaatgtgggctgctcttcttgaaccaggagtcaagcatgcattgtttgtcggggccggaattcagatacttcagcagttctctggcatcaatggagttttgtactacactcctcagattcttgaggaggcaggtgttgaagttcttctcgagagcttggggcttggtacggagtctgcatcgttccttatcagtgcattcacaaccctcttgatgcttccttgtatagtcgtcgccatgaagctcatggatatygtyggcagaaggcgcctgctgctcactacaattcctgtgctgatcgtcacacttctcgtcctagtcatcggcgaccttgtgaccacgaccacagtgatccatgcagcgatctctactgcatgtgttatcatctatttctgctgttttgtgacggcgtatggaccaatccctaacatcctctgctctgagatcttccccacaagggtccgaggcctgtgcattgccatatgcgckctagtttactggattggggacatcatcgtcacctatacgttaccggtgatgctgacttcaatcgggttgacgggtatctttggaatttatgcagttgtgtgtgtgatttcttgggtgtttgtgttcttgaaggtgcccgagacaaaaggcatgccacttgaagtgattgctgagttctttgcagttggagcaaggcaggttactgcagcaaagaatgactga

SEQ ID NO: 9933 - protein, 740 aa, Vitis vinifera
MNGAVLVAIAAAIGNFLQGWDNATIAGAIVYIKKELDLESTVEGLVVAMSLIGATLVTTCSGAISDWIGRRPMLIVSSMLYFISGLIMLWSPNVYVLLIARLLDGFGIGLAVTLVPIYISETAPADIRGSLNTLPQFTGSGGMFLSYCMVFGMSLLSSPSWRLMLGILSIPSLLYFALTVFYLPESPRWLVSKGRMVEAKKVLQRLRGREDVSAEMALLVEGLGIGGETSIEEYIIGPTGELTEDQDPDAVKDQIKLYGPEAGLSWVAKPVPGGQSTLSLVSRQGSLATQTLPLMDPLVTLFGSVHEKLPETGSMRSMLFPNFGSMFSTADPQIKTEQWDEESLQQEGEDYASDGGGDSDHDLQSPLISRQTSSMEKDMVPPPSHSSIMSMRRHSSLMQGTAGEAAGGMGIGGGWQLAWKWSEREGEDGKKEGGFKRIYLHEEGVPGSRRGSLVSLPGGDVPAEGDYIQAAALVSQPALYSKELMDQDPVGPAMVHPAETASRGPMWAALLEPGVKHALFVGAGIQILQQFSGINGVLYYTPQILEEAGVEVLLESLGLGTESASFLISAFTTLLMLPCIVVAMKLMDIVGRRRLLLTTIPVLIVTLLVLVIGDLVTTTTVIHAAISTACVIIYFCCFVTAYGPIPNILCSEIFPTRVRGLCIAICALVYWIGDIIVTYTLPVMLTSIGLTGIFGIYAVVCVISWVFVFLKVPETKGMPLEVIAEFFAVGARQVTAAKND

SEQ ID NO: 9934 - DNA, 1953 bp, Vitis vinifera
  CDS (1)..(1953)
atgagtggagctgtgcttgtggcgattgctgctgctgtgggaaacttgttgcaaggatgggataacgctacgattgctggggctgttctatacatcaagaaggaattcaacttgcaaggtgaacccactgtagagggtctaattgtggccatgtctctcatcggagccacgttcatcactactatctctggagcagtatctgattggcttgggcgccgccctatgttgataatctcatccctattttattttgtcagtggccttgtgatgctgtggtctcccaatgtttatgtgctgctgttggcaaggcttctggatggatttggggttgggctgtcagttactattgttccggtctatatatctgagactgcaccctctgaaataaggggattgttgaataccctccctcagttcactggttctgttggaatgtttttgtcttactgcatggtttttgggatgtcactgatgaattcaccaagctggaggttaatgcttggggttctttttattccttccctcgtatatttggcattaacggtatttttgttgcctgagtctcctcggtggctagtcagtaaagggcgtatgctcgaggcgaagcatgtattgcagagactacgcggcagggaggatgtctctggtgagatggctttgctggtcgaaggtcttggagtcggtagtaaagcatctatagaggagtacataattggccctgatgatctcacagatgaccaggatccagctgctatgaatgatagaatcagattatatgggcctcaagaaggtctctcctggattgctaaacctgttactggccagagttctcttggccttgtgtctcgctgtggaagcatggaaaacaagccagtgccacttatggaccctcttgtgaccctctttggcagtgttcacgagaagcttcctgagacaggaagcatgcgaagcgtgatctttccaaactttagcagcatgttcagcatatcaggcaatcaacctaaaaatgaagaatcggatgaagagagccttgccagagatggtgaagattatccatctgatgctgctggtggtgattctgacgacaacttgcaaatcagtagtagcatgggaattggtggcgggtcaagatggaaagaaggaaggagcatccctcgatctcaacgcggatctttagtttctgttccaggtggtgagaatccagttggaccagctatggttcatccttctgaaactgctataaaagggccaagttggagagatctttttaaaccaggagtcaagcatgcactagttgttggggtggggattcagatacttcagcagttctctggcataaatggggttctgtactacactcctcaaattcttgagcaggcaggtgttggagttattctttcaaacataggcattagttcagcctctacatctctgcttatcagtgcaatcacaaccttgttgatgcttccttgcatagctgttgccatgaggctcatggatatttctggtagaaggagtctgctgctcagcacaatccctgtcctgataatagccctttccattcttgtccttggaagtttagtaaatatgggtgatgttgtgcatgctgcaatctcgactgctagtgtcatcatctacttctgttgctttgtcatgggatttgggccagtcccaaacatactctgtgcggagatctttcccacccgtgtccgaggcctatgcattgccatttgtgcactctcattttggattggtgacatcattgtaacctacacactgccattgatgctcacctctgttggccttgctggtgtctttggcatgtacgccgttgtgtgcctcatctcatgggtgttcgtcttcttgaaagtcccagaaaccaaaggcatgccccttgaagttatctctgagttctttgctgttggtgcaagtgctggacagaagaagaactga

SEQ ID NO: 9935 - protein, 650 aa, Vitis vinifera
MSGAVLVAIAAAVGNLLQGWDNATIAGAVLYIKKEFNLQGEPTVEGLIVAMSLIGATFITTISGAVSDWLGRRPMLIISSLFYFVSGLVMLWSPNVYVLLLARLLDGFGVGLSVTIVPVYISETAPSEIRGLLNTLPQFTGSVGMFLSYCMVFGMSLMNSPSWRLMLGVLFIPSLVYLALTVFLLPESPRWLVSKGRMLEAKHVLQRLRGREDVSGEMALLVEGLGVGSKASIEEYIIGPDDLTDDQDPAAMNDRIRLYGPQEGLSWIAKPVTGQSSLGLVSRCGSMENKPVPLMDPLVTLFGSVHEKLPETGSMRSVIFPNFSSMFSISGNQPKNEESDEESLARDGEDYPSDAAGGDSDDNLQISSSMGIGGGSRWKEGRSIPRSQRGSLVSVPGGENPVGPAMVHPSETAIKGPSWRDLFKPGVKHALVVGVGIQILQQFSGINGVLYYTPQILEQAGVGVILSNIGISSASTSLLISAITTLLMLPCIAVAMRLMDISGRRSLLLSTIPVLIIALSILVLGSLVNMGDVVHAAISTASVIIYFCCFVMGFGPVPNILCAEIFPTRVRGLCIAICALSFWIGDIIVTYTLPLMLTSVGLAGVFGMYAVVCLISWVFVFLKVPETKGMPLEVISEFFAVGASAGQKKN

SEQ ID NO: 9936 - DNA, 2292 bp, Zea mays
  CDS (1)..(2292)
atgcaaggggccgtgttggtggccatcgcggctgccatcggcaacctcttgcaggggttggacaacgcggccatcgccgccgcggtgctctacatcaagcgcgagttccacctggagacagatccagcactcgagggcgtcgtggttgccacctccctcttcggggcaacgatcgtcaccatcttctccggccccgtctccgacgtcatcggtcgccgcccgatgctcatcgtgtcctcgctgctctacttcgccggcgggctcctcatgctatggtccccgagtgtgccggtgctcctcgtggcgcgccttgtggacggcttcggcgtcgggctcgccgtcacgctcgtccccgtctacatctccgagacggcgccccctgaaatccggggtttcctcaacacactgccgcagttaacgggatccttgggcatgttcctttcctattgcatgatcttctacatgacgctgggcgatagccccagttggcggttcatgctcggcgtcctctccgtgccctccctcgcctacctcgcgctcaccgtgctctacctccccgagtcgccgcgctggctcgtcagcaagggccggatgaaggaggccagggccattctccagatgttgcgcggcagggaggacgtgtctggcgagatggcgctcctcgtcgagggcctcggcagcagcgacgacaccgtcatcgaggagtacgtgttgggcccggcggcagccggggacgagtcggagcacgagaccagggaccaggtcacgctgtatgggcccgagcaggggctgtcgtgggtggcgcagcaggtgcagggcgcgcgcagcagcgtgctcggcagcgccgtcgggctcgcgtcgcgccaggggagcatgtacgagcagatgaaggaccccgtggtgacgctgctggggagcgtccacgacaagatgcccgactctggcgccagtgccagggccagcacgctcttccccaacctcggcagcatgctcagcgtgacggagcggcacggtggcgactgggacgaggagaacgtgccgcccaacgacgacctcgacgacgatgaggacgaggaggagtacctctccgacgatgaggacgctggcgccggagcagcagcacgaggagggggaggaggaggaggcgcgctgcacgcgccgctgctgtcgaggcagagcacggacgttgacgtcaccagcggcacgagcaagaaggacggcagccacccgcctgagagcagccccatgcagaggtacagcagcattaccagcggggaggccgcgagcaccatgggcatcggcggtggctggcagctggcgtggaagtggacagagatggtcggggccgacggcgtgagacgcggtggcgtcaagaggatgtacctacatgaggaaggcggcggcgatggggactcatcggacccggcagggggttacgtgcacgcggcgtcgctggtgagcccgtccatcctctacaccaaggacgtgctcatcgggcagagcccgaccccggcgttcgacagcccgccgccggagacggtggccaacaaggcaggcggggggccctgttggagagagctcctggagccgggtgtcaggcgcgcgctcttctgtggcgtcatgattcagatcctgcagcagttgtctggcatcaatggtgtgatgtactacacgccccagatccttgaccaggccggtgtgagcgtcctgctctctagcctgggccttagcgccgactccgcgtccatcctcctcagcggcgtcaccatgctgatgatgctcccttgcatcgtcgtggccatgcgcctcatggacgtggccggccggcgctcgctgctgctgcggaccatcccggtgctgatcgtgtcgctggcggtgctggtgctggcgaacgtggtgcccatggcggccaaggtgcacgcgctgctttcaacggcctgcgtggtcgtgtacttctgctgcttcgtcatggggttcgggcccatccccaacatcctatgcgcggagatcttccccacgcgtgtcagggggatctgcatcgccgtgtgctccctcaccttctggatctgcgacatcatcgtcaccaactctctccctgtgatgctcagaaccatcggcctcgcgggtgtatttggctcctacgccttcgtctgctgcttgtcgctcgtcttcgtgtacctcagggtgcccgagaccaaggggttcccgctcgaggtcataatcgagttcttcaacgtgggtgccaaagctcagaagccggagcagcatgaagaggaggagaaccacgactaa

SEQ ID NO: 9937 - protein, 763 aa, Zea mays
MQGAVLVAIAAAIGNLLQGLDNAAIAAAVLYIKREFHLETDPALEGVVVATSLFGATIVTIFSGPVSDVIGRRPMLIVSSLLYFAGGLLMLWSPSVPVLLVARLVDGFGVGLAVTLVPVYISETAPPEIRGFLNTLPQLTGSLGMFLSYCMIFYMTLGDSPSWRFMLGVLSVPSLAYLALTVLYLPESPRWLVSKGRMKEARAILQMLRGREDVSGEMALLVEGLGSSDDTVIEEYVLGPAAAGDESEHETRDQVTLYGPEQGLSWVAQQVQGARSSVLGSAVGLASRQGSMYEQMKDPVVTLLGSVHDKMPDSGASARASTLFPNLGSMLSVTERHGGDWDEENVPPNDDLDDDEDEEEYLSDDEDAGAGAAARGGGGGGGALHAPLLSRQSTDVDVTSGTSKKDGSHPPESSPMQRYSSITSGEAASTMGIGGGWQLAWKWTEMVGADGVRRGGVKRMYLHEEGGGDGDSSDPAGGYVHAASLVSPSILYTKDVLIGQSPTPAFDSPPPETVANKAGGGPCWRELLEPGVRRALFCGVMIQILQQLSGINGVMYYTPQILDQAGVSVLLSSLGLSADSASILLSGVTMLMMLPCIVVAMRLMDVAGRRSLLLRTIPVLIVSLAVLVLANVVPMAAKVHALLSTACVVVYFCCFVMGFGPIPNILCAEIFPTRVRGICIAVCSLTFWICDIIVTNSLPVMLRTIGLAGVFGSYAFVCCLSLVFVYLRVPETKGFPLEVIIEFFNVGAKAQKPEQHEEEENHD

SEQ ID NO: 9938 - DNA, 2157 bp, Oryza sativa subsp. indica
  CDS (1)..(2157)
atggcgggcgccgtgctggtcgccatcgcggcctccatcggcaacttgctgcagggctgggataatgcaaccattgcaggtgcggtactgtacatcaagaaggaattcaacttgcagagcgagccccttatcgaaggcctgatcgtggctatgtcgctcattggggcgacgatcatcacgacgttctctggagcagtggctgattcttttggtaggcggcccatgctgatcgcgtcggctgtcctctactttgttagtgggctagtgatgctttgggcgccaaatgtgtatgtgttgctcttggcgaggctcattgacgggttcgggatcggtttggctgtcacgcttgtaccattgtacatctctgagactgccccgacggacatcagaggactgctaaacacgctgccgcagttcagtgggtctggagggatgttcctttcatactgcatggtatttggcatgtccctcatgccacagccagattggaggatcatgcttggcgttctatcgataccatcacttatatactttgcattgaccatcttttacttacctgaatcgccgaggtggctcgtgagcaaaggaagaatggctgaggccaagcgtgtgttgcaaggcctgcgtggaagagaagatgtttcaggagaaatggcccttctcgttgaaggtctggggggctggctccagatccagagaagatcaactgtatgtcctgaagaaggcttatcgtgggttgcccgtcctgttcacgggcaaagtgcacttggaagtgcattaggtctcatctctcgtcatggtagtatggtcagtcagggtaagccccttgtggatcctgttgtcaccctttttggaagtgtccatgagaagatgcctgagataatgggaagcatgcggagcacattgtttcctaactttggcagcatgtttagtgtggcggaacagcagcaagctaaaggtgattgggatgctgagagtcaaagggagggtgaagattatggatcagaccatggtggggatgacattgaagatagcctccaaagcccacttatttctcgtcaagcgacaagcgtggaaggaaaggagatcgctgcacctcatggcagtataatgggtgctgtgggaagaagtagtagtctcatgcagggtggggaggcagtaagcagcatgggcattggtgggggatggcagttggcttggaaatggactgagagagaaggtgcagatggcgaaaaagaaggtggcttccaacgtatctacttgcatgaagagggtgtgacaggtgatcgcaggggctctatactgtcattgcctggaggtgatgttcctcctggtggtgagttcgtccaggcagctgctcttgtcagccaacctgctctttactctaaggaattgatggagcaacgccttgctggccctgctatggtgcatccatctcaggcagttgctaaaggtccaaaatgggcagacttattcgaacctggagtgaagcatgctctgtttgttggcatagggatacaaatcctgcaacagtttgctggcattaatggagttctgtactacactccacaaattcttgagcaagctggtgttggtgttcttcttgcaaacattggacttagctcctcatccgcatctattcttattagtggactgacaaccttgctgatgcttcccagcattggtattgctatgaggctcatggatatgtctggaagaaggtttcttctccttgcaacaatccctatcctgatagtagcactagctatcttgattctggtcaatattctggatgtggggaccatggttcatgcctcactgtccacagtcagtgtcatactctacttctgcttctttgtcatggggttcgggcctattccaaacattctctgtgcagagattttcccgaccaccgttcgtggcatctgcatagccatctgtgctctaacattctggatcggtgatatcattgtgacatacaccctccccgtgatgctcaacgccattggactcgctggagtgtttggaatctacgcagtggtctgcatactggctttcctgtttgtcttcatgaaggtgccggagacaaagggcatgcctcttgaagtcatcaccgagttcttctctgtcggagcaaagcaggccaaggaggactag

SEQ ID NO: 9939 - protein, 718 aa, Oryza sativa subsp. indica
MAGAVLVAIAASIGNLLQGWDNATIAGAVLYIKKEFNLQSEPLIEGLIVAMSLIGATIITTFSGAVADSFGRRPMLIASAVLYFVSGLVMLWAPNVYVLLLARLIDGFGIGLAVTLVPLYISETAPTDIRGLLNTLPQFSGSGGMFLSYCMVFGMSLMPQPDWRIMLGVLSIPSLIYFALTIFYLPESPRWLVSKGRMAEAKRVLQGLRGREDVSGEMALLVEGLGGWLQIQRRSTVCPEEGLSWVARPVHGQSALGSALGLISRHGSMVSQGKPLVDPVVTLFGSVHEKMPEIMGSMRSTLFPNFGSMFSVAEQQQAKGDWDAESQREGEDYGSDHGGDDIEDSLQSPLISRQATSVEGKEIAAPHGSIMGAVGRSSSLMQGGEAVSSMGIGGGWQLAWKWTEREGADGEKEGGFQRIYLHEEGVTGDRRGSILSLPGGDVPPGGEFVQAAALVSQPALYSKELMEQRLAGPAMVHPSQAVAKGPKWADLFEPGVKHALFVGIGIQILQQFAGINGVLYYTPQILEQAGVGVLLANIGLSSSSASILISGLTTLLMLPSIGIAMRLMDMSGRRFLLLATIPILIVALAILILVNILDVGTMVHASLSTVSVILYFCFFVMGFGPIPNILCAEIFPTTVRGICIAICALTFWIGDIIVTYTLPVMLNAIGLAGVFGIYAVVCILAFLFVFMKVPETKGMPLEVITEFFSVGAKQAKED

SEQ ID NO: 9940 - DNA, 1977 bp, Oryza sativa subsp. indica
  CDS (1)..(1977)
atgatgaagtcaacggtattttctgcggttgctgtttctattggttatacattacttggatgggattttacaaccgttttggaggctaatatccacatgaagaaggaatttggtttgaacaatggaccttctattgatggaataattttagcagtttcagttttcgggtctatcgcaatcacagtattctctggattgctattagattggcttggcagacgtgctgcactgatttactcttctctgctattgatttccggtggccttctaatggtgtggtctcctaacatatacattctacttctagctaggcttattgttggatcaggaagtggtctggttttcacctgtgttccgatttatatatctgaaacatctcctccaaatatgaggggatcactgggaactatgccacagttcatgttctttgtaggaatagtcttctcctattgcctgatattctggatgacactgataccttcacctaactggagaattatgatcggcgcaatctttgctccttccttggtctactttgctttattggtgttctacttgccagagtcacctagatggcttgtaagcgatggaaaaattagtgaggcccgaatttccttacagtggcttagagggaaagatgatgtatcagatagatctgcaggagaaatagctcttattgcggatggtatgaacatgataacggaaacagctgttggaggacatgctgttggtgctgttcgaagtcaaagttttcttggaactagcacaaaccagatgtcgcgccatagtactttctattggcacctgtcagatccattagttgatcttcttggaagcatccatgagagtatgtcggaattaggagctggacgaaacagctacttccctgtcttcaacagttttaatattgtggaacaagaacgggcgagtgagcagagggggaatgatagtcttcaacaatctagggaggcatattctgctgaagaaggcaataatggagataatttgcaagcttctctactttcccaagtagcaagtgctgaaacaaacgatataaatacatcattcacctctgaagggagctcttcatatttgagaagacatggtacatcaacatcagggcttgcgcaagatttaatatcttctttgcatgatcatgacattgaagaagatgacgaagaaatccatatagcagcattgtctagccagcctgcacttggttcaggactacatccatttcgacaacaaattgtccgattgtctgaaacagctgacataaagcctaaatggagggtacttcttcagccaggagtcaggcatgccttgtgttatggtatgctgattcaagctcttcagcagtctgcaggaatcagtggccttctccgatacactcctcaaattcttgaacaggtcggagtaattagtttgttttcagacattggacttgattcccattcagcatcgatcctcataagtgttcttaatgcttcgctgatgctcccctgtataactgttgcaatgatactgatggatgtctgtggaagaagggttcttctcctggtcagtatccccttcctaacattatcagtcggtgccatatctttgtccaacatcgtgaagatgggatctttgccacatgaaatcctcttccagctctcattaaccatttgcttctgctcatatgtcatcggtctggggccaatacccaatattctctgctccgagatgttcccaacaagggcccgtgcaacatgtgcaagtttttgctcacttgccttctggtttggcagactactttcaatttactgcttcccggtgatgctaagtaccattgggctcagtggggcatgtgcgatttatgcattcgtgtgctgcttggttctcgtgttcgtctacttaagagttccagagacgaagggtcttcccttggagctcatagctgagattttcaagttctcaagacaagaatgtctatag

SEQ ID NO: 9941 - protein, 658 aa, Oryza sativa subsp. indica
MMKSTVFSAVAVSIGYTLLGWDFTTVLEANIHMKKEFGLNNGPSIDGIILAVSVFGSIAITVFSGLLLDWLGRRAALIYSSLLLISGGLLMVWSPNIYILLLARLIVGSGSGLVFTCVPIYISETSPPNMRGSLGTMPQFMFFVGIVFSYCLIFWMTLIPSPNWRIMIGAIFAPSLVYFALLVFYLPESPRWLVSDGKISEARISLQWLRGKDDVSDRSAGEIALIADGMNMITETAVGGHAVGAVRSQSFLGTSTNQMSRHSTFYWHLSDPLVDLLGSIHESMSELGAGRNSYFPVFNSFNIVEQERASEQRGNDSLQQSREAYSAEEGNNGDNLQASLLSQVASAETNDINTSFTSEGSSSYLRRHGTSTSGLAQDLISSLHDHDIEEDDEEIHIAALSSQPALGSGLHPFRQQIVRLSETADIKPKWRVLLQPGVRHALCYGMLIQALQQSAGISGLLRYTPQILEQVGVISLFSDIGLDSHSASILISVLNASLMLPCITVAMILMDVCGRRVLLLVSIPFLTLSVGAISLSNIVKMGSLPHEILFQLSLTICFCSYVIGLGPIPNILCSEMFPTRARATCASFCSLAFWFGRLLSIYCFPVMLSTIGLSGACAIYAFVCCLVLVFVYLRVPETKGLPLELIAEIFKFSRQECL

SEQ ID NO: 9942 - DNA, 2220 bp, Ricinus communis
  CDS (1)..(2220)
atgaaaggagctgtacttgtggctattactgcttgcattggcagcttcttgcaaggatgggataatgctactattgctggagctattgtttacatcaagaaagacctcaatttgcaaacaacagtggaaggtctagttgtggccatgtcgcttattggagccactacaatcacaacgtgctcaggagcaatatcagattggcttggtcggcgtccaatgctaataatttcatcaacactttactttgtcagtggtttaataatgttgtggtctccagatgtctatgtcctatgcatagcaaggctattagatggatttgcaattgggttagctgttaccctcgttccagtgtatatatctgagactgccccgtcagaaataagggggatgttaaatacacttcctcagtttactggttcaggcggcatgtttctgtcatactgtatggtttttgggatgtcattgacatcctcgcctagttggaggttgatgcttggggttctttcaataccttccctaatatattttgcattgaccatattttatttgcctgaatcccctcgatggcttgtgagcaaagggaagatgctcgaggcaaaacgggttctgcagagattgcgtggaagggaagacgtttcaggtgagatggccttgctggttgaaggtcttggtattgggggtgaaacatccatagaagagtatataataggcccgggagatgaacttcctgacgatcacgaacccactgctgagaaagatagaatcaaattatatggacccgaagcaggtctttcctgggtcgctaaacctgtgactggacaaagttctcttgctcttgtatctcggcatggaagcatggtgaacaaaagtgtgccacttatggatcctcttgtgactctttttggcagtgttcatgagaagcttcctgaaacaggaagcatgcgaagcatgcttttccctaattttggtagcatgtttagtacagcagagcctcatgctaagcatgaacactgggatgaagagagcctacagagggaaggtgagggctacacatcagaagctgcaggggaagactcagatgataatttacatagtccattgatctcacgtcagacaacaagcatggaaaaggatatgcctccccctccttcccatggcagcattctgagcatgagacgccatagcagtctcatgcaaggaactggtgaggcagtgagtagtacaggcattggtggtggttggcagttggcttggaaatggtctgagagagaaggtgaagatggaaagaaggaaggaggatttaaaagggtgtatttgcaccaggaaggtgcccctggatctcgtcgaggttctcttgtttcatttccaggcggtgatgttcctgcagaaggtgagtatgtgcaggctgctgctctggtaagtcagcctgctctttattccaaggagcttctggatcagcatccagttggacctgcaatggttcacccagctgaaactgctaagaaggggccaatttgggctgctttacttgatccaggagttaagcgtgcattaattgttgggattgggattcaaattcttcagcagttttccggtataggtggtatcctctactacactcctcaaattcttgaagaggcaggtgttgaagtccttcttgcaaaccttggcattggtacagagtctgcatcattccttatcagtgcattcacaacattcctgatgcttccttgtatagctgtaggcatgaggctaatggatgtctcaggcagaagggcgctgctactgaccacaatccctgtgcttataggttcgcttgtcatcctaatcattggtgaatctatagacttgggcacagttgccaatgcagcagtttcaaccgcctgtgttgtcatctatttctgttgttttgttacggcttatggaccgattccaaatatcctatgctctgagatcttccccacaagagttcgtggtctctgcattgcaatctgtgccttagtttactggatagcagatatcattgttacctacacactgcctgtaatgctaacttcaattggcctggagggaatctttatcatttttgctgtcatgtgtgccatctcttgggtcttcgtcttcttgaaggttccagaaaccaaaggcatgccccttgaagtcattacagagttctttgctgttggtgcaagacaagctgatgctgccaagaacgagtaa

SEQ ID NO: 9943 - protein, 739 aa, Ricinus communis
MKGAVLVAITACIGSFLQGWDNATIAGAIVYIKKDLNLQTTVEGLVVAMSLIGATTITTCSGAISDWLGRRPMLIISSTLYFVSGLIMLWSPDVYVLCIARLLDGFAIGLAVTLVPVYISETAPSEIRGMLNTLPQFTGSGGMFLSYCMVFGMSLTSSPSWRLMLGVLSIPSLIYFALTIFYLPESPRWLVSKGKMLEAKRVLQRLRGREDVSGEMALLVEGLGIGGETSIEEYIIGPGDELPDDHEPTAEKDRIKLYGPEAGLSWVAKPVTGQSSLALVSRHGSMVNKSVPLMDPLVTLFGSVHEKLPETGSMRSMLFPNFGSMFSTAEPHAKHEHWDEESLQREGEGYTSEAAGEDSDDNLHSPLISRQTTSMEKDMPPPPSHGSILSMRRHSSLMQGTGEAVSSTGIGGGWQLAWKWSEREGEDGKKEGGFKRVYLHQEGAPGSRRGSLVSFPGGDVPAEGEYVQAAALVSQPALYSKELLDQHPVGPAMVHPAETAKKGPIWAALLDPGVKRALIVGIGIQILQQFSGIGGILYYTPQILEEAGVEVLLANLGIGTESASFLISAFTTFLMLPCIAVGMRLMDVSGRRALLLTTIPVLIGSLVILIIGESIDLGTVANAAVSTACVVIYFCCFVTAYGPIPNILCSEIFPTRVRGLCIAICALVYWIADIIVTYTLPVMLTSIGLEGIFIIFAVMCAISWVFVFLKVPETKGMPLEVITEFFAVGARQADAAKNE

SEQ ID NO: 9944 - DNA, 2223 bp, Ricinus communis
  CDS (1)..(2223)
atgagcggagctgtgcttgtagctgttgctgctgcagttggaaatctattgcaaggatgggataatgcaaccattgcaggggctgttttgtatataaagagggaatttaatttggaaagtgaaccaactatagaaggtttgattgtggctacgtcacttattggagccactttgataactacatgttctggagccatatcagactggcttggtcgccggcctatgttaataatctcttctgtgctttattttcttagtggtgttgtgatgttatggtctccgaatgtttatattttgctgttggcaaggcttttggatggatttggtattggcttggcagtaactcttgtgccagtttacatatctgaaactgcaccacctgaaatcaggggcttgttgaataccctccctcagttcactggatctggtggcatgtttttgtcatattgtatggtgtttggaatgtcattaacaactgctccaagttggagattgatgcttggggttctttttattccctccctcatttatttggctttgactctattttacttgcccgagtctccaaggtggcttgtgagtaaaggacgaatgcttgaggccaagagggttttgcagaggcttcgtggcagggaagatgtatctggtgagatggctttactggttgaaggacttggagttgggggtgaaacctcaatagaggagtacataattggccctgccaatgaagtggttgatgaccaagatatatctgtggataaagatcacgtgaagttatatgggcctgaagaaggtctcagctgggttgccaaacctgttacagggcagagcactattggtcttgtgtctcggcgtggaagcttggcaaaccagagtatgccactcatggatcctctagtcaccctctttggcagtgtgcatgaaaagctacctgagacaggtagcatgagaagtatgctttttccacacttcggcagcatgttcagtgtgggagggaatcaggctagaaatgaagagtgggatgaggagagccaaacgagggaaggtgaggattatcaatctgatgctggtggcggagattctgatgataatttggagagtccattaatttcacgtcagacaacaagcatggacaaggacttggtcccacatgcccatggaagcctttcaagcatgagacatggcagtcttatgcaaggaaatgctggagaacctgttggtagtgctgggattggtggtggctggcagttagcatggaaatggtctgagagggaaggccaagatggaaagaaggaaggaggctttaaaagaatttatttgcatcaagaaggtgtccctggttctcggcgtggatctttggtgtcgcttcatggtggtgatgcccctgcagaaggtgaatttatccaggctgctgctttggttagccaaccagctctcttttccaaggagcttgtcaatcaacatccggttggaccagctatgattcacccatctgaaactgcagctaaaggccctagttggaatgatctctttgaaccaggagtaaagcatgcattggttgttggggttggacttcaaatacttcagcagttctctggcataaatggtgttctctattacactcctcaaattcttgagcaggcaggtgtcggagttcttctttcagacttgggcattagttccgcttctgcatctctgctaattagtgcaattacaacactattaatgctcccctgtattgctgttgccatgaggctcatggatatctctgggagaaggagtttgttgctttgcacaatccctgtcttgatagtctctctgcttgtcctagttcttggaagtgcagtgaatttgggcagtgtcattaacgcatctatctcaactgctagcgtgatagtctatttctgttgctttgttatgggatttgggccaattcctaacatactctgtgctgaaatcttccccactcgtgtccgtggcctctgcattgccatatgtgccctcacattttggatcggtgacataattgttacctactcactcccagttatgctcaaatccattggtcttgctggtgttttcgggttgtatgcagttgtgtgcatcatatcattggtatttgtttacttaaaagttccagaaaccaaagggatgccccttgaagtaataactgagttcttttctgtcggtgcgaggcaggctgcggctgccaaggacaactga

SEQ ID NO: 9945 - protein, 740 aa, Ricinus communis
MSGAVLVAVAAAVGNLLQGWDNATIAGAVLYIKREFNLESEPTIEGLIVATSLIGATLITTCSGAISDWLGRRPMLIISSVLYFLSGVVMLWSPNVYILLLARLLDGFGIGLAVTLVPVYISETAPPEIRGLLNTLPQFTGSGGMFLSYCMVFGMSLTTAPSWRLMLGVLFIPSLIYLALTLFYLPESPRWLVSKGRMLEAKRVLQRLRGREDVSGEMALLVEGLGVGGETSIEEYIIGPANEVVDDQDISVDKDHVKLYGPEEGLSWVAKPVTGQSTIGLVSRRGSLANQSMPLMDPLVTLFGSVHEKLPETGSMRSMLFPHFGSMFSVGGNQARNEEWDEESQTREGEDYQSDAGGGDSDDNLESPLISRQTTSMDKDLVPHAHGSLSSMRHGSLMQGNAGEPVGSAGIGGGWQLAWKWSEREGQDGKKEGGFKRIYLHQEGVPGSRRGSLVSLHGGDAPAEGEFIQAAALVSQPALFSKELVNQHPVGPAMIHPSETAAKGPSWNDLFEPGVKHALVVGVGLQILQQFSGINGVLYYTPQILEQAGVGVLLSDLGISSASASLLISAITTLLMLPCIAVAMRLMDISGRRSLLLCTIPVLIVSLLVLVLGSAVNLGSVINASISTASVIVYFCCFVMGFGPIPNILCAEIFPTRVRGLCIAICALTFWIGDIIVTYSLPVMLKSIGLAGVFGLYAVVCIISLVFVYLKVPETKGMPLEVITEFFSVGARQAAAAKDN

SEQ ID NO: 9946 - DNA, 2223 bp, Vitis vinifera
  CDS (1)..(2223)
atgaacggagctgtgctagtggctattgcagccgcgattggtaactttctgcaaggatgggataatgctactattgcaggggctattgtttacataaagaaggagcttgatttggagagcactgtagaagggcttgttgtggctatgtccctcattggagccacattggtcacaacatgctcaggagccatatcggattggattggtcggcgtccaatgttaatagtctcatcaatgctttattttatcagtggtttgataatgttatggtcaccaaatgtctatgttctacttatagctaggttacttgatggatttggaattggtctagcagttactcttgttcccatttatatatctgagactgccccagcagatataaggggatcattaaatactcttccacaattcactggttctggtggaatgtttttatcatactgcatggtttttgggatgtcattgttaagctcaccaagctggaggttaatgcttgggattctttcaattccatcccttctttattttactttgacagtattttacttgcccgaatccccacggtggcttgtaagtaaaggaaggatggttgaggctaaaaaggttcttcaaagattacgtggcagggaagatgtttcagctgaaatggctttgctggttgagggtcttgggattgggggtgaaacatccatagaagagtacataatagggccaactggtgagcttactgaagatcaggatccagatgctgtgaaagaccaaatcaagttatatggacctgaagctggcctctcctgggttgccaaacctgttcctggtggacagagtacccttagtcttgtgcctcgccaaggaagcttggcaacccagactctacctcttatggatcctctcgtcactctgttcggtagtgtccatgaaaagccccctgaaacgggaagtatgcgaagcatgctttttcccaattttggcagcatgttcagtacagcagatcctcagattaaaactgaacagtgggatgaagagagcctacagcaggaaggtgaagactacgcatcagatggtgggggagactctgaccatgatttgcaaagtccattaatatctcgccagacaagcagcatggaaaaggacatggtgccccctccttcccatagcagcataatgagcatgaggcgtcatagcagtctgatgcaaggaactgctggtgaggcagctggtggtatgggaattggtggtggttggcagttggcatggaaatggtctgagagagaaggtgaagatggaaagaaggaaggaggatttaaaaggatttatttgcatgaggagggagtccccggatcccgacgtgggtctcttgtttcacttcctggtggagatgttcctgcagagggcgattatatccaggctgctgctctagtgagtcagcctgctctttactctaaggagcttatggatcaggatccggttggacctgcaatggttcacccagctgaaactgcttcaagagggccaatgtgggctgctcttcttgaaccaggagtcaagcatgcattgtttgtcggggccggaattcagatacttcagcagttctctggcatcaatggagttttgtactacactcctcagattcttgaggaggcaggtgttgaagttcttctcgagagcttggggcttggtacggagtctgcatcgttccttatcagtgcattcacaaccctcttgatgcttcctagtatagtcgtcgccatgaagctcatggatatcgttggcagaaggcgcatgctgctcactacaattcctgtgctgatcgtcacacttctcgtcctagtcatcggcgaccttgtgaccacgaccacagtgatccatgcagcgatctctactgcatgtgttatcatctatttctgctgttttgtgacggcgtatggaccaatccctaacatcctctgctctgagatcttccccacaagggtccgaggcctgtgcattgccatatgcgctctagtttactggattggggacatcatcgtcacctatacgttaccggtgatgctgacttcaatcgggttgacgggtatctttggaatttatgcagttgtgtgtgtgatttcttgggtgtttgtgttcttgaaggtgcccgagacaaaaggcatgccacttgaagtgattgctgagttctttgcagttggagcaaggcaggttactgcagcaaagaatgactga

SEQ ID NO: 9947 - protein, 740 aa, Vitis vinifera
MNGAVLVAIAAAIGNFLQGWDNATIAGAIVYIKKELDLESTVEGLVVAMSLIGATLVTTCSGAISDWIGRRPMLIVSSMLYFISGLIMLWSPNVYVLLIARLLDGFGIGLAVTLVPIYISETAPADIRGSLNTLPQFTGSGGMFLSYCMVFGMSLLSSPSWRLMLGILSIPSLLYFTLTVFYLPESPRWLVSKGRMVEAKKVLQRLRGREDVSAEMALLVEGLGIGGETSIEEYIIGPTGELTEDQDPDAVKDQIKLYGPEAGLSWVAKPVPGGQSTLSLVPRQGSLATQTLPLMDPLVTLFGSVHEKPPETGSMRSMLFPNFGSMFSTADPQIKTEQWDEESLQQEGEDYASDGGGDSDHDLQSPLISRQTSSMEKDMVPPPSHSSIMSMRRHSSLMQGTAGEAAGGMGIGGGWQLAWKWSEREGEDGKKEGGFKRIYLHEEGVPGSRRGSLVSLPGGDVPAEGDYIQAAALVSQPALYSKELMDQDPVGPAMVHPAETASRGPMWAALLEPGVKHALFVGAGIQILQQFSGINGVLYYTPQILEEAGVEVLLESLGLGTESASFLISAFTTLLMLPSIVVAMKLMDIVGRRRMLLTTIPVLIVTLLVLVIGDLVTTTTVIHAAISTACVIIYFCCFVTAYGPIPNILCSEIFPTRVRGLCIAICALVYWIGDIIVTYTLPVMLTSIGLTGIFGIYAVVCVISWVFVFLKVPETKGMPLEVIAEFFAVGARQVTAAKND

SEQ ID NO: 9948 - DNA, 2238 bp, Saccharum hybrid cultivar
  CDS (1)..(2238)
atgtcgggagctgctcttgttgcaatagtagcttcgatcggcaatctgcttcaggggtgggacaatgccaccatctcagctgctctattatatataaagaaggaattcaaactagaaagtgagcctactgtggaggggctgattgtggccatgtcactaattggagcaactatcattacaacattctctggaccagtatcagactggattggccggctccctatgctcatcctctcttcagttctgtactttgttagcagcctcattatgctatggtccccgaatgtctatgtactactgctggcacgtcttataaatggattcggtgtcggcttggctgtcactcttgttcctctgtacatttcagaaacagctcctccagagataagaggtttgctgaatacactgccacagttcagtgggtcaggggggatgtttttgtcgtactgcatggtgttcgggatgtcactgctgccatcacctgattggaggattatgcttggggttctcgcgttaccttcattgtttttctttggtttgacaatattttatctgcctgaatcaccaagatggcttgtcagcaaagggcgaatggcagaggcaaagaaggtgttgcaaagattacgtgggaaggatgacgtcacaggcgaaatggctcttcttgttgaagggttggaggtcggaggggataccttcattgaagagtacatcattggtcctgctatcgaaccagctgatgaccacgtcgctgatggtgatagagaacgaataatactatttgggcctgaagagggccaatcatggatagctcggccttccaaagggtccagcatgcttggaagtgtgctttctatcggatctcgtcatggcagcatggtgaaccaaaatttaccccttacggatcctattgtcacgctttttgggagtgtccatgagaacatctctctcgctggaggaagtatgaggagaatagtgccttctaaatttgacagtatgatcagtatcacagatcagcaccccaagaccgagcagtgggatgaggagaacctccatagggataatgaggagtatgcaactgatggtgctgcaagtgactatgaaaacaatgtacacagccctctgctgtcccgacagaatacaagtgccgaagggaagggcattgcacatcacgggcaccgtggaagtgctttgggtttgagaagaagaagcctgtccgatgagggtggtgaggcagcaaccagcactggcattggtggcggatggcagctcgcctggaaatggtcagagcgagaaggtgaggacggtaagaaggaagggagtttcaaaagaatctacttacaccaagagggagttgctggctcaagaaggggatctgttgtctcacttcctggtggaggtgatgcctctgaaggtggtaagttcatacatgctgctgctctggtcagccagtcagctctttacccgagggatattacagaacagcgcatggccggtccagctacaatgcacccatcagaggcagctgccaaagttccaagctggagagacctgtttgaacctggtgtgagacgtgccctgttggttggtattggaattcagatccttcaacagttcgcgggaataaatggggttctctactacactccgcaaattatggagcaagctggtgtggcagttcttatttccaatcttggtctcagttcggcatcagcatccatcctaattagttctgtcactgccctacttatgctccctagcattggtttagccatgagacttatggacgtatctggaagaaggtttctgctgctaagcacaattccagtcttgatagcatctttaattgtcctggttgtgtctaatgttatcgagttgggtacagtggtccatgctgtgctctccacaattagtgtcatcacctacttatgctgcttcaaaatgggctttggccccattcccaacattctatgtgcagagttttttccaaccagggttcgtggcatctgcattgccatctgtgccttgatattttgggttggagacattattgtcacatacagtcttcctgtgatgctgaatgctattggtctagaaggcgtgtttggcatatacgcagttgcctgtgccattgcctttgtgtttgtctatcttaaggttccggagacaaagggcatgccccttgaggtcatcactgagttctttgcagttggtgcaaagcaagcggttgcaaaggcctag

SEQ ID NO: 9949 - protein, 745 aa, Saccharum hybrid cultivar
MSGAALVAIVASIGNLLQGWDNATISAALLYIKKEFKLESEPTVEGLIVAMSLIGATIITTFSGPVSDWIGRLPMLILSSVLYFVSSLIMLWSPNVYVLLLARLINGFGVGLAVTLVPLYISETAPPEIRGLLNTLPQFSGSGGMFLSYCMVFGMSLLPSPDWRIMLGVLALPSLFFFGLTIFYLPESPRWLVSKGRMAEAKKVLQRLRGKDDVTGEMALLVEGLEVGGDTFIEEYIIGPAIEPADDHVADGDRERIILFGPEEGQSWIARPSKGSSMLGSVLSIGSRHGSMVNQNLPLTDPIVTLFGSVHENISLAGGSMRRIVPSKFDSMISITDQHPKTEQWDEENLHRDNEEYATDGAASDYENNVHSPLLSRQNTSAEGKGIAHHGHRGSALGLRRRSLSDEGGEAATSTGIGGGWQLAWKWSEREGEDGKKEGSFKRIYLHQEGVAGSRRGSVVSLPGGGDASEGGKFIHAAALVSQSALYPRDITEQRMAGPATMHPSEAAAKVPSWRDLFEPGVRRALLVGIGIQILQQFAGINGVLYYTPQIMEQAGVAVLISNLGLSSASASILISSVTALLMLPSIGLAMRLMDVSGRRFLLLSTIPVLIASLIVLVVSNVIELGTVVHAVLSTISVITYLCCFKMGFGPIPNILCAEFFPTRVRGICIAICALIFWVGDIIVTYSLPVMLNAIGLEGVFGIYAVACAIAFVFVYLKVPETKGMPLEVITEFFAVGAKQAVAKA

SEQ ID NO: 9950 - DNA, 2262 bp, Hordeum vulgare
  CDS (1)..(2262)
atgcggcggggagggtggaggtcctggcgaggttgccgagggtggcgagcgcggcggtcctcccgtctgcggcgaggatggaggaggcggcgcgcgggggcgggggcgggggcgaggaaagacctggcggccttgcaggcggagtggaagagcttggaggaggaggagctcgtcatggcggcggcggcgaaactcgtcttccttgcgtccaacgtgatgctctgggcgcccaacgtctatgtgttgctcttggccaggctcatcgacgggttcggtatcggtttggcagtcacccttgtccctctgtacatttcggagaccgccccgactgacattagagggctgctgaacacgctgccgcagttcagtgggtcaggagggatgttcctttcttactgcatggtgtttaccatgtccctcatgccgcagcctgactggagaatcatgctgggggttttgtcgatcccgtcgcttatgtattttgcattgactgtcttttatttgcccgaatctcccagatggcttgtgagcaagggaagaatggctgaggccaagcgagtattgcaaagactgcggggaagggaagatgtctcaggagagatggcccttcttgttgaaggattgggtgttggaaagacacacattgaggaatacataattggacctgatgatgagctggctgatgacgggctggctccagatcaagagaagttgaaactctatggagctgaagaaggggtatcttggatcgcccgtcctgttaggggtggcggccaaagtgcacttggaagcgctttgggcctcatgtctcgtcatgggagtatggttagtcagggtaaatctcttgttgacccccttgtcactctcttcggaagtgtccatgagaagatgcctgaggtaatggggagcatgcggagcaccttgtttcctaactttggcagcatgtttagtgtggctgaacagcagcaggctaaagctgactgggatgctgagagtcatagggatgatgaagattatgcatcggatcatggtgctgatgacattgaggataacctcaatagcccgcttatttctcgtcaagcgacaagcgtggagggtaaggagattgctgcacctcatggaagcataatgggtggtgtggaaagtagtagcatgcagggaggggacgcagtaagcagcatgggcattggtgggggttggcagttagcttggaagtggactgagagagaaggtgcagatgggcgaaaagaaggtggcgcccagcgtatttacttgcatgaggagggtgtgtcaggtgatcggagaggctctatattgtctatgccaggaggtgatattcctcctggtggtgagtatatccaggcagccgctcttgtgagccaacctgctctttactcgaaggacctgatagagcagcagcttgctggtccagccatggtacatccatccgaggcagttgccaagggtacaaagtgggcagaactatttgaacctggagtgaagcatgcactgtttgttggcattggattacagatcctgcagcagtttgcgggtatcaacggagtcctgtattacacgcctcagatacttgagcaagcaggtgttgggattcttctatcaaacattggactaagctcttcctctgcatctattcttattagtgccttgacaaccttgctgatgcttggttacatttcagaccgaattggtgcaagagctattacggctgcgagtttcatgtactgctcaattccagctttgttcttctaccgtagagctatcttggttttggtgaatgttctggatgtgggaaccatggtgcacgccgctctctcaacgatcagtgtcatagtctacttctgcttcttcgtcatgggtccaatcccggaaggatccacaagctcggtcaagattgatacagatagagcgaacgcagcatcgctcgctaaagcattactaaccttctggattggtgacatcatcgtgacatacactcttcccgtgatgctcaacgccatcggactcgctggagttttcggaatatatgctgtcgtttgcatgatagccttcgtattcgtctacatgaaggtccctgagacaaagggcatgcccctggaggtcatcaccgagttcttctcggtcggggcgaagcagggcaaggaagccacagacgaagtagcggagaagatagctgagtctaggccatcggaagaatgtagatctccggtggactatgtccaagatcatgtgatggaagtgtga

SEQ ID NO: 9951 - protein, 753 aa, Hordeum vulgare
MRRGGWRSWRGCRGWRARRSSRLRRGWRRRRAGAGAGARKDLAALQAEWKSLEEEELVMAAAAKLVFLASNVMLWAPNVYVLLLARLIDGFGIGLAVTLVPLYISETAPTDIRGLLNTLPQFSGSGGMFLSYCMVFTMSLMPQPDWRIMLGVLSIPSLMYFALTVFYLPESPRWLVSKGRMAEAKRVLQRLRGREDVSGEMALLVEGLGVGKTHIEEYIIGPDDELADDGLAPDQEKLKLYGAEEGVSWIARPVRGGGQSALGSALGLMSRHGSMVSQGKSLVDPLVTLFGSVHEKMPEVMGSMRSTLFPNFGSMFSVAEQQQAKADWDAESHRDDEDYASDHGADDIEDNLNSPLISRQATSVEGKEIAAPHGSIMGGVESSSMQGGDAVSSMGIGGGWQLAWKWTEREGADGRKEGGAQRIYLHEEGVSGDRRGSILSMPGGDIPPGGEYIQAAALVSQPALYSKDLIEQQLAGPAMVHPSEAVAKGTKWAELFEPGVKHALFVGIGLQILQQFAGINGVLYYTPQILEQAGVGILLSNIGLSSSSASILISALTTLLMLGYISDRIGARAITAASFMYCSIPALFFYRRAILVLVNVLDVGTMVHAALSTISVIVYFCFFVMGPIPEGSTSSVKIDTDRANAASLAKALLTFWIGDIIVTYTLPVMLNAIGLAGVFGIYAVVCMIAFVFVYMKVPETKGMPLEVITEFFSVGAKQGKEATDEVAEKIAESRPSEECRSPVDYVQDHVMEV

SEQ ID NO: 9952 - DNA, 2232 bp, Hordeum vulgare
  CDS (1)..(2232)
  misc_feature (823)..(823): s is g or c
atgtcgtcgggcgccgtgctggtcgccatagcggcgtccatcgggaacctgctgcaggggtgggataatgcgaccattgcaggtgccgtcctgtacataaagaaggagttcagcctggagacccagcccttgatcgagggcctcatcgtggccatgtcgctcatcggagcgacggttatcacgacgttctccggggcggtggctgacgctgttggtaggcggcccctgctgatcgcctcgtctgtcctctactttgtcagtggcctggtgatgctctgggcgcccaacgtctatgtgttgctcttggccaggctcatcgacgggttcggtatcggtttggcagtcacccttgtccctctgtacatttcggagaccgccccgactgacattagagggctgctgaacacgctgccgcagttcagtgggtcaggagggatgttcctttcttactgcatggtgtttaccatgtccctcatgccgcagcctgactggagaatcatgcttggggttttgtcgatcccgtcgcttatgtattttgcattgactgtcttttatttgcccgagtcgcccagatggcttgtgagcaagggaagaatggctgaggccaagcgagtattgcaaagactgcggggaagggaagatgtctcaggagagatggcccttcttgttgaaggattgggtgttggaaaagacacacattttgaggaatacataattggacctgatgatgagctggctgatgacgggctggctccagatcaagagaagttgaaactctatggagctgaagaaggggtatcttggatcgcccgtcctgttaggsgtggcggccaaagtgcacttggaagcgctttgggcctcatgtctcgtcatgggagtatggttagtcagggtaaatctcttgttgacccccttgtcactctcttcggaagtgtccatgagaagatgcctgaggtaatggggagcatgcggagcaccttgtttcctaactttggcagcatgtttagtgtggctgaacagcagcaggctaaagctgactgggatgctgagagtcatagggatgatgaagattatgcatcggatcatggtgctgatgacattgaggataacctcaatagcccgcttatttctcgtcaagcgacaagcgtggagggtaaggagattgctgcacctcatggaagcataatgggtggtgtggaaagtagtagcatgcagggaggggacgcagtaagcagcatgggcattggtggggggtggcagttagcttggaagtggactgagagagaaggtgcagatgggcaaaaagaaggtggcttccagcgtatttacttgcatgaggagggtgtgtcaggtgatcggagaggctctatattgtctatgccaggaggtgatattcctcctggtggtgagtatatccaggcagccgctctagtgagccaacctgctctttactcgaaggacctgatagagcagcagcttgctggtccagccatggtacatccatccgaggcagttgccaagggtacaaagtgggcagaactatttgaacctggagtgaagcatgcactgtttgttggcattggattacagatcctgcagcagtttgcgggtatcaacggagtcctgtattacacgcctcagatacttgagcaagcaggtgttgggattcttctatcaaacattggactaagctcttcctctgcatctattcttattagtgccttgacaaccttgctgatgcttcccagcattggcatcgccatgagactcatggatatgtcaggaagaaggtttcttctcctctcaacaatccctgtcttgatagtggcactagctatcttggttttggtgaatgttctggatgtgggaaccatggtgcacgccgctctctcaacgatcagtgtcatagtctacttctgcttcttcgtcatgggttttggacctatcccgaatattctctgcgcggagattttccccacctccgtccgtggcatctgcattgccatctgcgcactaaccttctggattggtgacatcatcgtgacatacactcttcccgtgatgctcaacgccatcggactcgctggagttttcggaatatatgctgtcgtttgcatgatagccttcgtattcgtctacatgaaggtccctgagacaaagggcatgcccctggaggtcatcaccgagttcttctcggtcggggcgaagcagggcaaggaagccacagactag

SEQ ID NO: 9953 - protein, 743 aa, Hordeum vulgare
  misc_feature (275)..(275): The Xaa at location 275 stands for Arg, or Gly.
MSSGAVLVAIAASIGNLLQGWDNATIAGAVLYIKKEFSLETQPLIEGLIVAMSLIGATVITTFSGAVADAVGRRPLLIASSVLYFVSGLVMLWAPNVYVLLLARLIDGFGIGLAVTLVPLYISETAPTDIRGLLNTLPQFSGSGGMFLSYCMVFTMSLMPQPDWRIMLGVLSIPSLMYFALTVFYLPESPRWLVSKGRMAEAKRVLQRLRGREDVSGEMALLVEGLGVGKDTHFEEYIIGPDDELADDGLAPDQEKLKLYGAEEGVSWIARPVRXGGQSALGSALGLMSRHGSMVSQGKSLVDPLVTLFGSVHEKMPEVMGSMRSTLFPNFGSMFSVAEQQQAKADWDAESHRDDEDYASDHGADDIEDNLNSPLISRQATSVEGKEIAAPHGSIMGGVESSSMQGGDAVSSMGIGGGWQLAWKWTEREGADGQKEGGFQRIYLHEEGVSGDRRGSILSMPGGDIPPGGEYIQAAALVSQPALYSKDLIEQQLAGPAMVHPSEAVAKGTKWAELFEPGVKHALFVGIGLQILQQFAGINGVLYYTPQILEQAGVGILLSNIGLSSSSASILISALTTLLMLPSIGIAMRLMDMSGRRFLLLSTIPVLIVALAILVLVNVLDVGTMVHAALSTISVIVYFCFFVMGFGPIPNILCAEIFPTSVRGICIAICALTFWIGDIIVTYTLPVMLNAIGLAGVFGIYAVVCMIAFVFVYMKVPETKGMPLEVITEFFSVGAKQGKEATD

SEQ ID NO: 9954 - DNA, 1932 bp, Zea mays
  CDS (1)..(1932)
atgaagtcaacagtgttttcagcagctgttgtttctattgggtatgcattgcttggatgggattttgcagcattatcagaagctaataatcatatggaaaaagaatttgaattgttgaatggaccttctattgaaggtataactttagcagcctcaacatttggggctattgtgataacaatattctctggcgcactattagattggctcggaagacgtgtcatactggtttactcgtctctggtattattttcgggtggcgtcttgatgctgtggtctcctaacatctacattgtacttctagctagctggagaatcatgattggtgcaatctttgctccttccatcgtgtactttgctttgttggtttactacttgccagagtcacctaggtggcttgcaagtgatggaaagattagtgaggccagagtttctctgcagtggcttagaggaaagaaacatgatgtttcaggagagatagctgctattgtggaaggtgtggacatcatatcggactccactgttggcgctgctcgtgctcagagtttctctggaaccagtgctagccacacttggccccgtagtactttttattggcagctttcagacccactagttgatcttctcggaagcgttcatgagaatatgtcagaaggaggaagtagacggaatagtttcttcccagtcttcaacagtttttcttttccagagcatgaacatatgaatgaacacagggatggtaacagtgatcaacagactagggagacttattatgctggagaagctaataatggagatggtttaagggcttctctgctttctcaggcagcaaatgttgaagtaaatgatacaaatacctcttttacttctgaagggagctcttcatatttaagaaggcatggaacatcagtgcttgcacaagagtttatggcgtctatacatgattatgacattgaagaagaagaagaagaaatccataggtttgcattgcctcaccagtctgcacctcgtgatatggaaagcaccgggagacatccattcagacatcaaatagtccggttatctgaaacagctgatatgaagtttaaatggcgggtgcttcttcaaccaggaatcaggcatgccttatgttatggcatgttaattcaagcccttcagcaagtacgattatgtgttattgtagattatgtattcaattcagcatggagttcagtttacttgcgcactggctaccatgtatacagaatgctagttagtctgctgacacgttcttttttgcttgtttcttgtttgctcttctcaaaaatacagtctacaggaatcagtggtcttctccgctgcgctcctgaaatatttgagcagtctggagtggctagtttgttttcagacattggactttctcctcattcaacatcaattctcatgagtacccttaatgctttgctgatactcccttgtataactgccgcaatgctgctgatggatgtctgcgggagaagggttcttgtgctggccactactcctgtcctgatactatcattgagtgttatgtctatgtccaccctggtgaatatgggaccgttcgaaagtgccgtcctcttccacttcgcattaaccatttgcttctggtcctatgtcattggtttgggaccgataccaaacattctctgctccgagatattcccaaccaaggcccgtgcgacatgtgcaagtttctgttcgctttccttctggtttgggggcctgctttcagcgtactgcttcccggtgatgttgagcaccatcgggcttggcggagcgtgtgggatctatgcacttgtgtgctgcgctccgctttttctcgtctactatcgaataccagagacgaagatgcttaacctggagctcattgcggagctgttcaagctttcaaggcaggagtatgtacagtag

SEQ ID NO: 9955 - protein, 643 aa, Zea mays
MKSTVFSAAVVSIGYALLGWDFAALSEANNHMEKEFELLNGPSIEGITLAASTFGAIVITIFSGALLDWLGRRVILVYSSLVLFSGGVLMLWSPNIYIVLLASWRIMIGAIFAPSIVYFALLVYYLPESPRWLASDGKISEARVSLQWLRGKKHDVSGEIAAIVEGVDIISDSTVGAARAQSFSGTSASHTWPRSTFYWQLSDPLVDLLGSVHENMSEGGSRRNSFFPVFNSFSFPEHEHMNEHRDGNSDQQTRETYYAGEANNGDGLRASLLSQAANVEVNDTNTSFTSEGSSSYLRRHGTSVLAQEFMASIHDYDIEEEEEEIHRFALPHQSAPRDMESTGRHPFRHQIVRLSETADMKFKWRVLLQPGIRHALCYGMLIQALQQVRLCVIVDYVFNSAWSSVYLRTGYHVYRMLVSLLTRSFLLVSCLLFSKIQSTGISGLLRCAPEIFEQSGVASLFSDIGLSPHSTSILMSTLNALLILPCITAAMLLMDVCGRRVLVLATTPVLILSLSVMSMSTLVNMGPFESAVLFHFALTICFWSYVIGLGPIPNILCSEIFPTKARATCASFCSLSFWFGGLLSAYCFPVMLSTIGLGGACGIYALVCCAPLFLVYYRIPETKMLNLELIAELFKLSRQEYVQ

SEQ ID NO: 9956 - DNA, 2241 bp, Sorghum bicolor
  CDS (1)..(2241)
atgagcatgatacactgcaaattgaatgtccaagctgaggatctgatgggtggtgccactggagctcaaggagatgtacagtggtgtaatggtggcaagttagaggaggtggcagtgctgggttgtgcccacaggataatggcagctgaggtttcaaccgtgcaccaggaagtttgcaaaatgtatttctggtttgcaggagcagcaatagcaagcaggttgattgactgtgaggcatacctgaggactgagttctcaggttttataattgtttgcaaaagggctatagtacttgatgagatgaagtcaacagtgttttcggcagttgttgtttctattgggtatgcaatgcttggatgggattttgcagcattattagaagctaatcatcatatgaaaaaagaatttgaattgttgaatggaccttctattgaaggtataactttagctgcctcaacatttggggctattgtgataacaatattctctggagcactattagattggcttggaagacgtgccatactggtttactcgtctctggtattattttcgggaggtgtgctgatgctgtggtctcctaacatctacattgtacttctagctaggttaatcgttggatcaggaagtgggttggttttcacctgtgtccctatttatatatctgaaacatctcctccaaatatgaggggattacttggaactatgccacagtttatgttcttcataggaactatcttttcatattgcctgatattctggttaacactaatgtcttcacctaactggagaatcatgattggtgcaatctttgctccttccattgtctactttgctttgttggtttactacttgccagagtcacctaggtggcttgcaagtgatggaaagattagtgaggccagagtttctctgcaacggcttagagggaagaaacatgatgtttcaggagagatagctgttattgttgatggtgtggacatcatatcggactccgctgttggcactgctcgagctcaaagtttctctggaaccagtgctagccgcacttggccccgtagtactttttattggcagctttcggatccactagttgatcttctcggaagcattcatgagaatatgtcagaaggaggaagtagacggaatagtttcttcccagtcttcaacagtttttcttttccagaacatgaacatatgaatgagcacagggatggtaacagtgatcaacagactagggaggcttattctgctggagaagttaacaatggagatggtttgcgggcttctctgctttctcaggcagcaagtgttgaagtaaatgatgcaaatacctcttttacttctgaagggagctcttcatatttaagaaggcatggaacatcagtacttgcgcaagagtttatggcatctatacatgatcatgacattgaagaagaagaagaaatccatggttttgtattgcctcaccagtctgcacctcgtgatatggaaagcagagggcgacatcaagtagtccggctatctgaaacagctgatatgaagtttaaatggcgggtgcttcttcaaccaggaatcaggcatgccttgtgttatggcatgttaattcaagcccttcagcagtctacaggaatcagtggtcttctccgctgtgctcctgaaatacttgaacaggttggagttagcttgttttcagacattggactttctccgcattcaacatcaattctcataagtaccctccaagctttgctgatactcccttgtataactgccgcaatgctgctgatggatgtctgtggaagaagggttcttgtgctggccactactcctatccttatattatcattgagcgttatgtctatgtccatcctgttcaatatgggaccgtttgaccgtgccatcgtcttccacttcgcattaacagtttgcttctgctcctatgtcattggtttgggaccaatacccaacattctctgctcagagatatttccaactaaggcccgtgcgacctgtgcaagtttctgttcgctttccttctggtttgggggcctgctttcagcgtactgcttgcctgtgatgatgagcaccattgggcttggcggagcatgcgggatctatgcacttgtgtgctgcgctccactttttctgttctactatcggataccagagacgaagatgctcaacttggagctcatcgcagagctattcaagctttcaaggcaggagtatgtacagtag

SEQ ID NO: 9957 - protein, 746 aa, Sorghum bicolor
MSMIHCKLNVQAEDLMGGATGAQGDVQWCNGGKLEEVAVLGCAHRIMAAEVSTVHQEVCKMYFWFAGAAIASRLIDCEAYLRTEFSGFIIVCKRAIVLDEMKSTVFSAVVVSIGYAMLGWDFAALLEANHHMKKEFELLNGPSIEGITLAASTFGAIVITIFSGALLDWLGRRAILVYSSLVLFSGGVLMLWSPNIYIVLLARLIVGSGSGLVFTCVPIYISETSPPNMRGLLGTMPQFMFFIGTIFSYCLIFWLTLMSSPNWRIMIGAIFAPSIVYFALLVYYLPESPRWLASDGKISEARVSLQRLRGKKHDVSGEIAVIVDGVDIISDSAVGTARAQSFSGTSASRTWPRSTFYWQLSDPLVDLLGSIHENMSEGGSRRNSFFPVFNSFSFPEHEHMNEHRDGNSDQQTREAYSAGEVNNGDGLRASLLSQAASVEVNDANTSFTSEGSSSYLRRHGTSVLAQEFMASIHDHDIEEEEEIHGFVLPHQSAPRDMESRGRHQVVRLSETADMKFKWRVLLQPGIRHALCYGMLIQALQQSTGISGLLRCAPEILEQVGVSLFSDIGLSPHSTSILISTLQALLILPCITAAMLLMDVCGRRVLVLATTPILILSLSVMSMSILFNMGPFDRAIVFHFALTVCFCSYVIGLGPIPNILCSEIFPTKARATCASFCSLSFWFGGLLSAYCLPVMMSTIGLGGACGIYALVCCAPLFLFYYRIPETKMLNLELIAELFKLSRQEYVQ

SEQ ID NO: 9958 - DNA, 2172 bp, Oryza sativa subsp. japonica
  CDS (1)..(2172)
atgttgtgtttgattcgtttttatttacgagggtatgcagcagcggacttgggtgcctggaagaacacgcggcaacaatactctccatcctcgccgatcagcttagggtcttccgtcttctccgaatcaagtctggaactttcgacaacaacagcggatggctcgacggctaatgcagtgctcgctgctattgtggcatctattggcaatctactacaaggatgggacaatgcagccattgcaggtgctattatgtacataaagaacgaattcaacctacaaaacgatccaatgatggagggacttatcctagcaatgtcactaattggtgcaactataatcactgcactatcagggatgattaccaattctattgggaagaggccattgctttctgttgcggcaattctatactctatcagtgcattgatcatgtttcaggcttcaaatgaatatatgctactgttggcgagacttatttatggctttggttcaggcttggtggtgacatatgccccactttatatctcagagactgcgcctacaaatatgcgagggttattaaatacattgccacaattcaatgggtctcttggaatgttgctatcttacattatggtatttttaatgtcacttacactaaatcccaactggagaatcatgcttggctccttatcaattccttcatttgtctttttactactgtgcatcttctatttaccggagtctcctgtattccttgtgagcaaaggaaagatagaagaagcaaaaaatgttatgaaaagactaagaggaacaaatgaagtctcaagtgaaatagcctttcttattcaaggcttgacagttgaccaagataattatatcgaagattacatgattggtcataataatgatgaatttgatgatcaatcaatttcaaacacagaaacaaccaaattgtatggccatgaagaaggtgtgacttggtttgcacgtccattcaagggaaaaaatgttgttgaaagtgaccatagtcctatacctaatttgcttgatcctattgtcacactttttgatagtatccatggtaatatattgaatacacctgaattcactagttctggaaacatgtcaaatgatatagaacaacctaaaacagatttggagagccaagaagatcttgatactgattatgaagatgacctcggccatccacttctatttcaccaaggatcttatatggaaggaatagatgatgcatgtgttaatggaggatggcacatagcttggaaatttgttcaaagagagaatgaatttgggcaaacacaagatgacttccaacaaatttttctacaaggtgatattcttcaagctggccgtgtttcccatgcaaccgctttggttagcacaccttcttttcaccattctattggacctgcaatggtgcatccatccaaattcaacttgtctaccgaaggacaaagttggtctgatcttttacaacccggggtaaagcagggattgattgtgggtgtcacaatacaaattcttcaacagcttgctggaattagtggcattctttattacactcctcaaatacttgagcaagctggagctggaattttgttaaaatggtttaatgttagttcttcctcatcatctattttgacgagtgctctaaccacctttacgatgcttccttctattggtattgcaatgaaatgcatggatcgttatggaagaagatcactccttctttacacaataccaatgttgatagtatcacttattatattgatcgtggtcaatgttatgaacttagaagcaatttttggagctattttatccacatttggtgttatcatctatgtttgttgcttcgttatgggatttggaccaattcccaatgttctttgctcagagctttttcctcctagttgtcgtaaccgttgtatgtctatttgtacattgacattttggattgtttccattattgtcacttatgcatttcctgttatgctaagctccataggtctaattggtgtttgtgggatatatgctgttgtctgcatagtctcctttatattcgtgttaattaaggtgcctgaaacgaaaggcatgcctcttgcggttatcgcaaattccttagctgttggagcaaggctatcagttaaacggaatgagaacatctaa

SEQ ID NO: 9959 - protein, 723 aa, Oryza sativa subsp. japonica
MLCLIRFYLRGYAAADLGAWKNTRQQYSPSSPISLGSSVFSESSLELSTTTADGSTANAVLAAIVASIGNLLQGWDNAAIAGAIMYIKNEFNLQNDPMMEGLILAMSLIGATIITALSGMITNSIGKRPLLSVAAILYSISALIMFQASNEYMLLLARLIYGFGSGLVVTYAPLYISETAPTNMRGLLNTLPQFNGSLGMLLSYIMVFLMSLTLNPNWRIMLGSLSIPSFVFLLLCIFYLPESPVFLVSKGKIEEAKNVMKRLRGTNEVSSEIAFLIQGLTVDQDNYIEDYMIGHNNDEFDDQSISNTETTKLYGHEEGVTWFARPFKGKNVVESDHSPIPNLLDPIVTLFDSIHGNILNTPEFTSSGNMSNDIEQPKTDLESQEDLDTDYEDDLGHPLLFHQGSYMEGIDDACVNGGWHIAWKFVQRENEFGQTQDDFQQIFLQGDILQAGRVSHATALVSTPSFHHSIGPAMVHPSKFNLSTEGQSWSDLLQPGVKQGLIVGVTIQILQQLAGISGILYYTPQILEQAGAGILLKWFNVSSSSSSILTSALTTFTMLPSIGIAMKCMDRYGRRSLLLYTIPMLIVSLIILIVVNVMNLEAIFGAILSTFGVIIYVCCFVMGFGPIPNVLCSELFPPSCRNRCMSICTLTFWIVSIIVTYAFPVMLSSIGLIGVCGIYAVVCIVSFIFVLIKVPETKGMPLAVIANSLAVGARLSVKRNENI

SEQ ID NO: 9960 - DNA, 2184 bp, Brassica napus
  CDS (1)..(2184)
atgaagggagcgacgcttgttgctctcgccgccactatcggcaatttcttgcaaggatgggacaatgccaccattgctggagctatggtctatatcaacaaagacatgaatctaccaacctctgttcaaggtcttgtggtagctatgtcattgataggtgcaacggtcatcaccacttgctctggacccatctctgactggctcgggagacgccccatgctcattttatcatccgttatgtatttcctcagcggtttgataatgtggtggtctccaaacgtctatgtcctgtgtttagctaggcttcttgatgggtttggtgccgggcttgcggttacccttgtccctgtttacatctctgaaacagctcctccggagatcagaggacagctcaacactcttcctcagtttcttggctctggtggaatgttcttgtcttactgtatggttttcactatgtcacttagcgaggctcctagctggagagggatgcttggtgtcctctcgataccttctcttgtgtatttgtttttcactgtgttttatttgcctgagtctcctcgttggctggttagtaaagggagaatggatgaggctaagagggtgcttcaacagttgtgtggcagagaagatgttaccgatgagatggctttgcttgtcgaaggactagacataggaggagagaaaacactagaggatctcttagtaactttagacgatcatgaaacactcaaaaccgttaacgaagacggacagatgaggcttattggcacccacgagaaccaatcctacatcgctcgacccgtccctgaacaacagagctcaatgttcctacgctctcgacacggcagcttagcagcaaaccaaagcatgatcctcaaagaccccctcgtgggtctcttcgacagcctccacgagaagatgatgcctgaagcagcaggcggaaacacgaggagcgggatcttccctcacttcggaagcatgttcagcaccaacgcagacgggaagccgcctcactgggagaaagacgtagagagccaattcaacaaagaccacgatgactacgcgaccgatgataatgcggctgctgatgactcggacaacgatcttcgcagcccgttgatgtctcgccagacgacgagcatggacaaggacatgatccctcaccccacagggggaagcacgctcagcatgaggcgacacagcacgcttacgggcgaaaccaacatggggattggtaatggttggcatatggggtatagatacgacaacggagagtacaaaaggtattaccttaaggaagacaatgcagagtctcgccgcggctcgatcatttctcttcctggtggtcaagatggaggcggcagctacattcacgcttctgctcttgtgagcaaatcagttcttggtcccaaatcaatccatggatcagccatggttcctccagagaaaaccgctcctacaggacctctctggtctgctcttcttgagcctggtgtcaagcgcgcgttggttgttggtgtggggattcagatacttcagcagttttcgggtatcaatggtgttctttactacactcctcagattcttgaacgtgctggtgtagacattcttctttcgagctttggactaagctccatctccgcgtcgttcctcatcagtgggttaacgactttactcatgcttccatctattgtcgtcgccatgagactcatggatgtctctggaagaagggcattacttctgtggacaatccctgttctcatcgtctcgctcatcgtcctggtcatcagcgagcttgtccacatcagcaaagttgtaaacgcagcgctctccacggcctgtgtgatactctacttctgcttcttcgtgatgggttacggtcccattccgaacatcctctgttctgaaatcttcccaacgagagtccgtggtctctgcattgctatctgcgctatggtgttctggatcggagacattatcgtcacttactcgcttcctgttcttctcagctcgatcggactcgttggtgtgttcatcatctacggtgcggtttgcgttatctcgtggatctttgtttacatgaaggtcccggagactaaaggtatgcccttggaggttatcacagactactttgcctttggtgctcaagctcaagcttctgctccttccaaagatatatag

SEQ ID NO: 9961 - protein, 727 aa, Brassica napus
MKGATLVALAATIGNFLQGWDNATIAGAMVYINKDMNLPTSVQGLVVAMSLIGATVITTCSGPISDWLGRRPMLILSSVMYFLSGLIMWWSPNVYVLCLARLLDGFGAGLAVTLVPVYISETAPPEIRGQLNTLPQFLGSGGMFLSYCMVFTMSLSEAPSWRGMLGVLSIPSLVYLFFTVFYLPESPRWLVSKGRMDEAKRVLQQLCGREDVTDEMALLVEGLDIGGEKTLEDLLVTLDDHETLKTVNEDGQMRLIGTHENQSYIARPVPEQQSSMFLRSRHGSLAANQSMILKDPLVGLFDSLHEKMMPEAAGGNTRSGIFPHFGSMFSTNADGKPPHWEKDVESQFNKDHDDYATDDNAAADDSDNDLRSPLMSRQTTSMDKDMIPHPTGGSTLSMRRHSTLTGETNMGIGNGWHMGYRYDNGEYKRYYLKEDNAESRRGSIISLPGGQDGGGSYIHASALVSKSVLGPKSIHGSAMVPPEKTAPTGPLWSALLEPGVKRALVVGVGIQILQQFSGINGVLYYTPQILERAGVDILLSSFGLSSISASFLISGLTTLLMLPSIVVAMRLMDVSGRRALLLWTIPVLIVSLIVLVISELVHISKVVNAALSTACVILYFCFFVMGYGPIPNILCSEIFPTRVRGLCIAICAMVFWIGDIIVTYSLPVLLSSIGLVGVFIIYGAVCVISWIFVYMKVPETKGMPLEVITDYFAFGAQAQASAPSKDI

SEQ ID NO: 9962 - DNA, 2217 bp, Glycine max
  CDS (1)..(2217)
atgaaaggtgccgtcctcgtcgctattgccgcttccatcggcaatttcctccagggatgggataatgctaccatcgccggggccattgtttacattaagaaagaccttgcgttgcaaacaactatggaagggcttgtggtggccatgtccctgattggagcaacggtaatcaccacatgctctggtcctatagcggattggctcggtcggcgacccatgatgataatctcatctgtgctctatttcttgggtggtttggtgatgctgtggtccccaaatgtgtatgtgttgtgcttggcgaggctacttgatggatttgggattggccttgctgtgactcttgtcccggtctatatatctgaaacggcgccgtctgaaataagggggtcgttgaatacgcttcctcagttcagtggctctggaggaatgtttttgtcgtactgtatggtttttggcatgtcattgagtcccgcgcctagctggaggctcatgcttggggttctgtctattccttccctcttgtattttgcattgaccatttttttcttgcccgagtctcctcgctggctggtcagcaaaggaaggatgctcgaggctaagaaagtgctccaaagattgcgcggaagggaggatgtgtcaggcgagatggcattgctggttgaaggtctcgggattgggggtgatacatctatcgaagagtacataattggccctgctgacgaggtggctgatggtcatgaacatgcaacagagaaagataaaattcgattatatggatcccaagcaggcctctcttggttagcaaaacctgtcactggacagagttctattggccttgcgtcacgccatggaagcatcatcaaccaaagcatgcccctcatggatcctctggtgacactgtttggtagcattcatgagaagctccccgagacaggagcaggaggaagcatgcgaagcactctgtttccaaattttggaagcatgttcagcactgctgagccgcatgctaaaaatgaacagtgggatgaagagagcttacaaagggaaggtgaggactacatgtcagatgcagccggtggggactctgatgataatttgcacagtcctttaatctcacgccaaacaacaagccttgaaaaagacttgcctcctcctcctccttcccatggcagtatccttggcagcatgaggcgtcacagtagtctcatgcaagggtcaggtgagcaaggtggtagtacaggtattggtggtggctggcaactggcatggaaatggactgataaaggtgaggatggaaaacaacaaggagggtttaaaaggatttatttacatgaggagggagtttctgcatctcgtcgtggatccattgtatcgattcccggtgaaggcgaatttgtccaggctgctgccttggtaagccaacccgctctttactccaaggagcttattgatggacacccagttgggcctgcaatggttcacccatctgagacagcttcaaaggggccaagttggaaagctcttcttgaaccaggggttaagcatgcattggttgttggagttggaatacaaatacttcagcagttttcagggataaatggggttctatattacacacctcaaatccttgaagaggccggtgttgaagttcttctttcagatataggcattggctcagagtcggcatcattccttatcagtgctttcacaaccttcttgatgcttccctgtataggcgtagccatgaagctcatggatgtttcaggcagaaggcagttgctacttactacaatccccgtgctgattgtgtcactcattattttggtcattggaagcctggtaaattttggcaatgtcgcccatgcagcaatctcaacagtatgcgttgtggtttatttctgctgctttgtgatgggttatggaccaattccaaacatcctttgctcagagattttccccactagggtgcgtggcctctgcattgctatctgtgcattagtgttctggattggagacatcatcatcacatactcgctgcctgtgatgctgggctctttaggacttggtggtgtattcgccatttacgcagttgtttgtttcatctcgtggatatttgtgtttttgaaggttccagaaacaaagggcatgccccttgaagtcatctctgaattcttttctgttggagcaaagcaggctgcttctgccaagaatgagtga

SEQ ID NO: 9963 - protein, 738 aa, Glycine max
MKGAVLVAIAASIGNFLQGWDNATIAGAIVYIKKDLALQTTMEGLVVAMSLIGATVITTCSGPIADWLGRRPMMIISSVLYFLGGLVMLWSPNVYVLCLARLLDGFGIGLAVTLVPVYISETAPSEIRGSLNTLPQFSGSGGMFLSYCMVFGMSLSPAPSWRLMLGVLSIPSLLYFALTIFFLPESPRWLVSKGRMLEAKKVLQRLRGREDVSGEMALLVEGLGIGGDTSIEEYIIGPADEVADGHEHATEKDKIRLYGSQAGLSWLAKPVTGQSSIGLASRHGSIINQSMPLMDPLVTLFGSIHEKLPETGAGGSMRSTLFPNFGSMFSTAEPHAKNEQWDEESLQREGEDYMSDAAGGDSDDNLHSPLISRQTTSLEKDLPPPPPSHGSILGSMRRHSSLMQGSGEQGGSTGIGGGWQLAWKWTDKGEDGKQQGGFKRIYLHEEGVSASRRGSIVSIPGEGEFVQAAALVSQPALYSKELIDGHPVGPAMVHPSETASKGPSWKALLEPGVKHALVVGVGIQILQQFSGINGVLYYTPQILEEAGVEVLLSDIGIGSESASFLISAFTTFLMLPCIGVAMKLMDVSGRRQLLLTTIPVLIVSLIILVIGSLVNFGNVAHAAISTVCVVVYFCCFVMGYGPIPNILCSEIFPTRVRGLCIAICALVFWIGDIIITYSLPVMLGSLGLGGVFAIYAVVCFISWIFVFLKVPETKGMPLEVISEFFSVGAKQAASAKNE

SEQ ID NO: 9964 - DNA, 21 bp, Artificial sequence
  primer
atgtcgggtgctgctctcgtc

SEQ ID NO: 9965 - DNA, 24 bp, Artificial sequence
  primer
ttaggcctttgtagcctgcatttg

SEQ ID NO: 9966 - protein, 846 aa, Artificial sequence
  consensus sequence
  Variant (2)..(2): Xaa in position 2 is any amino acid
  Variant (6)..(7): Xaa in position 6 to 7 is any amino acid
  Variant (9)..(10): Xaa in position 9 to 10 is any amino acid
  Variant (12)..(13): Xaa in position 12 to 13 is any amino acid
  Variant (16)..(16): Xaa in position 16 is any amino acid
  Variant (27)..(27): Xaa in position 27 is any amino acid
  Variant (29)..(30): Xaa in position 29 to 30 is any amino acid
  Variant (34)..(37): Xaa in position 34 to 37 is any amino acid
  Variant (38)..(38): Xaa in position 38 is any or no amino acid
  Variant (40)..(43): Xaa in position 40 to 43 is any amino acid
  Variant (44)..(45): Xaa in position 44 to 45 is any or no amino acid
  Variant (49)..(49): Xaa in position 49 is any amino acid
  Variant (52)..(52): Xaa in position 52 is any amino acid
  Variant (59)..(60): Xaa in position 59 to 60 is any amino acid
  Variant (62)..(63): Xaa in position 62 to 63 is any amino acid
  Variant (66)..(68): Xaa in position 66 to 68 is any amino acid
  Variant (70)..(71): Xaa in position 70 to 71 is any amino acid
  Variant (79)..(79): Xaa in position 79 is any amino acid
  Variant (82)..(82): Xaa in position 82 is any amino acid
  Variant (86)..(88): Xaa in position 86 to 88 is any amino acid
  Variant (90)..(90): Xaa in position 90 is any amino acid
  Variant (99)..(99): Xaa in position 99 is any amino acid
  Variant (102)..(102): Xaa in position 102 is any amino acid
  Variant (106)..(106): Xaa in position 106 is any amino acid
  Variant (111)..(111): Xaa in position 111 is any amino acid
  Variant (114)..(114): Xaa in position 114 is any amino acid
  Variant (117)..(117): Xaa in position 117 is any amino acid
  Variant (120)..(120): Xaa in position 120 is any amino acid
  Variant (128)..(129): Xaa in position 128 to 129 is any amino acid
  Variant (133)..(133): Xaa in position 133 is any amino acid
  Variant (141)..(141): Xaa in position 141 is any amino acid
  Variant (144)..(144): Xaa in position 144 is any amino acid
  Variant (155)..(155): Xaa in position 155 is any amino acid
  Variant (159)..(161): Xaa in position 159 to 161 is any amino acid
  Variant (163)..(163): Xaa in position 163 is any amino acid
  Variant (166)..(166): Xaa in position 166 is any amino acid
  Variant (170)..(170): Xaa in position 170 is any amino acid
  Variant (172)..(173): Xaa in position 172 to 173 is any amino acid
  Variant (177)..(180): Xaa in position 177 to 180 is any amino acid
  Variant (183)..(183): Xaa in position 183 is any amino acid
  Variant (185)..(185): Xaa in position 185 is any amino acid
  Variant (198)..(198): Xaa in position 198 is any amino acid
  Variant (200)..(200): Xaa in position 200 is any amino acid
  Variant (203)..(204): Xaa in position 203 to 204 is any amino acid
  Variant (208)..(208): Xaa in position 208 is any amino acid
  Variant (212)..(213): Xaa in position 212 to 213 is any amino acid
  Variant (214)..(214): Xaa in position 214 is any or no amino acid
  Variant (218)..(221): Xaa in position 218 to 221 is any amino acid
  Variant (224)..(224): Xaa in position 224 is any amino acid
  Variant (228)..(228): Xaa in position 228 is any amino acid
  Variant (232)..(233): Xaa in position 232 to 233 is any amino acid
  Variant (235)..(237): Xaa in position 235 to 237 is any amino acid
  Variant (238)..(239): Xaa in position 238 to 239 is any or no amino acid
  Variant (242)..(242): Xaa in position 242 is any amino acid
  Variant (244)..(245): Xaa in position 244 to 245 is any amino acid
  Variant (247)..(251): Xaa in position 247 to 251 is any amino acid
  Variant (252)..(266): Xaa in position 252 to 266 is any or no amino acid
  Variant (270)..(272): Xaa in position 270 to 272 is any amino acid
  Variant (274)..(274): Xaa in position 274 is any amino acid
  Variant (275)..(275): Xaa in position 275 is any or no amino acid
  Variant (278)..(278): Xaa in position 278 is any amino acid
  Variant (280)..(280): Xaa in position 280 is any amino acid
  Variant (282)..(284): Xaa in position 282 to 284 is any amino acid
  Variant (285)..(291): Xaa in position 285 to 291 is any or no amino acid
  Variant (293)..(293): Xaa in position 293 is any amino acid
  Variant (294)..(298): Xaa in position 294 to 298 is any or no amino acid
  Variant (301)..(301): Xaa in position 301 is any amino acid
  Variant (304)..(305): Xaa in position 304 to 305 is any amino acid
  Variant (306)..(311): Xaa in position 306 to 311 is any or no amino acid
  Variant (313)..(313): Xaa in position 313 is any amino acid
  Variant (316)..(316): Xaa in position 316 is any amino acid
  Variant (318)..(318): Xaa in position 318 is any amino acid
  Variant (320)..(320): Xaa in position 320 is any amino acid
  Variant (323)..(323): Xaa in position 323 is any amino acid
  Variant (326)..(330): Xaa in position 326 to 330 is any amino acid
  Variant (331)..(343): Xaa in position 331 to 343 is any or no amino acid
  Variant (346)..(348): Xaa in position 346 to 348 is any amino acid
  Variant (351)..(361): Xaa in position 351 to 361 is any amino acid
  Variant (362)..(365): Xaa in position 362 to 365 is any or no amino acid
  Variant (367)..(370): Xaa in position 367 to 370 is any amino acid
  Variant (371)..(407): Xaa in position 371 to 407 is any or no amino acid
  Variant (409)..(409): Xaa in position 409 is any amino acid
  Variant (410)..(410): Xaa in position 410 is any or no amino acid
  Variant (413)..(413): Xaa in position 413 is any amino acid
  Variant (415)..(415): Xaa in position 415 is any amino acid
  Variant (417)..(422): Xaa in position 417 to 422 is any amino acid
  Variant (423)..(456): Xaa in position 423 to 456 is any or no amino acid
  Variant (462)..(463): Xaa in position 462 to 463 is any amino acid
  Variant (467)..(469): Xaa in position 467 to 469 is any amino acid
  Variant (470)..(474): Xaa in position 470 to 474 is any or no amino acid
  Variant (476)..(476): Xaa in position 476 is any amino acid
  Variant (477)..(483): Xaa in position 477 to 483 is any or no amino acid
  Variant (485)..(485): Xaa in position 485 is any amino acid
  Variant (488)..(494): Xaa in position 488 to 494 is any amino acid
  Variant (495)..(525): Xaa in position 495 to 525 is any or no amino acid
  Variant (532)..(534): Xaa in position 532 to 534 is any amino acid
  Variant (536)..(537): Xaa in position 536 to 537 is any amino acid
  Variant (538)..(546): Xaa in position 538 to 546 is any or no amino acid
  Variant (548)..(549): Xaa in position 548 to 549 is any amino acid
  Variant (550)..(554): Xaa in position 550 to 554 is any or no amino acid
  Variant (556)..(562): Xaa in position 556 to 562 is any amino acid
  Variant (563)..(566): Xaa in position 563 to 566 is any or no amino acid
  Variant (568)..(569): Xaa in position 568 to 569 is any amino acid
  Variant (571)..(572): Xaa in position 571 to 572 is any amino acid
  Variant (574)..(575): Xaa in position 574 to 575 is any amino acid
  Variant (578)..(578): Xaa in position 578 is any amino acid
  Variant (580)..(581): Xaa in position 580 to 581 is any amino acid
  Variant (584)..(584): Xaa in position 584 is any amino acid
  Variant (587)..(588): Xaa in position 587 to 588 is any amino acid
  Variant (595)..(596): Xaa in position 595 to 596 is any amino acid
  Variant (597)..(646): Xaa in position 597 to 646 is any or no amino acid
  Variant (661)..(661): Xaa in position 661 is any amino acid
  Variant (665)..(665): Xaa in position 665 is any amino acid
  Variant (666)..(666): Xaa in position 666 is any or no amino acid
  Variant (669)..(671): Xaa in position 669 to 671 is any amino acid
  Variant (673)..(676): Xaa in position 673 to 676 is any amino acid
  Variant (678)..(678): Xaa in position 678 is any amino acid
  Variant (680)..(680): Xaa in position 680 is any amino acid
  Variant (684)..(685): Xaa in position 684 to 685 is any amino acid
  Variant (688)..(688): Xaa in position 688 is any amino acid
  Variant (693)..(693): Xaa in position 693 is any amino acid
  Variant (695)..(696): Xaa in position 695 to 696 is any amino acid
  Variant (699)..(699): Xaa in position 699 is any amino acid
  Variant (703)..(704): Xaa in position 703 to 704 is any amino acid
  Variant (708)..(708): Xaa in position 708 is any amino acid
  Variant (712)..(712): Xaa in position 712 is any amino acid
  Variant (716)..(716): Xaa in position 716 is any amino acid
  Variant (719)..(720): Xaa in position 719 to 720 is any amino acid
  Variant (722)..(723): Xaa in position 722 to 723 is any amino acid
  Variant (725)..(737): Xaa in position 725 to 737 is any amino acid
  Variant (739)..(740): Xaa in position 739 to 740 is any amino acid
  Variant (743)..(744): Xaa in position 743 to 744 is any amino acid
  Variant (746)..(747): Xaa in position 746 to 747 is any amino acid
  Variant (751)..(751): Xaa in position 751 is any amino acid
  Variant (756)..(756): Xaa in position 756 is any amino acid
  Variant (765)..(765): Xaa in position 765 is any amino acid
  Variant (771)..(771): Xaa in position 771 is any amino acid
  Variant (775)..(775): Xaa in position 775 is any amino acid
  Variant (781)..(781): Xaa in position 781 is any amino acid
  Variant (783)..(783): Xaa in position 783 is any amino acid
  Variant (786)..(787): Xaa in position 786 to 787 is any amino acid
  Variant (794)..(794): Xaa in position 794 is any amino acid
  Variant (795)..(795): Xaa in position 795 is any or no amino acid
  Variant (801)..(803): Xaa in position 801 to 803 is any amino acid
  Variant (806)..(806): Xaa in position 806 is any amino acid
  Variant (808)..(808): Xaa in position 808 is any amino acid
  Variant (810)..(811): Xaa in position 810 to 811 is any amino acid
  Variant (814)..(814): Xaa in position 814 is any amino acid
  Variant (817)..(821): Xaa in position 817 to 821 is any amino acid
  Variant (824)..(825): Xaa in position 824 to 825 is any amino acid
  Variant (839)..(839): Xaa in position 839 is any amino acid
  Variant (843)..(843): Xaa in position 843 is any amino acid
MXGAVXXAXXAXXGNXLQGWDNATIAXAXXYIKXXXXXLXXXXXXEGLXVAXSLIGATXXTXXSGXXXDXXGRRPMLIXSSXLYFXXXLXMLWSPNVYXLLXARLXDGFGXGLXVTXVPXYISETAPXXIRGXLNTLPQFXGSXGMFLSYCMVFXMSLXXXPXWRXMLGXLXXPSLXXXXLTXFXLPESPRWLVSKGXMXEAXXVLQXLRGXXXDVSXXXXGEXALLXEGLXXGXXXXXIEXYXXGXXXXXXXXXXXXXXXXXXXXLYGXXXGXXSWXAXPXXXXXXXXXXSXXXXXXSRXGSXXXXXXXXLXDPXVXLXGSXHEXXXXXXXXXXXXXXXXXXFPXXXSMXXXXXXXXXXXXXXXDXXXXXXXXXXXXXXXXXXXXXXXXXXXXXXXXXXXXXXXXXLXXPLXSXQXXXXXXXXXXXXXXXXXXXXXXXXXXXXXXXXXXXXXXXXIGGGWXXAWKXXXXXXXXGXXXXXXXXRXYLXXXXXXXXXXXXXXXXXXXXXXXXXXXXXXXXXXXXXXAAALVSXXXLXXXXXXXXXXXGXXXXXXXMXXXXXXXXXXXGXXWXXLXXPGXVXXALXVGXXIQILQQXXXXXXXXXXXXXXXXXXXXXXXXXXXXXXXXXXXXXXXXXXXXXXXXXXXXGINGVLYYTPQILEXAGVXXLLXXXGXXXXSXSXLISXXTTXLMLPXIXXAMXLMDXXGRRXLLLXTIPXLIXXLXXLXXXXXXXXXXXXXAXXSTXXVXXYFCXFVMGXGPIPNILCXEIFPTXVRGXCIAICXLXFWXXDIIVTYXXLPVMLXXXGLXGXFXXYAXVCXXXXXFVXXKVPETKGMPLEVIXEFFXVGA

SEQ ID NO: 9967 - protein, 28 aa, Artificial sequence
  protein pattern
  Variant (5)..(6): Xaa in position 5 to 6 is any or no amino acid
  Variant (8)..(9): Xaa in position 8 to 9 is any or no amino acid
  Variant (11)..(11): Xaa in position 11 is Ile, Leu or Val
  Variant (14)..(14): Xaa in position 14 is Ala or Thr
  Variant (15)..(15): Xaa in position 15 is Ile or Val
  Variant (17)..(17): Xaa in position 17 is Ala or Ser
  Variant (18)..(18): Xaa in position 18 is Phe, Leu or Met
  Variant (19)..(19): Xaa in position 19 is Ala, Ser, Thr or Val
  Variant (20)..(20): Xaa in position 20 is Phe or Tyr
  Variant (22)..(22): Xaa in position 22 is Ile, Leu or Val
  Variant (23)..(23): Xaa in position 23 is Ala, Cys or Gly
  Variant (24)..(24): Xaa in position 24 is Asp or Asn
  Variant (26)..(26): Xaa in position 26 is any amino acid
  Variant (27)..(27): Xaa in position 27 is Ile or Val
IFPTXXRXXGXCIXXCXXXXWXXXIXXT

SEQ ID NO: 9968 - protein, 54 aa, Artificial sequence
  protein pattern
  Variant (2)..(2): Xaa in position 2 is any amino acid
  Variant (5)..(5): Xaa in position 5 is Phe, Ile, Leu, Met or Val
  Variant (7)..(7): Xaa in position 7 is Ile or Leu
  Variant (9)..(9): Xaa in position 9 is any amino acid
  Variant (10)..(10): Xaa in position 10 is Ile or Leu
  Variant (11)..(11): Xaa in position 11 is any amino acid
  Variant (12)..(12): Xaa in position 12 is Ala, Ile, Leu or Val
  Variant (14)..(14): Xaa in position 14 is Ala or Ser
  Variant (15)..(15): Xaa in position 15 is Ile, Leu or Val
  Variant (16)..(16): Xaa in position 16 is any amino acid
  Variant (17)..(17): Xaa in position 17 is Phe or Tyr
  Variant (18)..(18): Xaa in position 18 is Phe or Leu
  Variant (19)..(19): Xaa in position 19 is any amino acid
  Variant (21)..(21): Xaa in position 21 is any amino acid
  Variant (22)..(22): Xaa in position 22 is Ala, Ile, Leu or Val
  Variant (23)..(23): Xaa in position 23 is Phe or Leu
  Variant (24)..(24): Xaa in position 24 is any amino acid
  Variant (35)..(36): Xaa in position 35 to 36 is any or no amino acid
  Variant (38)..(39): Xaa in position 38 to 39 is any amino acid
  Variant (40)..(41): Xaa in position 40 to 41 is any or no amino acid
  Variant (44)..(44): Xaa in position 44 is Lys or Arg
  Variant (45)..(46): Xaa in position 45 to 46 is any amino acid
  Variant (49)..(49): Xaa in position 49 is any amino acid
  Variant (53)..(53): Xaa in position 53 is Lys or Arg
  Variant (54)..(54): Xaa in position 54 is Asp, Glu or Gln
PXWRXMXGXXXXPXXXXXXLXXXXLPESPRWLVSXXKXXXXEAXXXLQXLRGXX

SEQ ID NO: 9969 - protein, 41 aa, Artificial sequence
  protein pattern
  Variant (2)..(2): Xaa in position 2 is any amino acid
  Variant (5)..(5): Xaa in position 5 is Ile, Leu or Val
  Variant (11)..(11): Xaa in position 11 is Ala or Ser
  Variant (13)..(13): Xaa in position 13 is Ala, Pro, Ser or Thr
  Variant (14)..(14): Xaa in position 14 is Asp, Glu or Asn
  Variant (15)..(15): Xaa in position 15 is Ile or Met
  Variant (18)..(18): Xaa in position 18 is any amino acid
  Variant (20)..(20): Xaa in position 20 is Gly or Asn
  Variant (22)..(22): Xaa in position 22 is Phe, Leu or Met
  Variant (25)..(25): Xaa in position 25 is Phe or Leu
  Variant (26)..(28): Xaa in position 26 to 28 is any amino acid
  Variant (29)..(29): Xaa in position 29 is Ala, Gly, Ile, Leu or Val
  Variant (31)..(31): Xaa in position 31 is any amino acid
  Variant (32)..(32): Xaa in position 32 is Phe, Ile or Val
  Variant (33)..(33): Xaa in position 33 is Phe, Leu or Met
  Variant (37)..(37): Xaa in position 37 is Leu or Met
  Variant (38)..(38): Xaa in position 38 is Ile or Val
  Variant (40)..(40): Xaa in position 40 is any amino acid
  Variant (41)..(41): Xaa in position 41 is Ile, Leu or Met
TXVPXYISETXPXXXRGXLXTXPQXXXXXGXXXSYCXXFXX

SEQ ID NO: 9970 - protein, 41 aa, Artificial sequence
  protein pattern
  Variant (2)..(3): Xaa in position 2 to 3 is any amino acid
  Variant (5)..(6): Xaa in position 5 to 6 is any amino acid
  Variant (9)..(9): Xaa in position 9 is Ile or Val
  Variant (10)..(10): Xaa in position 10 is Lys or Arg
  Variant (11)..(11): Xaa in position 11 is any amino acid
  Variant (12)..(12): Xaa in position 12 is Ala or Gly
  Variant (14)..(15): Xaa in position 14 to 15 is any amino acid
  Variant (17)..(18): Xaa in position 17 to 18 is any amino acid
  Variant (19)..(19): Xaa in position 19 is Ile, Leu or Met
  Variant (21)..(21): Xaa in position 21 is any amino acid
  Variant (25)..(25): Xaa in position 25 is any amino acid
  Variant (26)..(26): Xaa in position 26 is Ala or Ser
  Variant (29)..(29): Xaa in position 29 is Gly, Asn or Ser
  Variant (31)..(31): Xaa in position 31 is Ile, Leu or Val
  Variant (33)..(33): Xaa in position 33 is any or no amino acid
  Variant (35)..(35): Xaa in position 35 is any or no amino acid
  Variant (41)..(41): Xaa in position 41 is Asp or Glu
WXXLXXPGXXXXLXXGXXXQXLQQXXGIXGXLXYXTPQILX

SEQ ID NO: 9971 - protein, 39 aa, Artificial sequence
  protein pattern
  Variant (2)..(2): Xaa in position 2 is any amino acid
  Variant (4)..(4): Xaa in position 4 is Ala, Gly, Ser or Thr
  Variant (5)..(5): Xaa in position 5 is any amino acid
  Variant (8)..(8): Xaa in position 8 is any amino acid
  Variant (9)..(9): Xaa in position 9 is Ala, Gly or Val
  Variant (11)..(11): Xaa in position 11 is any amino acid
  Variant (12)..(12): Xaa in position 12 is Ile, Leu or Val
  Variant (13)..(13): Xaa in position 13 is Ala or Ser
  Variant (14)..(14): Xaa in position 14 is any amino acid
  Variant (15)..(15): Xaa in position 15 is Ala, Ile, Leu or Val
  Variant (18)..(18): Xaa in position 18 is any amino acid
  Variant (19)..(19): Xaa in position 19 is Ile, Leu, Met or Val
  Variant (20)..(20): Xaa in position 20 is Lys or Arg
  Variant (27)..(27): Xaa in position 27 is Phe, Leu or Met
  Variant (33)..(33): Xaa in position 33 is any amino acid
  Variant (34)..(34): Xaa in position 34 is Asp or Glu
  Variant (35)..(35): Xaa in position 35 is Phe or Tyr
  Variant (37)..(37): Xaa in position 37 is Ala, Asn or Ser
  Variant (38)..(38): Xaa in position 38 is Phe or Val
GXFXXYAXXCXXXXXFVXXXVPETKGXPLEVIXXXFXXG

SEQ ID NO: 9972 - protein, 20 aa, Artificial sequence
  protein pattern
  Variant (2)..(4): Xaa in position 2 to 4 is any amino acid
  Variant (5)..(6): Xaa in position 5 to 6 is any or no amino acid
  Variant (8)..(8): Xaa in position 8 is any amino acid
  Variant (9)..(9): Xaa in position 9 is Cys, Gly or Ser
  Variant (11)..(11): Xaa in position 11 is Ile or Val
  Variant (12)..(12): Xaa in position 12 is Ile, Leu or Val
  Variant (14)..(14): Xaa in position 14 is Phe, Leu or Val
  Variant (16)..(16): Xaa in position 16 is any amino acid
  Variant (19)..(19): Xaa in position 19 is any amino acid
  Variant (20)..(20): Xaa in position 20 is Ala or Gly
AXXXXXTXXVXXYXCXFVXX

SEQ ID NO: 9973 - protein, 30 aa, Artificial sequence
  protein pattern
  Variant (2)..(2): Xaa in position 2 is Ala, Ile, Leu or Val
  Variant (3)..(3): Xaa in position 3 is Ala, Thr or Val
  Variant (5)..(5): Xaa in position 5 is Ala, Cys, Ser or Thr
  Variant (6)..(6): Xaa in position 6 is Ile or Val
  Variant (8)..(8): Xaa in position 8 is Asn or Ser
  Variant (9)..(9): Xaa in position 9 is any amino acid
  Variant (17)..(17): Xaa in position 17 is Ala or Thr
  Variant (19)..(19): Xaa in position 19 is any or no amino acid
  Variant (21)..(23): Xaa in position 21 to 23 is any amino acid
  Variant (24)..(24): Xaa in position 24 is any or no amino acid
  Variant (26)..(26): Xaa in position 26 is Ile, Met or Val
  Variant (27)..(28): Xaa in position 27 to 28 is any amino acid
  Variant (29)..(29): Xaa in position 29 is Asp or Glu
  Variant (30)..(30): Xaa in position 30 is Phe, Leu or Met
AXXAXXGXXLQGWDNAXIXAXXXXYXXXXX

SEQ ID NO: 9974 - protein, 24 aa, Artificial sequence
  protein pattern
  Variant (2)..(2): Xaa in position 2 is any or no amino acid
  Variant (4)..(4): Xaa in position 4 is Phe, Leu or Val
  Variant (6)..(6): Xaa in position 6 is Ala or Ser
  Variant (8)..(8): Xaa in position 8 is Asp, Asn or Ser
  Variant (9)..(9): Xaa in position 9 is Ile or Val
  Variant (10)..(10): Xaa in position 10 is any amino acid
  Variant (11)..(11): Xaa in position 11 is Ile or Val
  Variant (13)..(13): Xaa in position 13 is any amino acid
  Variant (14)..(14): Xaa in position 14 is Phe, Ile, Leu or Val
  Variant (15)..(15): Xaa in position 15 is Ala or Gly
  Variant (17)..(17): Xaa in position 17 is Phe or Leu
  Variant (18)..(18): Xaa in position 18 is Ile, Leu or Val
  Variant (19)..(19): Xaa in position 19 is Asp, Asn or Val
  Variant (21)..(21): Xaa in position 21 is any amino acid
  Variant (22)..(22): Xaa in position 22 is Ala or Gly
  Variant (23)..(23): Xaa in position 23 is any amino acid
LXMXWXPXXXXLXXXRXXXGXXXG

SEQ ID NO: 9975 - protein, 27 aa, Artificial sequence
  protein pattern
  Variant (2)..(2): Xaa in position 2 is Ile, Leu or Met
  Variant (4)..(4): Xaa in position 4 is any amino acid
  Variant (5)..(5): Xaa in position 5 is Phe, Ile, Leu or Val
  Variant (6)..(6): Xaa in position 6 is Asn or Thr
  Variant (7)..(8): Xaa in position 7 to 8 is any amino acid
  Variant (9)..(9): Xaa in position 9 is Leu, Met or Val
  Variant (13)..(13): Xaa in position 13 is Ala, Cys or Ser
  Variant (15)..(16): Xaa in position 15 to 16 is any amino acid
  Variant (19)..(19): Xaa in position 19 is any amino acid
  Variant (23)..(23): Xaa in position 23 is any amino acid
  Variant (24)..(24): Xaa in position 24 is Ala, Cys, Ser or Val
LXSXXXXXXMLPXIXXAMXLMDXXGRR

SEQ ID NO: 9976 - protein, 38 aa, Artificial sequence
  protein pattern
  Variant (2)..(3): Xaa in position 2 to 3 is any amino acid
  Variant (5)..(5): Xaa in position 5 is Ala or Ser
  Variant (6)..(6): Xaa in position 6 is any amino acid
  Variant (8)..(8): Xaa in position 8 is any or no amino acid
  Variant (10)..(10): Xaa in position 10 is any amino acid
  Variant (12)..(14): Xaa in position 12 to 14 is any amino acid
  Variant (15)..(15): Xaa in position 15 is any or no amino acid
  Variant (17)..(18): Xaa in position 17 to 18 is any amino acid
  Variant (21)..(21): Xaa in position 21 is Ala, Gly, Pro or Thr
  Variant (22)..(22): Xaa in position 22 is Ala, Ile, Leu or Val
  Variant (23)..(23): Xaa in position 23 is Ala or Ser
  Variant (25)..(26): Xaa in position 25 to 26 is any amino acid
  Variant (29)..(29): Xaa in position 29 is any amino acid
  Variant (30)..(30): Xaa in position 30 is Pro or Ser
  Variant (31)..(32): Xaa in position 31 to 32 is Leu or Met
  Variant (33)..(33): Xaa in position 33 is Ile or Val
  Variant (34)..(34): Xaa in position 34 is any amino acid
  Variant (36)..(36): Xaa in position 36 is Ala or Ser
  Variant (37)..(37): Xaa in position 37 is any amino acid
  Variant (38)..(38): Xaa in position 38 is Phe, Leu or Met
GXXVXXSXLXGXXXXTXXSGXXXDXXGRXXXXXXSXXX

SEQ ID NO: 9977 - protein, 15 aa, Artificial sequence
  protein pattern
  Variant (2)..(2): Xaa in position 2 is any or no amino acid
  Variant (5)..(5): Xaa in position 5 is any amino acid
  Variant (6)..(6): Xaa in position 6 is Ile, Leu, Met or Val
  Variant (10)..(10): Xaa in position 10 is Phe, Trp or Tyr
  Variant (11)..(11): Xaa in position 11 is Asn, Ser, Thr or Val
  Variant (12)..(12): Xaa in position 12 is Asp, Glu or Gln
  Variant (13)..(14): Xaa in position 13 to 14 is any amino acid
  Variant (15)..(15): Xaa in position 15 is Ala, Asp, Glu, Gly, Asn or Ser
GXGWXXAWKXXXXXX

SEQ ID NO: 9978 - protein, 15 aa, Artificial sequence
  protein pattern
  Variant (3)..(3): Xaa in position 3 is Ile, Leu, Met or Val
  Variant (5)..(5): Xaa in position 5 is any amino acid
  Variant (7)..(7): Xaa in position 7 is Phe or Leu
  Variant (10)..(10): Xaa in position 10 is Ile, Leu, Met or Val
  Variant (13)..(14): Xaa in position 13 to 14 is any amino acid
  Variant (15)..(15): Xaa in position 15 is Pro, Ser or Thr
DPXVXLXGSXHEXXX

SEQ ID NO: 9979 - protein, 18 aa, Artificial sequence
  protein pattern
  Variant (3)..(3): Xaa in position 3 is Ala, Ser or Thr
  Variant (4)..(4): Xaa in position 4 is Ala, Asp or Gly
  Variant (6)..(6): Xaa in position 6 is Leu or Met
  Variant (7)..(7): Xaa in position 7 is Ala or Ser
  Variant (10)..(10): Xaa in position 10 is Ala, Leu or Val
  Variant (14)..(15): Xaa in position 14 to 15 is any or no amino acid
  Variant (17)..(17): Xaa in position 17 is any amino acid
  Variant (18)..(18): Xaa in position 18 is Asp, Glu, Gly or Ser
DVXXEXXLLXEGLXXGXX

SEQ ID NO: 9980 - protein, 10 aa, Artificial sequence
  protein pattern
  Variant (2)..(2): Xaa in position 2 is Pro or Val
  Variant (6)..(6): Xaa in position 6 is Ile or Val
  Variant (9)..(9): Xaa in position 9 is Ala or Ser
GXIPNXLCXE

SEQ ID NO: 9981 - DNA, 1479 bp, Saccharomyces cerevisiae
  CDS (1)..(1479)
atgtttcatgctttcaccttccttaaaggtggtagattttactcttcactaacagttaaatcattgtacgagcaggtacaccatactagccatgatcccatttcaattaatggatggatcaaatccataagactattaaaacgtatagcgtttttggatttacaagatgggacttctgtgaacccattaagaatagttattccactcacaaatactgatgaagtacagttcctaaaaattctgaaaactggtcaaactttatctatatctaatgctacctggcaaagcacccctaatagaaaacaaccttttgaattgcaaatcaaaaatcctgtcaagtcaattaaacttgtgggtcccgtttcagaaaactatccattacaaaagaaatatcaaaccttacgttatttaaggtccttacctacactaaaatacagaaccgcttacttaagtgcaattttacggttaagatcctttgtagaattccagttcatgctatatttccagaaaaaccacttcaccaaagtttcaccaccaatattaacttcaaacgattgtgaaggtgccggcgagttgtttcaagtctccaccaatacgtcgccaactgcatcctcgtactttgggaagccgacttatttgactgtgtccactcaattgcacttggaaattttagcgttatcactgtcaaggtgttggacgttatctccttgctttagagccgaaaagagtgatactccaagacacctttcggagttttggatgcttgaagtggaaatgtgctttgttaatagcgtcaacgagctaacatcgtttgttgagactacaataaaacacataattaaagcttgtatagataaccaacaagaactcttgccgaagcaatttatctcttcacaagaaaataatgcatcgtcagagctatcaataaatcaagagacacaacaaattaaaacacgatgggaagatttaataaatgaaaaatggcacaatataacgtataccaatgcaatagaaattctcaagaaacgccacaatgaagtttcacactttaagtatgaacctaaatggggacagcctttgcaaactgaacatgaaaaatttttagccggagagtattttaagtccccagttttcgttaccgactatccacgtctttgtaaaccattctacatgaaacaaaattccactcctgacgatactgttggatgctttgatctactggttcctggaatgggtgaaataattggtgggagtttaagggaagatgactatgacaagttatgtagagaaatgaaagcacgcgggatgaatagatctggagaattggactggtatgtttctctgagaaaagaaggaagtgcaccacacggaggctttggtctagggtttgagagatttatctcatacttatatggcaaccataatataaaggatgccatacccttttatagaacatctgcagaatccatcgatttttga

SEQ ID NO: 9982 - protein, 492 aa, Saccharomyces cerevisiae
MFHAFTFLKGGRFYSSLTVKSLYEQVHHTSHDPISINGWIKSIRLLKRIAFLDLQDGTSVNPLRIVIPLTNTDEVQFLKILKTGQTLSISNATWQSTPNRKQPFELQIKNPVKSIKLVGPVSENYPLQKKYQTLRYLRSLPTLKYRTAYLSAILRLRSFVEFQFMLYFQKNHFTKVSPPILTSNDCEGAGELFQVSTNTSPTASSYFGKPTYLTVSTQLHLEILALSLSRCWTLSPCFRAEKSDTPRHLSEFWMLEVEMCFVNSVNELTSFVETTIKHIIKACIDNQQELLPKQFISSQENNASSELSINQETQQIKTRWEDLINEKWHNITYTNAIEILKKRHNEVSHFKYEPKWGQPLQTEHEKFLAGEYFKSPVFVTDYPRLCKPFYMKQNSTPDDTVGCFDLLVPGMGEIIGGSLREDDYDKLCREMKARGMNRSGELDWYVSLRKEGSAPHGGFGLGFERFISYLYGNHNIKDAIPFYRTSAESIDF

SEQ ID NO: 9983 - DNA, 2019 bp, Zea mays
  CDS (1)..(2019)
atgcgtgccagacatgtccacaaccgcacaagtggcgtggcgtcgcatcggtctaccttggcgcgcaagattcctgcgaaaacagaacagattcacgaaaacattgtccacgataccaaaaccacacaggtgacgggcacacacggctacaaatacttgcaaccacaatttgttctgtttgcaagccacaaatatttgcaagccacaagccaagccaagcaaaaccctaagaaacccaccctccctccagtctcctcgacccccgccgccgccgccgccatcacaacccagagcaccccctccccaccccaccctgtcccgatggctgcggacgccgccgctgcggcgatgtccgcgacttccctctgcgacgatctcgagcccgccaccgtgcgcacccgcatccgcgatgtcctggccgcaggtgccgcgcgtgccggggaccgcgtcgtggtcggtgggtgggtccggacgggccgggagcaggggaagggctctttcgccttcctggagctcagcgacgggtcctgcgctgccacgcttcaggccatcgttgacgccgccgtgcacccgctagcgcgcctcaccgccaccggcacctccgtcctcgtcgagggcgtgatcaaggagccgcccgaggggaccaagcagaacgtcgagctgaaggtcagccgcgtgcttgaggtcggcgaggtcgatgccgccgtctacccgctgcccaagggcaaggtcaaactcacgctcgagaagctcagggacgtcgttcatctccgttcgcgcaccaacacgattggagcggttgctaggattaggcaccagttagcctatgcatcacacaggttctttgatgagaatggatttctctatgtacatacaccaataataactacgagtgactgtgaaggtgctggtgagatgtttcaagtgacaactttatttagccaggctgagaaaactgagaaggaattgagagagaacccaaaaccttctgattctgaaattgaggcagctaaagttcttgtcaaggaaaaaggtgatgtggtcgcacagcttaaagctgcaaaagccagcaaacaagagatatcaactgctgtcgatgagcttaatagggcaaaggaaattgtttcaaaactggaggagaggttcaagttaaagcctgggattccacgcaaggatgatggttcaatagcttttgaaaatgacttcttcaaacgtcaagcttttttgacagtgtctggacagcttcaggttgagacatatgcatgtgctcttagtagcgtttatacctttggaccaacattccgggcagagaactcacatacgtcacgacatttggcagagttttggatggttgaaccggaaatcgcatttgcaaacttgcaggatgacatgaactgtgcagaaaaatatgtacagtacctttgcaagtggctgcttgaccattgccaggaagatatggagtttatggtgaaaaattatgataagagtgcaattgaacgcctggagcttgtttcgtcaactccttttgtgcggatttcatacacaaaggctgtggagctcttgaaaaatgttaccgacaagaagtttgacaacaaagttgaatggggaattgatttagcctctgagcatgaaaggtatttaacagaggatatatttaagaagccagttattgtctataactatccgaaaggaataaaggcattttatatgagactcaatgatgatgacaagacggtggctgcaatggatgttcttgtgcctaaggttggtgaattgattggtggaagccaaagggaggaacggttagatgttctgaaacagaggatacttgatgctggcctgcctttggaaccctatgaatggtacttggacctccgtcgctttggatctgtaaagcacagtggttttgggttgggttttgaaaggatgattctatttgcaaccggaatggagaacatcagagatgttatacccttcccaagctctaagaaattctatgctcaaataatgggcaagtaa

SEQ ID NO: 9984 - protein, 672 aa, Zea mays
MRARHVHNRTSGVASHRSTLARKIPAKTEQIHENIVHDTKTTQVTGTHGYKYLQPQFVLFASHKYLQATSQAKQNPKKPTLPPVSSTPAAAAAITTQSTPSPPHPVPMAADAAAAAMSATSLCDDLEPATVRTRIRDVLAAGAARAGDRVVVGGWVRTGREQGKGSFAFLELSDGSCAATLQAIVDAAVHPLARLTATGTSVLVEGVIKEPPEGTKQNVELKVSRVLEVGEVDAAVYPLPKGKVKLTLEKLRDVVHLRSRTNTIGAVARIRHQLAYASHRFFDENGFLYVHTPIITTSDCEGAGEMFQVTTLFSQAEKTEKELRENPKPSDSEIEAAKVLVKEKGDVVAQLKAAKASKQEISTAVDELNRAKEIVSKLEERFKLKPGIPRKDDGSIAFENDFFKRQAFLTVSGQLQVETYACALSSVYTFGPTFRAENSHTSRHLAEFWMVEPEIAFANLQDDMNCAEKYVQYLCKWLLDHCQEDMEFMVKNYDKSAIERLELVSSTPFVRISYTKAVELLKNVTDKKFDNKVEWGIDLASEHERYLTEDIFKKPVIVYNYPKGIKAFYMRLNDDDKTVAAMDVLVPKVGELIGGSQREERLDVLKQRILDAGLPLEPYEWYLDLRRFGSVKHSGFGLGFERMILFATGMENIRDVIPFPSSKKFYAQIMGK

SEQ ID NO: 9985 - DNA, 2007 bp, Zea mays
  CDS (1)..(2007)
atgcgtgccagacatgtccacaaccgcacaagtggcgtggcgtcgcatcggtctaccttggcgcgcaagattcctgcgaaaacagaacagattcacgaaaacattgtccacgataccaaaaccacacaggtgacgggcacacacggctacaaatacttgcaaccacaatttgttctgtttgcaagccacaaatatttgcaagccacaagccaagccaagcaaaaccctaagaaacccaccctccctccagtctcctcgacccccgccgccgccgccgccatcacaacccagagcaccccctccccaccccaccctgtcccgatggctgcggacgccgccgctgcggcgatgtccgcgacttccctctgcgacgatctcgagcccgccaccgtgcgcacccgcatccgcgatgtcctggccgcaggtgccgcgcgtgccggggaccgcgtcgtggtcggtgggtgggtccggacgggccgggagcaggggaagggctctttcgccttcctggagctcagcgacgggtcctgcgctgccacgcttcaggccatcgttgacgccgccgtgcacccgctagcgcgcctcaccgccaccggcacctccgtcctcgtcgagggcgtgatcaaggagccgcccgaggggaccaagcagaacgtcgagctgaaggtcagccgcgtgcttgaggtcggcgaggtcgatgccgccgtctacccgctgcccaagggcaaggtcaaactcacgctcgagaagctcagggacgtcgttcatctccgttcgcgcaccaacacgattggagcggttgctaggattaggcaccagttagcctatgcatcacacaggttctttgatgagaatggatttctctatgtacatacaccaataataactacgagtgactgtgaaggtgctggtgagatgtttcaagtgacaactttatttagccaggctgagaaaactgagaaggaattgagagagaacccaaaaccttctgattctgaaattgaggcagctaaagttcttgtcaaggaaaaaggtgatgtggtcgcacagcttaaagctgcaaaagccagcaaacaagagatatcaactgctgtcgatgagcttaatagggcaaaggaaattgtttcaaaactggaggagaggttcaagttaaagcctgggattccacgcaaggatgatggttcaatagcttttgaaaatgacttcttcaaacgtcaagcttttttgacagtgtctggacagcttcaggttgagacatatgcatgtgctcttagtagcgtttatacctttggaccaacattccgggcagagaactcacatacgtcacgacatttggcagagttttggatggttgaaccggaaatcgcatttgcaaacttgcaggatgacatgaactgtgcagaaaaatatgtacagtacctttgcaagtggctgcttgaccattgccaggaagatatggagtttatggtgaaaaattatgataagagtgcaattgaacgcctggagcttgtttcgtcaactccttttgtgcggatttcatacacaaaggctgtggagctcttgaaaaatgttaccgacaagaagtttgacaacaaagttgaatggggaattgatttagcctctgagcatgaaaggtatttaacagaggatatatttaagaagccagttattgtctataactatccgaaaggaataaaggcattttatatgagactcaatgatgatgacaagacggtggctgcaatggatgttcttgtgcctaaggttggtgaattgattggtggaagccaaagggaggaacggttagatgttctgaaacagaggatacttgatgctggcctgcctttggaaccctatgaatggtacttggacctccgtcgctttggatctgtaaagcacagtggttttgggttgggttttgaaaggatgattctatttgcaaccggaatggagaacatcagagatgttatacccttcccaaggtacccaggaagggctgatctgtga

SEQ ID NO: 9986 - protein, 668 aa, Zea mays
MRARHVHNRTSGVASHRSTLARKIPAKTEQIHENIVHDTKTTQVTGTHGYKYLQPQFVLFASHKYLQATSQAKQNPKKPTLPPVSSTPAAAAAITTQSTPSPPHPVPMAADAAAAAMSATSLCDDLEPATVRTRIRDVLAAGAARAGDRVVVGGWVRTGREQGKGSFAFLELSDGSCAATLQAIVDAAVHPLARLTATGTSVLVEGVIKEPPEGTKQNVELKVSRVLEVGEVDAAVYPLPKGKVKLTLEKLRDVVHLRSRTNTIGAVARIRHQLAYASHRFFDENGFLYVHTPIITTSDCEGAGEMFQVTTLFSQAEKTEKELRENPKPSDSEIEAAKVLVKEKGDVVAQLKAAKASKQEISTAVDELNRAKEIVSKLEERFKLKPGIPRKDDGSIAFENDFFKRQAFLTVSGQLQVETYACALSSVYTFGPTFRAENSHTSRHLAEFWMVEPEIAFANLQDDMNCAEKYVQYLCKWLLDHCQEDMEFMVKNYDKSAIERLELVSSTPFVRISYTKAVELLKNVTDKKFDNKVEWGIDLASEHERYLTEDIFKKPVIVYNYPKGIKAFYMRLNDDDKTVAAMDVLVPKVGELIGGSQREERLDVLKQRILDAGLPLEPYEWYLDLRRFGSVKHSGFGLGFERMILFATGMENIRDVIPFPRYPGRADL

SEQ ID NO: 9987 - DNA, 1680 bp, Oryza sativa
  CDS (1)..(1680)
atggccgaagacgccgcggcggccgccatggccgcggcctccctctccgacgacctggagcccgccaccgaccgcacccgcatccgatccatcctggccgacggcgccgcgcgcgccggcgagcgcgtcgtcgtgggcgggtgggtcaagaccgggcgggagcaggggaaaggcaccttcgccttcctcgagctcaacgatggctcctgcgcctccaacctgcaggtcctcgtcgacgccgccgtccacccgctcgcgccgctcaccgccacgggcacgtccgtgctcgtcgagggcgagctcaagaagccgccggagggcgccaagcagcgcgtcgagctccgcgtcgaccgcgtcatcgaggtcggcgaggtcgaccccgccgcctacccgctgcccaagaccaagctcacgctcgagaatctcagggacgtcgtccatctccgctcccgcaccaacacgattggtgctgttgcgcgtattagacaccagctagcctgtgcaacacacaggttttttgatgagaatggttttctttatgtgcacacaccaataataactacaagtgattgtgagggtgctggtgagatgtttcaagtgacgactttgttcagccatgctgaaaaggtggagaaggaattgaaagagaaccctgcaccatcagagtctgatattgaggcagctagagttgttgtcaaggaaaaaggtgatgcggttgcacagcttaaagctgcaaaagctagcaaacaagaaatcacagctgctgttgctgagcttaacaaggcaaaagaaaatgtctcaaggctggaggaaagatctaagttgaagcccggaattccgtacagagatgatgggacagtagcttatgagaatgacttcttcaaacgccaggcttttctgactgtgtctggacagcttcaagttgagacctatgcatgtgctcttagcagtgtttatacctttggaccaacattccgtgcagaaaactcccatacatcacgacatttggcagagttttggatggttgaaccagaaatcgcatttgctaacttgcaggatgatatgaactgtgcagaaagatatgtacagtacctttgcaagtggcttcttgagcattgccgggaagacatggaattcatggtgaaaaattacgataagactgcaattgagcgtctggagcttgtttcctcgacaccttttcagcgcatttcatatacaaaagctgttgagctattgaaaaatgtcactgataagaaattcgaaaacaaggttgaatggggaattgatttagcttcagagcatgaaaggtatttaaccgaggtgatatttaagaagccggtgattgtttataactatcccaaagaaataaaggcattttatatgagactcaatgatgatcagaagactgtagctgctatggatgttcttgtgcccaaggttggtgagttggttggtggaagccaaagggaggaacgtctggaccttctcaaaacaaggatacaagacgccgggttgcctttggagccatatgaatggtacttggacctccgccgctttggatctgtcaagcacagtggttttggtttgggttttgaaagaatgattctttttgccactggtttggagaacatcagagatgtcatccccttccctagatacccagggagggctgatctctaa

SEQ ID NO: 9988 - protein, 559 aa, Oryza sativa
MAEDAAAAAMAAASLSDDLEPATDRTRIRSILADGAARAGERVVVGGWVKTGREQGKGTFAFLELNDGSCASNLQVLVDAAVHPLAPLTATGTSVLVEGELKKPPEGAKQRVELRVDRVIEVGEVDPAAYPLPKTKLTLENLRDVVHLRSRTNTIGAVARIRHQLACATHRFFDENGFLYVHTPIITTSDCEGAGEMFQVTTLFSHAEKVEKELKENPAPSESDIEAARVVVKEKGDAVAQLKAAKASKQEITAAVAELNKAKENVSRLEERSKLKPGIPYRDDGTVAYENDFFKRQAFLTVSGQLQVETYACALSSVYTFGPTFRAENSHTSRHLAEFWMVEPEIAFANLQDDMNCAERYVQYLCKWLLEHCREDMEFMVKNYDKTAIERLELVSSTPFQRISYTKAVELLKNVTDKKFENKVEWGIDLASEHERYLTEVIFKKPVIVYNYPKEIKAFYMRLNDDQKTVAAMDVLVPKVGELVGGSQREERLDLLKTRIQDAGLPLEPYEWYLDLRRFGSVKHSGFGLGFERMILFATGLENIRDVIPFPRYPGRADL

SEQ ID NO: 9989 - DNA, 1668 bp, Oryza sativa
  CDS (1)..(1668)
atggcggccgccgcggcgacccgcctcctccgccttgccccgcgccgcctccagggcccacccagggcgtgcccgttcgccgccctcccgctccacccgacgccggcccggctcgccgccaccacctcgaggtggcgccgcttctgcgccgccgcgcaggcctcggcgccgcccccgccaccggccgccacggcggcggcggcggcggcctcgggggaggccgtgggggagttcaggagacggacgcgggtggcggatgtcaagggaggggaggacgagggcgccgcgtgggttggaaagcagctcgccgtgcgcgggtgggtgcgcacctgccgcgcccagaggaccgtcaccttcgtcgaggttaatgatggttcttgcttgtccaacatgcaatgtgtattgactcctgatacagaaggctacgaccagatagactctatcactactggggcctctgtgttagtggaaggagttatagcaagcagccaaggtggtaaacaaaaagtggagttgaaggtttcaaagatcagtgtgattggagaaagtgatccaacatcttttcctatacaaaagaagcgggcatcaagagaatttctgagaactgtagcccatctccgtcctcggacaaatacttttggcgcagtggcaagagtgagaaatgctttggcatacgcaacccacaaattttttcaagacaacggatttgtttgggtagcaagccctattatcacagcatcagactgtgaaggagcaggggagcagttttatgtgacaacattgatttcgaatagtgctgaaggtggttctctagtcaaggatattccttctactaaggatggaagggttgattggtcacaggatttcttctgcaaaccagcatttctgacagtgtctgggcaactgaatggtgaaacatacgctacagctctatcagatgtttacacttttggtccaacatttagagctgaaaattcaaacacctcaagacatttggctgaattttggatgattgagcctgaacttgcctttgcggatctaaatgatgacatggcatgtgcgagttcatatctccagtatgtagtgaagtatgttctagagaactgcaaagaagatatggatttctttaatacatggattgaaaaagggatcatcgatagattaaatgacgtagttgagaaaaactttgttcacttgtcatattctgatgctattgagctacttgttgggtccaagaagaaatttgagttcccggtcaaatggggattggatctgcaaagtgagcatgaaagatatatcacagaagttgcttttggtgggcgcccggtgataattagagattatccaaaggaaatcaaagctttctatatgcgagagaatgatgatggtaaaacagttgctgcaatggatctattggttcctcgggttggtgaactcattggtggaagccaaagggaagaacgtcttgattaccttgaagctcgcttggatgagttaaatcttaacaaagatagctactggtggtacttagatctacgtcgatatggatcagttcctcatgctggttttggtcttggatttgaaagactagtacagtttgcaactggaatggacaacattagagacaccattccatttccccgggttccaggctctgcagagttttag

SEQ ID NO: 9990 - protein, 555 aa, Oryza sativa
MAAAAATRLLRLAPRRLQGPPRACPFAALPLHPTPARLAATTSRWRRFCAAAQASAPPPPPAATAAAAAASGEAVGEFRRRTRVADVKGGEDEGAAWVGKQLAVRGWVRTCRAQRTVTFVEVNDGSCLSNMQCVLTPDTEGYDQIDSITTGASVLVEGVIASSQGGKQKVELKVSKISVIGESDPTSFPIQKKRASREFLRTVAHLRPRTNTFGAVARVRNALAYATHKFFQDNGFVWVASPIITASDCEGAGEQFYVTTLISNSAEGGSLVKDIPSTKDGRVDWSQDFFCKPAFLTVSGQLNGETYATALSDVYTFGPTFRAENSNTSRHLAEFWMIEPELAFADLNDDMACASSYLQYVVKYVLENCKEDMDFFNTWIEKGIIDRLNDVVEKNFVHLSYSDAIELLVGSKKKFEFPVKWGLDLQSEHERYITEVAFGGRPVIIRDYPKEIKAFYMRENDDGKTVAAMDLLVPRVGELIGGSQREERLDYLEARLDELNLNKDSYWWYLDLRRYGSVPHAGFGLGFERLVQFATGMDNIRDTIPFPRVPGSAEF

SEQ ID NO: 9991 - DNA, 1704 bp, Glycine max
  CDS (1)..(1704)
atggcagacgcatcttctccgccgacggatcaactcgccgccatcaccctcgacgaggttcccaaagctaatttctccgaccgcgtccccatccgatccatcatctcccgcaccgacggcggctcgggcctcgccggcaggaaggcgcgcgtcggcggctgggtgaagacgggacgcaaagccgacaaggacgctttcgcgttcctggaaatcaacgacggaagctgcgccggcaacctccaggtcatcgtcgaagccgcgctgggcgaactcggccaactcgttcccaccggaacatgcgtcgtcgtcgacggccacctcaaactccctcccgctggcaccagacagaagatcgaactccgcgccgataaggtcctccacgtcggtcccgtcgatcccgccaagtatcctctgcccaaaatgagactcactctcgagttcctcagagatttcgttcaccttcgttccagaaccaacacgatatctgcggtggctagaattagaaatgctcttgcgtatgctacacatacatttttcaacaaggaagggtttctatacgtgcacacgcccattgttaccacaagtgattgcgagggtgcgggtgagatgtttcaggtgaccactttgctgagtgaggcggagagattggagaaggagttgttgcagaatccacctccgtcggaagcggatgtggaggcggctagggttgttgttcaggagaaaggggaggttgtgtctcagttgaaagctgccaaggcgagtaagcaggagattggtgctgctgtggatcagcttaagaaggcgaaggagagtttggctaaggtggaggagtggtctaagcttaagcctgggattcctaaaaaggatgatggaaaggtggattatggtaaagatttctttgcacgtcaagcgtttttgacggtttcaggtcagcttcaagtcgagtcttatgcttgtgctctgagtagtgtgtatacctttggccccacatttcgcgcggagaattctcacacttccaggcatttggccgagttttggatggttgaacctgagattgcttttgcagagttgaaggatgatatgaactgtgccgaggcatatgtgaaatttatgtgtcagtggttacttgacaactgccttgaggatatggagtttatggctgataagtttgataaaggttgcattgaccgtttgaaattggttgcttccactccctttattcgagttacatatacagaagcagtggaaatactagaagatgctgtgaagaatggtaagaaatttgaaaatgaagtgaaatggggaattgacttagcatctgagcatgaaagatacctaacagaggtaaagtttcagaagcccgtcattgtatataactatccaaaagatatcaaagcattctacatgcggctcaatgatgacttaaagacagtggctgctatggatgtgcttgtacccaaggttggagagctaattggtggaagccaaagggaagaacgttatgatgtcatccagacaagaataaaggagatgggtttgcctgttgagccatatgagtggtaccttgatctgaggcggtatggaacagtgaaacatgccggatttggccttggctttgaaaggatgattctctttgccactggcctggaaaatattagagatgtgattcccttcccacgatatcctggcagagcagatctatga

SEQ ID NO: 9992 - protein, 567 aa, Glycine max
MADASSPPTDQLAAITLDEVPKANFSDRVPIRSIISRTDGGSGLAGRKARVGGWVKTGRKADKDAFAFLEINDGSCAGNLQVIVEAALGELGQLVPTGTCVVVDGHLKLPPAGTRQKIELRADKVLHVGPVDPAKYPLPKMRLTLEFLRDFVHLRSRTNTISAVARIRNALAYATHTFFNKEGFLYVHTPIVTTSDCEGAGEMFQVTTLLSEAERLEKELLQNPPPSEADVEAARVVVQEKGEVVSQLKAAKASKQEIGAAVDQLKKAKESLAKVEEWSKLKPGIPKKDDGKVDYGKDFFARQAFLTVSGQLQVESYACALSSVYTFGPTFRAENSHTSRHLAEFWMVEPEIAFAELKDDMNCAEAYVKFMCQWLLDNCLEDMEFMADKFDKGCIDRLKLVASTPFIRVTYTEAVEILEDAVKNGKKFENEVKWGIDLASEHERYLTEVKFQKPVIVYNYPKDIKAFYMRLNDDLKTVAAMDVLVPKVGELIGGSQREERYDVIQTRIKEMGLPVEPYEWYLDLRRYGTVKHAGFGLGFERMILFATGLENIRDVIPFPRYPGRADL

SEQ ID NO: 9993 - DNA, 1704 bp, Glycine max
  CDS (1)..(1704)
atggcagactcatcttctccgccgacgaaccaactcgctgccaccaccctcgacgaggttcccaaagccaatttctccgaccgcgtccccattcgatccatcatctcccgccccgacggcggctcgggcctcgccggcagcaaggcgcgcgtcggcggctgggtgaaaacgggacgcaaagccgacaaggacgctttcgccttcctagaaatcaacgacggaagctgcgccggcaacctccaggtcatcgtcgaagccgcgctcggcgaactcggccaactcgttcccaccggaacatgtgtcgtcttcgacggccacctgaagctccctccttccggcaccaaacagaagatcgaactccgcgccgataaggtcctccacgtcggcccggtcgatcccgccaagtatcctctgcccaaaatgagactcactctcgagttcctcagagatttcgttcaccttcgttccagaaccaacacgatatctgctgtggctagaattagaaatgctcttgcgtatgctacacacacatttttcaacaaggaagggtttctttacgtgcacacgcccattgttaccacgagtgattgtgagggtgcgggtgagatgtttcaggtgacaactttgctgagtgaggctgagagattggagaaggagttcttgcagaatccgcctccgtcggaggcagatgtggaggtggctaggtttgttgttcaggagaaaggggaggttgtgtctcagttgaaagctgccaaggcgagtaagcaggagatcggtgctgctgtggatcagcttaagaaggcaaaggagagttttgctaaggtggaggagaggtctaagcttaagcctgggattcccaggaaggatgatggaaaggtggattatgggaaagatttctttgcacgtcaagcatttttgacggtttcgggtcagcttcaagttgagtcttatgtatgtgctctcagtagtgtgtatacctttggaccaacatttcgggcggagaattctcacacttccaggcatttggctgagttttggatggtagaacccgagattgcatttgcagagttgaaggatgatatgaactgtgccgaggcatatgtgaaattcatgtgtcagtggttacttgacaactgtctcgaggatatggagtttatggctgataagtttgataaaggttgcattgaccgtttgaaattggttgcttccacacccttcattcgagttacatatacagaagcagtggaattactagaagatgctgtgaagaatggtaagaaatttgaaaatgaagtgaaatggggaattgatttagcatctgagcatgaaagatacctaacagaggtgaagtttcagaagcccgtcattgtatacaactatccaaaagatatcaaagcattctacatgcggctcaatgatgacttaaagacagtggcggcaatggatgtgcttgtacccaaggttggagagctaattggtggaagccaaagggaagagcgttgtgatgtcattcagacaagaataaaggagatgggtttgcctattgagccatatgagtggtaccttgatctgaggcggtatggaacagtaaaacatgccggatttgggcttggctttgaaaggatgattctctttgtcaccggcctggagaatattagagatgtgattcccttcccacgatatcctggcagagcagatctatga

SEQ ID NO: 9994 - protein, 567 aa, Glycine max
MADSSSPPTNQLAATTLDEVPKANFSDRVPIRSIISRPDGGSGLAGSKARVGGWVKTGRKADKDAFAFLEINDGSCAGNLQVIVEAALGELGQLVPTGTCVVFDGHLKLPPSGTKQKIELRADKVLHVGPVDPAKYPLPKMRLTLEFLRDFVHLRSRTNTISAVARIRNALAYATHTFFNKEGFLYVHTPIVTTSDCEGAGEMFQVTTLLSEAERLEKEFLQNPPPSEADVEVARFVVQEKGEVVSQLKAAKASKQEIGAAVDQLKKAKESFAKVEERSKLKPGIPRKDDGKVDYGKDFFARQAFLTVSGQLQVESYVCALSSVYTFGPTFRAENSHTSRHLAEFWMVEPEIAFAELKDDMNCAEAYVKFMCQWLLDNCLEDMEFMADKFDKGCIDRLKLVASTPFIRVTYTEAVELLEDAVKNGKKFENEVKWGIDLASEHERYLTEVKFQKPVIVYNYPKDIKAFYMRLNDDLKTVAAMDVLVPKVGELIGGSQREERCDVIQTRIKEMGLPIEPYEWYLDLRRYGTVKHAGFGLGFERMILFVTGLENIRDVIPFPRYPGRADL

SEQ ID NO: 9995 - DNA, 1653 bp, Glycine max
  CDS (1)..(1653)
atggctgctaccattggcgttggcgccgcaaaagccatatcaatcgcaatagcagttaggcacctccgaacaaaaccttacgcagcagcaacaacaacagcacttgctcttctttcactccacaaacctctcttcctccctcattcctctcccttctcctctcgccgcgctttttgcgccgcgacgcttcgcacctccgacaacagagtgcaacagttccgcaggaagcttagggtttccgaaatcaaagaaggcgacggcgccgacgtgctcggccgcaacctagtcgtgcagggctgggtccgcacgcttcgcattcagagtagcgtcaccttcctcgagattaacgatggttcttgcctttctaacatgcaatgtgtgttgaattcggaggctgaaggttacgatcaggtagaatctggcttggttaccactggtgcttcagtgtgggtgcaaggagttgtggtgaagagtcaaggatcgaaacagaaagttgaattgaaggtcaacaaaatagtactgattggcaaaagcgatccctcctttcccatccaaaagaaaagagccagcagagaatttctaagaacaaaagcacatcttcgtgcgaggacaaatacttttggtgcagttgcaagggttaggaatgcattggcatatgctacacataagttcttccaagaaaatgggtttgtatgggtctccagtcctatcatcacggcatcagattgcgagggtgcgggtgaacagttctgcgttactaccttgataccaagttctcatgaaactaatgattctcctgttgatgctattccaaaaacaaatgatggattaattgactggtcacaagacttctttggaaaaccagcattcttgactgtttcaggtcaactcaatggtgaaacttatgccactgctctctctgatgtgtatacatttggtcctacattccgagcagaaaattctaacacttctaggcacttggctgaattttggatgattgaaccggagcttgcatttgctgatctaaatgatgacatggcttgtgcaactgcttatctccagtttgtaataagacatgttctcgataactgcaaggaagacatggagtttttcgatgcatggattaataaaggaatcattgatcgcttgagtgatgtagcagataaagatgttgtgcaaataacctacactgaagcgatagatctgctgtcaggagcaaataagaaatttgaattcccggtgaaatggggtagtgatcttcagagtgaacatgagcgttatataactgaagaggtattcagtggatgccctgtgataattagagactatccaaaggatattaaagcattctatatgcgacagaatgatgatggaaggacagttgcagccatggacatgttggttccagggattggtgaacttattggtggaagccaaagagaagaaaggcttgagtatctagaagctcgtttagatgatttaaagctgaacaaggatgcatattggtggtatcttgatttgcgtcgatatggttcagtacctcatgcaggctttggtttggggtttgaaagacttgtccaatttgcaactggaatggacaatataagggatgttattccttttcctcgaactcctggctcggctgagttttag

SEQ ID NO: 9996 - protein, 550 aa, Glycine max
MAATIGVGAAKAISIAIAVRHLRTKPYAAATTTALALLSLHKPLFLPHSSPFSSRRAFCAATLRTSDNRVQQFRRKLRVSEIKEGDGADVLGRNLVVQGWVRTLRIQSSVTFLEINDGSCLSNMQCVLNSEAEGYDQVESGLVTTGASVWVQGVVVKSQGSKQKVELKVNKIVLIGKSDPSFPIQKKRASREFLRTKAHLRARTNTFGAVARVRNALAYATHKFFQENGFVWVSSPIITASDCEGAGEQFCVTTLIPSSHETNDSPVDAIPKTNDGLIDWSQDFFGKPAFLTVSGQLNGETYATALSDVYTFGPTFRAENSNTSRHLAEFWMIEPELAFADLNDDMACATAYLQFVIRHVLDNCKEDMEFFDAWINKGIIDRLSDVADKDVVQITYTEAIDLLSGANKKFEFPVKWGSDLQSEHERYITEEVFSGCPVIIRDYPKDIKAFYMRQNDDGRTVAAMDMLVPGIGELIGGSQREERLEYLEARLDDLKLNKDAYWWYLDLRRYGSVPHAGFGLGFERLVQFATGMDNIRDVIPFPRTPGSAEF

SEQ ID NO: 9997 - DNA, 1716 bp, Arabidopsis thaliana
  CDS (1)..(1716)
atgggtgatgagattgtgcctccggcgaatcagttagccgccgataacttggaaaacgatggatctacggtgcagaaagcgcaattttcagacagggttctgattcgatcgattttgggcggcggagctaaactcgccggtcaaaaggttagaatcggtggttgggttaaaaccggaagacagcaagggaaagggacttttgctttccttgaggttaacgatgggtcttgtccagcgaatctccaggttatggttgattcatctctttatgatctctctaggttggttgcgactggaacttgtgttactgttgatggagttttgaagattcctccggaaggtaaaggtttgaagcagagtattgagcttagcgttgagacggtgattgcggtgggaactgttgatccgactacgtatccgcttcctaagactaagttgactcctgagtttctcagagatgtgcttcatcttcgttctaggactaacttgatctcagcagttgcaagaatccgtaacgcgcttgcttttgcgacgcatagtttttttcaagaacatagtttcctttacattcacactcctatcatcacaacaagtgattgtgaaggtgctggtgaaatgttccaagtgacaaccttgatcaatcacactgagagggttgagcaggatctcattgataaccctccaccaactgaggctgacgttgaagcggccaggcttattgtcaaggagagaggtgaagctgttgcgcaacttaaagttgccaaggcgagcaaggaagagatcactgcttccgttgctcaactaagtgtagcaaaggcgagtttagctcatgttgaagagaggttaaggcttaagcctggactacctaagaatgatggtaaaattgattattccaatgatttctttggccgtcaagctttcttgacagtttctggtcagttacaagtggagacctatgcttgcgctcttagcagcgtgtatacatttggtcccacttttcgggcagagaactctcacacttcaaggcatttagctgagttctggatggttgagcctgaaattgcttttgcagatatacatgacgacatgaactgtgcagaggcgtatgtgaaatacatgtgcaaatggttgatggataaatgtggcgatgacatggaacttatggataagaacgtcgacgagggatgcactaaaaggctaaacatggttgccaaagcctcgtttaagcgtgtaacatacactgaagcaatagagcgacttgagaaagctgtagctcaaggaaaggttgtttttgataacaaagtggagtggggaatcgacttggcctcagagcatgaaagatacttgacagaggttgagtttgatcaaaagccaataattgtgtataactacccgaaaggaatcaaagctttttacatgagacttaacgatgatgagaagacagttgctgccatggatgtccttgttccaaaggttggagaactcattggtggaagccaaagggaagaacgatatgatgttatcaaacagaggatcgaggagatgggtctaccaatggagccatatgagtggtacctagacttgcgtcgttatggaacagtgaagcattgtggatttggacttggcttcgaacgtatgattcagttcgctacaggaattgataacatcagagatgttattcctttccctcgctatcctggaaaagctgatctctga

SEQ ID NO: 9998 - protein, 571 aa, Arabidopsis thaliana
MGDEIVPPANQLAADNLENDGSTVQKAQFSDRVLIRSILGGGAKLAGQKVRIGGWVKTGRQQGKGTFAFLEVNDGSCPANLQVMVDSSLYDLSRLVATGTCVTVDGVLKIPPEGKGLKQSIELSVETVIAVGTVDPTTYPLPKTKLTPEFLRDVLHLRSRTNLISAVARIRNALAFATHSFFQEHSFLYIHTPIITTSDCEGAGEMFQVTTLINHTERVEQDLIDNPPPTEADVEAARLIVKERGEAVAQLKVAKASKEEITASVAQLSVAKASLAHVEERLRLKPGLPKNDGKIDYSNDFFGRQAFLTVSGQLQVETYACALSSVYTFGPTFRAENSHTSRHLAEFWMVEPEIAFADIHDDMNCAEAYVKYMCKWLMDKCGDDMELMDKNVDEGCTKRLNMVAKASFKRVTYTEAIERLEKAVAQGKVVFDNKVEWGIDLASEHERYLTEVEFDQKPIIVYNYPKGIKAFYMRLNDDEKTVAAMDVLVPKVGELIGGSQREERYDVIKQRIEEMGLPMEPYEWYLDLRRYGTVKHCGFGLGFERMIQFATGIDNIRDVIPFPRYPGKADL

SEQ ID NO: 9999 - DNA, 1704 bp, Arabidopsis thaliana
  CDS (1)..(1704)
atggcggccacgtttctgccggcgacatctctccgtctaactcaaaactctactctccgcttcttatcattcttcaccatttctaacccttcttattctctcttccgtcctctacgccgccgtgttctccctcccttcgatgcttttccggccaattctcgccggagatgcttttgcacagctgtttcggaatctctcggctccggtgatggaaataaagttgagagttacgagaaacgatttgggagtaaagttggagaattcaggaaaaagttgaggatagctgaagtgaaaggaggagcggacgaaggactgagtcgggtcgggcagagccttaacattatgggttgggttcgtacacttcgatctcagagcagtgtcacattcattgagataaatgatggttcatgcttatcgaatttgcaatgtgtgatgacttcggatgcagaagggtatgatcaggtagaatctggttcgatcttgactggagcatcagtatctgtacaaggtactattgtagctagccagggaacgaagcaaaaagtggaacttaaggtggagaaaatcattgtggttggagagtgtgactcttcctatccgatccagaagaaaagggtcagccgggaattcttgagaaccaaggctcatttacgtcctagaaccaacacttttggggcggtggcaagagttaggaatactctggcatatgctacacacaagttctttcaagaaagtggatttgtctgggtggcaagcccaattatcacagcttcggattgtgaaggagcaggagaacagttctgtgtcactacacttattcctagctcccatgagaacaccgatacttccattgatgcgattccgaaaacaaagggagggttgatcgattggtctcaggacttttttgggaaaccagcattcttaaccgtctctgggcaacttaatggagaaacttatgcaaccgctctctcagatgtatacacatttggtcctacatttcgagctgagaattccaacacgtcaaggcacttagccgaattctggatgattgaaccagaacttgcttttgccgacctggatgatgacatggcctgtgccactgcctacctccagtacgtagtaaagtacgttcttgataattgcaaggaagacatggagtttttcgatacatggattgagaaaggaatcattcgccgcttgagtgacgtagctgagaaagagtttctacagctggggtacacagacgccattgaaattcttctgaaagcaaacaaaaaattcgattttccggtgaagtgggggctggatctgcagagtgagcatgaaaggtacataacagaagaggcttttgggggtcgacctgtgataataagagactatccgaaggagatcaaagcattctatatgcgggagaacgatgatgggaagacagtggcagcaatggatatgcttgtgcctcggataggagagctgataggtggaagccaaagagaggaaaggcttgaggtgttggaagcgaggcttgatgagttgaaactcaacaaagagagctactggtggtacctcgacctccgccgctatggttcagttcctcatgcaggatttggactagggtttgagagactggtccaatttgtcaccggaattgataatatcagagacgttattcctttcccgcgcacacctgcctctgctgaattctga

SEQ ID NO: 10000 - protein, 567 aa, Arabidopsis thaliana
MAATFLPATSLRLTQNSTLRFLSFFTISNPSYSLFRPLRRRVLPPFDAFPANSRRRCFCTAVSESLGSGDGNKVESYEKRFGSKVGEFRKKLRIAEVKGGADEGLSRVGQSLNIMGWVRTLRSQSSVTFIEINDGSCLSNLQCVMTSDAEGYDQVESGSILTGASVSVQGTIVASQGTKQKVELKVEKIIVVGECDSSYPIQKKRVSREFLRTKAHLRPRTNTFGAVARVRNTLAYATHKFFQESGFVWVASPIITASDCEGAGEQFCVTTLIPSSHENTDTSIDAIPKTKGGLIDWSQDFFGKPAFLTVSGQLNGETYATALSDVYTFGPTFRAENSNTSRHLAEFWMIEPELAFADLDDDMACATAYLQYVVKYVLDNCKEDMEFFDTWIEKGIIRRLSDVAEKEFLQLGYTDAIEILLKANKKFDFPVKWGLDLQSEHERYITEEAFGGRPVIIRDYPKEIKAFYMRENDDGKTVAAMDMLVPRIGELIGGSQREERLEVLEARLDELKLNKESYWWYLDLRRYGSVPHAGFGLGFERLVQFVTGIDNIRDVIPFPRTPASAEF

SEQ ID NO: 10001 - DNA, 1719 bp, Arabidopsis thaliana
  CDS (1)..(1719)
atggctgatgagattgtgccgccggcgactcaattagccgccgtatccttagaaaacgatggatctacggtgcaaagagctcaattctctaaccgggttttgattcgaacgattttggatcgacctgacggcggagctggactcgccggtcaaacggttcgaatcggtggttgggtaaaatccggaagagatcaagggaaaagaacgttttctttccttgcggttaacgatggatcttgtccagcgaatcttcaggttatggtggatccgtctctctatgatgtctctaacttggttgctacgggaacttgtgtgactgttgatggagttttgaaggttccaccgaaaggtaaaggtacgcagcagcagattgagcttaacgttgtgaaggtgattgatgttggaacggtggatgcgtctaagtatccacttcctaagactaagttgactcttgagactttgagagatgtgcttcatcttcgttctagaactaactcgatctcagctgttgcaagaattcgtaatgctcttgcttttgcgactcacagtttctttcaagagcatagtttcctttacattcacactcctatcatcacgacaagtgattgtgaaggtgctggtgaaatgttccaagcaacaactttgatcaattacactgagaggttggagcaggatctcattgataaccctccgcctactgaggctgatgttgaagctgcgaggctcattgtcattgagagaggtaatgttgtagcggaactgaaagctgccaaagcaagcaaggaagcgatcactgctgctgttgctgaacttaaaatagcaaaggagacttttgctcatattgatgagaggtcgaggcttagacctggactacctaagaaagatggaaacattgattattccaaggatttctttggtcgtcaagctttcttgacagtttccggtcaattacaagtggagacctatgcttgtgctcttagcaatgtgtatacatttggcccgactttccgggcagagaactctcacacttcaaggcatcttgctgaattctggatggttgagcctgagattgcttttgcagatctagaggacgacatgaactgtgcagaggcgtatgtgaaatacatgtgcaactggttgcttgagaaatgttacgctgacatggaacttatggctaagaatttcgactcaggatgcattgacaggctaaaattggttgcctctactccgtttgggcgtataacatacactaaagcaatagagctacttgaggaagctgtggctaaaggaaaggaatttgataacaatgtggagtggggaatcgacttagcctcggagcatgaaagatacttgacagaggttctgtttcaaaagccacttattgtctataactacccgaaaggaatcaaagctttttacatgagacttaacgatgatgagaagacagttgctgccatggatgtcctcgttccaaaggttggagaactcattggtggaagccaaagggaagaacgatatgatgtcatcaaaaagaggattgaggagatgggtcttccaatagagccatatgagtggtacctagacttgcgccgttatggaacagtgaagcattgtgggtttggacttggcttcgaacgtatgattctcttcgctactggacttgataacatcagagacgttattcctttccctcgctatcctggaaaagctgatctttga

SEQ ID NO: 10002 - protein, 572 aa, Arabidopsis thaliana
MADEIVPPATQLAAVSLENDGSTVQRAQFSNRVLIRTILDRPDGGAGLAGQTVRIGGWVKSGRDQGKRTFSFLAVNDGSCPANLQVMVDPSLYDVSNLVATGTCVTVDGVLKVPPKGKGTQQQIELNVVKVIDVGTVDASKYPLPKTKLTLETLRDVLHLRSRTNSISAVARIRNALAFATHSFFQEHSFLYIHTPIITTSDCEGAGEMFQATTLINYTERLEQDLIDNPPPTEADVEAARLIVIERGNVVAELKAAKASKEAITAAVAELKIAKETFAHIDERSRLRPGLPKKDGNIDYSKDFFGRQAFLTVSGQLQVETYACALSNVYTFGPTFRAENSHTSRHLAEFWMVEPEIAFADLEDDMNCAEAYVKYMCNWLLEKCYADMELMAKNFDSGCIDRLKLVASTPFGRITYTKAIELLEEAVAKGKEFDNNVEWGIDLASEHERYLTEVLFQKPLIVYNYPKGIKAFYMRLNDDEKTVAAMDVLVPKVGELIGGSQREERYDVIKKRIEEMGLPIEPYEWYLDLRRYGTVKHCGFGLGFERMILFATGLDNIRDVIPFPRYPGKADL

SEQ ID NO: 10003 - DNA, 1401 bp, Borrelia burgdorferi B31
  CDS (1)..(1401): transl_table=11
atgataaataaaatgtttgcaagcattaaagatattttaaaaaacccaattttaaacagcaatgttacaataaacggctggattagaaccaaaagaagtaatggcaaaattggatttatagaaattaatgatggttcaacgcttaaaggaattcaagctgtaataaacgaagaagaaaatcaatttagtgaaaaagatctaaaaaaattaacaacaggaacaagtatatcgttaacgggcctattagtagaaagtcctgcaaaagggcaaaattatgaaataaaaacacatagttttaatgtaatcggggaaacagacccagaaacttacccattgcaaaagaaaagacattcttttgaatttttaagagaaataccccatttaagaatacgaaccaacacatttggagctattgctagggtaagaaacaaaatttcatacaaaattcatgaatatttccaaaaaaatggttttttttatattaatacaccaataattacatcaaatgatggggaaggtgctggagaaatgtttagggtttccacactaaaatttaataaactaaacaatgcacttagcaatattgattttaaagacgatttttttggaaaagaagcttttctctctgtcactggtcaattgcatggggaagcatatgcaatggctttatctaaaatatatacattcggaccaacatttagagcagaaaattctaacaccacacgccacgcttcagaattttggatgatagaaccagaaatggctttttataagcttaacgacaatattgccctagcagaagatctcttgaaatatcttttaagttcaattttaaacgaatgctcacaagatatggattttttagaaaattacattgaaaaaggtttaattaaaaaactagaaaatgtaataaattcaaattttgaggttattacctatactaaagcaattgaaattcttgaaaactcaaaaaaaaattttgaaataaaaccttactggggaatagatttgcaaacagatcacgaaagatacctaacagaagagacttttaaaaaaccggtagtggtcattgattatccaaaaaatttcaaagcattttacatgaaagcaaataaagacaataaaactgttaaaggaatggacatacttgttccaaaaattggagagattatagggggaagcgaaagagaagatgaccttcaaaaattagaaaatagaataaaagaattaaacttaaacattgaacatctaaactggtatcttgatctaagaagatttggctcggctcctcattctggctttggacttggacttgaaagattggtgcaatactcaacaggaatatctaatataagagattcaataccattcccaaggactcctaaaaatctttatttttaa

SEQ ID NO: 10004 - protein, 466 aa, Borrelia burgdorferi B31
MINKMFASIKDILKNPILNSNVTINGWIRTKRSNGKIGFIEINDGSTLKGIQAVINEEENQFSEKDLKKLTTGTSISLTGLLVESPAKGQNYEIKTHSFNVIGETDPETYPLQKKRHSFEFLREIPHLRIRTNTFGAIARVRNKISYKIHEYFQKNGFFYINTPIITSNDGEGAGEMFRVSTLKFNKLNNALSNIDFKDDFFGKEAFLSVTGQLHGEAYAMALSKIYTFGPTFRAENSNTTRHASEFWMIEPEMAFYKLNDNIALAEDLLKYLLSSILNECSQDMDFLENYIEKGLIKKLENVINSNFEVITYTKAIEILENSKKNFEIKPYWGIDLQTDHERYLTEETFKKPVVVIDYPKNFKAFYMKANKDNKTVKGMDILVPKIGEIIGGSEREDDLQKLENRIKELNLNIEHLNWYLDLRRFGSAPHSGFGLGLERLVQYSTGISNIRDSIPFPRTPKNLYF

SEQ ID NO: 10005 - DNA, 1401 bp, Escherichia coli O157:H7 str. Sakai
  CDS (1)..(1401): transl_table=11
atgagcgttgtgcctgtagccgacgtactccagggccgcgtagccgttgacagcgaagtcaccgtacgcggatgggtacgtacccgccgagattcaaaagctggcatctccttcctcgccgtttatgacggttcctgctttgatcctgtacaggctgtcatcaataattctctgcccaattacaatgaagacgtcctgcgtctgaccaccggctgctcggtcattgtgacgggtaaagtcgtggcgtcgccgggccaggggcaacaatttgaaattcagaccagcaaggttgaagttgctggttgggttgaagatccagacacttacccgatggcggcaaaacgccacagcattgagtatctgcgtgaagtcgctcacctgcgtccgcgcacaaacctgattggtgccgtcgcgcgcgttcgccatacgctggcgcaggcgctgcatcgcttctttaacgagcagggattcttctgggtttcaacgccactgattactgcgtctgataccgaaggggctggcgaaatgttccgcgtttctacgctggatctggaaaatctgccgcgtaacgatcagggcaaagtggatttcgacaaagacttctttggtaaagagtctttcctgaccgtatctggccagttgaacggcgaaacctacgcttgcgcattatccaaaatttataccttcggcccgactttccgtgctgaaaactccaacaccagccgtcacctggcggaattctggatgctggagccggaagtggcgtttgctaacctgaacgatatcgcgggtctggctgaagccatgctgaaatatgtcttcaaagcggttctcgaagaacgcgctgacgacatgaaattcttcgctgaacgcgtagataaagatgccgtttcacgtctggaacgctttattgaggccgatttcgcgcaggtggattacaccgaagcagtaaccattctcgaaaactgcggcaggaagtttgaaaacccggtttactggggcgtcgatctctcttctgagcatgagcgttatctggcggaagaacactttaaagcaccggtagtggttaaaaactatccgaaagatattaaagcgttctatatgcgcctcaacgaagacggtaaaaccgttgcggctatggatgttctggctccgggcatcggtgagatcattggtggctcccagcgtgaagagcgtctggacgtgctggacgagcgtatgctggaaatgggcctgaacaaagaagattactggtggtatcgcgatctgcgtcgctacggtactgttccgcattccggtttcggtcttggttttgaacgcctgattgcttacgtaactggtgtgcaaaacgtgcgtgatgtgattccgttcccacgaactccgcgtaacgccagcttctaa

SEQ ID NO: 10006 - protein, 466 aa, Escherichia coli O157:H7 str. Sakai
MSVVPVADVLQGRVAVDSEVTVRGWVRTRRDSKAGISFLAVYDGSCFDPVQAVINNSLPNYNEDVLRLTTGCSVIVTGKVVASPGQGQQFEIQTSKVEVAGWVEDPDTYPMAAKRHSIEYLREVAHLRPRTNLIGAVARVRHTLAQALHRFFNEQGFFWVSTPLITASDTEGAGEMFRVSTLDLENLPRNDQGKVDFDKDFFGKESFLTVSGQLNGETYACALSKIYTFGPTFRAENSNTSRHLAEFWMLEPEVAFANLNDIAGLAEAMLKYVFKAVLEERADDMKFFAERVDKDAVSRLERFIEADFAQVDYTEAVTILENCGRKFENPVYWGVDLSSEHERYLAEEHFKAPVVVKNYPKDIKAFYMRLNEDGKTVAAMDVLAPGIGEIIGGSQREERLDVLDERMLEMGLNKEDYWWYRDLRRYGTVPHSGFGLGFERLIAYVTGVQNVRDVIPFPRTPRNASF

SEQ ID NO: 10007 - DNA, 1392 bp, Clostridium acetobutylicum ATCC 824
  CDS (1)..(1392): transl_table=11
atggaaaacgtacttgtaaaacaactttatagattatccagtgaatttggtggaaaaaaagtaagactatcaggctgggtaagaactataagagcatctaaatcttttggatttattgaaatcaatgatggaagtttctttaagaacatccaggttgtttttgatgataaacttgataattttaaagaaatttctaagtttataataagctcaacaattactgttgaaggagaatttgtgcttactcctaatgctaagcagccatttgaaatacacgctgaaaatattacgcttgaaggtaattcagacaatgactatccacttcaaaagaaaagacatactcttgaatatctaagaagtattgctcacttaagacctagaagtaatactttttctgcagtattcagagttcgttctttagcagcatatgcagtacacaagttttttcaggaaagagactttgtatatgtaaatacaccgctaataactgcaagtgatgctgaaggagcaggagaaatgtttcaagtaacaactcttgatctaaaaaatccacctaaaaatgaagagggaaatatagatttttcaaaagatttctttggaaaaaaagcaaaccttacagttagtggtcagctttcagcagagacttttgcgttagctttcagaaatgtatatactttcggaccaacatttagagcagaagaatcaaacactacaagacatgcagctgaattttggatgatagagcctgaaatggcatttgcagaacttagcgactatctagatacagctgaggaaatggttaagtatataataaacttcgttatggaaaatgctccagaggaaatggaattctttaatactagaatagataaagggttatttgatagactacacaatgttgtaaacagcgaatttggaagaataacttatactgaagctgttgatatccttgaaaaatcaggagaaaaatttgagtatccagttaagtggggaatagaccttcaaactgagcatgaaagatatttaactgataaggtatttaaaaagccattgtttgtaacggattatcctaaggatataaaagctttctatatgagaattaatgatgacaacaagacagtagcagcagcagatttacttgttccaggagtaggagagattataggaggaagtcaaagagaagaaagacttgctgttctcgaaaaaagaatggaagaattaaatttaaataaagaagactactggtggtatcttgaacttagaaaatatggagaaactaagcattcaggatatggacttggatttgaaagaatgattatgtatttaactggcatttcaaatataagagatgtaataccattcccaagaacaacaggaagtgcagaattctaa

SEQ ID NO: 10008 - protein, 463 aa, Clostridium acetobutylicum ATCC 824
MENVLVKQLYRLSSEFGGKKVRLSGWVRTIRASKSFGFIEINDGSFFKNIQVVFDDKLDNFKEISKFIISSTITVEGEFVLTPNAKQPFEIHAENITLEGNSDNDYPLQKKRHTLEYLRSIAHLRPRSNTFSAVFRVRSLAAYAVHKFFQERDFVYVNTPLITASDAEGAGEMFQVTTLDLKNPPKNEEGNIDFSKDFFGKKANLTVSGQLSAETFALAFRNVYTFGPTFRAEESNTTRHAAEFWMIEPEMAFAELSDYLDTAEEMVKYIINFVMENAPEEMEFFNTRIDKGLFDRLHNVVNSEFGRITYTEAVDILEKSGEKFEYPVKWGIDLQTEHERYLTDKVFKKPLFVTDYPKDIKAFYMRINDDNKTVAAADLLVPGVGEIIGGSQREERLAVLEKRMEELNLNKEDYWWYLELRKYGETKHSGYGLGFERMIMYLTGISNIRDVIPFPRTTGSAEF

SEQ ID NO: 10009 - DNA, 1404 bp, Haemophilus influenzae Rd KW20
  CDS (1)..(1404): transl_table=11
atgtctaaagtggcatcaattgttgatgtattacaagggaaagtggcgattggtgaaaccgtcactgtgcgtggttgggttcgtacccgtcgcgattctaaagcaggcttatctttcttagcggtttatgacggttcttgttttgatccaattcaagcgattattaataacgatattgaaaattacgaaagcgaaattttacgtttaacaacaggctgttctgtgattgtaaccggtaaagtcgttgaatcacctgcagaaggacaagcggttgaattacaagcagaaaaagtggaagtgacagggtttgttgaagatcctgatacttacccaatggcagcaaaacgccactctatcgaatatttacgcgaagtagctcacttacgccctcgtaccaatattattggcgcggtcgcacgtgttcgccattgcttatctcaagcaattcaccgtttcttccatgagcaaggtttctactgggtggcaaccccattaattactgcatcagacactgaaggtgcgggtgaaatgttccgtgtttctacacttgatttagaaaatcttccacgtagtgaaaatggaaaagttgatttcagccaagatttcttcggtaaagaatcatttttaacggtttcaggtcagttaaacggcgaaacctatgcttgtgcattaagcaaaatttatacttttggcccaacattccgtgcagaaaactctaataccacccgtcacttagcggaattctggatggttgaacccgaagttgcatttgcaaccttagcggataacgcaaaacttgcagaagatatgttgaaatacgtattccgtgcagtattagcagagcgtaaagacgacttacaattctttgaaaaacatgtagataaagatgttattactcgtttagaaaactttgtaaactcagattttgcgcaaattgactataccgatgccattgatgtgttattaaaatctggtaagaaatttgaattccctgtttcttggggcattgatctttcttctgaacacgaacgtttcttagcggaagaatatttcaaatcaccagttgtggtaaaaaactatccaaaagacattaaagcattctatatgcgtttaaatgatgatgaaaaaactgtggcggcaatggacgtgttagccccaggaattggtgaaatcatcggtggttcacaacgtgaagaacgtttagaggtgcttgataaacgcatggaagaaatgggattaaatccagatgattattggtggtatcgcgatcttcgtaaatacggcagtgttccacattctggttttggtcttggttttgaacgcttaattgtctatgtaactggcgtgcaaaatattcgtgatgtaattccattcccacgcgcaccaagaaatgcgaatttctaa

SEQ ID NO: 10010 - protein, 467 aa, Haemophilus influenzae Rd KW20
MSKVASIVDVLQGKVAIGETVTVRGWVRTRRDSKAGLSFLAVYDGSCFDPIQAIINNDIENYESEILRLTTGCSVIVTGKVVESPAEGQAVELQAEKVEVTGFVEDPDTYPMAAKRHSIEYLREVAHLRPRTNIIGAVARVRHCLSQAIHRFFHEQGFYWVATPLITASDTEGAGEMFRVSTLDLENLPRSENGKVDFSQDFFGKESFLTVSGQLNGETYACALSKIYTFGPTFRAENSNTTRHLAEFWMVEPEVAFATLADNAKLAEDMLKYVFRAVLAERKDDLQFFEKHVDKDVITRLENFVNSDFAQIDYTDAIDVLLKSGKKFEFPVSWGIDLSSEHERFLAEEYFKSPVVVKNYPKDIKAFYMRLNDDEKTVAAMDVLAPGIGEIIGGSQREERLEVLDKRMEEMGLNPDDYWWYRDLRKYGSVPHSGFGLGFERLIVYVTGVQNIRDVIPFPRAPRNANF

SEQ ID NO: 10011 - DNA, 1401 bp, Salmonella enterica subsp. enterica serovar Typhimurium str. LT2
  CDS (1)..(1401): transl_table=11
atgagcgttgtgcctgtagccgacgtactccagggccgcgtagccgttgaccaagaagtcaccgtgcgcggatgggtgcgtacccgccgagattcaaaagctggcatctccttcctcgccgtttatgacggctcctgctttgatcctgtacaggctgtcattaataattctctgcccaattataatgaagaagtattacacctgacgacaggctgctccgtggtagtaacaggtaaggttgtcgcgtcgccgggacaggggcaaagtttcgaaatccaggccacgaaagtagaagtcgcaggctgggtggaagatccggatacctacccgatggcggcaaaacgccatagcattgagtatctgcgtgaagtcgcgcatctgcgcccgcgcaccaacctgattggcgcggtagcgcgcgtccgccatactctggcgcaggcgctgcatcgcttcttcgatgagcagggtttcttttgggtctctaccccgctgattaccgcttccgataccgaaggcgctggcgaaatgttccgcgtctcaacgttggatctggaaaacctgccgcgtaacgaccagggcagagtagattttgacaaagacttttttggcaaagaatcattcctgaccgtctccggccagctcaacggtgaaacctatgcctgcgcgctgtccaaaatctatacttttgggccgaccttccgcgcggaaaattccaacaccagccgccacctggcggagttctggatgctggagccggaagtggcattcgccgatctggaagacaacgcccgtctggcggaagccatgctgaaatatgtcttcaacgcggttctggaagagcgtgcggatgacatgaagttctttgccgaacgcgtggataaagacgctatcgctcgtctggagcgttttgtctctaccgacttcgctcaggtggattacaccgatgcggtcgccattctggaacgctgtggtaagacatttgaaaacccggtgttctggggcgtcgacctctcttccgaacacgaacgttatctggcggaagagcatttcaaagcgccggtagtggtgaaaaactatccgaaagaaattaaagcgttttacatgcgccttaacgaagatggcaaaaccgtggcggccatggatgtgctggcgccgggaatcggcgaaatcatcggtggttcccagcgtgaagagcgtctggatgtgctggatgcccgtatggccgaaatggggctgaataaagaggattactggtggtatcgcgacttgcgtcgctacggtactgtaccgcattccggctttggcctgggctttgaacgccttatcgcttacgtcactggtgtgcaaaacgtgcgcgatgttattccgttcccacggaccccacgcaacgccagcttctga

SEQ ID NO: 10012 - protein, 466 aa, Salmonella enterica subsp. enterica serovar Typhimurium str. LT2
MSVVPVADVLQGRVAVDQEVTVRGWVRTRRDSKAGISFLAVYDGSCFDPVQAVINNSLPNYNEEVLHLTTGCSVVVTGKVVASPGQGQSFEIQATKVEVAGWVEDPDTYPMAAKRHSIEYLREVAHLRPRTNLIGAVARVRHTLAQALHRFFDEQGFFWVSTPLITASDTEGAGEMFRVSTLDLENLPRNDQGRVDFDKDFFGKESFLTVSGQLNGETYACALSKIYTFGPTFRAENSNTSRHLAEFWMLEPEVAFADLEDNARLAEAMLKYVFNAVLEERADDMKFFAERVDKDAIARLERFVSTDFAQVDYTDAVAILERCGKTFENPVFWGVDLSSEHERYLAEEHFKAPVVVKNYPKEIKAFYMRLNEDGKTVAAMDVLAPGIGEIIGGSQREERLDVLDARMAEMGLNKEDYWWYRDLRRYGTVPHSGFGLGFERLIAYVTGVQNVRDVIPFPRTPRNASF

SEQ ID NO: 10013 - DNA, 1392 bp, Nostoc sp. PCC 7120
  CDS (1)..(1392): transl_table=11
atggtaaatcgacgaattgcagaaatattgcggagtggtcaacctgatgagtctctggtagttcaaggctgggtaagaacaaagcgtgaacttaagggatttgcttttattgaagttaatgacggctcatcattaggtaatttgcaagttgtcatcaatcaggatttgccagactacgcagtaattgtcaaacaactaaacacaggtgcatcagttgaggtaaacggcgtattggtggcttcccaaggaaaaggacagcgtattgaattaaaagccgaagcagtgaaagtttatggtgaagctgaccccgaaacttatccactgcaaaagaaacgccactcttttgaatttttacgcacaattggacatttgcgatcgcgtactaattccttcggtgcagtgttccgtgtccgtaatgcttgttccgcagccattcaccaattcttccaggaaaggggctttttgtgggtacacacccccatcatcaccgctagcgactgcgaaggcgcaggggaactatttagcgtcaccagcttggatttaaagcagattccccgcacagaaaatcaaggaattgattacagccaagacttttttgctaaacccacctacttaacagtcagtggacaactagaagccgaagtcatggcgatggcttttagtaacgtctacaccttcggccccaccttccgtgcagaaaactccaacacctcccgccacttggcagaattttggatggttgagccagaaatggcattttgcgacttagaaggcgatatggatttagcagaggcttttctcaaacacatttttaatcatgtgttggaaaaatgcccagaagacatggaatttttcaatcaacgcattgataatactgtcttagcaacagccgaaaatattattaataatcaatttgaacgtctgacttacaccgatgccatcaaacttttagaaaaagctgatgttaaatttgaatatcccgtaagttggggcttagatttacaatcagaacacgaacgttacctagcagaacaactcttcaaaaagccagtcatcgttacagattaccccgcacagattaaagccttttatatgcggttgagcgacgatgaaaaaacagtccgcgcgatggatgtccttgcaccaaaaattggggaaatcattggtggttcccaaagagaagaacgtttagatgtgttggaacgccgagtattagcacaaggaatgcagcctgaagatttgtggtggtatctcgatttacgtcgttatggtactgttcctcacgctggtttcggcttgggttttgaacgactcgtgcaatttatcacaggaatgggcaatattcgggatgtaattcccttcccccggacaccacaaaacgctgagttttag

SEQ ID NO: 10014 - protein, 463 aa, Nostoc sp. PCC 7120
MVNRRIAEILRSGQPDESLVVQGWVRTKRELKGFAFIEVNDGSSLGNLQVVINQDLPDYAVIVKQLNTGASVEVNGVLVASQGKGQRIELKAEAVKVYGEADPETYPLQKKRHSFEFLRTIGHLRSRTNSFGAVFRVRNACSAAIHQFFQERGFLWVHTPIITASDCEGAGELFSVTSLDLKQIPRTENQGIDYSQDFFAKPTYLTVSGQLEAEVMAMAFSNVYTFGPTFRAENSNTSRHLAEFWMVEPEMAFCDLEGDMDLAEAFLKHIFNHVLEKCPEDMEFFNQRIDNTVLATAENIINNQFERLTYTDAIKLLEKADVKFEYPVSWGLDLQSEHERYLAEQLFKKPVIVTDYPAQIKAFYMRLSDDEKTVRAMDVLAPKIGEIIGGSQREERLDVLERRVLAQGMQPEDLWWYLDLRRYGTVPHAGFGLGFERLVQFITGMGNIRDVIPFPRTPQNAEF

SEQ ID NO: 10015 - DNA, 1326 bp, Schizosaccharomyces pombe
  CDS (1)..(1326)
atgaataaattccaactaccaaaaactttaaagtctttatggcatcacccacataatggagagttaataagcataaacggctgggtacgatctatccgaaaactaaaaaatgtttgttttgccatggtttctgatggtacatgtcaacaagcccttcaagtggtgacttcgcctgaacagagtaagaagctatcatatggtgctagtgtgaatattgaaggccagttggcagtttctaaaaacgcaaaacttggattgcagcagtatgaactgttggctgagaaaataaaaatttacggccagataaatgatgataactaccctattcagaaaaaacatttgactactgaaatgttacgacaaataccccatcttcgattacgaacagcaaaacaaggggagatttttcgtctccgttcagattcattaaaagcattgcgacaatttttttcaagcaaagattttacagagaccaaccccccgataataacttcttctgattgtgaaggagctggtgaagtatttaccttgaccccccaggagacgcataaaaataaaagttttgaaagagatgatcaaaagcatttttttgaccgacctgcatttttaactgtatccactcaattgcatctagaggctctagcattaggactgtccagagtgtatactatatcgccagcatttagagcagaacaaagtcatactagtcgacatttggcagaattttggatgctggaagcagaagttgcgttcatgacttcgctttcacaactaacatcacttatggaggatatgattaaatatactcttaattcattgatggagcagaactatcacagagatcattgggaccaactgcttaaaccgtggaaatgcatgacatattctgaagcaatagaagaattaagcgctgtgaaaaaaacatggaaataccctcctaaatggggaaacgatttaagtagtgaacatgaaaaatatctttgtgaaatcttacataaaactccggtattcgtgacggactatccacaaaaaattaaaccgttttatatgaaatcctctgggcccgatacagttgctgctgttgatttactcgttccacaggtgggtgaacttgctggaggttctttacgtaaagaccatttagatgagtataaaacttacccaccagaacttcaatggtatttagacctaatgaagtacagcaatgcgccacacggagggtttggcttagggatagaacgactgattgcttttctagaaggagaaaacacgaacgtaaaagaaactatacccttcccccgttcagtaggatccatttttgcatga

SEQ ID NO: 10016 - protein, 441 aa, Schizosaccharomyces pombe
MNKFQLPKTLKSLWHHPHNGELISINGWVRSIRKLKNVCFAMVSDGTCQQALQVVTSPEQSKKLSYGASVNIEGQLAVSKNAKLGLQQYELLAEKIKIYGQINDDNYPIQKKHLTTEMLRQIPHLRLRTAKQGEIFRLRSDSLKALRQFFSSKDFTETNPPIITSSDCEGAGEVFTLTPQETHKNKSFERDDQKHFFDRPAFLTVSTQLHLEALALGLSRVYTISPAFRAEQSHTSRHLAEFWMLEAEVAFMTSLSQLTSLMEDMIKYTLNSLMEQNYHRDHWDQLLKPWKCMTYSEAIEELSAVKKTWKYPPKWGNDLSSEHEKYLCEILHKTPVFVTDYPQKIKPFYMKSSGPDTVAAVDLLVPQVGELAGGSLRKDHLDEYKTYPPELQWYLDLMKYSNAPHGGFGLGIERLIAFLEGENTNVKETIPFPRSVGSIFA

SEQ ID NO: 10017 - DNA, 1386 bp, Fusobacterium nucleatum subsp. nucleatum ATCC 25586
  CDS (1)..(1386): transl_table=11
atgattactgtaaaagatatttttagacatggagaggattatctagacaaagagatagagctttttgggtgggtaagaaagataagagaccaaaagaaattcggttttattgaattaaatgatggttcattctttaaaggagttcaaatagtttttgaagaaggacttgaaaattttgatgaagtttcaagactttcaatagcttctactattaaagtaaaagggactcttgttaaatctgaaggtagtggacaagatttagaagttaaagctaaaaaaatagaaatattccaaaaagcggatttagaatatccattacaaaataaaagacatacttttgaatatttaagaactaaagctcatttaagagcaagaacaaatactttctcagcagtgttcagagttagatctgtacttgcttatgcattacataaatttttccaagaaaataactttgcttatgtacatgctccaatcataacaggttctgatgctgaaggtgctggagaaatgtttagaattacaactcttgatttaaataaagtacctaagaaagaaaatggtgaggttgatttctctaaagacttctttggtaaatctactaacctaacagttagcggtcaattaaaccttgaaactttctgtgctgcttttagaaatgtctatacttttggtcctacattcagagctgaatattcaaatacagcaagacatgcttctgaattctggatggtagaacctgaaattgcttttggagatatatttgcattaatggaacttgcagaagcaatggttaaatatatcattaaatatgttatggataactgtcctgaagaaatggaattctttaactcatttattgaaaaaggactatttgataaattaaataatgtacttaacaatgattttggaagagttacttatacagaagcaatagaaattttagaaaaatctggaaagaaatttgaatttcctgttaaatggggaatagacttacaaagtgaacatgaaagatatttagcagaagaatattttaaaaagccagtgtttgtaactgattatccaaaagatattaaggctttctatatgaaactaaatgaagataataaaacagttagagctatggacttattagcaccaggaattggagaaataattggtggttctcaaagagaagataactatgaacttcttacaaagagaatgaaagaacttggacttaatgaagaagactatgaattttatttagatttaagaagatttggaagtttcccacactctggatatggattaggttttgaaagaatgatgatgtatctaactggtatgcaaaatatcagagacgtaatacctttcccaagaactccaaataatgcagaattttaa

SEQ ID NO: 10018 - protein, 461 aa, Fusobacterium nucleatum subsp. nucleatum ATCC 25586
MITVKDIFRHGEDYLDKEIELFGWVRKIRDQKKFGFIELNDGSFFKGVQIVFEEGLENFDEVSRLSIASTIKVKGTLVKSEGSGQDLEVKAKKIEIFQKADLEYPLQNKRHTFEYLRTKAHLRARTNTFSAVFRVRSVLAYALHKFFQENNFAYVHAPIITGSDAEGAGEMFRITTLDLNKVPKKENGEVDFSKDFFGKSTNLTVSGQLNLETFCAAFRNVYTFGPTFRAEYSNTARHASEFWMVEPEIAFGDIFALMELAEAMVKYIIKYVMDNCPEEMEFFNSFIEKGLFDKLNNVLNNDFGRVTYTEAIEILEKSGKKFEFPVKWGIDLQSEHERYLAEEYFKKPVFVTDYPKDIKAFYMKLNEDNKTVRAMDLLAPGIGEIIGGSQREDNYELLTKRMKELGLNEEDYEFYLDLRRFGSFPHSGYGLGFERMMMYLTGMQNIRDVIPFPRTPNNAEF

SEQ ID NO: 10019 - DNA, 1383 bp, Drosophila melanogaster
  CDS (1)..(1383)
atgttattcttgagacgattttacagcaaatccggacggatagctcaaatattaaagactaataagccaggcgactctttggccatacagggatggatcaaaaacgttcgccggttgaagaacaacacatttctggacatcaatgatggttccacgagcagtaggttccaggtggtcgtgccccggactccggaaaaccagcacttggctccgggaagcgtcattgcagctgtcggtaaaattcaagtggctccaaatggcagcttcgagttgcatgcgaatcaggtggaaatgttggctgaaggacggctgcaggagggttatcccttcagtcccaaacagaaacatccaccggaatatgtacgtgagcatctacatcttcgatcacgcgtagatttcgttgccgcccagatgagggtcagacacaaagcacaaaaagctatacacgactacatggatgatcaggatttcgtgcagatcaacactcctctgctcacaaccaacgattgcgagggagcaggagaagtgtttcgggtacaaccggactcccaagacctgctcaagcagatgaaccgaccaaatattcccatggaacaaagctactttgatagcaaagtattcctcagcgtctctggtcaactgcacctggaggccatgacatacggtttaggcaagacatacactctctcaccagccttccgagcggagaactccaagtctccgttgcatttagcagagttctatatgtttgaagcggaacttgcccatttggaggagatggagaagttagcgcagttcattgaacagatgctgaaatctgtgacaaaccgtttgctggaaacgagtggcgaggacctaagtttctgtcaacggaattcaaactctaactccgatctcccttggctgcaagtaccgtggaagataatgagctacgatgaagccctgcaagtactgcaggaaaacaaggacagtcttaagactcctattagcctgaacgaaggattctccaaggaccaagaactttttttagtggcccattgtggtgctcccgtattcgttgtggattggccagctcagcagaaacctttttacatgaaagtctcgcgttcaaatcccaatcgagttcatgccctagacctactgatgccagctgttggagaattatgcggcgggagcctgcgtgaaagcgatcctgctatattaaaatcccatccgcatctgccgaaggatctggaatggtacgttgacttgcgaaagtatggaggagttccaactggaggatttggaatgggctttgagcgttacttgcagcttgtcacgggcgttaaaaacattcgtgatgtgatacccttccccaggtatccacacagctgcaagatgtga

SEQ ID NO: 10020 - protein, 460 aa, Drosophila melanogaster
MLFLRRFYSKSGRIAQILKTNKPGDSLAIQGWIKNVRRLKNNTFLDINDGSTSSRFQVVVPRTPENQHLAPGSVIAAVGKIQVAPNGSFELHANQVEMLAEGRLQEGYPFSPKQKHPPEYVREHLHLRSRVDFVAAQMRVRHKAQKAIHDYMDDQDFVQINTPLLTTNDCEGAGEVFRVQPDSQDLLKQMNRPNIPMEQSYFDSKVFLSVSGQLHLEAMTYGLGKTYTLSPAFRAENSKSPLHLAEFYMFEAELAHLEEMEKLAQFIEQMLKSVTNRLLETSGEDLSFCQRNSNSNSDLPWLQVPWKIMSYDEALQVLQENKDSLKTPISLNEGFSKDQELFLVAHCGAPVFVVDWPAQQKPFYMKVSRSNPNRVHALDLLMPAVGELCGGSLRESDPAILKSHPHLPKDLEWYVDLRKYGGVPTGGFGMGFERYLQLVTGVKNIRDVIPFPRYPHSCKM

SEQ ID NO: 10021 - DNA, 1395 bp, Xanthomonas campestris pv. campestris str. ATCC 33913
  CDS (1)..(1395): transl_table=11
atgacggtggtcagcgttgaacatgcgcttgcggggaagatcccggaaggcggcgaagttacggtacgcgggtgggtgcgcacgctgcgcgggtctgccggactggccttcatcaacgtcaccgatggctcctgcttcgcgccgatccaggtcgtggccaccgacacgctgccgaatttcgacgagatcaagcggctgaccagtggctgttcgctgatcgccaagggcgtgctggtgaagtcgcaaggcaaggggcaatcgttcgagatccaggccagcggcgtggagatcgtcggctgggtcgaagacccgctgacctacccgatccagcccaagccgatgtcgccggagttcctgcgcgaagtggcgcatctgcgtccgcgcaccaacctgttcggcgcggtcacgcggatccgcaactgcctggcgcaggcggtgcaccgcttcttccaccagaacggcttcaactggatcagcacgccgatcatcaccacctccgacgccgaaggcgccgggcagatgttccgcgtctcctcgctggacatggtgaacctgccgcgcaccgcgcagggcgaggtggatttcagccgcgacttcttcggcaaggaaaccttcctgaccgtgtccggccagctcaacgtggaggcctactgcctggcactgagcaaggtctacaccttcgggccgaccttccgcgccgaaaacagccacaccacccgccatctggccgagttctggatgatcgagccggaaatcgccttcgccgatctggccgaagacgcgcgcctggccgagcagttcctcaagtacctgttccgcgcggtgctggacgaacgtggcgacgatctggccttcctggccgagcgcgtggacaagaacgccatcagcaagctggaagccttcatcaatgccccgttcgagcagatcgactacaccgaggcggtgaagctgctgcagaactccggaaagaagttcgacttcccggtcgaatggggcctggacctgcagaccgagcacgagcgttggttgaccgaagaacacatcggccgcccggtggtggtgaccaactatcccgagcacatcaaggcgttctacatgcgcctgaacgatgacggcaaaaccgttgcggcgatggacgtgctggcgccgggcatcggcgagatcatcggcggcagccagcgcgaagagcgcctggacgtgctcgacgcgcgcatggcgcagttcggtctggataaggagcactacagctggtaccgcgacttccgccggtatggctcggtgccgcatgccggcttcggcttggggttcgagcgcctggtggtttacgtgtgcggcttgagcaatatccgcgacgcgatcccctacccgcgcgcgccgggcagcgcggagttctga

SEQ ID NO: 10022 - protein, 464 aa, Xanthomonas campestris pv. campestris str. ATCC 33913
MTVVSVEHALAGKIPEGGEVTVRGWVRTLRGSAGLAFINVTDGSCFAPIQVVATDTLPNFDEIKRLTSGCSLIAKGVLVKSQGKGQSFEIQASGVEIVGWVEDPLTYPIQPKPMSPEFLREVAHLRPRTNLFGAVTRIRNCLAQAVHRFFHQNGFNWISTPIITTSDAEGAGQMFRVSSLDMVNLPRTAQGEVDFSRDFFGKETFLTVSGQLNVEAYCLALSKVYTFGPTFRAENSHTTRHLAEFWMIEPEIAFADLAEDARLAEQFLKYLFRAVLDERGDDLAFLAERVDKNAISKLEAFINAPFEQIDYTEAVKLLQNSGKKFDFPVEWGLDLQTEHERWLTEEHIGRPVVVTNYPEHIKAFYMRLNDDGKTVAAMDVLAPGIGEIIGGSQREERLDVLDARMAQFGLDKEHYSWYRDFRRYGSVPHAGFGLGFERLVVYVCGLSNIRDAIPYPRAPGSAEF

SEQ ID NO: 10023 - DNA, 1401 bp, Buchnera aphidicola str. Bp (Baizongia pistaciae)
  CDS (1)..(1401): transl_table=11
atgaaaacggtttctatatttgatatatacttaaataagatcaaattaaatagtaaaattaatattcagggctgggttagaaacagaagaaggtcaaagttaggtttattatttattgatctttatgatgggtcgtgtttatatactatgcaagtagtagtaaaagatattttgtcaaattatgatagtgaaatttcaaagttatctgtcgggtgttcgataaatgtttttggagtgttaatatcatctattggaacaaaacaaaaatatgaaattcaagcaaaagtagttaaagttattggtataattaataatcctggtagttatcctatttcatctaaatatcatacaatgaaacatttaaggaatgttcctcatttaagatctagaacaaatttttttggtgctgtttcgagagtaagaaattatttatttaatgcattacatgaatttctttttaaaaatggttattattggattccatctcctattatcactggattaaattctgaaggtgcaggagatatgtttaaagtttctatattagaccttaacaatatacctaaaaataaaaatggaaagattaattttaaaaaagatttttttggaaaggaagcttttttaactgtatcaggacaattaactctggaaacatatgcttgttctttatcaaaagtttactcttttggtcctatatttagagctgaaaattcgaatactagaagacatttgtctgaattttggatgttggaagtagaaactgcgttttcaaatttatgcgatatcataaaattttccgagaatatgttgaagtatgcaattggcatcatattggataaatgcgtaattgatattaacttttttagagaaaatgtagatgaaaaaattttttgtcgtttgaaagatttttcttcgaaacaattttttcaaatagaatataaagaagcaataaacattttaattaaatctaatcgttttgatcataaagttatgtttattggtatggaattgtcatctgatcatgagcgttttttagttgaagaatattttaaatttccattagtgattactaattatccaaaatcgctaaaagctttttacatgagagtgaatgacgataacaaaacagtatcagctatggatgtattagtacctggtgtaggagaaataataggaggttcagagcgagaagaacgtttaaatgtattggatcgaaggttttttgaattaaatttgaataaagaagattattggtggtatagagatttgcgtaaatatggaacaatacctcattctggctttggattaggatttgagcgtttattatcatatatattaggaataaagaatatacgagatgtatgcccgtttcctagaacagcttataaagctgatttttag

SEQ ID NO: 10024 - protein, 466 aa, Buchnera aphidicola str. Bp (Baizongia pistaciae)
MKTVSIFDIYLNKIKLNSKINIQGWVRNRRRSKLGLLFIDLYDGSCLYTMQVVVKDILSNYDSEISKLSVGCSINVFGVLISSIGTKQKYEIQAKVVKVIGIINNPGSYPISSKYHTMKHLRNVPHLRSRTNFFGAVSRVRNYLFNALHEFLFKNGYYWIPSPIITGLNSEGAGDMFKVSILDLNNIPKNKNGKINFKKDFFGKEAFLTVSGQLTLETYACSLSKVYSFGPIFRAENSNTRRHLSEFWMLEVETAFSNLCDIIKFSENMLKYAIGIILDKCVIDINFFRENVDEKIFCRLKDFSSKQFFQIEYKEAINILIKSNRFDHKVMFIGMELSSDHERFLVEEYFKFPLVITNYPKSLKAFYMRVNDDNKTVSAMDVLVPGVGEIIGGSEREERLNVLDRRFFELNLNKEDYWWYRDLRKYGTIPHSGFGLGFERLLSYILGIKNIRDVCPFPRTAYKADF

SEQ ID NO: 10025 - DNA, 1410 bp, Porphyromonas gingivalis W83
  CDS (1)..(1410): transl_table=11
atggataagaagatgaaaaggactagaatcgcagatgccctccatggagggcttgtcggccaagaaatcaacatcaaaggatgggtacgcaccaagcgcggcaacaaggctgtgaattttatcgctctcaatgatggttctacgattcataatatgcagatcgtagcggatcttgcttctttcgatgctgcacagatgtctcagattaccacgggtgcttgcatcggtgttataggcactttggtcgaatctcagggagcaggccagtccgtggaggtacaagcgtcggctatcgagatttatggtacggctgatccggctacctatccgctacagaagaaaggccatacgttggagtttttgcgtgagatagcgcatttgcgcccgcgcactaataccttcggtgccatctatcgcatccggcaccatatggctattgccatccataccttttttcataacaaagggtattactacttccatgcacctcttattacagccagtgactgtgaaggagccggacagatgtttcaggtgacaacgctgaaccctgattctctcccccgaacagaagagggacaagtggactatcgtaaagatttcttcggtcgtcatacctcattgaccgtttcgggacaattggagggtgaaatggctgctatggctttgggcggtatttatactttcgggcctacattccgtgcagaaaattccaatacaccgcgtcacttggccgagttctggatgatcgaaccggaggttgcattccttgagatagaggataacatggacttggcggaagagttcatcaaatattgtgtgcagtgggccttggataactgtatggatgacatcagtttcctttctgaacacttcgacaaagagctgatcgatcgtctcaagtttgtactcgaaaagccatttgttcgtttggcctatacggaaggtattcgtatcctggaagaagcagtcaagaatggtgtaaaatttgaattccccatctattggggagcagatttggccagcgaacacgagcgttatctggttgaggtgcatttcaagacaccggttatcatgacagactaccccaaagagatcaagagtttctacatgaagctgaacgatgacggaaagactgtccgtggcatggatgtgcttttcccgaagatcggagaaatcatcggtggctccgaacgtgaagccgactacgacaaattggtggctcgtgctaacgaaatgggagtgccggagaaagatatttggtggtacctcgactcgcgtcgttacggtactgcaccgcatagtggctttggtttgggcttcgaacgcctgcttctattcgtaacgggaatgagtaatatccgagatgtaattcctttcccacggacacccaacaacgcagagttttaa

SEQ ID NO: 10026 - protein, 469 aa, Porphyromonas gingivalis W83
MDKKMKRTRIADALHGGLVGQEINIKGWVRTKRGNKAVNFIALNDGSTIHNMQIVADLASFDAAQMSQITTGACIGVIGTLVESQGAGQSVEVQASAIEIYGTADPATYPLQKKGHTLEFLREIAHLRPRTNTFGAIYRIRHHMAIAIHTFFHNKGYYYFHAPLITASDCEGAGQMFQVTTLNPDSLPRTEEGQVDYRKDFFGRHTSLTVSGQLEGEMAAMALGGIYTFGPTFRAENSNTPRHLAEFWMIEPEVAFLEIEDNMDLAEEFIKYCVQWALDNCMDDISFLSEHFDKELIDRLKFVLEKPFVRLAYTEGIRILEEAVKNGVKFEFPIYWGADLASEHERYLVEVHFKTPVIMTDYPKEIKSFYMKLNDDGKTVRGMDVLFPKIGEIIGGSEREADYDKLVARANEMGVPEKDIWWYLDSRRYGTAPHSGFGLGFERLLLFVTGMSNIRDVIPFPRTPNNAEF

SEQ ID NO: 10027 - DNA, 1401 bp, Photorhabdus luminescens subsp. laumondii TTO1
  CDS (1)..(1401): transl_table=11
atgagcgtagcgcctgtagtcgacgtactgcaaggccgggttgcggttgatagtgaagtcaccgttcgcggctggatacgtacaaggagagattctaaagctggcatctctttcctcgccgtctatgacggttcctgctttaatccattacaggccgtcgttaataataatttgcccaattatcaggatgaagttctgcatttaactaccggttgttctgtcgaagtgacagggacagtcgttgcttcccttggtcaagggcagaactttgaactgcaagcgacgaaaatcgtcgtgatcggtctggttgaagatcctgacacctatcccatggccgctaaacgccacagcattgaatacctgcgcgaagttgctcacctgcgtccacgtaccaacctgattggtgccgttgctcgtatgcgccatacccttgctcaagcactacaccgtttcttccatgaaaatggttacttctgggtttccaccccgttgatcacggcggctgatacagaaggtgctggcgaaatgttccgcgtctctacgctggatctacaaaatctgcctttaactgacaaaggtgaagtggatttcaaccaagattttttcggccgcgaagctttcctgaccgtatctggacaattgaacggtgaagcatacgcttgtgcattaagcaaagtttacacattcggcccgacttttcgtgctgaaaactctaataccagccgccatctggcagaattctggatgcttgaaccagaaatcgccttcgctaacctcaatgatgccgccacattagctgaaaatatgttgaaatatgttttcaaagccgcattggcagaacgtgctgatgatctgcaattcttcgctgaacgcgtggataaagatgttatcacccgcctggaaaaatttattaattctgactttgctcagattgattacaccagtgccattgaaattctgcaaaactgcggccagaaatttgaaaatccagtcttctggggagttgacctttcttcggaacatgaacgttatctggcagagaaacatttccaagctccggttgtcgtgaaaaactatccaaaagatattaaagccttctatatgcgaatgaacgacgacggtaaaactgtcgcggcactggatgtacttgcaccaggcattggcgaaattatcggcggctcacagcgtgaagagcgtctggatatgctggataagcgtctggaagagatggggcttaataaagaagattactggtggtaccgtgatctgcgtcgttatggcaccgttcctcactctgggttcggactgggctttgaacgtctggttgcttacgtgactggcgtgccaaatgtacgtgatgtcatccccttcccgcgcacaccaagaagcgcaaacttctaa

SEQ ID NO: 10028 - protein, 466 aa, Photorhabdus luminescens subsp. laumondii TTO1
MSVAPVVDVLQGRVAVDSEVTVRGWIRTRRDSKAGISFLAVYDGSCFNPLQAVVNNNLPNYQDEVLHLTTGCSVEVTGTVVASLGQGQNFELQATKIVVIGLVEDPDTYPMAAKRHSIEYLREVAHLRPRTNLIGAVARMRHTLAQALHRFFHENGYFWVSTPLITAADTEGAGEMFRVSTLDLQNLPLTDKGEVDFNQDFFGREAFLTVSGQLNGEAYACALSKVYTFGPTFRAENSNTSRHLAEFWMLEPEIAFANLNDAATLAENMLKYVFKAALAERADDLQFFAERVDKDVITRLEKFINSDFAQIDYTSAIEILQNCGQKFENPVFWGVDLSSEHERYLAEKHFQAPVVVKNYPKDIKAFYMRMNDDGKTVAALDVLAPGIGEIIGGSQREERLDMLDKRLEEMGLNKEDYWWYRDLRRYGTVPHSGFGLGFERLVAYVTGVPNVRDVIPFPRTPRSANF

SEQ ID NO: 10029 - DNA, 1521 bp, Onion yellows phytoplasma OY-M
  CDS (1)..(1521): transl_table=11
atgaaaatttctatcaaagatattttccaaaaaccagagttattttatcaaaaaaaaatagtattaaatggttgggttagaaattgtcgttatcaaaaaaaattaatttttatcgatttaaatgatggtacttttctggaaaatttacaaataatttgtaaagaaaccaaaaccaaaaacatcgaaaccgccgccgaaattaccgaatttcatgaaaaccaaaaagtcaacaccaaaaacgaatctccaaataacatcaatttagaaaaattaaaagaaatgttgcaaattggggcttctttgcaagtggaaggcattctaaaagcaaccaacaatccccaaacgccttttgaaattagtgcccaaaatgtttctcttttaggcgcaagtgatttttcttatccgcttcaacccaaaaaacattctaaggcttttttgagacaaatatctcatctaagagtgcgcaccaaactttttggagcagtttttcgcattagaaataccgctttttttgccctgcacagtttttttcaaaaaaaaggtttttttcacatcaacacccccattatcactgctaatgatggagaaggcgcgggtgaattatttcaacttacaacccttaatttagaagctttgccacaaacaaaaaacattccaaacgcttccaaacttgccgatgagactatcagcaaaaatgaaattgattatcaaaaagatttttttggcaaaaaagtttttttaacagcaacaggtcaactagaagcagaagcgatggctttgggtttgaataaagtctatacttttggtcctacttttagagctgaaaaatcaaatactccaagacatgctgctgaattttggatgttagaacctgaaatggctttttgcaatttatctcaaaatttaaaagtcgcccaagaaatgttacaatttgttattgctaaatgtttagaacaaaattatcaagatatagaatttttggataagacagaaaaaaactgtttaattgaagaattaaaaaacatctctgaggaaaaagaatttttgacagtaaaatacgaacaagctttagaaattttgcaaaaaagcaacaccaaatttgaaaacccccttttttatggcgctgatttggcaaccgaacacgaaaaatatttaaccgaaacacattttaaaaaaccagtttttattgttgattggcccaaagaaattaaagctttttatatgaaaaataatcccgatcaaaaaacagtagctgcgatggatcttttagttcctcgtgtcggagaattaattggcggatcgcaaagagaagaaaatttatcagttttaattgaaaaaatgaaccaaatgaaaattcctcaaaaagatttggaatggtatttagatttacgccgttttgggggatgcattcattcaggttttggtttaggatttgaaagactactaatttttttaacaggattagataatattcgtgatgtaattgcttttccaagaacttatcataatttagttttttaa

SEQ ID NO: 10030 - protein, 506 aa, Onion yellows phytoplasma OY-M
MKISIKDIFQKPELFYQKKIVLNGWVRNCRYQKKLIFIDLNDGTFLENLQIICKETKTKNIETAAEITEFHENQKVNTKNESPNNINLEKLKEMLQIGASLQVEGILKATNNPQTPFEISAQNVSLLGASDFSYPLQPKKHSKAFLRQISHLRVRTKLFGAVFRIRNTAFFALHSFFQKKGFFHINTPIITANDGEGAGELFQLTTLNLEALPQTKNIPNASKLADETISKNEIDYQKDFFGKKVFLTATGQLEAEAMALGLNKVYTFGPTFRAEKSNTPRHAAEFWMLEPEMAFCNLSQNLKVAQEMLQFVIAKCLEQNYQDIEFLDKTEKNCLIEELKNISEEKEFLTVKYEQALEILQKSNTKFENPLFYGADLATEHEKYLTETHFKKPVFIVDWPKEIKAFYMKNNPDQKTVAAMDLLVPRVGELIGGSQREENLSVLIEKMNQMKIPQKDLEWYLDLRRFGGCIHSGFGLGFERLLIFLTGLDNIRDVIAFPRTYHNLVF

SEQ ID NO: 10031 - DNA, 1422 bp, Treponema denticola ATCC 35405
  CDS (1)..(1422): transl_table=11
atgatacatttaattaaagatattttaacctccgaaccgaaaggccaagcaatcgatgtttacggctgggttcgtacaaagcgggaaaccaagaatttggtttttatcgagatcaatgacggctcttgttttgcctccattcaggcaacctttgacagggatacaggtctcgataataatactgaagctcttttaaaaaaggccggtaccggagtttcggtaaaggtatcgggcaatctcgttccctcccctgcggcagggcaaagagttgagcttcaggctaataatatccatatcttcggtgatgctgatcaggaaaaatatcctttacaaaaaaagcgtcatagcatggaatttttaagggacatagctcacttgagggctcgtaccaatacctttggagctgttgcccgtataagaagccagatggcctatgcaatccacaccttttttcaggaaagaggttttcaatatgtgcatacgccgattattaccggctcggactgcgagggtgcaggcgaaatgttccatgttacaacctttgatatagaagaaaccgtaaaaaaagctctaaaagaaaaaaaggatcccgattcttttaaaatagattattctcaagattttttcggcaagcaggctaacttgaccgtttcaggccagcttgaaggagaaacctatgcgacagccctttcgcgcatttacacattcggcccgacttttagagcggaaaactcgaacacaagccgacaccttgcagaattttggatggttgagcccgaaatgtccttttttaccataaaagaaaacatggagctggcagaagaatttatcgtctatcttttaaaatgggccttggaaaagtgcaaagaggatctggaattttttgattcaaggatcaaaaaagggcttatcgagatgctcaaaaatgttgtaaacacgccctttactcgtcttacttacacggaagctatagccgaacttgaaaagcacattgaccgctttgagtttaaaccctactggggctgcgacctccagagcgagcatgaaaggtttttgaccgaagaagtttataaggggccggtaattgttacaaactatcccaaggagattaagtccttttatatgaagttaaacgaggacggaaaaacggtgcgggcgatggatgtgcttgtaccgggattgggcgaaataatcgggggctcggaaagggaagaaaatcttgatattttgcagggcaggattaaggaattgggtttaagagaagaagactattggtggtaccttgacctccgccgatacggtacggttcctcattcgggattcgggctcgggtttgagaggcttctcctctatgttacgggtatgggaaacataagggatgttatccccttccccagagcaccgaaattagccgagttctaa

SEQ ID NO: 10032 - protein, 473 aa, Treponema denticola ATCC 35405
MIHLIKDILTSEPKGQAIDVYGWVRTKRETKNLVFIEINDGSCFASIQATFDRDTGLDNNTEALLKKAGTGVSVKVSGNLVPSPAAGQRVELQANNIHIFGDADQEKYPLQKKRHSMEFLRDIAHLRARTNTFGAVARIRSQMAYAIHTFFQERGFQYVHTPIITGSDCEGAGEMFHVTTFDIEETVKKALKEKKDPDSFKIDYSQDFFGKQANLTVSGQLEGETYATALSRIYTFGPTFRAENSNTSRHLAEFWMVEPEMSFFTIKENMELAEEFIVYLLKWALEKCKEDLEFFDSRIKKGLIEMLKNVVNTPFTRLTYTEAIAELEKHIDRFEFKPYWGCDLQSEHERFLTEEVYKGPVIVTNYPKEIKSFYMKLNEDGKTVRAMDVLVPGLGEIIGGSEREENLDILQGRIKELGLREEDYWWYLDLRRYGTVPHSGFGLGFERLLLYVTGMGNIRDVIPFPRAPKLAEF

SEQ ID NO: 10033 - DNA, 1392 bp, Bacillus cereus ATCC 10987
  CDS (1)..(1392): transl_table=11
atggaaaacacattagtaaaaagtctgtatagagatacagataaatacgcaggtcaaacagtacaagtatcagggtggattcgtaacttacgtgattcaaaagcgtttggtttcatcgaattaaacgacggtagcttcttcaaaagcgttcaaatcgttttcgatacagaattagataacttcaaagaaattgcaaaacttccacttagctcttcagttaaagtagaaggtaaagtaattgtaacgcctggagcgaagcaaccatttgaaattaaagcagaaaaaattgatattgagggcttatcagattctgattacccacttcaaaagaaacgtcatacgtttgaatacttacgtacaatcgctcacttacgtccaagaacaaatgcattctctgcaacgttccgcgtacgttctatcgcagcatttgcgattcaccaattcttccaagagcgtggattcgtacatgttcacacacctatcatcactggtagtgatacagaaggtgcgggcgaaatgttccgcgtaacaacgcaagatttaaacaacgtaccaaaaggcgaagacggacaagttgatgaatcaaaagacttcttcggcaaagaaacaaacttaacagtaagtggacagctgaacgctgaagcttatgcattagcattccgtgatgtatacacattcggacctacattccgtgcagaaaactcaaacacaactcgccacgcagctgagttctggatggttgagcctgagattgcattcgctgaactaggtgacgtaatgaaccttacagaagatatgctgaaatatgcaatgaaatacgtattagagcatgcaccagaagaaatggaattcttcaacagtttcgttgataaaacagttctagagcgcatgaacaacgtaatcaactctgacttcggtcgcatcacttatacagaagcaattaaagtacttcaagaatcaggtgctgacttcaaatacccagtagaatggggtattgacttacaaacagagcatgaaagatacttatcagaagaaatcttcaaacgccctgtattcgtaacggactatccgaaagacattaaagcattctacatgcgcttaaatgacgacggtaaaacagtggctgctactgaccttctagttcctggcatcggtgaattaatcggcggaagtcaacgtgaagaaagaatggacgttttagtagacagaattaaagaattaggtatgaacgaagaggactactggtggtacttagaacttagaaaatacggcggtacaaaacacgctggattcggtctaggtttcgagcgcttcctaatgtatatcactggcatggctaacatccgtgacgtaattccattcccaagaactccaggttcttctgaattctaa

SEQ ID NO: 10034 - protein, 463 aa, Bacillus cereus ATCC 10987
MENTLVKSLYRDTDKYAGQTVQVSGWIRNLRDSKAFGFIELNDGSFFKSVQIVFDTELDNFKEIAKLPLSSSVKVEGKVIVTPGAKQPFEIKAEKIDIEGLSDSDYPLQKKRHTFEYLRTIAHLRPRTNAFSATFRVRSIAAFAIHQFFQERGFVHVHTPIITGSDTEGAGEMFRVTTQDLNNVPKGEDGQVDESKDFFGKETNLTVSGQLNAEAYALAFRDVYTFGPTFRAENSNTTRHAAEFWMVEPEIAFAELGDVMNLTEDMLKYAMKYVLEHAPEEMEFFNSFVDKTVLERMNNVINSDFGRITYTEAIKVLQESGADFKYPVEWGIDLQTEHERYLSEEIFKRPVFVTDYPKDIKAFYMRLNDDGKTVAATDLLVPGIGELIGGSQREERMDVLVDRIKELGMNEEDYWWYLELRKYGGTKHAGFGLGFERFLMYITGMANIRDVIPFPRTPGSSEF

SEQ ID NO: 10035 - DNA, 1434 bp, Ashbya gossypii ATCC 10895
  CDS (1)..(1434)
atgctcgcacccttccggccgaggcgttattcggcgatcacttctccgctgcgcaccatcactgtgcgcgaccttctgcagctgcaggatgctccgaagcaacctctcgacgtccaaggaagagtacgctcgttcagggccatgaaaaacgcctcatttctagacctcgaggacggcagcagcaagaatgcgctgaaagtcgtcatttctcaccatgggagacctaatcctgtcacactgaaaaccggccaatcggtagccgtccgcgatgcaatgtggaaatggactccggaccgccaacaggcatttgagctggcatgccagcctacagatgtacaagtcatcggagatgtgacggatgagtatcctctacagaagaaatacgtgtccttgaagcacctacgccagtggcctttgtggaagcatcggacgcagtacctaggtggcttactgcgattcagatcgcacattgaggccaccttgacccaaattctcacgcaagagggcatttacaaggtgccaccgccggttgtgacgtcgggagactgcgaaggcgcaggcgagcttttccatgtcgaagctaatagcctacgtgcctctcagcggaagtacttcggaactaatgcgtacttgaccgtgtcagcgcagatgcatctggaagtaattgctctcgctctcggccgtgtgtgggcactcacgccctgtttcagggctgaggagagcgacacaagcagacatctgtcagagttctggatgttggaggcagagttgtgctttgtgcaagatgtgacgcaattgacgggcttcgtccagaagctgatacaggaacttgctcgcacactgctacagcgccaagacgagctactacctggcatggtcccgcaggaaggcgccgagtcgagggagacagttctcgcccgctggcaatccctaattgagcatccatggcacaccgtcacatacacggaagctattcaggtgctgcagcgccagcacgatctatctccgtttgtgcacgcgcctcagtggggcgcggctctgcagtctgaacatgagaaatggcttgccggagctcacttcggcggccccgtcttcgtcaccgactatccgcgtgagtgtaaagccttctacatgagactgaacgacgacaaaaagactttcgcatgtttcgatttgctgtttccagagatgggcgaggtcatgggcggaagtattagagaagagcgttatgacgctcttcttcgcgagatgaccagcagaaacatgaatatagcagaacttgactggtatcttcaactacggcgtcagggcagtgcgccgcatggcggatttggactaggcatggagcggctcattagctggctgtacgggaaccataacgttagagacgctatagggttttataggtccgcgacctcgaccattgaattataa

SEQ ID NO: 10036 - protein, 477 aa, Ashbya gossypii ATCC 10895
MLAPFRPRRYSAITSPLRTITVRDLLQLQDAPKQPLDVQGRVRSFRAMKNASFLDLEDGSSKNALKVVISHHGRPNPVTLKTGQSVAVRDAMWKWTPDRQQAFELACQPTDVQVIGDVTDEYPLQKKYVSLKHLRQWPLWKHRTQYLGGLLRFRSHIEATLTQILTQEGIYKVPPPVVTSGDCEGAGELFHVEANSLRASQRKYFGTNAYLTVSAQMHLEVIALALGRVWALTPCFRAEESDTSRHLSEFWMLEAELCFVQDVTQLTGFVQKLIQELARTLLQRQDELLPGMVPQEGAESRETVLARWQSLIEHPWHTVTYTEAIQVLQRQHDLSPFVHAPQWGAALQSEHEKWLAGAHFGGPVFVTDYPRECKAFYMRLNDDKKTFACFDLLFPEMGEVMGGSIREERYDALLREMTSRNMNIAELDWYLQLRRQGSAPHGGFGLGMERLISWLYGNHNVRDAIGFYRSATSTIEL

SEQ ID NO: 10037 - DNA, 1623 bp, Aspergillus clavatus NRRL 1
  CDS (1)..(1623)
atgcggacatggcagcgaacctttgccacgtctgctgccagactaaatcataatgcagcaggacggagcagcgggtcccccctcctgcgctgtgcggaggttctgcggaagaataaggcgggccgctgccaatacgaagaccaagagatcaaagtgaacggctttatccgctctgtccggaaacagaagcgtttcgcgtttgcagagatctcggatgggacgacgattgagcccttgcaggcgattttgaagccggcgcaggcgtgcgagctggctacggggacggcggttgagatttctgggttgtggaaggcgtgtccgcctggtaaggagcagagccatgagctacagacgacggaggtgaaggtggtgggcagagcggatccggagacatatcccattcagaaaaagtaccacagccccgagttcctccgtcagattcctcaccttcgtctccggacaccgttcaactccctcctctcgcggttccgttctgagtgcctgtaccagctgggcaatgtgtttcgcaacgcgccccatggcggctttgtccaggtccaacccccgctgatcacgtcatcggactgcgaaggcgctggcgagacgtttactgtggtaccgcgcgaagcggcgacgggatcggcgtcagacaatgagggggaacatttcttccgggcacccaagtacctgacggtgtcgtcgcagctgcatctggaggcctacgcggcggagctgggcaacgtatggacgatcacgccagccttccgtgcggagaagagcgacacgccgcggcacctgagcgaattctacatgctggaggcggagatgaatttcatggatgacttgggggcgctcacagattccgtcgagtacacgctccgcgacctgactctccggttatacagatcgccagtccggcaggagatgctatctgcgaagcgatcgggtgagacgggcgaggatcctacgcatggagctgtgtcgggtctacaacggcgatggatcgaccttgtggatgggcccaagtggcggcggatgacatatacacaagccatagagctgctccaattggcggtggccaaggggcaggtatcgttcgagtacgcgccctcttgggatggcggtctgcagctcgagcatgagaggtacatcgtcgatggactcaacgacggccagccagtcttcgtgaccgactatcccaaggccgtcaagccgttctacatggcgccatcgcaagtgtcagaagagcgcgattccacacccggggagacggtcgcatgcttcgacctgcttctgccggaggtcagcgaggtcgccggcggctcgctccgtgagcaccgtctacccgagatcatccagaacatgcgcgctcacgggctgatcaaggcgcgcgaggcgtcaacagccgagacggcagcggaggaggagccgctgtaccctcatctcttgccccatgagagcctgggccatttacagtggtacgccgaccttcgccgatgggggagcgcgccgcatggaggatacgggctgggattcgaccgattcgtgagttatctagctggagtatcaagtgtgcgggatgtggtggctttccctcgatacttcggccgggcggactgttga

SEQ ID NO: 10038 - protein, 540 aa, Aspergillus clavatus NRRL 1
MRTWQRTFATSAARLNHNAAGRSSGSPLLRCAEVLRKNKAGRCQYEDQEIKVNGFIRSVRKQKRFAFAEISDGTTIEPLQAILKPAQACELATGTAVEISGLWKACPPGKEQSHELQTTEVKVVGRADPETYPIQKKYHSPEFLRQIPHLRLRTPFNSLLSRFRSECLYQLGNVFRNAPHGGFVQVQPPLITSSDCEGAGETFTVVPREAATGSASDNEGEHFFRAPKYLTVSSQLHLEAYAAELGNVWTITPAFRAEKSDTPRHLSEFYMLEAEMNFMDDLGALTDSVEYTLRDLTLRLYRSPVRQEMLSAKRSGETGEDPTHGAVSGLQRRWIDLVDGPKWRRMTYTQAIELLQLAVAKGQVSFEYAPSWDGGLQLEHERYIVDGLNDGQPVFVTDYPKAVKPFYMAPSQVSEERDSTPGETVACFDLLLPEVSEVAGGSLREHRLPEIIQNMRAHGLIKAREASTAETAAEEEPLYPHLLPHESLGHLQWYADLRRWGSAPHGGYGLGFDRFVSYLAGVSSVRDVVAFPRYFGRADC

SEQ ID NO: 10039 - DNA, 1383 bp, Drosophila pseudoobscura pseudoobscura
  CDS (1)..(1383)
atgttacttattagaaggttttactgtagctctcagcgaataagtcatatagccaagtcaaataagcgaggcgactcactcggtattcggggctggataaaaaacattcgccggctgaagaacaacacatttctggacattgatgatggatcttcgagcagcagattccaagtcgttgtgccacgcaatccagaaacacaaaacctaacaccgggcagcgtcatctcggctgtgggagagatccaagtggcacctaacggaaactttgagctgcatgcagatcgcgtggaatcactggccgaaggacacctgcaggatggctatcctttcacccccaagcagaaacacgcaccggaatatgttcgagagcatctgcatctccgctcccgtgtcgactacgtagccgcccagatgcgaatcagacacaaggctcagaaagccatacatgactacatggatgagctggattttgtgcaaatcaacactcctctgatgaccaccaacgattgtgagggtgccggcgaggttttccgtgtacagcccgactcggaggaactgcttaagcaaatggcccggcccaatgtcccagcagaacaaagctattttgacagcaaggtctttctttccgtctcgggacaactgcaccttgaggccatgacctatggcctgggaaacacgtactgtctagcccccgcctttcgagccgagaactccaagtcgccattgcatttagccgagttctatatgtttgaagccgagctggcgcatttggatgagctggagaagctggcgaaatttattgagcagatgcttaagtccattacaaatcgcgtactcgagacgagctcagaggacttgcacttctgccagcgcaatgccaatgctagctcggatctgccttggctgactgttccatggacgatcatgagctacgatgatgctctccacgtgctccaggccaacaaggagagtctgaagacgcccatcagcttggacgagggttttaccaaggaccaggaactttttcttgtgtcccactgcggcactcccgtctttgttgtagattggcccacccagcaaaagcctttttacatgaaaatcactcgcaataatccggatcgggtccacgccctagacctgctgatgccagctgtgggggaattgtgtggtggcagcttgcgtgagagcgatgcagccactttgagctcccatccacagtttcccaaggacttgtcgtggtatgtggacctgcgaaaatacggagggatccctacgggcggctttggcatgggctttgagcgatatctgcagctcgtgacgggtgttaagaacatacgggatgtgataccatttccccgatatccacacagctgcaaaatgtga

SEQ ID NO: 10040 - protein, 460 aa, Drosophila pseudoobscura pseudoobscura
MLLIRRFYCSSQRISHIAKSNKRGDSLGIRGWIKNIRRLKNNTFLDIDDGSSSSRFQVVVPRNPETQNLTPGSVISAVGEIQVAPNGNFELHADRVESLAEGHLQDGYPFTPKQKHAPEYVREHLHLRSRVDYVAAQMRIRHKAQKAIHDYMDELDFVQINTPLMTTNDCEGAGEVFRVQPDSEELLKQMARPNVPAEQSYFDSKVFLSVSGQLHLEAMTYGLGNTYCLAPAFRAENSKSPLHLAEFYMFEAELAHLDELEKLAKFIEQMLKSITNRVLETSSEDLHFCQRNANASSDLPWLTVPWTIMSYDDALHVLQANKESLKTPISLDEGFTKDQELFLVSHCGTPVFVVDWPTQQKPFYMKITRNNPDRVHALDLLMPAVGELCGGSLRESDAATLSSHPQFPKDLSWYVDLRKYGGIPTGGFGMGFERYLQLVTGVKNIRDVIPFPRYPHSCKM

SEQ ID NO: 10041 - DNA, 1536 bp, Pichia stipitis CBS 6054
  CDS (1)..(1536): transl_table=12
atgaatcaacttttcaaaacttccagacagtacaggcgtttgccaatttttcgttcgatttttcactctcaaaagtacttttcttcacttactcctaccatcaaggacttactagctaatccaccactgccagactcaacgatattagctcagggtcatatcaagtcaattagacagggcaagagtgccgggttcatcgacttgtcggacggctcagcccatttgagcttgaacgtgatagtgaaaaatccattagaagtgctatctaaattacaattgaaagtcggacagagcattcaggttcaaggaaaatgggtagagtctcagggaactcaagattatgagattgtctacaattttgaagatgtggcacatagccttcgtgtagttggagatgtttcggagcagtatcctatccagaagaagtcgctgtcgtaccagttcttgcgaaaccatccgacattgagacacagaacttcaacgttggcttccttgcttcgtttcagatcatttgtagaatcactgttgtttgaatttttcaacggcaacagcttcaccaaggtagtgccaccactcatcaccagctcagactgtgagggtgctggtgagcagttttctgtagagtctttgtctaagctcaatgaaagtagaaacaagacgactttgctgtctgaagatcacttctttggaaaatccacctatttgacggtatcaacacagctccacttggaagtgttggcgttgtcgttgaatcgagtatggactttgactccttgtttcagagccgaagactccaataccaatcgccatttgagcgagttctggatgttggaagccgaaatatgctacttgggcgacttgaaccagttgacttctttcactgaagatatgattagacacgttgccaactctttgaagcagtcttgcaatgacagcagtatttctggcggagctgtagatcttcttggttcacgattcaacaaggaagatgtagagttgatgaagaatagatgggatactgtcttgagtgaagcactgtggccatccatcacttataccgaggcagttgagattattaacagagtcatgaacaaaggaagactgaaaaatcgcttgcagtggggggattctatccagactcctcatgagaagtggcttgctggagaatatttcaaatcgccagtatttatcaccgattaccctactgccgagaagcccttctatatgcccaagtccaagaacttcgatccgcagaggccaacagtggcatgctacgacttgatattgcctgaaataggcgagctcgtaggaggatccatgagagagcataactacaataatcttgtggaagaaatgaaaaacagaaatatgaaccttgacgaaatgcaatggtatttatctacccgtgaaaacggtacagtacctcatggaggatttggcatgggatttgagcggttgatagcatacttatcgggaatggaaaacgtcaaggaagtgataccattccccagagttcctcaatcctgtcattgttag

SEQ ID NO: 10042 - protein, 511 aa, Pichia stipitis CBS 6054
MNQLFKTSRQYRRLPIFRSIFHSQKYFSSLTPTIKDLLANPPSPDSTILAQGHIKSIRQGKSAGFIDLSDGSAHLSLNVIVKNPLEVLSKLQLKVGQSIQVQGKWVESQGTQDYEIVYNFEDVAHSLRVVGDVSEQYPIQKKSSSYQFLRNHPTLRHRTSTLASLLRFRSFVESSLFEFFNGNSFTKVVPPLITSSDCEGAGEQFSVESLSKLNESRNKTTLSSEDHFFGKSTYLTVSTQLHLEVLALSLNRVWTLTPCFRAEDSNTNRHLSEFWMLEAEICYLGDLNQLTSFTEDMIRHVANSLKQSCNDSSISGGAVDLLGSRFNKEDVELMKNRWDTVLSEASWPSITYTEAVEIINRVMNKGRSKNRLQWGDSIQTPHEKWLAGEYFKSPVFITDYPTAEKPFYMPKSKNFDPQRPTVACYDLILPEIGELVGGSMREHNYNNLVEEMKNRNMNLDEMQWYLSTRENGTVPHGGFGMGFERLIAYLSGMENVKEVIPFPRVPQSCHC

SEQ ID NO: 10043 - DNA, 1530 bp, Aspergillus niger CBS 513.88
  CDS (1)..(1530)
atgctgacatggcggcggaccttcgccacatcggtcgcgcgactgaacaataggccagcagcaagaagcgccggctccacgcttctccgctgcgctcaggtcctcgagcagagccagaagggatctagtctggaggaccaggagatccagttgaacgggttcatccgctcagttcgcaagcagaagcgttttgcttttgcagagatctccgatggctcgacagtcaagcctttgcaggctatcctgaacccctcccaggctgccgaactatctaccggaacagctgtcgaaatctcgggagtatggaaggcatgtccaccaggcaaggagcagacacatgagctgcaggctacctctgtcaacatcgtgggcaaaacagaccccgagacctaccctatccaaaagaaataccacagtcccgaattcctccgtcagatcccccacttacgcattcgcacgcccttcaattccctcctctcccgattcagatccgaatgcctataccaactcggaaatgtgtttcggcacgcccccaacggcggcttcgttcaggtgcacccgccgctaatcacatcgtcggactgcgaaggagccggagaaactttcacagtgctaccgcgtgaggcagtagggacgacgccagccgatggcgaccacttcttccgcgcacccaagtacctcacggtatcatcacagctgcatctggaagcatacgcggcggagctaggaaacgtatggaccatgtcacccatgttccgggcggagaagagcgacacaccgcgccacctcagcgagttttacatgttagaggcagaggcaaacttcatggataacctggacaccctcacagaccttgtcgagtaccttctccgcgacctaacccgtcgcctctacgacacccccatcggacaggaaatcctcaccacaaaacgccccggcgaatccaactcggaggaattagcaacagcaacagaccctgctgaccttcgccaacggtggcaggacatgatcgacgggcccaaatggcgacgcatgacgtacacggaagcgatcgagctccttcaagacgccgtcgccaaggactccgccaccttcgagtaccctccaacgtgggagggcggcctccaactcgaacacgagaaatacatcgttgacgtgctcaaccacgggcacccggtcttcgtaaccgactaccccaagccaatcaaacccttctacatggccccttcgcacgcatcagcggccaccacccacggtgaaacagtcgcctgctttgaccttctcctaccagaggtcagcgaagtagcaggcggttcactccgcgagcaccgcctcccggagatcatccagaacatgcgccagcacgacctaggccatctccagtggtacgctgacctccgtcgatggggtaccgcaccgcacggaggcttcggactcgggttcgatcgcttcctgggctatttggcgggcgtgtccagtgttagagacattgttgcgttccctagatacttcggtcgggcggattgctag

SEQ ID NO: 10044 - protein, 509 aa, Aspergillus niger CBS 513.88
MLTWRRTFATSVARLNNRPAARSAGSTLLRCAQVLEQSQKGSSLEDQEIQLNGFIRSVRKQKRFAFAEISDGSTVKPLQAILNPSQAAELSTGTAVEISGVWKACPPGKEQTHELQATSVNIVGKTDPETYPIQKKYHSPEFLRQIPHLRIRTPFNSLLSRFRSECLYQLGNVFRHAPNGGFVQVHPPLITSSDCEGAGETFTVLPREAVGTTPADGDHFFRAPKYLTVSSQLHLEAYAAELGNVWTMSPMFRAEKSDTPRHLSEFYMLEAEANFMDNLDTLTDLVEYLLRDLTRRLYDTPIGQEILTTKRPGESNSEELATATDPADLRQRWQDMIDGPKWRRMTYTEAIELLQDAVAKDSATFEYPPTWEGGLQLEHEKYIVDVLNHGHPVFVTDYPKPIKPFYMAPSHASAATTHGETVACFDLLLPEVSEVAGGSLREHRLPEIIQNMRQHDLGHLQWYADLRRWGTAPHGGFGLGFDRFLGYLAGVSSVRDIVAFPRYFGRADC

SEQ ID NO: 10045 - DNA, 1692 bp, Ostreococcus lucimarinus CCE9901
  CDS (1)..(1692)
atggcggacgcccttgcctcgacgctcgacggcctgacgctcgacggcgcgaggcacaggtactcgaagatctacgaccgcgtcccgatcgaaagcgtgctcgcgacggcggaaaaagacgcgatcggacggacgatcgtcgtcggtggctgggtgaagacgggacgcgaggcggagcgaggcgcgctgctgtttctcgcggtgaacgacgggagcggaccgggaaacctgcaggtggtggtgaaatccgagacgtacgccgagctgggggagctgaagacgacggggacgagcgtggtgatcgagggcgagctgcgggcgccgccggagagcgcgaaggggcaggcgatcgagatgcacgcgacgagggtgctgatggtcggaaagtgcgacggcgcgacgtatccgatcgcgaagaagaagcagacgctggagttcctgcgggagaagattcatctgcgaccgaggacgaacacgatcgcgagcgtggcgcgggtgcggagcgcgctcgcgtacgcgacgcatacgttttttaaccaaaatgggttcttgtacgtgcacacgccgtgcgtgacgcagagcgattgcgagggagcgggagagatgtttcaagtgacgacgttgctgagcgaggcggagaagccggaggcgttagaggcgacggtgaagccggaggagattgaggcaaagcgcgccgaggtttccgcgtgcggcggagagatcaagtcgatgaaggagagtggggcggattccaaggaggtgaagaaggcggtgaagacgttagataaactcaagcaagagctgtcgcagatggaatcggcggcgcgcaagattggcgggattcaacgcgccgaagacggttccatcgattactcccgcgatttctttggcggcaagtcgtacttgaccgtttccgggcagttacaggtggaaacgtacgcgtgtgcgctctctaacgtgtacactttcggtccgacgttccgtgcggagaactcgaacaccaccagacacttggctgagttctggatgattgaacccgagctcgcgtttgccgacttgaacgacgacatgcagtgcgcggaggattacgtcaggttctgctgcaactacctcctcgagaactgctacggcgacttggaattctttgccaagatgtacgacagcacgtgcatcgatcgcgtgaaggaaattgcgacaacgccgtttggtcgcgtctcgtacaccgaagccatcgatctcttggaaaaagccgtcgccgacggcaaggagttcgtctacccagtctcttggggtatcgacttggccaccgaacacgagcgctggctcgccgaggaacacttcaagaaacccgtgatcgtttacaactacccgaaggacatcaaggctttctacatgcgcttgaacgacgacaacaaaaccgtcgccgcgatggacgtcttggtgccaaaggttggcgaactcatcggcggtagtcaacgcgaggagcgattggacgtgttggaacgccgaatggtggaatgtgacctcgtgccggaagaatattcttggtacttggacctgcgtcgttacggcaccgtcacccacgccggtttcggcctcggctttgaacgcctgattcttttgtgcaccgggatggagaatattcgcgacgtcattccgtacccgcgctggccgaacaactgcattagttga

SEQ ID NO: 10046 - protein, 563 aa, Ostreococcus lucimarinus CCE9901
MADALASTLDGLTLDGARHRYSKIYDRVPIESVLATAEKDAIGRTIVVGGWVKTGREAERGALLFLAVNDGSGPGNLQVVVKSETYAELGELKTTGTSVVIEGELRAPPESAKGQAIEMHATRVLMVGKCDGATYPIAKKKQTLEFLREKIHLRPRTNTIASVARVRSALAYATHTFFNQNGFLYVHTPCVTQSDCEGAGEMFQVTTLLSEAEKPEALEATVKPEEIEAKRAEVSACGGEIKSMKESGADSKEVKKAVKTLDKLKQELSQMESAARKIGGIQRAEDGSIDYSRDFFGGKSYLTVSGQLQVETYACALSNVYTFGPTFRAENSNTTRHLAEFWMIEPELAFADLNDDMQCAEDYVRFCCNYLLENCYGDLEFFAKMYDSTCIDRVKEIATTPFGRVSYTEAIDLLEKAVADGKEFVYPVSWGIDLATEHERWLAEEHFKKPVIVYNYPKDIKAFYMRLNDDNKTVAAMDVLVPKVGELIGGSQREERLDVLERRMVECDLVPEEYSWYLDLRRYGTVTHAGFGLGFERLILLCTGMENIRDVIPYPRWPNNCIS

SEQ ID NO: 10047 - DNA, 1512 bp, Ostreococcus lucimarinus CCE9901
  CDS (1)..(1512)
atgcgggcgagagcgacgccgggagcgatcaaacacgcgcggagcgcgcgcgcggtggcgacgcgggcgacgtacggacgacccgagcgcatcgcgcgcgtgaagggaaacgacgggggggcgtcgcgcgtgggcgaggcgttggaactgcgagggtgggcgcgatcggtgcggacgcagaagggaatggcgttcatcgacctgaacgatgggagcgcgatctcggggatgcaagcggtggtgaacgagggaagcgcggcgtgggacgcgctcgacgcgggcggcgtctccacgggggcggcgctcagggtgaaggggaaactcgtggcgagtccgggagggaagcaagcggcggaattggcggtggaggagattgatgtcatcggaacggcggatccggagacgtatccgctgcaaaagaagcgacacacgctggaatatcttcgaagcatcgcgcacttgcgacctcgcacaaacaccatcggcgccgtggctcgcgtgcgcaatcagttggcgtacgcgacgcacacgttctttcaagagcatgggtttttatacgccaacacgccgatcatcaccgcgtcggattgcgaaggcgctggggaacagtttcaagtgacgacgctcgtcgaggcgctgaagaacaatcgcccgtcgtccgacttgccgaagaataaggatggttccatcgactattctcaagacttcttcggcaaaccgtcttatttgaccgtgtctgggcaattgaacggtgaaatcatggcttgcgcggtcaacgacatctacaccttcggtccgacgttccgcgcggagaatagcaacacgtcgcgccacctggctgagttttggatggtagagcccgaactcgcgttcgcggatttgaacgacgacatggattgcgcagaagcgtacttgaagtattgcctgaaccacgtcctcgagcactgcgacgaagatcttgaattcttcgagaagaacatctccaaagacaacctgagagagcgacttcgaaacgtcgcgtcgcaagagtttgcgcgcatcacgtacaccgaagccgtcgagcacgtgttgaacgcgaagaagaagtttgagttcccaatcgaatggggatcggatcttcagagcgagcacgagcggtacatctcagaagaagtcttcaaagatcgccccgtgatcgtgcgcgattatccgaaagatatcaaggcgttctacatgcgtctcaacgacgacaacaaaaccgtcgccgcaatggacgtcttggtgccccgcgttggtgagttgatgggtggtagccaaagagaagaacgccttgatgtcttggagcgccgaatcgaagaggttggtttggaaaaggagtcgtactggtggtacttagatttgagacgatacggttcgcagccgcacgccggtttcggcctcggttttgaacgcctcgttcagtacgtcacaggtgtggagaacattcgtgacgccattcctttcccccgttacccgggtagcgctgagttctag

SEQ ID NO: 10048 - protein, 503 aa, Ostreococcus lucimarinus CCE9901
MRARATPGAIKHARSARAVATRATYGRPERIARVKGNDGGASRVGEALELRGWARSVRTQKGMAFIDLNDGSAISGMQAVVNEGSAAWDALDAGGVSTGAALRVKGKLVASPGGKQAAELAVEEIDVIGTADPETYPLQKKRHTLEYLRSIAHLRPRTNTIGAVARVRNQLAYATHTFFQEHGFLYANTPIITASDCEGAGEQFQVTTLVEALKNNRPSSDLPKNKDGSIDYSQDFFGKPSYLTVSGQLNGEIMACAVNDIYTFGPTFRAENSNTSRHLAEFWMVEPELAFADLNDDMDCAEAYLKYCLNHVLEHCDEDLEFFEKNISKDNLRERLRNVASQEFARITYTEAVEHVLNAKKKFEFPIEWGSDLQSEHERYISEEVFKDRPVIVRDYPKDIKAFYMRLNDDNKTVAAMDVLVPRVGELMGGSQREERLDVLERRIEEVGLEKESYWWYLDLRRYGSQPHAGFGLGFERLVQYVTGVENIRDAIPFPRYPGSAEF

SEQ ID NO: 10049 - DNA, 1446 bp, Pichia guilliermondii ATCC 6260
  CDS (1)..(1446): transl_table=12
atgttttgtggtatttctcgccgagcatggcgaacgtacctgtccagcgcactctcctcgctgagtactaccataccgccaactatcaagcatctattatcatttccaccttctgtggatagtttagtaaaaacgcagggccatgtaaaggctgttcggtcgtttaaaaatcttcattttgtggacctttccgacgggtctacgcactccacgttgaatgtggtgctcaatggtgacaccaatatcaactttaaagtgggacaaagcgtttcgtttgtaggaaaatgggtagagtccaaaggcagtcaggactatgaactcttatacgattctacggagaatgagcacaaagcagctgttataggtgaagttcctgaactgtatcccatccagaaaaagtcactgtcgtatcagtttcttcgaacacttcctacattgagacatcgaacatcatcattggcatcagttcttcgacttcgatccttcttggaaggtctgttccagcggtttttcgagcaaaacgacgttataaaggtcctggcaccgctaattacaagctctgactgcgaaggagcgggcgaacagtttattgttgaggcaaaagattccaaaccagagaatccattttttggaaaaccagcgtatttgactgtatcgactcaattgcaccttgaggttctttctcagtcattgaatcgggtgtgggcattgaccccatgctttcgggccgaggagtcccataccaaccgtcatttaagtgagttctggatgttggaagcagaattatcgtacattgaatcagtccaccaaatttgtgattttaccgagaatatgatccgctacgttacacaggatgtggtccagagtattgcgaatgacttggctcagtcccgctacaataaagacgaacgacaagccatggaggccaactggaagacgatactacagagcgagccttggcccagaatcacctatactgaagctatcgaaatcatcaataaaatcaaaaacaaaggacgactgaagggcaggcttacgtggggagactcaatacaaacagagcacgaaaaatggctcgctgaaacccattttaagtcgccagtatttatcactgattatccgaaagctcagaaaccattctacatgcccgaatctgaaaaccaaaattctactgttgcgtgcttcgacctcataattcctggcataggagagcttgtgggaggctcggtaagagagcacaactacgagaaactattacaagagctcaaaaatcgcaacatgtccatcgaagataatgaatggtacttgtcaattcgtgaaaacggaaccgttccccatggaggttttggcatgggtatggaaagactagtggcatttctttctggaatggccagtatcaaggacgttatagcgtttcccagaaccccgggatcatgttcctgctag

SEQ ID NO: 10050 - protein, 481 aa, Pichia guilliermondii ATCC 6260
MFCGISRRAWRTYLSSALSSLSTTIPPTIKHLLSFPPSVDSLVKTQGHVKAVRSFKNLHFVDLSDGSTHSTLNVVLNGDTNINFKVGQSVSFVGKWVESKGSQDYELLYDSTENEHKAAVIGEVPELYPIQKKSLSYQFLRTLPTLRHRTSSLASVLRLRSFLEGLFQRFFEQNDVIKVLAPLITSSDCEGAGEQFIVEAKDSKPENPFFGKPAYLTVSTQLHLEVLSQSLNRVWALTPCFRAEESHTNRHLSEFWMLEAELSYIESVHQICDFTENMIRYVTQDVVQSIANDLAQSRYNKDERQAMEANWKTILQSEPWPRITYTEAIEIINKIKNKGRLKGRLTWGDSIQTEHEKWLAETHFKSPVFITDYPKAQKPFYMPESENQNSTVACFDLIIPGIGELVGGSVREHNYEKLLQELKNRNMSIEDNEWYLSIRENGTVPHGGFGMGMERLVAFLSGMASIKDVIAFPRTPGSCSC

SEQ ID NO: 10051 - DNA, 1413 bp, Lodderomyces elongisporus NRRL YB-4239
  CDS (1)..(1413)
atgaatattaccaaccaagcaaaatgcgtgataaaaaagaggtttgtacggctagcacataaaagcacactcaatccaactattaagcaccatcttgcaaaatcagaacctggagagcttattgaagcccgcgggtttgtcaagagtgtgagaaagtccaagaatattgggtttcttgatctcgcagatggaacgacatccgaagacctcaaggtagtgtttcagactaaagagcaaccaaaactccgtgtgggtcaaacggttgcagtcaatggtgaatgggcagaaagtaaaggcaagggccaaacaagagaacttcgatgcaacccacaggagccacaacattcgtataggataattggtgatgtagaggaagactaccctttgcaaaagaaatccacatcaatgcagttcttgcgtacattaccagcacttaaacatcgaacatccactattgcgtctttttatagattgagatcatttttggagacgcaaatgattgatttttttaacatcaacgactttaccaaggtcactccgccaataataacaagttctgattgtgagggtgcaggtgaaactttcaagattgccgagagtgcaaatttctttgaaaagaccacttacttgacggtttcgactcaattgcatatcgaagcgttggcgatggctttgaatagagtgtggaccttgacaccatgcttccgagccgaaaattcaaatacaacgcgacatttatgtgaattttggatgctagaagccgagatatcgcatgtggaagatttagagcaattgttaaattttaccgaggatatgattaagtattcgacacggaaacttattgacctgaaaaaggagtatttgagaggtgtttatttggaagaagagttggtgcaatcgagatgggcagcaattacgaaacaagagaaatggcctagaatgacctacactgatgccatcgagtatttgaacaaactgcgaaaagatagtgaagagaagctcgaattcggggactcgcttctgttggagcatgagaaatatcttgccaaagatggacccatatttatcacagactatcctgccgagatgaaaccattctatatgttgaaatcggcaaagtttgatccggaaaaacccacagttgcatgctatgacttacttttccccgactttggtgagcttgctgggggttcgcttagagagcacaattatgaggagttggtggagagcatgggaaaacatggcatggatgtggaagagatggattggtacaccacattgagaaaaaatggaacgattccacatggaggttttggaatgggttgggaaagatttgttacatacttatctggacatgacaatgtaaaagatgtcatacctttccctagagcgccaggcttgtgcagagcatag

SEQ ID NO: 10052 - protein, 470 aa, Lodderomyces elongisporus NRRL YB-4239
MNITNQAKCVIKKRFVRLAHKSTLNPTIKHHLAKSEPGELIEARGFVKSVRKSKNIGFLDLADGTTSEDLKVVFQTKEQPKLRVGQTVAVNGEWAESKGKGQTRELRCNPQEPQHSYRIIGDVEEDYPLQKKSTSMQFLRTLPALKHRTSTIASFYRLRSFLETQMIDFFNINDFTKVTPPIITSSDCEGAGETFKIAESANFFEKTTYLTVSTQLHIEALAMALNRVWTLTPCFRAENSNTTRHLCEFWMLEAEISHVEDLEQLLNFTEDMIKYSTRKLIDLKKEYLRGVYLEEELVQSRWAAITKQEKWPRMTYTDAIEYLNKLRKDSEEKLEFGDSLLLEHEKYLAKDGPIFITDYPAEMKPFYMLKSAKFDPEKPTVACYDLLFPDFGELAGGSLREHNYEELVESMGKHGMDVEEMDWYTTLRKNGTIPHGGFGMGWERFVTYLSGHDNVKDVIPFPRAPGLCRA

SEQ ID NO: 10053 - DNA, 1452 bp, Vanderwaltozyma polyspora DSM 70294
  CDS (1)..(1452)
atgtttggccgtttgctttgtaggaggtatcacgttaattctctaaaatctctctatggtcaagttgattcgttacctagcaaagtatcaaatatcaatggttggattaaatcggtgagactattgaaaaaagttgcattcattgatatacaagatggtactatattgaaagaattaaaaatagtcgttccattcgattctcaaagtaatttatcctctgaagttgctacatttttgaagagtttaagaactggccaaagtattgcaataaaagatgccaagttagtggaaactgaaggtagagaacaacggtttgaattgaacattactgatccaatagacaatatttcaataattggtaatgtctccgaatcatatccattgcagaagaagtatcattcattgccttatctcaggacattgccaacattaaagcatagaacatcatatttgggttcgttgctgaggtttagatctgaattagaatataatatggccactttcttcaaactgaatcaatttacaaaggcatcaccaccaattttaaccggaagtgattgtgaaggtgctggtgaattatttagggtcgaagcaaatggttatgttgaaaagaagcaacattattttgggaaaccaacttatctaacagtatctttgcaattacaactagaaatattagcaatggcattttcgagagcttggtctctttctccatgttttagagctgaagaaagtgacactaaccgtcatttgagtgaattttggatgatggaggcagaatggtgttttacaaaagatacaaaagagttgaccacttttgtaaaagatatgattcaatatattactcgtgaatcatataaaaactttgatgatttcattcctaagaatatacctgaaaactgtctaccaagaaatgagctattagaaaggtgggaaacattattaagagatgaatcatggaatactatcacatacacagaggcaattgaaatcctgcaaaagagggataaagaggtacctttcccaaattacagacctatttggggggaagctttacaatctgagcatgagagatggctatcagaatcgtattttaaaggtcctacgtttgtaactgactatcctcgtgattgcaaagcattctatatgaaattgaatcctgatggacagacagttgcatgttttgatttattagttcctgggattggtgagattgttggtggcagtataagagaggataatttcgaactattatccaaggaggtgtctcgacgtcaaatgaataaaaatggcgaattggactggtacctatcattaagaaaagaaggaagtgtcccacatggtggatttggattgggtttagaaagatttgtatcctatctatacggtaaccataatattagagatgcgatcccattttatagagccgcatctggtaatattgacctataa

SEQ ID NO: 10054 - protein, 483 aa, Vanderwaltozyma polyspora DSM 70294
MFGRLLCRRYHVNSLKSLYGQVDSLPSKVSNINGWIKSVRLLKKVAFIDIQDGTILKELKIVVPFDSQSNLSSEVATFLKSLRTGQSIAIKDAKLVETEGREQRFELNITDPIDNISIIGNVSESYPLQKKYHSLPYLRTLPTLKHRTSYLGSLLRFRSELEYNMATFFKLNQFTKASPPILTGSDCEGAGELFRVEANGYVEKKQHYFGKPTYLTVSLQLQLEILAMAFSRAWSLSPCFRAEESDTNRHLSEFWMMEAEWCFTKDTKELTTFVKDMIQYITRESYKNFDDFIPKNIPENCLPRNELLERWETLLRDESWNTITYTEAIEILQKRDKEVPFPNYRPIWGEALQSEHERWLSESYFKGPTFVTDYPRDCKAFYMKLNPDGQTVACFDLLVPGIGEIVGGSIREDNFELLSKEVSRRQMNKNGELDWYLSLRKEGSVPHGGFGLGLERFVSYLYGNHNIRDAIPFYRAASGNIDL

SEQ ID NO: 10055 - DNA, 1443 bp, Aedes aegypti
  CDS (1)..(1443)
atgttgaaatattctttagaaaaactattcttctccaacagtttctgtaaaagtaatcagtttcgatgcatttctcatttttctgccagtatttgggatgtcacaagtggaaaacatcgagaaggggaccaacttaatgttaagggttgggttaaatccgtccgaaagctgaaagagcacgcatttctggagatcaacgacggttcgtgcaacaaaaacctgcaattggtggtggataaagcccagctgaacggagctgcctacggatcatccgtcgacgcaagtggcactcttggcgttacacctaaaaaccaactcgaacttaaagttgaacgattgcaagagttcgggaagtgtcctctctccgaggggtatccattctaccctaagaaatcgtacccaccggactacgttcggaaccaccttcatttgagaccgcaggtttcttccctggcttccaccctacgagtgcggcaccacgcaacgaaatgcttcaatgattatctggatcgtgagggcttcttccagattcacaccccgattatcacttcgaatgattgcgaaggggctggcgaggcattcctagtgcgaccggccagcgcagatctgctcaagcaaatggccaagaaggacgtccctctggatcgagcttacttcgatcggcaggcttatctgaccgtgtccggccagctgcacctggaggccatgagccatgggctgggcaaagtgtatacgttcggtcccacattccgggcggagaattccaaatcacctatccatttgagcgagttctacatgctagaactggaggaggctttcatggaaaccctggaggatttgacgaatcggatcgaatctatgataaaacatgtcaccaaatccctgctggacgttgcttcggaagatttggccgccgtaagaaagctgaccgatgattccaccctggaggaaagcttctcgtggctggataaaccttatcctaggatcaccttcaaggaagccatccacgttctggagcaaaacaaatccaaactaaagtcagtagttcggcccgaagaaggcatcaacaaggagcaggaattgttcctggtgagtcacttccagtgccctctgtttgtaatagactggcccaaagcgatcaaatcgttctacatgcgtgagaatcgtactgaaccggcccttgtagacgcgatggatttcctggtgccacacgtgggcgaactggttgggggaagtgtccgcgagaatgaatacgatcggttgaaagccaaactgccggatcaggaagcgttgcgatggtacctggagctgcgcaagtttggatcggtcccgacggctggcttcggactggggttggagcggtacctctgctgggtgctgaacgtgcacaacatcagggacgtgataccgtttccacggtgggcgcataattgtagtatgtag

SEQ ID NO: 10056 - protein, 480 aa, Aedes aegypti
MLKYSLEKLFFSNSFCKSNQFRCISHFSASIWDVTSGKHREGDQLNVKGWVKSVRKLKEHAFLEINDGSCNKNLQLVVDKAQLNGAAYGSSVDASGTLGVTPKNQLELKVERLQEFGKCPLSEGYPFYPKKSYPPDYVRNHLHLRPQVSSLASTLRVRHHATKCFNDYLDREGFFQIHTPIITSNDCEGAGEAFLVRPASADLLKQMAKKDVPLDRAYFDRQAYLTVSGQLHLEAMSHGLGKVYTFGPTFRAENSKSPIHLSEFYMLELEEAFMETLEDLTNRIESMIKHVTKSLLDVASEDLAAVRKLTDDSTLEESFSWLDKPYPRITFKEAIHVLEQNKSKLKSVVRPEEGINKEQELFLVSHFQCPLFVIDWPKAIKSFYMRENRTEPALVDAMDFLVPHVGELVGGSVRENEYDRLKAKLPDQEALRWYLELRKFGSVPTAGFGLGLERYLCWVLNVHNIRDVIPFPRWAHNCSM

SEQ ID NO: 10057 - DNA, 1608 bp, Chlamydomonas reinhardtii
  CDS (1)..(1608)
atgacacgatgctggccttgcaatgctggggtgtcgcaggttggccagacgctgcgcgtgggtggctgggtgaagaccggccgtgaggctggtgcgggtgccttctgcttccttgaggtcaacgatggctccatgttcgatagcctgcaggtgatggtgtcgaaggaggtaggcggcctgaagacgctggtgcccaccggcacctcggtgctggtggagggccacctggaggccacccctgagggcaccaagcaggccgtggagctgaaggccaccaagatcgtgcacgtgggcccctcggacgccgccacctaccccattgccaagaagaagaccacgtacgagttcctgcgcgagaagatgcacctgcgcccgcgctccaacaccatcagcgccgtggcgcgcatccgcaacgcgctggcctttgccacacaccgcttcttccaggagaacggcttcctgtacgtgcacacgcccatcatcaccgcctccgactgcgagggcgccggcgagatgttccaggcgcgtgtgaccacgctgctgggcaagatgaaggagcacgagggcgcgccggcggtgtcaccggccgagctggaggccgccaaggcgcaggtggcggcgcacggcgaggaggtcaaggcagccaaggcggacaagtcgctggccgccgcctccaaggcggccgtggacaagctgctgaaggccaaggaggagctggccaagctggaggagggctcccgcatcgtgggcggcatcaagcgcctgccggacggcacccccgactataaggaggacttcttctccaagcccgccttcctcaccgtgtccggccagctgcagggcgagttctacgcctgcgcgctgtccaacatctacaccttcggccccaccttccgcgccgagtacagctttacggcgcgccacctggcggagttctggatgattgagccggagatggcgttctgcgacctgaaggacgacatgcagtgcgccgaggactacgtgcgctactgctgcaagttcctgctggagaactgcaagcctgacctggagttcatcaacaagatggtggacaacacggcactggcgcgcctggagcaggtggcgtccacgcccttcaagcgcatcagctacacggaggcgattgacctgctgctgggcgtggtggcggagggcaagaagtcgttcgagttcaaggtggagtggggcatcgacctgtcgaccgagcacgagcgctacctgactgaggagattttcaagcagcccgtcatcgtgtacaactaccccaaggagatcaaggcgttctacatgcgcctgaacgacgacaacaagaccgtggcggccatggacgtgctggtgcccaaggtgggcgagttgatcggcggctctcaacgtgaggaccgcctggacgtgctggagcgccggctaggcgagagcggcatggacctggccgcctacgagggctacctcgacctgcgccgctacggcaccgtgccgcactcgggcttcggcctgggcttcgagcgcctcatcctgttcgccactggcctcgacaacatccgcgaggtcatccccttcccgcgctggcccggcaacgccgcgtactaa

SEQ ID NO: 10058 - protein, 535 aa, Chlamydomonas reinhardtii
MTRCWPCNAGVSQVGQTLRVGGWVKTGREAGAGAFCFLEVNDGSMFDSLQVMVSKEVGGLKTLVPTGTSVLVEGHLEATPEGTKQAVELKATKIVHVGPSDAATYPIAKKKTTYEFLREKMHLRPRSNTISAVARIRNALAFATHRFFQENGFLYVHTPIITASDCEGAGEMFQARVTTLLGKMKEHEGAPAVSPAELEAAKAQVAAHGEEVKAAKADKSLAAASKAAVDKLLKAKEELAKLEEGSRIVGGIKRLPDGTPDYKEDFFSKPAFLTVSGQLQGEFYACALSNIYTFGPTFRAEYSFTARHLAEFWMIEPEMAFCDLKDDMQCAEDYVRYCCKFLLENCKPDLEFINKMVDNTALARLEQVASTPFKRISYTEAIDLLLGVVAEGKKSFEFKVEWGIDLSTEHERYLTEEIFKQPVIVYNYPKEIKAFYMRLNDDNKTVAAMDVLVPKVGELIGGSQREDRLDVLERRLGESGMDLAAYEGYLDLRRYGTVPHSGFGLGFERLILFATGLDNIREVIPFPRWPGNAAY

SEQ ID NO: 10059 - DNA, 1506 bp, Physcomitrella patens subsp. patens
  CDS (1)..(1506)
atggaggataaagagggcggagatggagtcgagcctgtgccttcgtcgtctgtgcctgaatttagaaagagactgcgaattgcggacattaaaggtggcgaggatgggggtttgggacgcgtcggggagaccatggttgtgcgagggtgggtgcggacttgtagaatacagaagactttctcattcattgaggtcaatgacggatcggctgtatcaaatctgcagactgttgtgttgtccgatgttgaaggctatgataagattgaggcaggccaggtcaacacgggtgcttctgtggctgttgaaggagttcttgtcgagagtaaaggcgccaagcagaaagtggagctcaaagccacaaagctgacgctaataggaggtacagatcctgcctcattcccaatccagaagaagaagctgacccgtgagtacttgcgaagtgttgctcacttgcgtcccaggaccaatacatttggtgcagtcgctagggttcgaactgctctagcctatgccactcatcagtttttcagagagcaggggtttgtatgggtggctagtcccatcattacggcatctgactgtgaaggagctggagaacaattctgcgttaccactctgattcctagttcacacgaggacactaaaacacctgtatcgcaagtacctaccaccaaggacgggttgattgactggtcccaggacttttttgggaagcccgcttttctcacggtatctgggcagctcaatggagagacgtatgccacagctttgtgtgacatctatacgtttgggcctactttccgtgctgaaaattcgaacactactcggcatttggctgaattttggatgattgagccagagcttgcatttgccgacctaaaagatgacatggcttgcgccacagcctatcttcagtatgttgtcagatatgtcttggataattgtatggaagacttggagtttttcaaccagtgggttgaaaagggcatcatcacccgtctcactaatgtagtagagaaacccttcgtgcacgtgacctacactgaggcggtggagctacttcagaaatctaagaagaagtttgaatttccggtgaaatggggagctgatttacagagtgaacatgaacgttacctcacagaagtggccttcagtggtaatccggttattgtcactgactacccaaaggaaattaaggccttctacatgaggcaaaatgaagatgaaaaaactgtggcagccatggacatccttgttcctagggtgggagagcttataggtggaagtcagcgtgaggagcgactagaagtgttagagagacggatcgaggagcttggactcagtaaagagagctattggtggtatcttgacttgcgtcgatacggttctgttccccatgcaggattcgggttgggttttgagaggctggtgcagttctcaacgggaattgagaacattcgcgatgtcattccttttcccagaacccccaactcggctgaattttag

SEQ ID NO: 10060 - protein, 501 aa, Physcomitrella patens subsp. patens
MEDKEGGDGVEPVPSSSVPEFRKRLRIADIKGGEDGGLGRVGETMVVRGWVRTCRIQKTFSFIEVNDGSAVSNLQTVVLSDVEGYDKIEAGQVNTGASVAVEGVLVESKGAKQKVELKATKLTLIGGTDPASFPIQKKKLTREYLRSVAHLRPRTNTFGAVARVRTALAYATHQFFREQGFVWVASPIITASDCEGAGEQFCVTTLIPSSHEDTKTPVSQVPTTKDGLIDWSQDFFGKPAFLTVSGQLNGETYATALCDIYTFGPTFRAENSNTTRHLAEFWMIEPELAFADLKDDMACATAYLQYVVRYVLDNCMEDLEFFNQWVEKGIITRLTNVVEKPFVHVTYTEAVELLQKSKKKFEFPVKWGADLQSEHERYLTEVAFSGNPVIVTDYPKEIKAFYMRQNEDEKTVAAMDILVPRVGELIGGSQREERLEVLERRIEELGLSKESYWWYLDLRRYGSVPHAGFGLGFERLVQFSTGIENIRDVIPFPRTPNSAEF

SEQ ID NO: 10061 - DNA, 1665 bp, Physcomitrella patens subsp. patens
  CDS (1)..(1665)
atggtggccaactccaagtacagcggccgcgtcttcatcaaatccattctgggtcgacccgacggtggagttgggctcattgggcagaaggtgactgtgggaggatgggtcaagactggccgtgtcatgggcaagaccgcgtctgccttcttggaggtgaacgatggatcctggattggcaacttgcaggtgttggtggacgcgactgtcgccacggaacggcagctcaccctcaccgggaccagcgtcttggtgcaagggaagctcgtggagcctcctgaagacaagaagcagaaggtggagctgctcgtggagaccattctgcatgttggcaccgtgaacgccgccaagtatcccatcgccaagaccaagctgtcgctggagtcgcttcgcagccaattgcacctccgggctcgcaccaacaccatttcggctgtggcgcgaatcaggcacgctttggctgtggcgacgcacacgttcttcgaccggaatgggttcatgtgggtgcacactcccatcatcacgaccagcgactgcgagggcgcgggcgagatgttccaagtgacgacgctgttcagcgaaacggaaaggagagatcgcgagtatgcggcgaacccacctccgagccaggccgaggtggaggcagcccaagatgtcgtggcggaggcggctgaggtggtgaaggagctgaaggcgcagaagaagaacaagaaagagttggagccgtcggtgcaggcgctgatgaaggcgaaggagcacgccgcacatttggaggcacgggcgagcctgaaacccgggatgccgaggaaagaaggcggggaggtggatttcggagcggattttttcgcacgacaagcgtttctgacggtgtcggggcagctgcaagtggagacgtatgcatgtgcgctgagcaacgtgtacacgttcgggccgacgttcagggcggagaactcacacacgacgaggcacttggcggagttctggatgatcgagccagagatagcgtttgcggacttgcaggacgacatgaactgtgcggaggattacgtgaggttcatgtgccagtggttgctggaccactgtctggaggacatgaagtttatatcgagtatgtatgacaagacggccgtggatcgtctgaagctggtggcgtcgacgccgttcgtgcgcatcacgtacacggaagcaatcgagatactagagaaggcaaggacctcgaagtgtggtgtgacagagaagaagttcgagaacaaggtggaatggggaatcgacctagcatcggaacatgaaaggtatttgacagaggagatatacaagaagccagtgattgtgtacaactacccgaaggacataaaagcgttttacatgcggctgaacgacgacgagaagacggtggccgctatggacgtgctggtaccgaaggttggagagctggtgggtgggagtcagagggaggagcgtcaggacgttcttgagaggaggttgaaggagatgaacttgccgatggagccgtatgagtggtacatagatttgcggcgacacggaacagtgaagcacgcagggtttgggcttggattcgagcggatgatattgtttgcgacggggttggagaacatcagggacgtgattccgtttccgagatatccaggcaaggcggagctttga

SEQ ID NO: 10062 - protein, 554 aa, Physcomitrella patens subsp. patens
MVANSKYSGRVFIKSILGRPDGGVGLIGQKVTVGGWVKTGRVMGKTASAFLEVNDGSWIGNLQVLVDATVATERQLTLTGTSVLVQGKLVEPPEDKKQKVELLVETILHVGTVNAAKYPIAKTKLSLESLRSQLHLRARTNTISAVARIRHALAVATHTFFDRNGFMWVHTPIITTSDCEGAGEMFQVTTLFSETERRDREYAANPPPSQAEVEAAQDVVAEAAEVVKELKAQKKNKKELEPSVQALMKAKEHAAHLEARASLKPGMPRKEGGEVDFGADFFARQAFLTVSGQLQVETYACALSNVYTFGPTFRAENSHTTRHLAEFWMIEPEIAFADLQDDMNCAEDYVRFMCQWLLDHCLEDMKFISSMYDKTAVDRLKLVASTPFVRITYTEAIEILEKARTSKCGVTEKKFENKVEWGIDLASEHERYLTEEIYKKPVIVYNYPKDIKAFYMRLNDDEKTVAAMDVLVPKVGELVGGSQREERQDVLERRLKEMNLPMEPYEWYIDLRRHGTVKHAGFGLGFERMILFATGLENIRDVIPFPRYPGKAEL

SEQ ID NO: 10063 - DNA, 1482 bp, Physcomitrella patens subsp. patens
  CDS (1)..(1482)
atggtggccaactccaagtacagcggccgcgtcttcatcaaatccattctgggtcgacccgacggtggagttgggctcattgggcagaaggtgactgtgggaggatgggtcaagactggccgtgtcatgggcaagaccgcgtctgccttcttggaggtgaacgatggatcctggattggcaacttgcaggtgttggtggacgcgactgtcgccacggaacggcagctcaccctcaccgggaccagcgtcttggtgcaagggaagctcgtggagccccctgaagacaagaagcagaaggtggagctgctcgtggagaccattctgcatgttgggaccgtgaacgccgccaagtatcccatttccaagaccaagctgtcgctggagtcgcttcgcagccaattgcacctccgggctcgcaccaacaccatttcggctgtggcgcgaatcaggcacgctttggctgtggcgacgcacacgttcttcgaccggaatgggttcatgtgggtgcacactcccatcatcacgaccagcgactgcgagggcgcgggcgagatgttccaagtgacgacgctgttcagcgaaacggaaaggagagatcgcgacctgaaacccgggatgccgaggaaagaaggcggggaggtggatttcggagcggattttttcgcacgacaagcgtttctgacggtgtcggggcagatgcaagtggagatgtatgcatgtgcgctgagcaacgtgtacacgttcgggccgacgttcagggcggagaactcacacacgacgaggcacttggcggagttctggatgatcgagccagagatagcgtttgcggacttgcaggacgacatgaactgtgcggaggattacgtgaggttcatgtgccagtggttgctggaccactgtctggaggacatgaagtttatatcgagtatgtatgacaagacggccgtggatcgtctgaagctggtggcgtcgacgccgttcgtgcgcatcacgtacacggaagcaatcgagatactagagaaggcaaggacctcgaagtgtggtgtgacagagaagaagttcgagaacaaggtggaatggggaatcgacctagcatcggaacatgaaaggtatttgacagaggagatatacaagaagccagtgattgtgtacaactacccgaaggacataaaagcgttttacatgcggctgaacgacgacgagaagacggtggccgctatggacgtgctggtaccgaaggttggagagctggtgggtgggagtcagagggaggagcgtcaggacgttcttgagaggaggttgaaggagatgaacttgccgatggagccgtatgagtggtacatagatttgcggcgacacggaacagtgaagcacgcagggtttgggcttggattcgagcggatgatattgtttgcgacggggttggagaacatcagggacgtgattccgtttccgagatatccaggcaaggcggagctttga

SEQ ID NO: 10064 - protein, 493 aa, Physcomitrella patens subsp. patens
MVANSKYSGRVFIKSILGRPDGGVGLIGQKVTVGGWVKTGRVMGKTASAFLEVNDGSWIGNLQVLVDATVATERQLTLTGTSVLVQGKLVEPPEDKKQKVELLVETILHVGTVNAAKYPISKTKLSLESLRSQLHLRARTNTISAVARIRHALAVATHTFFDRNGFMWVHTPIITTSDCEGAGEMFQVTTLFSETERRDRDLKPGMPRKEGGEVDFGADFFARQAFLTVSGQMQVEMYACALSNVYTFGPTFRAENSHTTRHLAEFWMIEPEIAFADLQDDMNCAEDYVRFMCQWLLDHCLEDMKFISSMYDKTAVDRLKLVASTPFVRITYTEAIEILEKARTSKCGVTEKKFENKVEWGIDLASEHERYLTEEIYKKPVIVYNYPKDIKAFYMRLNDDEKTVAAMDVLVPKVGELVGGSQREERQDVLERRLKEMNLPMEPYEWYIDLRRHGTVKHAGFGLGFERMILFATGLENIRDVIPFPRYPGKAEL

SEQ ID NO: 10065 - DNA, 1629 bp, Aspergillus oryzae RIB40
  CDS (1)..(1629)
atgcgaacatggcgacgaagcttcgctacgtctgttgccagactaaaccataaacctgccggtcagggcgtcagccccacgctcttacgatgcgcacaagtcctggagcaaagcaagagtggaacctgcagtttagaagatcaagagatcaagttgaatgggtttattcgctccgtccgaaagcagaaacgctttgcgttcgccgagatctcagatgggtcgacgattgagcctatacaggcttttttgagaccagcacaggctgccgaactgtctactggaactgctgtggagatttctggggtctggaaggcttgcccaccgggcaaggagcaaacccatgagcttcaaacgacagacgtgaatgttcttgggaaggcagaccctgagacgtaccccatccagaaaaagtatcacagccccgacttccttcgtcagattccccacctccgcatgcgcacacctttcagctccctcctctcgcggttccgatcagaatgcttgtaccagctaggaaatgtgtttcgcttcgccccgaacgggggctacgttcaggtccacccaccgttaatcacatcgtcggattgtgaaggcgctggggagacattcacagttctgccgcgggaagctatgggggcacagtctgagggcgagcatttcttccgggcacccaaatacctgacagtatcgtcacagctccatctggaggcatatgcagcagagctaggaaacgtgtggacaatatcgcccatgttccgggccgagaagagcgatacgccgcgccatcttagcgagttctacatgctggaggcagagatgaactacatgcatgacctagactcgctgaccgactccgtagagtatattctccgtgacctagttcgtcggttacacgacacgcctgttggccaggagatcctgtccgcaaagcgatcgggcgagtccggtcaggatcaaactgaaggatctggtgctaatctaaaacaacgatggaacgacatgatggagggacccaaatggggtcgcatgacctacacgcaagcgattgagaagctccaggacgcggtcgccaagggacaagccacattcgaacatgcacccgaatggaccggcggccttcaactcgaacacgagaagtacatcgtcgacgtgattcacaacggccgtcccgtgttcgtgaccgactatcctaaggtcgtcaaaccgttctacatgctaccatccaatggggacagctccgctgcaccaggcgaaacagtcgcctgctttgatctcctcctcccagaagttagcgaagtcgcaggaggctccctccgcgagcatcgcctccccaacatcatccagaatatgcgcgagcacggactgatcaagacccgcgcaccacccgctctggaagcggaagcggaagcaggagcacaagccgattccgagacgccgatgtaccctcacctcctgcccggtgaagacctgggccatctccagtggtatgctgatcttcggcggtggggaacagcgccccatggaggatttggtcttggatttgaccgattcttgggatacctggctggcgtctccagtatccgagacgtagtatctttccctcggtattttggcagggcggactgctga

SEQ ID NO: 10066 - protein, 542 aa, Aspergillus oryzae RIB40
MRTWRRSFATSVARLNHKPAGQGVSPTLLRCAQVLEQSKSGTCSLEDQEIKLNGFIRSVRKQKRFAFAEISDGSTIEPIQAFLRPAQAAELSTGTAVEISGVWKACPPGKEQTHELQTTDVNVLGKADPETYPIQKKYHSPDFLRQIPHLRMRTPFSSLLSRFRSECLYQLGNVFRFAPNGGYVQVHPPLITSSDCEGAGETFTVLPREAMGAQSEGEHFFRAPKYLTVSSQLHLEAYAAELGNVWTISPMFRAEKSDTPRHLSEFYMLEAEMNYMHDLDSLTDSVEYILRDLVRRLHDTPVGQEILSAKRSGESGQDQTEGSGANLKQRWNDMMEGPKWGRMTYTQAIEKLQDAVAKGQATFEHAPEWTGGLQLEHEKYIVDVIHNGRPVFVTDYPKVVKPFYMLPSNGDSSAAPGETVACFDLLLPEVSEVAGGSLREHRLPNIIQNMREHGLIKTRAPPALEAEAEAGAQADSETPMYPHLLPGEDLGHLQWYADLRRWGTAPHGGFGLGFDRFLGYLAGVSSIRDVVSFPRYFGRADC

SEQ ID NO: 10067 - DNA, 1647 bp, Brugia malayi
  CDS (1)..(1647)
  misc_feature (357)..(357): m is a or c
  misc_feature (918)..(918): y is t or c
atgactgtttacatttgtccagaaactggagatgatggtaatgatggtagcgagctgaaacctttaaggacgctttatcaggcaatgataattactaagtcttccaaaggtgacttcttaataaggacaaagaaagatggaaaacaaatatgggaagctgcttcaaagacggcattgaagaaaagttggaaacattacgagcaagaaatgttgaagaatgaaaaagttgctgcaaagatgttagagaaggatgcgacagaagtgggagtaaaagcagcccttgaagaagccaaaaaagtgcaaatagaactggacacgagtctgtcatatatcactggtgtgaagattcgtgatctmgttaagcaccgtaatgaacgtgtttgcatcaaaggatggattcatagaatgcgtcgacaaggaaagtcactgatgtttttcatccttcgagatgggactggtttccttcaagtactactcatggataaattgtgccagacgtatgacgctctcactgtgaatactgaatgcacggttgagatatacggcgcaataaaggaagttccggaaggtaaagaggcaccgaacgggcacgagttaatagctgatttttggaaaataataggaaatgcacctcctggaggcattgataatgtgttaaacgaagaagcaagtgtcgacaaaatgttggacaatagacatttggttattcgaggtgaaaatgctgctgcattgctacgtttgagagcagctgctactcgagcaatgcgggaacatttctataatgctggctatttggaagttgcaccaccgactttagtgcaaacgcaggtagaaggtggatcaacgttatttaatctggattattttggtgagcaatcttttcttacgcagtcatcacagctctatctagaaacttgyattcccactcttggtgatgtcttctgcattgctcagtcttacagggcggaaaaatctcgcactcgtcgacacttggcggaatatgcacatgttgaagccgagtgtcctttcataacgctggatgatttgatggagaaaattgaagaactcgtttgcgacacagtggatcgacttttagctgacgaggaggcaaaaaaattattggaacacattaatccgaaatttcaaccgccagaaagaccatttttaagaatggaatacaaggatgctattaaatggttgcaagaacacaatgttgagaatgaatttggtaatacttttacttatggggaagatattgctgaagcagcggaacgtttcatgactgataccatcaataagcctattctactgaatcgtttcccgagcgaaattaaggcattttatatgcagagggatgcaaaggataataccttaacagaatctgttgatcttcttatgcctggcgttggcgaaattgttggtggcagtatgagaatttggaagttcgatgaactatcgaaagcttttaaaaatgtggaaattgacccgaaaccgtattactggtacttggatcaacgtttatatggcacctgtcctcatggtggctatggacttggcttggaacgttttatttgttggttaacaaacaccaatcatattcgcgatgtgtgtctttacccacgctttgttggtcgatgtgtcccataa

SEQ ID NO: 10068 - protein, 548 aa, Brugia malayi
MTVYICPETGDDGNDGSELKPLRTLYQAMIITKSSKGDFLIRTKKDGKQIWEAASKTALKKSWKHYEQEMLKNEKVAAKMLEKDATEVGVKAALEEAKKVQIELDTSLSYITGVKIRDLVKHRNERVCIKGWIHRMRRQGKSLMFFILRDGTGFLQVLLMDKLCQTYDALTVNTECTVEIYGAIKEVPEGKEAPNGHELIADFWKIIGNAPPGGIDNVLNEEASVDKMLDNRHLVIRGENAAALLRLRAAATRAMREHFYNAGYLEVAPPTLVQTQVEGGSTLFNLDYFGEQSFLTQSSQLYLETCIPTLGDVFCIAQSYRAEKSRTRRHLAEYAHVEAECPFITLDDLMEKIEELVCDTVDRLLADEEAKKLLEHINPKFQPPERPFLRMEYKDAIKWLQEHNVENEFGNTFTYGEDIAEAAERFMTDTINKPILLNRFPSEIKAFYMQRDAKDNTLTESVDLLMPGVGEIVGGSMRIWKFDELSKAFKNVEIDPKPYYWYLDQRLYGTCPHGGYGLGLERFICWLTNTNHIRDVCLYPRFVGRCVP

SEQ ID NO: 10069 - DNA, 1335 bp, Brugia malayi
  CDS (1)..(1335)
atgtccataaaagctgctatcaagttgcttcaatcacatcctgtttcgtcattactgcaaataaatcaaaaattaaaggatatacgaatacaaggatgggcacgtcgagtagaaacacgtgggaaattcttgtttttgcatgtcagtgatggatgttcgttaaaaacgatacaagctgtggtacagcgtgatatttgtcctaaagtaccggttggtagtgctgtggatatcgttggtgattgggtaatgagtaatggtaagcaacaaggcatggaattgtttgctacaaattgtgaagttgttggacttcagcaaaaaagcttcagcgaattgcctactgaagaaagttgtgcggatgttacgcgtagaaaatatcatttacgaatgaaatccattccattcatgtgtctgctgcggctacgttctcggctagaccagttgagtcgatcttttttccagaaggaattattctttcatgtggatacaccgctgttaactcataatgactgcgaaggtgctggtgatatatttattgttcaggctgataaacaaaattatttcggtgatcaagcagtttatttgccagtttcaagccaactacatctggaatcctttgttggcagcctatcgaaggtgtacacaatagcgcctgcattacgtgctgaccattcgcagactcgacaacatttggcagaatttcgaatgttggaggcggaatatgcgtttgcagatgatttagagcagttatgcgatttggtggagcgttatgtcaactatgtgatagatggaatgcttagttatgatgtgaaggaaatcaaatcaatgatgcaagttttttgcagcgggaatgcagaagtgcagtcacttttatggactaatggttctcggaagccatttctccgtatacagtatgacgaagcagctgctatattgcaaagtaagggtgaaatgatacctggaggacggtttagcaaagagaacgaattaaccatggtgaagcactgtgctgggcccttatttgtcctccgttatccatatacacagaagcctttctacatgaaacgttatggcaattatgcggaatgtttcgacttgttggcaccatttgttggtgagctagctggtggttctttgagggagccagatgcagaagagctccgtcgtcgtggatgcgatgactcgttggattggtatttggaaataagacagcatggccatccacccagtgcaggatttggcattggtttggaacgtttcatgcaagccttgtttggtattctaaacataaaggacacggtagcattcccgagatggtataagcattgtccaagctaa

SEQ ID NO: 10070 - protein, 444 aa, Brugia malayi
MSIKAAIKLLQSHPVSSLLQINQKLKDIRIQGWARRVETRGKFLFLHVSDGCSLKTIQAVVQRDICPKVPVGSAVDIVGDWVMSNGKQQGMELFATNCEVVGLQQKSFSELPTEESCADVTRRKYHLRMKSIPFMCLLRLRSRLDQLSRSFFQKELFFHVDTPLLTHNDCEGAGDIFIVQADKQNYFGDQAVYLPVSSQLHLESFVGSLSKVYTIAPALRADHSQTRQHLAEFRMLEAEYAFADDLEQLCDLVERYVNYVIDGMLSYDVKEIKSMMQVFCSGNAEVQSLLWTNGSRKPFLRIQYDEAAAILQSKGEMIPGGRFSKENELTMVKHCAGPLFVLRYPYTQKPFYMKRYGNYAECFDLLAPFVGELAGGSLREPDAEELRRRGCDDSLDWYLEIRQHGHPPSAGFGIGLERFMQALFGILNIKDTVAFPRWYKHCPS

SEQ ID NO: 10071 - DNA, 1629 bp, Podospora anserina DSM 980
  CDS (1)..(1629)
atgcggccctccgttctggggtctgccatgcggccatcagcaagtccccttgtctcgcgtatctcaatgctctcgcgcccgagtcacagctcccgtcgatgtctatcacaccaagcaaccgcaacaccagcaccagcaccagcaccagtaccggtacagccagcccgtgccatctctcagctgctcaagtggaaacctgagcaaaacgtcgacaatgtggttgtccacggctatgtccggtctgtccgtggtctgaaagcctggcgctttgtctcgctcgccgatggttcctcgctggatcctctgcaggccgttatcgagtccggtctggctgaaggcctgactgtcggcgcggccgtccgactcaccggctcctgggttgcttctcctggcgccgcacaaagccacgagttgcaagtcagggaggtaaaggtcttgggttcttcagatgccaagtttgctctccagacatttcccattcaaaagaaatatcagacacccgagtaccttcgtactttgccgcacttgcggccgagaacaccgctcaatgctctcttgctgagattgcggtccgaagccgtaacttcgttgactcagttctttgctcgccaggattttgtacagacacacccgcccatcatcacatcgtccgattgtgagggtgcgggcgaggtctttactctgaacccggccaatgacacggccggccaacctggcaaggagtctgctgattcacaagattcttttttccgctccaagaagtacctcacagtttcgacccaacttcatctagaggcccttgcacagtcagtcggcaatgtctggaccctgtcccctgtattccgcgccgagcagagcgatacatcaagacatctcagcgagttctacatgcttgaagcagagatgagcttcgtcgacgacatgaactccgtcatggacctcgctgaggacatgatgcgtcaacttggcacggacttataccagtcagacacggtcaaatctttgctgacacggacaccccattttggccaagatctggctccggcggaagaggttgaccgtcgttggcagggcttgatgcagccagactggccccgtatcacatacacggaagctattgacattttgaagcagcatgaagacaagttcgagcacaagccggtttggggcgccggcctgcagtctgagcatgaaaagttcatcgcttcgacggttggcaaggaccggccggtctttgtcaccaactacccccgtgatatcaaggccttctacatgcgcccaacccggggtcccggctccgaagatccttccagagtcacggtcgactgtttcgacttgcttgttcccgaactctgtgaaattgcgggtgggtcgatgcgtgagcaccagttggaacctctgttggacataatgacgcgtcaagggatcatcaagtctccgtcagaaactgcatccgaggacgattctggaaacggccttcagtggtatgccgacctgcgtcgatggggatgccctccccacggtgggtttggcttgggcttcgatcggctgctgagctatctgtcgggggttcaaacggtgcgagacattgtctcattcccacgctggtatgggcgatgcgactgttaa

SEQ ID NO: 10072 - protein, 542 aa, Podospora anserina DSM 980
MRPSVLGSAMRPSASPLVSRISMLSRPSHSSRRCLSHQATATPAPAPAPVPVQPARAISQLLKWKPEQNVDNVVVHGYVRSVRGLKAWRFVSLADGSSLDPLQAVIESGLAEGLTVGAAVRLTGSWVASPGAAQSHELQVREVKVLGSSDAKFALQTFPIQKKYQTPEYLRTLPHLRPRTPLNALLLRLRSEAVTSLTQFFARQDFVQTHPPIITSSDCEGAGEVFTLNPANDTAGQPGKESADSQDSFFRSKKYLTVSTQLHLEALAQSVGNVWTLSPVFRAEQSDTSRHLSEFYMLEAEMSFVDDMNSVMDLAEDMMRQLGTDLYQSDTVKSLLTRTPHFGQDLAPAEEVDRRWQGLMQPDWPRITYTEAIDILKQHEDKFEHKPVWGAGLQSEHEKFIASTVGKDRPVFVTNYPRDIKAFYMRPTRGPGSEDPSRVTVDCFDLLVPELCEIAGGSMREHQLEPLLDIMTRQGIIKSPSETASEDDSGNGLQWYADLRRWGCPPHGGFGLGFDRLLSYLSGVQTVRDIVSFPRWYGRCDC

SEQ ID NO: 10073 - DNA, 1434 bp, Acyrthosiphon pisum
  CDS (1)..(1434)
atgaacatgaaactattaagtttaccatgcagatatactctgagcaggcatctgtattccagttgttcagtaaaagacattttaaatactcaacccgagggttgtaaaaaaaaattaaagggttgggcaaaagcaatgcgaaaaatgaaagaaaacatattcgtggacttagatgatggttctacacatcgtcgtctacaagtagtaatacctaaaaataaaattccagcttcattgacttatggatgttccttcgaagctgagggtgtcttagttagaaaccctaactatcaactggagttggtagcagaatctattaatgtttacggatcatgtgttgtccaagatggttatccatttgcacctcgaaaaacttaccatccagaatatgtcagacaacatttacatattcgaccacgtacagcaacatttagtagtctacttagacttagagacaaattgtctagtgctgttagaaatagatttgctgaagacaattttatagaaataaatgctccagtattatcttctaatgattgtgaaggagctggtgaagtatttgcagttaaaccagatagtgaaaaattagttaaagaaatgatttcaaaagatcatcagtcacctatggaagctttctttaacgggcaaacgtatttaacagtatctggacagatgcatttagaatgtatggcgcgggctctaactaaagtttacacattagggccaacatttagagcagaaaattcaaagtctaggttacatttatcagaattttatatgattgaagcagagcaagcttttattgacaatacagaagaactcttgagttcaatagaaaaaactacatctacagttgtaaaacaacttttggagaattctagtgatgaaataggccattacagaaacatcataggtgcttctaaagacaatgaccctgtgaatatggtaaatgttccttatgaagtaattagttaccaaaaagcatgtgatgtattagaaaaagaaaattgctttaaaaattcaatgattcgaggcaaacctttggctaaagaacatgaattgtttttagtaaaatataatggtcagaaacctatttttgtcgtggattggcctaaagatttaaaaccattttacactaaagctatacctaataacaagtcattggtgtatgctgtagacctattatgcccaaatgttggtgaattatgtggcggaagtgtacgtgaagatgattatgatgttttgaaagaaaaattatcttttgcaggattggaagacaaacttcattggtatttagaattaagaaaatttgggaatgtgtctactgctggttttggcataggttttgaacgatttcttcaagtattgttagatgtacagaatattaaagacactattgcatttccccgatggccacataactgtaaaatgtaa

SEQ ID NO: 10074 - protein, 477 aa, Acyrthosiphon pisum
MNMKLLSLPCRYTLSRHLYSSCSVKDILNTQPEGCKKKLKGWAKAMRKMKENIFVDLDDGSTHRRLQVVIPKNKIPASLTYGCSFEAEGVLVRNPNYQLELVAESINVYGSCVVQDGYPFAPRKTYHPEYVRQHLHIRPRTATFSSLLRLRDKLSSAVRNRFAEDNFIEINAPVLSSNDCEGAGEVFAVKPDSEKLVKEMISKDHQSPMEAFFNGQTYLTVSGQMHLECMARALTKVYTLGPTFRAENSKSRLHLSEFYMIEAEQAFIDNTEELLSSIEKTTSTVVKQLLENSSDEIGHYRNIIGASKDNDPVNMVNVPYEVISYQKACDVLEKENCFKNSMIRGKPLAKEHELFLVKYNGQKPIFVVDWPKDLKPFYTKAIPNNKSLVYAVDLLCPNVGELCGGSVREDDYDVLKEKLSFAGLEDKLHWYLELRKFGNVSTAGFGIGFERFLQVLLDVQNIKDTIAFPRWPHNCKM

SEQ ID NO: 10075 - DNA, 1383 bp, Drosophila ananassae
  CDS (1)..(1383)
atgttatttttgaaacgattttacagtaactcgcaacgaatagcccaggtggccaagtctagcaagccaggggactcattaagtattcagggttggatacgtaacgttcgcaaactgaagagtcacacatttctagacatcaacgatggatccacaagtactaaattccaggtggtggtgcccaagactccggaaaaccagcatctagcgcccggcagtgtaatatcggcggagggacaaatccaggtggctcctaatggcagctatgaattgcatgcgagtcatgtggaaacgctggctgatggacatcttcaagaaggctatcccttcgcaccaaaacaaaagcttccgccggagtacgtcagagagcaccttcatcttcgttcccgcgtggattacatagctgctcagatgagaatcagacataaggcccaaaaagccattcacgactacatggatgagcttgatttcgttcagatcaatactcccctcctgaccaccaatgattgcgagggagcgggagaggtatttcgggttcaaccggactccgaggcgttgttgaaaactatggccaagcctaatgttcctgccgagcagagttacttcgatgaaaaggttttcctcagcgtatccggccaattgcacctggaggccatgacctatggcttgggaaacacttacaccttctccccagcatttcgagctgagaactctaaatctcccctccatttggcggaattctatatgtttgaagcagagctctcccatctaaaagaagtggacaagttagccgcatttattgagcagatgctcaagtcaataacgactaggttactggaatcgagctcagatgatcttaacttctgccagcgaaacgccaacgcatcctctgacctagcctggttgaatgtgccgtggaagatagccagctacgacgaagctctccaaatcttgcaagacaatgcggatagcctgaaaacgcccattagcattcaggatgggttctccaaagaccaggaattatttttagtttctcacttcgctgctccagttttcgttgtggattggccggctcagcagaaacccttttacatgaaagtttcaagaagtaaccctaatagagtccatgctttggatctcttgatgcccgctgtaggagagctgtgtggtggaagcctccgcgaaagtgatccaagcgttctaagttcccatccacagctgccgaaaaatctttcctggtatgtggaccttcgaaagtacggcggagtcccaactggaggctttggaatgggcttcgaacgttacttgcaattagttacaggcgttaaaaatatcagggatgtaataccctttcccagatatcctcatagctgcaagatgtga

SEQ ID NO: 10076 - protein, 460 aa, Drosophila ananassae
MLFLKRFYSNSQRIAQVAKSSKPGDSLSIQGWIRNVRKLKSHTFLDINDGSTSTKFQVVVPKTPENQHLAPGSVISAEGQIQVAPNGSYELHASHVETLADGHLQEGYPFAPKQKLPPEYVREHLHLRSRVDYIAAQMRIRHKAQKAIHDYMDELDFVQINTPLLTTNDCEGAGEVFRVQPDSEALLKTMAKPNVPAEQSYFDEKVFLSVSGQLHLEAMTYGLGNTYTFSPAFRAENSKSPLHLAEFYMFEAELSHLKEVDKLAAFIEQMLKSITTRLLESSSDDLNFCQRNANASSDLAWLNVPWKIASYDEALQILQDNADSLKTPISIQDGFSKDQELFLVSHFAAPVFVVDWPAQQKPFYMKVSRSNPNRVHALDLLMPAVGELCGGSLRESDPSVLSSHPQLPKNLSWYVDLRKYGGVPTGGFGMGFERYLQLVTGVKNIRDVIPFPRYPHSCKM

SEQ ID NO: 10077 - DNA, 1383 bp, Drosophila erecta
  CDS (1)..(1383)
atgttattcttgagacggttttatagtaaatccggacggatagctcaaatatttaagactaataagccaggcgactctttggcaatacagggatggatcaaaaatgttcgccggttgaagaataacacattcctggacatcaatgatggttcctcgagctgtcgattccaggtggtagtgccccggactccggaaaaccagcacttatctccaggcagcgtcattgccgcggtcggtaaaattcaagtagctccaaatggtagctttgagttgcatgcgaatcaggtggaaatgttggcggaaggtcgattgcaggaaggttatcccttcagtcccaaacagaaacatccaccggaatatgtacgtgagcatctacatcttcgatcccgcgtggattttgtggccgcccaaatgagagtcagacacaaagcacaaaaagccattcacgactacatggatgagcagaatttcgtgcaaataaacactcctctgctgacaaccaatgattgcgagggagcaggagaagttttccgggtacaaccggactccgaaaatctgctcaagcaaatgaacagaccgaatatacccgtggaacagagctacttcgacggcaaggtattcctcaccgtctctggtcaactgcacctagaggccatgacatacggtctaggcaacacatataccctctcaccagcctttcgggcggagaactcgaagtctccgttgcatttagccgagttctatatgtttgaagcggagctggcccatttagaggagctggagaagttagcgaagttcattgaacaaatgctgaaatctgtaacaaaccgtttgctagaaactagtgccgaggacctaagtttctgtcaaaagaattcaagctcagtctccgatctgccttggctgcaagttccgtggacgataataagctacgatgatgccctacaagtactgcaggaaaataaggacagtctaaagacgcccataagtctgaccgaaggtttctccaaggaccaagaactttttttagtggcccactgtggtgctcccgtattcattgtggattggccagctgagcaaaaacctttttacatgaaagtatcgcgtacaaatcccaatcgagttcatgccctagatctgctgatgccagctgttggagaattatgcggcggaagcctgcgtgaatgcgatccttctatattaagatcccacccgcaactgccaaaggatctggaatggtacgttgacttgcgaaagtacggaggaattccaactggaggatttggaatgggctttgagcgttacttgcagcttgtcacgggtgtgaaaaacatacgagatgtaataccctttcccaggtatccacacagctgcaagatgtga

SEQ ID NO: 10078 - protein, 460 aa, Drosophila erecta
MLFLRRFYSKSGRIAQIFKTNKPGDSLAIQGWIKNVRRLKNNTFLDINDGSSSCRFQVVVPRTPENQHLSPGSVIAAVGKIQVAPNGSFELHANQVEMLAEGRLQEGYPFSPKQKHPPEYVREHLHLRSRVDFVAAQMRVRHKAQKAIHDYMDEQNFVQINTPLLTTNDCEGAGEVFRVQPDSENLLKQMNRPNIPVEQSYFDGKVFLTVSGQLHLEAMTYGLGNTYTLSPAFRAENSKSPLHLAEFYMFEAELAHLEELEKLAKFIEQMLKSVTNRLLETSAEDLSFCQKNSSSVSDLPWLQVPWTIISYDDALQVLQENKDSLKTPISLTEGFSKDQELFLVAHCGAPVFIVDWPAEQKPFYMKVSRTNPNRVHALDLLMPAVGELCGGSLRECDPSILRSHPQLPKDLEWYVDLRKYGGIPTGGFGMGFERYLQLVTGVKNIRDVIPFPRYPHSCKM

SEQ ID NO: 10079 - DNA, 1383 bp, Drosophila grimshawi
  CDS (1)..(1383)
atgttatccattagaagatattttagcagtgttcaacgcattgcacaaattgctaatgctagcaaaccgggtgaaacgctccaagtgcagggttggataaagaatgtacgccgccttaagaacaacatttttctggacatcaatgatggttcgacgagtgagaagtttcagctggttgtgccacgcaatgcgtccacacagcaactggcatcgggcagtgtgatcagcgccgtgggacgtgtccagctggcgccaaatggacactacgagctgcatgcggatgcggtgcaatgtttggctgagggtcatctgcaggatggttatcccttcacacccaagcaaaaacatgctccggaatatgtccgagagcatctgcatctgcgcgctcgcgtcgattacattgccgcccagatgcgtatccggcacaaggcacagaaggcgatccacgactacatggatgagctgcactttgtgcagatcaacacacccatcctgaccacaaatgactgcgagggcgccggcgaggtctttcgagtacaaccggattcggagcagctgctcaagcaaatggcgcgtcccagtgtgcctgtcgagcagagctatttcgatcagaaagtatttctgagcgtgtccggtcaactgcacttagaggccatgtcctacggcctaggcaacacttacacccttgcgcccgcctttcgcgcagaaaactccaaatctccgctgcacttggccgagttctatatgttcgaggcggaactggtgcacatggagcagctggatgcgctggcggcattcatagagcgcatgctgaaagacataacacaaagactgctcaacagtagtgcgtcagatttgcatttttgccaggagagcgctaatgctggctcagatatcgcctggctgcagttgccatggcagaggctcagctatgatgcggccatggcaataattatggagcacaaggataagttcaagagtgccgttagcgccgctgatggtttcagcaaggagcaggagctatttctggtcgcgcactgtggtgcgcccgtctttgtgattgattggcccacgcagcagaaacccttctatatgaaagtctcacgcagcgatccgcaacgtgtccatgccctggatctgctcatgcccgccgtgggtgagctgtgcggcggcagtctgcgtgaatgtgatgcgcagctgctccaggcgcatccacagttgcccagggatctgagctggtatgtggaactgcgtaagtttggtggtctgcacacgggcggatttggcatgggcttcgagcgctatttgcagctggtgacgggtgtgaagaatatacgggatgtgatagcctttccccgctatccgcatagttgtaaaatgtag

SEQ ID NO: 10080 - protein, 460 aa, Drosophila grimshawi
MLSIRRYFSSVQRIAQIANASKPGETLQVQGWIKNVRRLKNNIFLDINDGSTSEKFQLVVPRNASTQQLASGSVISAVGRVQLAPNGHYELHADAVQCLAEGHLQDGYPFTPKQKHAPEYVREHLHLRARVDYIAAQMRIRHKAQKAIHDYMDELHFVQINTPILTTNDCEGAGEVFRVQPDSEQLLKQMARPSVPVEQSYFDQKVFLSVSGQLHLEAMSYGLGNTYTLAPAFRAENSKSPLHLAEFYMFEAELVHMEQLDALAAFIERMLKDITQRLLNSSASDLHFCQESANAGSDIAWLQLPWQRLSYDAAMAIIMEHKDKFKSAVSAADGFSKEQELFLVAHCGAPVFVIDWPTQQKPFYMKVSRSDPQRVHALDLLMPAVGELCGGSLRECDAQLLQAHPQLPRDLSWYVELRKFGGLHTGGFGMGFERYLQLVTGVKNIRDVIAFPRYPHSCKM

SEQ ID NO: 10081 - DNA, 1383 bp, Drosophila mojavensis
  CDS (1)..(1383)
atgtttttgattagaagatattatagcagcgttaaacgcattgcccaaatagctggcgcaaacaaagcaggtgacacgctacaagtacagggctggataaagaatgtgcgacgtttgaaaaacaatatatttttggacatcaacgatggttccactagcgacaagtttcagttggttgtgccacgaactctggagacgcagaagctgacagcgggcagcgtagtcagcgccgtaggtcgtgtacaagtggcgccaaatgggcattacgaattgcacgcagagaatgttcaatcaatagcggagggtcatctgcaggacgggtatccgttctcacccaaacagcagcatgcgccggaatatgtgcgagagcacctgcatttgcgttcacgcatcgactacattgcagcccaaatgagagtcagacacaaagcacagaaggctatacacgattacatggacgagctgaattttgtgcagataaacacgcccatacttactaccaacgattgcgaaggagctggcgaggtctttcgcgttcaacccgaatcagcgcagttgctcaagcagatgtcgcggcctaatgtgcccgtggaggagagttatttcgatcagaaggcctttctgagcgtctctggtcaactgcatctagaagcaatgtcctatggcttgggcaacacgtacacgtttgcgcccgcctttcgtgcggaaaattccaaatcgccactgcatttagccgagttctacatgtttgaggcggagcttgtatatatggaacagctggatgaactggcggcatttatagagtgtacgctaaaggaaattactaagcgccttctcaacagcagtgcgtccgatttgcatttttgtcagagtagggctaatgccagctcagacttggattggatgcaggtgccttggaaagttatgagctatgatgaggccttggcagtggttgtggctaatagagataagtttaagactcttgtgagtgcggatgatgggtttagcaaggagcaagagttatttttggtcgcacactgcggagcacccgtctttgtgctcaactggcctacacaacagaaacccttctatatgaaggtttcacgcagcgatccacaacgagttcatgcgctggatttgctgatgccttctgtaggcgagctgtgcggcggcagcctacgcgaatctgatgctgagctactaagtaaacatccaaaatttcctaaggacctctcttggtatgtggaattgcgcaaatatggtggcttgcccactggaggctttggcatgggttttgagcgttatcttcagctgttgacgggagttaagaacattagggacgtcataccctatccacggtatccacacagctgcaaaatgtaa

SEQ ID NO: 10082 - protein, 460 aa, Drosophila mojavensis
MFLIRRYYSSVKRIAQIAGANKAGDTLQVQGWIKNVRRLKNNIFLDINDGSTSDKFQLVVPRTLETQKLTAGSVVSAVGRVQVAPNGHYELHAENVQSIAEGHLQDGYPFSPKQQHAPEYVREHLHLRSRIDYIAAQMRVRHKAQKAIHDYMDELNFVQINTPILTTNDCEGAGEVFRVQPESAQLLKQMSRPNVPVEESYFDQKAFLSVSGQLHLEAMSYGLGNTYTFAPAFRAENSKSPLHLAEFYMFEAELVYMEQLDELAAFIECTLKEITKRLLNSSASDLHFCQSRANASSDLDWMQVPWKVMSYDEALAVVVANRDKFKTLVSADDGFSKEQELFLVAHCGAPVFVLNWPTQQKPFYMKVSRSDPQRVHALDLLMPSVGELCGGSLRESDAELLSKHPKFPKDLSWYVELRKYGGLPTGGFGMGFERYLQLLTGVKNIRDVIPYPRYPHSCKM

SEQ ID NO: 10083 - DNA, 1383 bp, Drosophila persimilis
  CDS (1)..(1383)
atgttacttattagaaggttttactgtagctctcagcgaataagtcatatagccaagtcaaataagcgaggcgactcactcggtattcggggctggataaaaaacattcgccggttgaagaacaacacatttctggacattgatgatggatcttcgagcagcagattccaagtcgttgtgccacgcaatccagaaacacaaaacctaacaccgggcagcgtcatctcggctgtgggagagatccaagtggcacctaacggaaactttgagctgcatgcagatcgcgtggaatcactggccgaaggacacctgcaggatggctatcctttcacccccaagcagaaacacgcaccggaatatgttcgagagcatctgcatctccgctcccgtgtcgactacgtagccgcccagatgcgaatcagacacaaggctcagaaagccatacatgactacatggatgagctggattttgtgcaaatcaacactcctctgatgaccaccaacgattgtgagggtgccggcgaggttttccgtgtacagcccgactcggaggaactgcttaagcaaatggcccggcccaatgtcccagcagaacaaagctattttgacagcaaggtctttctttccgtctcgggacaactgcaccttgaggccatgacctatggcctgggaaacacgtactgtctagcccccgcctttcgagccgagaactccaagtcgccattgcatttagccgagttctatatgtttgaagccgagctggcgcatttggatgagctggagaagctggcgaaatttattgagcagatgcttaagtccattacaaatcgcgtactcgagacgagctcagaggacttgcacttctgccagcgcaatgccaatgctagctcggatctgccttggctgactgttccatggacgatcatgagctacgatgatgctctccacgtgctcctggccaacaaggagagtctaaagacgcccatcagcttggacgagggttttaccaaggaccaggaactttttcttgtgtcccactgcggcactcccgtcttcgttgtagattggcccacccagcaaaagcctttttacatgaaaatcactcgcaataatccggatcgtgtccacgccctagacctgctgatgccagctgtgggggaattgtgtggtggcagcttgcgtgagagcgatgcagccactttgagctcccatccacagtttcccaaggacttgtcgtggtatgtggacctgcgaaaatacggagggatccctacgggcggctttggcatgggctttgagcgatatctgcagctcgtgacgggtgttaagaacatacgggatgtgataccatttccccgatatccacacagctgcaaaatgtga

SEQ ID NO: 10084 - protein, 460 aa, Drosophila persimilis
MLLIRRFYCSSQRISHIAKSNKRGDSLGIRGWIKNIRRLKNNTFLDIDDGSSSSRFQVVVPRNPETQNLTPGSVISAVGEIQVAPNGNFELHADRVESLAEGHLQDGYPFTPKQKHAPEYVREHLHLRSRVDYVAAQMRIRHKAQKAIHDYMDELDFVQINTPLMTTNDCEGAGEVFRVQPDSEELLKQMARPNVPAEQSYFDSKVFLSVSGQLHLEAMTYGLGNTYCLAPAFRAENSKSPLHLAEFYMFEAELAHLDELEKLAKFIEQMLKSITNRVLETSSEDLHFCQRNANASSDLPWLTVPWTIMSYDDALHVLLANKESLKTPISLDEGFTKDQELFLVSHCGTPVFVVDWPTQQKPFYMKITRNNPDRVHALDLLMPAVGELCGGSLRESDAATLSSHPQFPKDLSWYVDLRKYGGIPTGGFGMGFERYLQLVTGVKNIRDVIPFPRYPHSCKM

SEQ ID NO: 10085 - DNA, 1383 bp, Drosophila sechellia
  CDS (1)..(1383)
atgttattcttgagacgattttacagcaaatccggacggatatctcaaatattaaagacaaataagccaggcgactctttggccatacagggatggatcaaaaacgttcgccggttgaagaacaacacatttctggacattaatgatggttccacgagcagtaggttccaggtggtggtgccccggactccggaaaaccagcacttggctccgggcagcgtcattgcagcggtcggtgaaattcaagtggctccaaatggcagcttcgagttgcatgcgaatcaggtggaaatgttggctgaaggacgcctgcaggagggttatcccttcagtcccaaacagaaacatccaccggaatatgtacgtgagcatctacatcttcgatcccgcgtagatttcgtggccgcccagatgagggtcagacacaaagcacaaaaagctatacacgactacatggatgagcaggatttcgtgcagatcaacactcctctgcttacaaccaatgattgcgagggagcaggagaagtgtttcgggtacaaccggactcccaagatctgctcaagcagatgaaccgaccaaatgttcccatggaacaaagctactttgatagcaaagtattcctcagcgtctctggtcaactgcacctggaggccatgacatacggtttaggcaagacatacaccctctcaccagccttccgagcggagaactccaagtctccgttgcatttagcagagttctacatgtttgaagcggaacttgcgcatttggaggagctggagaagttagcgcggttcattgaacagatgctaaaatctgtgacaagccgtttgctggaaacgagtggcgaggacctaagtttctgtcaacggaattcaaactcgaactccgatctgccttggctgcaagtaccgtggaagataatgagctacgatgaagccctgcaagtgctgcaggaaaacaaaggcagtcttaagactcccattagcctgaacgaaggattctcgaaggaccaagaactttttttagtggcccattgtggtgctcccgtattcgttgtggattggccagttcagcagaaacctttttacatgaaagtctcgcgtacaaatcctaatcgagttcatgccctagacctcctcatgccagctgttggagaattatgcggcgggagcctgcgtgaaagcgatcctgctatattaaaatcccatccgcaactgccgaaggatttggaatggtacgttgacttgcgaaagtacggaggagttccaactggaggatttggaatgggctttgagcgttacttgcagcttgtcacgggcgttaaaaacattcgtgatgtgataccctttcccaggtatccacacagctgcaagatgtga

SEQ ID NO: 10086 - protein, 460 aa, Drosophila sechellia
MLFLRRFYSKSGRISQILKTNKPGDSLAIQGWIKNVRRLKNNTFLDINDGSTSSRFQVVVPRTPENQHLAPGSVIAAVGEIQVAPNGSFELHANQVEMLAEGRLQEGYPFSPKQKHPPEYVREHLHLRSRVDFVAAQMRVRHKAQKAIHDYMDEQDFVQINTPLLTTNDCEGAGEVFRVQPDSQDLLKQMNRPNVPMEQSYFDSKVFLSVSGQLHLEAMTYGLGKTYTLSPAFRAENSKSPLHLAEFYMFEAELAHLEELEKLARFIEQMLKSVTSRLLETSGEDLSFCQRNSNSNSDLPWLQVPWKIMSYDEALQVLQENKGSLKTPISLNEGFSKDQELFLVAHCGAPVFVVDWPVQQKPFYMKVSRTNPNRVHALDLLMPAVGELCGGSLRESDPAILKSHPQLPKDLEWYVDLRKYGGVPTGGFGMGFERYLQLVTGVKNIRDVIPFPRYPHSCKM

SEQ ID NO: 10087 - DNA, 1383 bp, Drosophila virilis
  CDS (1)..(1383)
atgtttttaattagaagatattacagcagcgtccagcgcatcgctcaaatagctaatgctaccaagccgggtgatacgctccaaatccagggctggataaaaaatgtgcgacggctaaagaacaacatattcctggacatcagtgatggttccacgagcgaaaaatttcaactggttgtgccacggaacctggatacacatcaactgacactgggcagcgtagtcagcgccgtgggtcgtgtccagttggcgcccaatggacactacgaattgcacgctgatgaagtgaaggcactggcggagggtcatgtgcagagcggatatcccttctcgcccaagcagaaacatccaccggagtatgtgcgggaacatttacatttgcgctcccgcatcgactacattgccgcccagatgcgcatcaggcataaggcacagaaggccatacacgactacatggacgcgctgaattttgtgcagattaacacgcccatcttgactacgaacgattgtgagggtgctggcgaggtttttcgcgtgcaacccgattcggagcggttgcttaaacaaatggcgcggcccaatgtgcccccggagcagagttatttcgatcagaaggtatttttgagcgtttccggtcaactgcatctggaggccatgtcctatggcctgggcaacacgtacacctttgcgcctgcctttcgtgcagaaaattcaaaatctccgttgcatttagcagagttttacatgttcgaggcggaactggtgcatatcgagcagctagatacgctggcggcattcatagaacgtatgctcaaagacattaccaatcgcctgctcaacagtagtgcgtccgatttgcatttttgccagcagaatgccaatgccagctcagatttggcctggctacaggcgccttggaagattcttagctatgacgaggccatggcgctggttgtggctaacagcgataagttaaagagtgctgttagcccggatgagggctttagcaaggagcaggagctatttcttgtggcacactgcggtgcgcccgtctttgtgctaaattggcccacgcaacagaaacctttctatatgaagatctcacgcagcgatccgcaacgtgttcatgctctggatttgctaatgccctcggtgggcgagttgtgcggcggcagcctgcgtgagtgcgatgctgagcttcttgctgcgcatccacaattgcccaaggatctggcctggtatgtggatttgcgaaagtacggcggattgcctaccggcggttttggcatgggctttgagcgttatctacaactgctgacgggcgtcaagaacataagggatgtaataccctatccacgttatccgcacagctgtaaaatgtag

SEQ ID NO: 10088 - protein, 460 aa, Drosophila virilis
MFLIRRYYSSVQRIAQIANATKPGDTLQIQGWIKNVRRLKNNIFLDISDGSTSEKFQLVVPRNLDTHQLTLGSVVSAVGRVQLAPNGHYELHADEVKALAEGHVQSGYPFSPKQKHPPEYVREHLHLRSRIDYIAAQMRIRHKAQKAIHDYMDALNFVQINTPILTTNDCEGAGEVFRVQPDSERLLKQMARPNVPPEQSYFDQKVFLSVSGQLHLEAMSYGLGNTYTFAPAFRAENSKSPLHLAEFYMFEAELVHIEQLDTLAAFIERMLKDITNRLLNSSASDLHFCQQNANASSDLAWLQAPWKILSYDEAMALVVANSDKLKSAVSPDEGFSKEQELFLVAHCGAPVFVLNWPTQQKPFYMKISRSDPQRVHALDLLMPSVGELCGGSLRECDAELLAAHPQLPKDLAWYVDLRKYGGLPTGGFGMGFERYLQLLTGVKNIRDVIPYPRYPHSCKM

SEQ ID NO: 10089 - DNA, 1380 bp, Drosophila willistoni
  CDS (1)..(1380)
atgttgttaataaaacgatttcacagcagctttcaacgcattgctcacgtgggaaaagctcagacaggagattcttttagcgtaaagggctggattaagaatatacgccggctaaaaaataacatattcctggatatcaacgatggatccacaagtggtagattccaaatagtgcttccacgtgattcccacacccagaaacttacctcaggcaccgttgtaagtgcccagggtaagattcaagtggctcccaatggccactacgagctgcatgctgatgcagtggagtctttggccgatggacagctgcaagatggctttcccttttcacccaaacagaaacatcctccagaatatgtgcgagagcatttgcatctacgatcgcgcattgattactttgctgcccagatgcgtttacgtcacaaagcccagaaaatcatacatgattacatggatgaactggagttcgtgcagatcaatacacctctcttgaccaccaacgattgtgaaggagcaggcgaggtttttcgggttcagccagattctgaagatttactaaagcagatgtcgcgtcccaatgttcctctggatcagagttacttcgatcacaaagtattcctcacagtttctggacaacttcacttagaggccatgtcctacggtctgggcaacacatataccatggctcctgcctttcgtgctgagaattccaagagtcctttgcatttagccgaattctacatgtttgaagccgagctagtacatcttaaacatctggaggaactctccggattcatagaaaagatgttaaagaccactaccaaccgcctgattgaaactagtgggcaggacttgcaattctgtcaagctagtgcagatgccaagcaggatttaccatggctaagtgtcccatggcctgttctcacctatgacgaagcattggacactttgatcaagcacaaagaatcctttacgactccaattagccaaaacgaaggtttcaccaaagagcaagaactgtttctagttgctcactgcaaggcaccaatatttgtgatagattggcctgtccaacaaaaacccttctatatgaaagtctctgagtcaaatcctcagcgtgttcacgctctggatctcttgatgcctacggtgggtgaactgtgtggcgggagtttgcgtgaggacgatgtcagcagattgagtagtcatccgcaattgcccaaagatttggcttggtatgtggaactgagaaagtttggcggtgttcccaccggtggatttggcatgggattcgaacgttatctgcaactacttacgggcgtaaagaatatacgagatgttataccctttccccgatatccacacagttgcagaatgtga

SEQ ID NO: 10090 - protein, 459 aa, Drosophila willistoni
MLLIKRFHSSFQRIAHVGKAQTGDSFSVKGWIKNIRRLKNNIFLDINDGSTSGRFQIVLPRDSHTQKLTSGTVVSAQGKIQVAPNGHYELHADAVESLADGQLQDGFPFSPKQKHPPEYVREHLHLRSRIDYFAAQMRLRHKAQKIIHDYMDELEFVQINTPLLTTNDCEGAGEVFRVQPDSEDLLKQMSRPNVPLDQSYFDHKVFLTVSGQLHLEAMSYGLGNTYTMAPAFRAENSKSPLHLAEFYMFEAELVHLKHLEELSGFIEKMLKTTTNRLIETSGQDLQFCQASADAKQDLPWLSVPWPVLTYDEALDTLIKHKESFTTPISQNEGFTKEQELFLVAHCKAPIFVIDWPVQQKPFYMKVSESNPQRVHALDLLMPTVGELCGGSLREDDVSRLSSHPQLPKDLAWYVELRKFGGVPTGGFGMGFERYLQLLTGVKNIRDVIPFPRYPHSCRM

SEQ ID NO: 10091 - DNA, 1383 bp, Drosophila simulans
  CDS (1)..(1383)
atgttattcttgagacgattttacagcaaatccggacggatatctcaaatattaaagacaaataagccaggcgactctttggccatacagggatggatcaaaaacgttcgccggttgaagaacaacacatttctggacattaatgatggttccacaagcagtaggttccaggtggtggtgccccggactccggaaaaccagcacttggctccgggcagcgtcattgcagcggtcggtgaaattcaagtggctccaaatggcagcttcgagttgcatgcgaatcaggtggaaatgttggctgaaggacgcctgcaggagggttatcccttcagtcccaaacagaaacatccacctgaatatgtacgtgagcatctacatcttcgatcccgcgtagatttcgtcgccgcccagatgagggtcagacacaaagcacaaaaagcactacacgactacatggatgagcaggatttcgtgcagatcaacactcctctgcttacaaccaacgattgcgagggagcaggagaagtgtttcgagtacaaccggactctcaagatctgctcaagcagatgaaccgaccaaatattcccatagaacaaagctacttcgatagcaaagtattccttagcgtctctggtcaactgcacctggaggccatgacatacggtttaggcaagacatacaccctctcaccagccttccgagcggagaactccaagtctccgttgcatttagcagagttctacatgtttgaagcggaacttgcccatttggaggagctggagaagttagcgcggttcattgaacagatgctgaaatctgtgacaagccgtttgctggaaacaagtggcgaggacctaagtttctgtcaacggaattcaaactcgaactccgatctgccttggctgcaagtaccgtggaagataatgagctacgatgaagccctgcaagtgctgcaggaaaacaaggacagtcttaagactcccattagcctgaacgaaggattttccaaggaccaagaactttttttagtggcccattgtggtgctcccgtattcgttgtggattggccagctcaacagaaacctttttacatgaaagtctcgcgtacaaatcccaatcgagttcatgccctagacctcctgatgccagctgttggagaattatgcggcgggagcctgcgtgaaagcgatcctgctatattaaaatcccatccgcaactgccgaaggatctggaatggtacgttgacttgcgaaagtacggaggagttccaactggaggatttggaatgggctttgagcgttacttgcagcttgtcacgggcgttaaaaacattcgtgatgtgataccctttcccaggtatccacacagctgcaagatgtga

SEQ ID NO: 10092 - protein, 460 aa, Drosophila simulans
MLFLRRFYSKSGRISQILKTNKPGDSLAIQGWIKNVRRLKNNTFLDINDGSTSSRFQVVVPRTPENQHLAPGSVIAAVGEIQVAPNGSFELHANQVEMLAEGRLQEGYPFSPKQKHPPEYVREHLHLRSRVDFVAAQMRVRHKAQKALHDYMDEQDFVQINTPLLTTNDCEGAGEVFRVQPDSQDLLKQMNRPNIPIEQSYFDSKVFLSVSGQLHLEAMTYGLGKTYTLSPAFRAENSKSPLHLAEFYMFEAELAHLEELEKLARFIEQMLKSVTSRLLETSGEDLSFCQRNSNSNSDLPWLQVPWKIMSYDEALQVLQENKDSLKTPISLNEGFSKDQELFLVAHCGAPVFVVDWPAQQKPFYMKVSRTNPNRVHALDLLMPAVGELCGGSLRESDPAILKSHPQLPKDLEWYVDLRKYGGVPTGGFGMGFERYLQLVTGVKNIRDVIPFPRYPHSCKM

SEQ ID NO: 10093 - DNA, 1383 bp, Drosophila yakuba
  CDS (1)..(1383)
atgttattcttgagacgattttacagtaaatccgggcggatagctcaaatatttaagactaataagccaggcgactcgttggccattcagggatggatcaaaaacgttcgccggttgaagaacaacacatttctggacatcaatgatggttcgacgagcagtaggttccaagtggtggtgccccggactccggaaaaccagcacttagctccgggcagcgtcattgccgcggtcggtgaaattcaagtggctccaaatggcagctttgaattgcatgcgagtcaggtggaaacgttggcggaaggacacctgcaggaaggttatcccttcagccccaaacagaaacatccaccggaatatgtgcgtgagcatctacatcttcgatcccgcgtagattttgtggccgcccagatgagggtcagacacaaagcacaaaaagccatacacgactatatggatgcgcaggatttcgtgcagatcaacactcctctgcttacaaccaatgattgcgagggagcaggagaagttttccgggttcaaccggactccgaagatctgcttaagcagatgaaaagaccgaatgttcccgtggaacagagctacttcgatggcaaggcattcctcagcgtctctggtcaactgcacctagaggccatgacatacggtctaggcaacacatataccctctcgccagccttccgagcggagaactccaagtctccattgcatttagccgagttttacatgtttgaagcggaactggcgcatttggaggtgctggaaaagttagcccagttcattgaaaagatgctgaagtcagtgacaaaccgtttgctggaaacgagtgccgaggacctaagtttctgtcaacgaaattccaactccagctccgatctgccttggctgcaagtaccgtggaagaaaataagctacgatgaagccctacaggtactgcaggaaaataagaacagcctaaagacgcctataaacttgaatgaaggcttctctaaggaccaagaattttttctagtcgaccactgtggtgctcccgtattcgttgtggattggccagctcagcaaaaacctttttacatgaaaatctcgcgtacaaatcccaaccgagttcatgccctagacctgctgatgccagccgttggcgaattatgtggcggcagcctgcgtgaaagcgaccctgatatattaagatcccatccgcagctgccaaaggatctggaatggtacgttgacttgcgaaagtacggtggaatcccaactggaggatttggaatgggctttgaacgttacttgcagcttgtcacgggtgttaaaaacattcgcgatgtgataccctttcccaggtatccacacagttgcaagatgtga

SEQ ID NO: 10094 - protein, 460 aa, Drosophila yakuba
MLFLRRFYSKSGRIAQIFKTNKPGDSLAIQGWIKNVRRLKNNTFLDINDGSTSSRFQVVVPRTPENQHLAPGSVIAAVGEIQVAPNGSFELHASQVETLAEGHLQEGYPFSPKQKHPPEYVREHLHLRSRVDFVAAQMRVRHKAQKAIHDYMDAQDFVQINTPLLTTNDCEGAGEVFRVQPDSEDLLKQMKRPNVPVEQSYFDGKAFLSVSGQLHLEAMTYGLGNTYTLSPAFRAENSKSPLHLAEFYMFEAELAHLEVLEKLAQFIEKMLKSVTNRLLETSAEDLSFCQRNSNSSSDLPWLQVPWKKISYDEALQVLQENKNSLKTPINLNEGFSKDQEFFLVDHCGAPVFVVDWPAQQKPFYMKISRTNPNRVHALDLLMPAVGELCGGSLRESDPDILRSHPQLPKDLEWYVDLRKYGGIPTGGFGMGFERYLQLVTGVKNIRDVIPFPRYPHSCKM

SEQ ID NO: 10095 - DNA, 1473 bp, Trichoplax adhaerens
  CDS (1)..(1473)
atgaatcttatacgggctcaatgtattatatctccttttaatcgttgtatgaacaataaaaccgttctaatgtggtataaacatgttcgtgcatatgtaacatgtactattaaagagatcatgctaggagaaattgctcgaaaacgagagaggattacgattaagggatgggtgcgattatgtcgatctcaaaagaacgtaatttttttaaatgtaagtgatggctcttgcgcgagtaagctacaggtggttcttcccgcttccgcttgcacgaagccgcctacaattggaagctctgtagaagcatgtggagaactagtggaaagtagccacaagggtcaactttacgaattacaagccgatacaattactgtattaggagatatgttagattctaactttccgtttgttcctggaagacgctatagcctagagtacttgagaaaatttccacatttacgagcaagaactaatgttttccaagcacttttgagaataagaagtcaagcttgcatgcaacttcataaatactttcaggattactattatacatttattcactctccaattataacttccagtgactgcgaaggtgccggagatttgttcactgtcacacctaaaaataaggaaaacactgacagaacagatgatcagcgaattaatgactttttcaatagtccaagctttttaacagtatcagggcagcttcatgctgaagctcttatgagttcactatcacatgtatatacctttggtccggctttcagggctgaaaaatctcatacacgccaccacttagcagaattttacatgatcgaagctgaatctactagattcgataatatggaaatactaatcagtagtacagaacacttcgttaaagaaactataaaaaagttattggtgatatgccaggatgacctaagcttatttgatggatttgttcctccaaatcataagatagccttggatgacttcctaaatttctcatgtaccagaatgacttataaggacgcaataagtgctttggaagccaccagcaaaaagtttaccacatatcctaagtggggcgaagaattacagagtgatcatgaaaattatttgattcaaatgagcggaaataaaggactttttataacagattttcctgctaaattaaggcctttctactgtagaaaaaatgatgatgacaaaacagttgcagcttttgactttttagtgcctactattggagaactaataggcggaagccttcgtgaagaaagatttgatttattattaaacaacatgaaaacctttaatatatcgcaggaatcctattcctggtatattgacttaagaagatatggtactatccgtcacggcggctttggaatggggtttgaacgattcctacagtttatcttaggccttgcaaatatccgcgatgtcatgccatttcctagatattctggatcgtgtaaattataa

SEQ ID NO: 10096 - protein, 490 aa, Trichoplax adhaerens
MNLIRAQCIISPFNRCMNNKTVLMWYKHVRAYVTCTIKEIMLGEIARKRERITIKGWVRLCRSQKNVIFLNVSDGSCASKLQVVLPASACTKPPTIGSSVEACGELVESSHKGQLYELQADTITVLGDMLDSNFPFVPGRRYSLEYLRKFPHLRARTNVFQALLRIRSQACMQLHKYFQDYYYTFIHSPIITSSDCEGAGDLFTVTPKNKENTDRTDDQRINDFFNSPSFLTVSGQLHAEALMSSLSHVYTFGPAFRAEKSHTRHHLAEFYMIEAESTRFDNMEILISSTEHFVKETIKKLLVICQDDLSLFDGFVPPNHKIALDDFLNFSCTRMTYKDAISALEATSKKFTTYPKWGEELQSDHENYLIQMSGNKGLFITDFPAKLRPFYCRKNDDDKTVAAFDFLVPTIGELIGGSLREERFDLLLNNMKTFNISQESYSWYIDLRRYGTIRHGGFGMGFERFLQFILGLANIRDVMPFPRYSGSCKL

SEQ ID NO: 10097 - DNA, 1416 bp, Ciona intestinalis
  CDS (1)..(1416)
atgtttcgtctgtgcaagcttagctacagtactgttactacagctctaaaacgttttaaaatcaaagatgttgttaacggagaagcagtttctcaaaacggatggatccagggttgggtgcaatcaatacgaaaacacaagaactttatgttcgttgatattgtggacggaacgtcattgaaccctttgcaagtcgtattgccttcacatatgttcaatagccagctgcagaatggtgctgcagtatcagccaacggtacatttgttgaaactgatttgaatgtgaacaagattgagatggtgtgtgaagaaattcaagttgttggaccttgtgatccagaaacttatccatttctgaaacacactcctcatgatatgcaacatctgaggagctacccgcatcttcgaatgaggagaacatccatgattaacgcatttaaactccggaatcaactagaaatgttatttcatgaattctttcagaatgaaggttttacacacgtgcacactcccatcatcactttgagtgactgtgagggtgctggcgaactcttcagcataaaatccgacacatccacaaacactgatatggagaactctgaaaatcatttttttaataaacctgcctatttaactgtatcgggtcaaatgcatctggaagcatgcgcgatgtctctcggcagtgtttacaccttaagtcctgtgttccgtgccgagcatggaatatcaaggaaacatctgagcgagttcaggatgctggaagtggaggtggcttttacacaggatttgcatgaaattcttgaccttatagaagacagcatcaaattttgcattgaacgggtgcaaagtgtcccactaaagaaatttgatgacggttacaaggatattccccctcaacatcataaagctgttaagaatgcaacatgcagtaattatgtaagaattccgtattctgaggcacttgaaatactgcagaagaattcacacaaattaacaacagcagctccggtttggggagatgattttaacactgaccaggaatctttcctggttaaacattttggattaacaccagtgtttatcatcaactttccaaaagtagcaaaaccattttacatgtatgctaataacgacaacaatacagtagctgcggtggacctaatattccccttctgtggtgaaatatgtggtggaagtcttcgagaacatagacttgagctgctgcaggattcattgcgtacgtctggtctcaatgaaaaagattatgaatggtacttggacctacgtaggttcggcagtgcacctcacggcggttatggacttggttttgatcgacttgtgcattttctccttggaactcgtaacataaaagacgccgtgccttttccaaggaccccacattcttgcccgctttaa

SEQ ID NO: 10098 - protein, 471 aa, Ciona intestinalis
MFRLCKLSYSTVTTALKRFKIKDVVNGEAVSQNGWIQGWVQSIRKHKNFMFVDIVDGTSLNPLQVVLPSHMFNSQLQNGAAVSANGTFVETDLNVNKIEMVCEEIQVVGPCDPETYPFLKHTPHDMQHLRSYPHLRMRRTSMINAFKLRNQLEMLFHEFFQNEGFTHVHTPIITLSDCEGAGELFSIKSDTSTNTDMENSENHFFNKPAYLTVSGQMHLEACAMSLGSVYTLSPVFRAEHGISRKHLSEFRMLEVEVAFTQDLHEILDLIEDSIKFCIERVQSVPLKKFDDGYKDIPPQHHKAVKNATCSNYVRIPYSEALEILQKNSHKLTTAAPVWGDDFNTDQESFLVKHFGLTPVFIINFPKVAKPFYMYANNDNNTVAAVDLIFPFCGEICGGSLREHRLELLQDSLRTSGLNEKDYEWYLDLRRFGSAPHGGYGLGFDRLVHFLLGTRNIKDAVPFPRTPHSCPL

SEQ ID NO: 10099 - DNA, 1683 bp, Penicillium marneffei ATCC 18224
  CDS (1)..(1683)
atgcgggcatggcgacgctcattctcgacgtccgtcgtgaaacgatactctccttcaagctcgttagcagctaatcaattacgatgcgccgaactcttgaatgcgacaactacgacgacgacggacgccatagaccaggaattgaaagcgcataaatacgaaaacgaggaaattaccttaaaaggatttattcgatcagtcaggaaacagaagcgatttgcgtttgcggagatatcggatgggtcgacggtcaagtcgttgcaggctatattgacgccggagcaggctgctgatttgtcgaccggaacggcgattgagatatctggaatatggaaagcatgtcctgctgggaaagagcaaacacatgaattgcagacttcggagatacggatcgttggcgatgcggatgctgagacttatccaattcaaaagaaatatcactcctcggactttctacgacaaatcccacacctacgattacgaacacccttcagctctctcctcgcccgcttccgctcagaaaccatataccagttaggacaagtgtttaggtccgtcccacaaggaggcttcatacaagtgcagccgccattgatcacatcatcagattgcgaaggtgcaggagaaacattcacattatccccacaatcatctgggctgcctctagattctccaaaaggatctgaagaattggagtatttacatttctttcgcaacccgaaatatctcacagtctcatcacaacttcatctggaagcatatgctgctgagttgggaaatgtatggacattatcaccgacgtttcgtgcggaaaagagtaaaacgccgcgccatctgagtgaattttatatgctggaggctgaagtgaactttacgaatgaattacccgctttgttggatttggtggaatatttaatccgggatcttgcgcgcagactgtatgatacccctgttgcgcaagaagtgctatcggccaagcgaacgggcgagtctggtttggatagtagcgatgatgtacaagggatccttcgcaggaggtgggaggtattactgtccgagacaatcagctggcctcgaatcacatatacccaagcaatcgaaatgcttcaagatgcacaagccaatcacggagcatcattcgtctacccaccatcatggtccgaaggccttcagaccgagcatgagaaatatatcgtcgacactattttcaacggtgttcccgtctttgtgactgattacccgcagaaagtaaaaccattctacatggcgccttcagaaggtgctgacgctggacatccggaccaagcgacggtggcttgtttcgatttactcttccctgagatttgtgaagttgtcggtggctcgctgcgtgagcatcggttagcagaactaatcagcaagatgcgcgagtacggtttgatcaaacaaggcccccagtcatcgaaactaatggatgacaacgagaacgaacatatccttgctctctcaaagaattacccatacttgcaacccggtgaaacactcggtcatttacaatggtacgctgacctccgtcgatggggcagtgcgccacacggcgggttcgggctgggatttgatcggttactggggtatttggctggagttggcagtttgagggatgtggttcctttcccaagatatttcgggcgagccgattgttaa

SEQ ID NO: 10100 - protein, 560 aa, Penicillium marneffei ATCC 18224
MRAWRRSFSTSVVKRYSPSSSLAANQLRCAELLNATTTTTTDAIDQELKAHKYENEEITLKGFIRSVRKQKRFAFAEISDGSTVKSLQAILTPEQAADLSTGTAIEISGIWKACPAGKEQTHELQTSEIRIVGDADAETYPIQKKYHSSDFLRQIPHLRLRTPFSSLLARFRSETIYQLGQVFRSVPQGGFIQVQPPLITSSDCEGAGETFTLSPQSSGLPLDSPKGSEELEYLHFFRNPKYLTVSSQLHLEAYAAELGNVWTLSPTFRAEKSKTPRHLSEFYMLEAEVNFTNELPALLDLVEYLIRDLARRLYDTPVAQEVLSAKRTGESGLDSSDDVQGILRRRWEVLLSETISWPRITYTQAIEMLQDAQANHGASFVYPPSWSEGLQTEHEKYIVDTIFNGVPVFVTDYPQKVKPFYMAPSEGADAGHPDQATVACFDLLFPEICEVVGGSLREHRLAELISKMREYGLIKQGPQSSKLMDDNENEHILALSKNYPYLQPGETLGHLQWYADLRRWGSAPHGGFGLGFDRLLGYLAGVGSLRDVVPFPRYFGRADC

SEQ ID NO: 10101 - DNA, 1362 bp, Schizosaccharomyces japonicus yFS275
  CDS (1)..(1362)
atgattttattaaaaaatatattcttaaaccccaaagtaaacgaagtattacagatcaatgggtggattcggtcaattcgaaagatgaaaaatgtgacatttattatgttaaatgatggaagttgctacaagtctctacaggttgtgttgccgaaatgtcaaaatgatggacttacatatggaagtgcaatatccgtcaagggggccctgaaatgcagggacagggtacagaatcaggatctgggacataaaagaggtccacagttagaacttcaagctgagcttgtaaaccttctcggtgaaaacaattggaagaattatccaatccaaaaaaaaccaatgtcagaagactacctgcgaagcattccccaccttcgccttcgtacgtcaacaatggcacaaacgatgcggcttcgggcttcaatattacgggaattacgacgtttcttggacgagcgtgatttcatagaaaccaatccaccgctcattaccagctcggactgtgagggtgctggagaaacattccaagtcataaaaaaaaacatcaaaaggaacggcacgacaaagcaagaggatgatttaccatcaactatcgaattcttcaaccgtccggcgcacttaaccgtttcaacgcaactgcatttagaggcactggcgttggcattaaatcgcgtttatacggttacgcctgcattccgagcggaagagagcaaaacgagccgtcatttggccgaattttggatgttagaactcgaacaatcttttatcgatgagttggatcctctgctacatctggctgaaacattaataaagtcggtagcacgtcaattactgcgaacgaagcatatgtatatggaaagtaaagagggttacttgacagaccgttggcaaagcttgttgaacccatggcatcgactgtgttatgacgatgcaattcatatgatgcagcggtcatcgcgatgctggaattttgaaccaaaatggggtaccgatttacaaagtgaacatgaacaatggctcactcatgaagtcggaaacaaaccacttttcgtaacagactatccgtcagcacaaaagcccttttacatgaaggattcaacgcctaagaaaagtgcatgctttgatctactattcccagaagttggagaagtgataggcgggtcgcttcgaaaagacgcaaaacaggaacttgcttctgcgcccaaggcactagaatggtacaaggatctccgacaatatggaagtgctcctcatggaggatttggcttaggcattgaacgtctcgttagttacttggcgcgggaaccgaacgtgcgagagtgtattccatttccgaggacggcgggtatgttgttatgttaa

SEQ ID NO: 10102 - protein, 453 aa, Schizosaccharomyces japonicus yFS275
MILLKNIFLNPKVNEVLQINGWIRSIRKMKNVTFIMLNDGSCYKSLQVVLPKCQNDGLTYGSAISVKGALKCRDRVQNQDLGHKRGPQLELQAELVNLLGENNWKNYPIQKKPMSEDYLRSIPHLRLRTSTMAQTMRLRASILRELRRFLDERDFIETNPPLITSSDCEGAGETFQVIKKNIKRNGTTKQEDDLPSTIEFFNRPAHLTVSTQLHLEALALALNRVYTVTPAFRAEESKTSRHLAEFWMLELEQSFIDELDPLLHLAETLIKSVARQLLRTKHMYMESKEGYLTDRWQSLLNPWHRLCYDDAIHMMQRSSRCWNFEPKWGTDLQSEHEQWLTHEVGNKPLFVTDYPSAQKPFYMKDSTPKKSACFDLLFPEVGEVIGGSLRKDAKQELASAPKALEWYKDLRQYGSAPHGGFGLGIERLVSYLAREPNVRECIPFPRTAGMLLC

SEQ ID NO: 10103 - DNA, 1737 bp, Populus trichocarpa
  CDS (1)..(1737)
atggctattgctgctttaggaccagctacttcgctccggttaaacccggggtctactcttcggttgctgtctttctaccccaagtcaaaccctagtaacctccctgaaatcctcaaaacaatgacgaaacctcatgccatacctccaaagttccaccatttttttcaactttcaggtttgcctcgccggaggttcttctgcagtgtgatttctggagctctacagtctaacgagagtgcaaaagtgggatttttggagaaggagaagagtgatgtgggaaatagagttggagaatttagaaaaaagttgaagattgctgatataaagggtggtccagatgaagggttggatcgtgtagggaagaccattgttgtgatgggttgggttcgtactcttcgtgttcagagcagtgttacgtttattgaggttaatgatggttcatgcctatcaaacatgcaatgtgtaatgggattggaggctgaaggttatgatcaggtagaatctgggttgataacaactggcgcatcaatattggtgcaaggaactgtggtggagagccaaggatcaaaacagaaggtggaactgaaggtcaacaaaattgttttggttggcaagagtgatccttcctatcccattcaaaagaaaagggtcagcagagaatttttgagaactaaagctcaccttcgtcctagaacaaatacatttggtgcggttgcaagggtgaggaatgctttagcatatgccactcacaagtttttccaagaaaatgggtttgtttgggtctcaagtcctattattacagcttcagattgtgaaggggccggtgagcagttctgtgtgactactttgattccaggctctcaagaagttgctaattctccggtggataggattccaaaaacaaaggatggcttaattgattggtcacaagacttttttggcaaaccagcttttctgacggtctctggccagctcaatgctgaaacatatgccactgctctttcggatgtgtatacatttggtcccacatttcgagctgaaaattctaatacttcaaggcatttggctgaattttggatgattgaaccagaacttgcatttgctgatctgactgacgacatggcctgtgccactgcctatctccagtatgtagtgaaacatatacttgaaaactgcaaggaagacatggaatttttcaatacttggattgagaagggaatcattgatcgattgactgatgtggctgagaaagactttgttcagttgacttatactgatgcagttgaacttcttctgaaagcaaaaaagaagtttgaattcccggtggaatggggatgtgatttgcaaagtgagcatgagcgttatataactgaagaggcatttggtgggtgccccgtcataatcagagattatccaaaggacatcaaagcattttatatgcggcaaaatgatgatgggaaaactgtcgctgctatggacatgctggttcctcgggttggtgaacttattggtggaagccaaagagaggaacggcttgaatatctagaagaccgtttagatgagttaaagttgaacaaggagagcttctggtggtatcttgatttgcgacgttatggttcagttccgcatgcgggtttcggacttggttttgagaggctcgtgcaatttgctactggattagaaaatataagagatgcaattcctttcccccgggtacctggttctgcggaattttaa

SEQ ID NO: 10104 - protein, 578 aa, Populus trichocarpa
MAIAALGPATSLRLNPGSTLRLLSFYPKSNPSNLPEILKTMTKPHAIPPKFHHFFQLSGLPRRRFFCSVISGALQSNESAKVGFLEKEKSDVGNRVGEFRKKLKIADIKGGPDEGLDRVGKTIVVMGWVRTLRVQSSVTFIEVNDGSCLSNMQCVMGLEAEGYDQVESGLITTGASILVQGTVVESQGSKQKVELKVNKIVLVGKSDPSYPIQKKRVSREFLRTKAHLRPRTNTFGAVARVRNALAYATHKFFQENGFVWVSSPIITASDCEGAGEQFCVTTLIPGSQEVANSPVDRIPKTKDGLIDWSQDFFGKPAFLTVSGQLNAETYATALSDVYTFGPTFRAENSNTSRHLAEFWMIEPELAFADLTDDMACATAYLQYVVKHILENCKEDMEFFNTWIEKGIIDRLTDVAEKDFVQLTYTDAVELLLKAKKKFEFPVEWGCDLQSEHERYITEEAFGGCPVIIRDYPKDIKAFYMRQNDDGKTVAAMDMLVPRVGELIGGSQREERLEYLEDRLDELKLNKESFWWYLDLRRYGSVPHAGFGLGFERLVQFATGLENIRDAIPFPRVPGSAEF

SEQ ID NO: 10105 - DNA, 1725 bp, Populus trichocarpa
  CDS (1)..(1725)
atggcaatttctgcgctaggaccagctacatcgctccggttaaccccagggtcaactctccggttgctatccttctactccaaatcaaaccctagtaacctgtctggtatcctcaaaacaataacgaaacctcatgccatacctccaaagttccaccatctattgcaactttcaggtttgccttgtcggaggttcttctgcagtgtaatttatggagctctacagtctagcgagagtgcaaaagtagagaagaagggtgaaattgggaatagagttggagaatttagaaggaagttgaagattgctgatataaagggtggtccagatgaagggttggatcgtgtagggaagaccatcattgtaatgggttgggttcgtacacttcgagttcaaagtagtgttacttttattgaggttaatgatggttcatgcctgtcaaacttgcaatgtgtaatggacttggaggctgaaggttatgatcaggtagaatctggcttggtaacaactggcgcgtcaatatggatgcaaggaactgtggtgaagagccaagggtcaaaacaaaaggtggaactgaaggtcatcaaaatagtagcggttggcaagagtgatccttcctatcccatccaaaagaaaagggttagtagagaatttttgagaactaaggctcaccttcgtcctcgaacaaatacatttggtgcggttgcaagggtgaggaatgctttggcatatgccactcacaagttttttcaagaaaatgggtttgtttgggtctcaagtcctattattacagcttcagattgtgaaggggccggtgaacagttctgtgtgactactttgattccaggttctcaagaagctgccaattctccggtggatgggattccaaaaacaaaggatgggttaattgattggtcacaggacttttttggcaaaccagcttttctgacggtctctggccagctcaatgctgaaacatatgccactgctctttcggatgtatatacatttggtcccacgtttcgagctgaaaattctaacacttctaggcacttggctgaattttggatgattgaaccagaacttgcatttgctgatctgaatgacgacatggcctgcgccactgcctatctccagtatgtagtgagacatatccttgaaaactgcaaggaagacatggaatttttcaatacttggattgagaagggaatcattgatcgattgagtgatgtggttgagaaagactttgttcagttgacttacactgatgcaattgaacttcttctgaaagcaaaaaagaagtttgaattcccgttggaatggggatgtgatttgcaaagcgagcatgagcgatacataactgaagaggtatttggtgggtgccctgtcatcatcagagattatccaaaggacatcaaagcattttatatgcggcaaaatgatgatggtaagactgttgctgccatggatatgctggttcctcgggttggtgagcttattggtggaagccaaagagaagaacggctggaatatatagaagaccgtttagatgagctaaagctgaacaaggagagcttctggtggtatcttgatttgcgccgttatggttcagttcctcatgcaggttttggactgggttttgaaaggctcgttcaatttgctacaggaatagacaatataagagatgcaatacctttccctcgggtacctggttcggctgaattttaa

SEQ ID NO: 10106 - protein, 574 aa, Populus trichocarpa
MAISALGPATSLRLTPGSTLRLLSFYSKSNPSNLSGILKTITKPHAIPPKFHHLLQLSGLPCRRFFCSVIYGALQSSESAKVEKKGEIGNRVGEFRRKLKIADIKGGPDEGLDRVGKTIIVMGWVRTLRVQSSVTFIEVNDGSCLSNLQCVMDLEAEGYDQVESGLVTTGASIWMQGTVVKSQGSKQKVELKVIKIVAVGKSDPSYPIQKKRVSREFLRTKAHLRPRTNTFGAVARVRNALAYATHKFFQENGFVWVSSPIITASDCEGAGEQFCVTTLIPGSQEAANSPVDGIPKTKDGLIDWSQDFFGKPAFLTVSGQLNAETYATALSDVYTFGPTFRAENSNTSRHLAEFWMIEPELAFADLNDDMACATAYLQYVVRHILENCKEDMEFFNTWIEKGIIDRLSDVVEKDFVQLTYTDAIELLLKAKKKFEFPLEWGCDLQSEHERYITEEVFGGCPVIIRDYPKDIKAFYMRQNDDGKTVAAMDMLVPRVGELIGGSQREERLEYIEDRLDELKLNKESFWWYLDLRRYGSVPHAGFGLGFERLVQFATGIDNIRDAIPFPRVPGSAEF

SEQ ID NO: 10107 - DNA, 1629 bp, Aspergillus flavus NRRL3357
  CDS (1)..(1629)
atgcgaacatggcggcgaagcttcgctacgtctgttgccagactaagccataaacctgccggtcagggcgtcagccccacgctcttacgatgcgcacaagtcctggagcaaagcaagagtggaacctgcagtttagaagatcaagagatcaagttgaatgggtttattcgctccgtccgaaagcagaaacgctttgcgttcgccgagatctcagatgggtcgacgattgagcctatacaggcttttttgagaccagcacaggctgccgaactgtctactggaactgctgtggagatttctggggtctggaaggcttgcccaccgggcaaggagcaaacccatgagcttcaaacgacagacgtgaatgttcttgggaaggcagaccctgagacgtaccccatccagaaaaagtatcacagccccgacttccttcgtcagattccccacctccgcatgcgcacacctttcagctccctcctctcgcggttccgatcagaatgcttgtaccagctaggaaatgtgtttcgcttcgccccgaacgggggctacgttcaggtccacccaccgttaatcacatcgtcggattgtgaaggcgctggggagacattcacagttctgccgcgggaagctatgggggcacagtctgagggcgagcatttcttccgggcacccaaatacctgacggtatcgtcacagctccatctggaggcatatgcagcagagctaggaaacgtgtggacaatatcgcccatgttccgggccgagaagagcgatacgccgcgccatcttagcgagttctacatgctggaggcagagatgaactacatgcatgacctagactcgctgaccgactccgtagagtatattctccgtgacctagttcgtcggttacacgacacgcctgttggccaggagatcctgtccgcaaagcgatcgggcgagtccggtcaggatcaaactgaaggatctggtgctaatctaaaacaacgatggaacgacatgatggagggacccaaatggggtcgcatgacctacacgcaagcgattgagaagctccaggacgcggtcgccaagggacaagccacattcgaacatgcacccgaatggaccggcggccttcaactcgaacacgagaagtacatcgtcgacgtgattcacaacggccgtcccgtgttcgtgaccgactatcctaaggtcgtcaaaccgttctacatgctaccatccaatggggacagctccgctgcaccaggcgaaacagtcgcctgctttgatctcctcctcccagaagttagcgaagtcgcaggaggctccctccgcgagcatcgcctccccaacatcatccagaatatgcgcgagcacgggctgatcaagacccgcgcaccacccgctctggaagcggaagcggaagcaggagcacaagccgattccgagacgccgatgtaccctcacctcctgcccggtgaagacctgggccatctccagtggtatgctgatcttcggcggtggggaacagcgccccatggaggatttggtcttggatttgaccgattcttgggatacctggctggcgtctccagtatccgagacgtagtatctttccctcggtattttggcagggcggactgctga

SEQ ID NO: 10108 - protein, 542 aa, Aspergillus flavus NRRL3357
MRTWRRSFATSVARLSHKPAGQGVSPTLLRCAQVLEQSKSGTCSLEDQEIKLNGFIRSVRKQKRFAFAEISDGSTIEPIQAFLRPAQAAELSTGTAVEISGVWKACPPGKEQTHELQTTDVNVLGKADPETYPIQKKYHSPDFLRQIPHLRMRTPFSSLLSRFRSECLYQLGNVFRFAPNGGYVQVHPPLITSSDCEGAGETFTVLPREAMGAQSEGEHFFRAPKYLTVSSQLHLEAYAAELGNVWTISPMFRAEKSDTPRHLSEFYMLEAEMNYMHDLDSLTDSVEYILRDLVRRLHDTPVGQEILSAKRSGESGQDQTEGSGANLKQRWNDMMEGPKWGRMTYTQAIEKLQDAVAKGQATFEHAPEWTGGLQLEHEKYIVDVIHNGRPVFVTDYPKVVKPFYMLPSNGDSSAAPGETVACFDLLLPEVSEVAGGSLREHRLPNIIQNMREHGLIKTRAPPALEAEAEAGAQADSETPMYPHLLPGEDLGHLQWYADLRRWGTAPHGGFGLGFDRFLGYLAGVSSIRDVVSFPRYFGRADC

SEQ ID NO: 10109 - DNA, 1470 bp, Candida dubliniensis CD36
  CDS (1)..(1470): transl_table=12
atgcttgtacagttaaagttcccactcaaaacactacagcaaatactgctgaaacgctttaacagtagcagtctaaaccctactattaaaaaccaattatcaaatcctcctccaataggttcaataatagaagctagagggtttgtgaaaagtattagatcatctaaaaaagttgggtttgtcgatataactgatggttccattagtaataacctcaacattgtccttcaaggatctgatcaaccaaaatttaaagttggacaaagcatagtagttaaaggagattggtgtgctgggaaggggaaacaaccatttgaattgaaatataatcctgaaaatccgcaacatacttttactatattaggtgatgtaactgatgattatccattacagaagaaagccacttcaatgtcatttttaagaaatttccctgagatcaagcatagaactagtacattaggatcatttttacgattacgatcacatttggaatttaaattgatggaatttttccaatcacaagattttattaaagtcacacctccattgattaccagttctgattgtgaaggtgccggagaagtgtttaaaatagagccattgaatgataatgaccctaaagagccatttttcggtaaaaatgcatatttgactgtgtctacgcaattacatcttgaatgtttggcattagcgttgaatcgtgcttggacattaactccatgtttccgggcagagaattccaaaacaacaagacatttgagtgaattctggatgttggaagcagaaatttctcatgttgttgatgtggatcaagttacaacttttactgaaaatatgataagatttgttaccaaatcgttagttgaaagcagtaatgatactgaccttaataatcttggtgctggtaatggtaatgattacttgattggaacttatattgaaaaagatgttgttcaatcgaggtggtcaaatatattgagtgcagaaagatggccacgcatgacatacactgaagcaattggctatttgaacaaaatattgcctcaagacgaaaaacttacatggggggattcattgcaattaaaacatgaaaggcttttggcagaaaaaagtccaatatttataactgattatcctgaaactcaaaaaccattttatatgttaaaatcagcaaattataaccttgaaaaaccaacagtggcctgttttgatttattagttcctgaatttggagaattagcaggaggatctatgagagaacatgattatgaggtattgttagcaaacatgaaacaagataatatgaatattgaagatatcgaatggtatttaaacttacgtaagcaaggaacgatcccacatggtggttttggattaggatttgagagattaataacttatttggctggttatgataatgtaagagatatttctgctttcccaagagcacctgagttgtgcaactgttaa

SEQ ID NO: 10110 - protein, 489 aa, Candida dubliniensis CD36
MLVQLKFPLKTLQQISSKRFNSSSLNPTIKNQLSNPPPIGSIIEARGFVKSIRSSKKVGFVDITDGSISNNLNIVLQGSDQPKFKVGQSIVVKGDWCAGKGKQPFELKYNPENPQHTFTILGDVTDDYPLQKKATSMSFLRNFPEIKHRTSTLGSFLRLRSHLEFKLMEFFQSQDFIKVTPPLITSSDCEGAGEVFKIEPLNDNDPKEPFFGKNAYLTVSTQLHLECLALALNRAWTLTPCFRAENSKTTRHLSEFWMLEAEISHVVDVDQVTTFTENMIRFVTKSLVESSNDTDLNNLGAGNGNDYLIGTYIEKDVVQSRWSNILSAERWPRMTYTEAIGYLNKILPQDEKLTWGDSLQLKHERLLAEKSPIFITDYPETQKPFYMLKSANYNLEKPTVACFDLLVPEFGELAGGSMREHDYEVLLANMKQDNMNIEDIEWYLNLRKQGTIPHGGFGLGFERLITYLAGYDNVRDISAFPRAPELCNC

SEQ ID NO: 10111 - DNA, 1659 bp, Pediculus humanus corporis
  CDS (1)..(1659)
atgacagatttaacttcagcagacgaaatttacacatcagaaaccagaggttctgacgaaactggtgatggttcagagcagaaaccatttaaatcaattcttcaagcaatgaggaaagctggaaaagagcctttcccaaaaatatatgttgatggaaaaggagatggaattatttacgatcttgcagctaaatcacagttaaaaaaaattcaaaaaatatgggtcagagaaaacatgaaacaagcagaaaaaaataaaaaagaagctgaaaatgctgaaaaaagagtaaaaaatttggaggaagccaaaaaaattgttttagaagaagataaaactcttacgcctgcaattagaattagaataaaagacagcactgagtatcgtgataaaagagttaagatttatggttgggttcatagacttagaagacaaggaaaatcattaatttttattacactgagagatggaactggttttttacagtgtgtgttaaatgaccttttatgtcaatcttatgaagctctaattttgtctactgaatctactgttttattgtatggaactttaaaaaaactaccagaaggaaaaactgctcccggtggtcatgaattacacgtagattattggaaattgattgggttggcacctccgggtggagcagaaaacattctcaatgaagaggcgcatattgatattcagttagacaataggcatattatgataagaggagaaaacacagctaaagttttaaaaatgcgttctgttgttatgcaagcgtttcgtgatcactatgccgaacgtggttattatgaagttacccctcctactttggtgcaaactcaagtcgaaggtggatctacactttttaaattaaattatttcggtgaggaagcctacttgactcaaagctcccaattgtatctcgaaacttgtttggcatccatgggtgatgttttttgcatagctcaaagttacagagctgaacagagtaggactcgaagacatttggcagagtacacccacgtggaagccgaatgtccatttattgattacgaagaatttttaaacagagtcgaagatttattgacggacgtagtagataaagtattgaaatcttcacacgggcatttagtgtacgaattaaatccggattttaaaccgcctaaaaaaccgttcaaacgaatggactacgcggacgctatcaaatacttgaaagaaaacaatataactaaggaagatggaagtttttacgaattcggagaggacatacccgaaatgccggaaagaaaaatgacggatcaaataaacgaaccgataatgttgtgccgttttcccgttaatattaaatccttttacatggcgagatgcgccgaagattccaacctaactgaatccgtagacgtacttcttcctggagtaggagaaataattggtggatcgatgcgttcttgggatgaaaaggaattaatcgacggtttcgttcgtaataacattaatcctgaaccgtattattggtacatcgatcagagaaaatatggttcgtgtccacacggcggttacggtctaggattggaaagattcatgtgttggctcctcaacagataccacatacgagaagtttgcttgtatccgaggtttctggaaagatgtcggccttaa

SEQ ID NO: 10112 - protein, 552 aa, Pediculus humanus corporis
MTDLTSADEIYTSETRGSDETGDGSEQKPFKSILQAMRKAGKEPFPKIYVDGKGDGIIYDLAAKSQLKKIQKIWVRENMKQAEKNKKEAENAEKRVKNLEEAKKIVLEEDKTLTPAIRIRIKDSTEYRDKRVKIYGWVHRLRRQGKSLIFITLRDGTGFLQCVLNDLLCQSYEALILSTESTVLLYGTLKKLPEGKTAPGGHELHVDYWKLIGLAPPGGAENILNEEAHIDIQLDNRHIMIRGENTAKVLKMRSVVMQAFRDHYAERGYYEVTPPTLVQTQVEGGSTLFKLNYFGEEAYLTQSSQLYLETCLASMGDVFCIAQSYRAEQSRTRRHLAEYTHVEAECPFIDYEEFLNRVEDLLTDVVDKVLKSSHGHLVYELNPDFKPPKKPFKRMDYADAIKYLKENNITKEDGSFYEFGEDIPEMPERKMTDQINEPIMLCRFPVNIKSFYMARCAEDSNLTESVDVLLPGVGEIIGGSMRSWDEKELIDGFVRNNINPEPYYWYIDQRKYGSCPHGGYGLGLERFMCWLLNRYHIREVCLYPRFLERCRP

SEQ ID NO: 10113 - DNA, 1686 bp, Sorghum bicolor
  CDS (1)..(1686)
atggctgccgacgccgcaactgcggcgatggccgcggcttccctctgcgacgaccttgagcccgccaccgcgcgcacccgcatccgtgatgtccttgccgcaggcaccgcgcgtgccggggaccgcgtcgtggtcggggggtgggtccggacgggccgggagcaggggaagggctccttcgccttcctggagctcagcgacggctcctgcgccgccacgcttcaggtcatcgtcgacgccgccgtgcacccgctcgcgcgcctcaccgccaccgggacctccgtgctcgtcgagggcgagatcaaggagccgcccgaggggaccaagcagaacgtcgagctcaaggtcagccgcgtgcttgaggtcggcgaggtcgatgccgccgtctacccgctgcccaagggcaaggtcaaactcacgctcgagaaactcagggacgtcgttcatctccgttcgcgcaccaacacgattggagcggttgctaggattaggcaccagttagcctatgcgtcacacactttcttcaatgagaatggatttctctatgtacatacaccaataataactaccagtgactgtgaaggtgctggtgagatgttccaagtgacaactctgtttagtcaggctgaaaaaactgagaaggaattgagagagaacccggcaccatctgattctgaaattgaggcagctaaatttcttgtcaaggaaagaggtgatgtggtcgcacagcttaaagctgcgaaagccagcaaacaagagatatcagctgctgttgatgagctaaatagggcaaaggaaattgtttcaaaactggaggaaaggtccaagttaaagcctggggttccacgcaaggatgatggttcaatagcttttgaaaatgacttcttcaagcgtcaagcttttttgacagtgtctggacagcttcaggttgagacatatgcatgtgctcttagtagcgtttatacctttggaccaacattccgggcagagaactcacatacatcacggcatttggcagagttttggatggttgaaccggaaattgcattcgcaaacttgcaggatgatatgaactgtgcagaaaaatatgtacaatacctttgcaagtggctgcttgaccattgccaggaagatatggagtttatggtgaaaaattatgataagagtgcaattgaacgcctggagcttgtttcctcgactccttttgtgcggatttcatatacaaaggctgtggagctcttgaaaaatgttacagacaagaagtttgataacaaagttgaatggggaattgatttagcctctgagcatgaaaggtatttaacagaggatatatttaagaagccagtgattgtctataactatccgaaaggaataaaggctttttatatgaggctcaatgatgatgacaagacggtggctgcaatggatgttcttgtgcctaaggtcggcgaattgattggtggaagccaaagggaggaacggctagatgttctgaaacaaaggatacttgatgctggcttgcctttggaaccctatgagtggtacttggacctccgccgctttggatctgtaaagcacagtggctttgggttgggttttgaaaggatgattctttttgcaaccggaatggagaacatcagagatgttatacccttcccaaggtacccagggagggctgatctgtga

SEQ ID NO: 10114 - protein, 561 aa, Sorghum bicolor
MAADAATAAMAAASLCDDLEPATARTRIRDVLAAGTARAGDRVVVGGWVRTGREQGKGSFAFLELSDGSCAATLQVIVDAAVHPLARLTATGTSVLVEGEIKEPPEGTKQNVELKVSRVLEVGEVDAAVYPLPKGKVKLTLEKLRDVVHLRSRTNTIGAVARIRHQLAYASHTFFNENGFLYVHTPIITTSDCEGAGEMFQVTTLFSQAEKTEKELRENPAPSDSEIEAAKFLVKERGDVVAQLKAAKASKQEISAAVDELNRAKEIVSKLEERSKLKPGVPRKDDGSIAFENDFFKRQAFLTVSGQLQVETYACALSSVYTFGPTFRAENSHTSRHLAEFWMVEPEIAFANLQDDMNCAEKYVQYLCKWLLDHCQEDMEFMVKNYDKSAIERLELVSSTPFVRISYTKAVELLKNVTDKKFDNKVEWGIDLASEHERYLTEDIFKKPVIVYNYPKGIKAFYMRLNDDDKTVAAMDVLVPKVGELIGGSQREERLDVLKQRILDAGLPLEPYEWYLDLRRFGSVKHSGFGLGFERMILFATGMENIRDVIPFPRYPGRADL

SEQ ID NO: 10115 - DNA, 1698 bp, Talaromyces stipitatus ATCC 10500
  CDS (1)..(1698)
atgcgggcatggcgacgctccttctccacatccgtcgtgaaacgatacagtccatcaagctctctggcagctagtcgattacggtgcgccgaactcttgaatgcgacgaccgcaacgacggtaacgggaacaatagccggagatacgaagacacataaatatgaaaatgaggaagttacattaaagggatttgtgcgatcagtcaggaagcagaagcggttcgccttcgcggagatatcggatgggtcgacggtgaagtcgttgcaggctatattgacgccagagcaggcggctgacttgtcgactggaacggcgattgagatttctgggagatggaaggcgtgtcctgctgggaaagaacaaacacatgaattacagacttcaaaggtcaaaatcgttggatatgctgatccggagacatatctaattcagaagaaatatcactcccccgatttcctacgacaaatcccccacctacggttacgaacacccttcaactctctcctctcccgattccgctcagagaccatatatcagctaggacaagtgtttaggtccgttccgcaaggaggttttgtacaagtgcagccgccattgatcacctcgtcagactgtgagggtgcgggagagacatttacattgtccccgcaatcatctgcaccacctccatctggttcaaagggatcggaagatgaagaacatttacatttcttccgcagtccgaaatatcttacagtctcgtcgcaacttcatctagaagcatacgctgctgagttgggaaatgtatgggcattatcgccgacgtttcgggcggaaaagagtaaaacaccgcgtcatctgagtgaattctatatgctggaggctgaagtgaattttacggatgacctacccgccctgctggatttggtggaatatttgattcgggatctggcgcgcagactctacgataccccagtggcacaggaagtgctgtcagccaaacggacgggcgagtctggcctggatagtagcgatgatatccatgctgttcttcgcaggagatgggaggtattgttatccgagaccatcaactggcctcgaattacatacacacgagcaattgaactgctccaagacgcacaaaccaatcatggagtctcattcgtgtaccccccatcctggtccgagggtctccagcttgagcatgagaaatatatcgtcgacactatctttcaaggcgtccctgtctttgtcacggattatccgcaaaaagtcaaaccattctacatggcgccttcagaaggtgccgatgctgctcatccagaccaagctaccgtagcttgtttcgatctactcttccctgaaatctgtgaagttgtcggtggttcgcttcgcgaacatcgattgccgcaactgatcatcaaaatgcgcgagtacggtctaatcaagcatggttccacaaaaccgtcatcatcatcacagccaaacgacgacaaagacgacgagcatgtgcttgacctctcaaagaattacccgtacttacaacccagtgaaactctcggccatttacaatggtatgctgaccttcgtcgatggggaactgcaccccatggcgggtttggactggggtttgatcggttaatgggatatttggctggagtgagcagtttgagggatgtggtcccttttcctaggtattttggacgagctgattgttag

SEQ ID NO: 10116 - protein, 565 aa, Talaromyces stipitatus ATCC 10500
MRAWRRSFSTSVVKRYSPSSSLAASRLRCAELLNATTATTVTGTIAGDTKTHKYENEEVTLKGFVRSVRKQKRFAFAEISDGSTVKSLQAILTPEQAADLSTGTAIEISGRWKACPAGKEQTHELQTSKVKIVGYADPETYLIQKKYHSPDFLRQIPHLRLRTPFNSLLSRFRSETIYQLGQVFRSVPQGGFVQVQPPLITSSDCEGAGETFTLSPQSSAPPPSGSKGSEDEEHLHFFRSPKYLTVSSQLHLEAYAAELGNVWALSPTFRAEKSKTPRHLSEFYMLEAEVNFTDDLPALLDLVEYLIRDLARRLYDTPVAQEVLSAKRTGESGLDSSDDIHAVLRRRWEVLLSETINWPRITYTRAIELLQDAQTNHGVSFVYPPSWSEGLQLEHEKYIVDTIFQGVPVFVTDYPQKVKPFYMAPSEGADAAHPDQATVACFDLLFPEICEVVGGSLREHRLPQLIIKMREYGLIKHGSTKPSSSSQPNDDKDDEHVLDLSKNYPYLQPSETLGHLQWYADLRRWGTAPHGGFGLGFDRLMGYLAGVSSLRDVVPFPRYFGRADC

SEQ ID NO: 10117 - DNA, 1437 bp, Pichia pastoris GS115
  CDS (1)..(1437)
atgttgataaaacctccaggattcgtttttcagttcaagaggctgcaatcttcatacgccctatcgaaatgcattaatgaaatcttcaaagatcccccttttaaatctcagaccacggtgaacggttgggtaaaaggtgtgcgagttcaaaagagaatcgcatttatagatatcagtgatgggacatcatttcaaaatctgatgtgcgtagttccaccagaccaggcaaaggagttgaggactggtgtcagcgttcaagtcactggtgagattaaggaaagtaacggtaaaagtcaatctatcgagctcaaaacaactgatcctgatagtgtcaaggtattaggtccagttttagattcttatccgttgcaaaaaaaatttcattctccccagttcttgagaacgattccccacttgagatggaaaactcaatttctatcttcgatattacgatttagatctcatgtggaaatgaagttgatggaatttttcacccaggaacaatttactagaactcatccccctttaataacatcgtctgattgtgaaggtgctggagaattattcaaaattgaaagtgcctctagagctgacatagaaaacaagttttttggtaaagatagttatttaactgtcagtactcaattgcacttagaagtactttgtatggctcttagcagagtgtggaccttaactccttgcttcagagctgaagaaagtgatacccatagacatcttagtgaattctggatgctagaagcagaaattgcctttatttcggatgtcagacagctcactacgttttgtgaaagaatgataaaacatgtcgtgaactctttgcatcaagatttggaaggtcaaggttccaacttgattaactcaaggcgtgaccaggaattcgtccacaaaatgattgaacgatgggatcaactattgaatggtaaatggaagactattacttacactgaagctatagatatactgagtgcagagagttccaagggaaatatctccttccaatttaagcctgcgtggggagaaccgcttcaatcggaacacgaaaaatggctaacaggcgaatatttcaaatctccggtcttcgtattaaattatcccaaagaatcaaaaccattttacatgactagaaaccctgatggaaaaactgtggcatgttttgatcttctagtaccagatgttggagaaataattggagggtcgatgagagaacacaatattgatctcttgctggatgaaatcaagcaaagaaatatgaagactgatgatattgaatggtacttatccttacgatcaagtggatccgtttctcatggagggtttggaatgggctttgaacgactattatgttatttgggatgtgttgaaaacatccgtgatgtaatcccctttccacgaagctcccgtgattgtgtctgttga

SEQ ID NO: 10118 - protein, 478 aa, Pichia pastoris GS115
MLIKPPGFVFQFKRLQSSYALSKCINEIFKDPPFKSQTTVNGWVKGVRVQKRIAFIDISDGTSFQNLMCVVPPDQAKELRTGVSVQVTGEIKESNGKSQSIELKTTDPDSVKVLGPVLDSYPLQKKFHSPQFLRTIPHLRWKTQFLSSILRFRSHVEMKLMEFFTQEQFTRTHPPLITSSDCEGAGELFKIESASRADIENKFFGKDSYLTVSTQLHLEVLCMALSRVWTLTPCFRAEESDTHRHLSEFWMLEAEIAFISDVRQLTTFCERMIKHVVNSLHQDLEGQGSNLINSRRDQEFVHKMIERWDQLLNGKWKTITYTEAIDILSAESSKGNISFQFKPAWGEPLQSEHEKWLTGEYFKSPVFVLNYPKESKPFYMTRNPDGKTVACFDLLVPDVGEIIGGSMREHNIDLLLDEIKQRNMKTDDIEWYLSLRSSGSVSHGGFGMGFERLLCYLGCVENIRDVIPFPRSSRDCVC

SEQ ID NO: 10119 - DNA, 1392 bp, Zygosaccharomyces rouxii CBS 732
  CDS (1)..(1392)
atgtttagaggttaccatacgattagggcgttgtacgactcaggtccccaaaagtttgttgacgtcaacggttggattcaatcgatcagacagttgaaaagaatagcgtttatagatcttcgagatggtacttcaactaagtccttaaagatagctgtaccattatgtgatcaatcattaatagaatccgttaaaaacttgaaaacaggtcaatgtgtttctatttctcaagctcagtgggtgcctacacctcaaagagaacaaccttttgaattaaaagtgggagatgcgctaaaggatattcaaatcctaggtaacgttacatcacaatacccgttacaaaaaaagtctcatagtttgtcattcttgaggacactaccacatttaaagcatagatcaaattatttgggttcattgctgagatttagatctcatgtggaaaatacatttatccaattctttgcccaaaacgaatttaccaaagtgacaccaccactcattacatcaagtgattgcgaaggtggtggtgaactgtttaaagttgatggatctaacgactacttcggtagatcagcttatttaacggtttccgcgcaattacatttggaagcactgtcactagccctaaaccgatgttatacattatctccaagctttagagctgagaaaagtgatactaatcgtcatttatgcgagttttggatgctagaggcagaatggtgttttgtcagagatgttaacgaattaacacattttacccaaaatttgttgaaatctgtgattaagtcatgttatgacaatagaaacgaattaataccacaaattattcctcaagaatctgaccaagtttccaccattatacagagatgggaaaatctactcaaaaatgataactggccatcaatcacctacactgaagccattaaaatattaagagaacaacattcaaacgtcaaacctttccccaattacgaaccacagtgggggttagcattacagagtgaacatgaaaaatggttagctggtgaatatttccagtcacctgtatttgttaccgattatccaaaggattgcaaagcattctacatgaagcataacgacgatggccaaaccgtggcatgcttcgatttattagtgcctggaatgggtgaaattgtgggcggtagtgtgagagaagatgactacattaaattagtaacagagatggatcgtaggcagatgaatcacaatggtgatttggactggtacgctgccttgagacaagaaggttcagctccacatggtgggtttggtttgggtgtggaaagattggtatcgtacttgtacggaaatcacaacattagggatgccattccattccacagggctgctactggtactattgaactttaa

SEQ ID NO: 10120 - protein, 463 aa, Zygosaccharomyces rouxii CBS 732
MFRGYHTIRALYDSGPQKFVDVNGWIQSIRQLKRIAFIDLRDGTSTKSLKIAVPLCDQSLIESVKNLKTGQCVSISQAQWVPTPQREQPFELKVGDALKDIQILGNVTSQYPLQKKSHSLSFLRTLPHLKHRSNYLGSLLRFRSHVENTFIQFFAQNEFTKVTPPLITSSDCEGGGELFKVDGSNDYFGRSAYLTVSAQLHLEALSLALNRCYTLSPSFRAEKSDTNRHLCEFWMLEAEWCFVRDVNELTHFTQNLLKSVIKSCYDNRNELIPQIIPQESDQVSTIIQRWENLLKNDNWPSITYTEAIKILREQHSNVKPFPNYEPQWGLALQSEHEKWLAGEYFQSPVFVTDYPKDCKAFYMKHNDDGQTVACFDLLVPGMGEIVGGSVREDDYIKLVTEMDRRQMNHNGDLDWYAALRQEGSAPHGGFGLGVERLVSYLYGNHNIRDAIPFHRAATGTIEL

SEQ ID NO: 10121 - DNA, 1896 bp, Micromonas sp. RCC299
  CDS (1)..(1896)
atggctctaatgaccacccgcatgatggtgcgcaacggcgcggagtgcctcgggcgctccgccccgtcgctccgctccgtgctgcgatgcgccccctcgacgcagagggcaacgctcgcgagcccgggcgccccgacgccggtgaggctcggggtcggcggcgccgggcgctcgatggtctcgattcgcgcgagctccgtcaccaccaccgcggataccgccgcggcgacgtccgcgtcggcgccgttcaagcgccacgagcgcatcgccgccatcaagggcaaggaccagggcaaatcccgcgtcggcgataccgtgcagctccgcggctgggtccgcaccgtccgcgcgcagaaggacctctcgtttatcgaggtgaacgacggctcgtcgctgagcggcatccaggcggtggtgaacggagacgtgcccgggcgcgagcacctcgacgcgggcgacatcaccaccggcgccgcggtggtcatcaagggtatcgtggtggaatctccgggcggtaagcaggcggtggaggtggccgtcgagtccatcaagctcatcggaggagccgacgcgtccaccttccccctgcagaagaagaggcacaccctcgagtacctccgcagcatcgcgcacctcaggccgaggaccaacaccatcggcgcggtcacccgcgtcaggaaccagctcgcgtacgccacgcacaccttcttccagcagcacggcttccagtacgtcaacaccccgatcgtcaccgcgtccgactgcgagggtgccggcgagcagttccaggtcaccacgctcatcaacggaatagacgggccaagcgtcgcctccgcccaatcgaacgtcgcgtccgaggctgacatcaccgccgccaaggccgccgccgcggagcagggcgtcgtcgtcaagaccctcaaggatgccaagaaggagggcaaggcgacgaaggaggaggtggacgaagccgtcgccgagctcctcgcgctaaaggcgaaggcggagtccctcgagaattctcccgcggcggcggcggcgggcggcgacatcccccgcgacgccgccggcgccgtggactacggcaaggacttcttcggcaaaccctcctacctgaccgtgtccggccagctcaacgccgagatttacgcgtgcgccatgagggacgtctacacgtttgggccgacgttcagagccgagaactccaacaccagccgccacctcgccgagttttggatggtcgagcccgagctcgcgttcgcggaccttcaggacgacatggactgcgccgaggcgtacctcaagcactgcctgacgcacgtgctggagcactgcgacgaggacctggagtttttcgagaagaacatctcgaaggataacctccgcgagcgccttcgcggcgtcgccacctccgactttgccaggatcacctacacggaggctgtcgaccacgttctcaaggcgaagaagaagttcgagttccccgtggagtgggggtgcgaccttcagagcgagcacgagcggtacctcaccgaggaggtcttcaagaaccgccccgtcatcgtccgcgattaccccaaggcggtcaaggcgttttacatgcgcgaaaacgacgacggcaagacggtggccgcgatggatgtgctcgtgcccaaggtgggcgagctcatgggcgggtcgcagagggaggagcgcctcgacgtgctcgagcgcaggatcgaagaggtcggcctggagaaggagagctactggtggtacctcgatcttcgcaggtacgggagcgtcccccacgcgggcttcggcctcgggtttgagcggctggtgcagtacgtcaccggcgtggagaacattcgggacgtgatcccgttcccgaggtacccgggcagcgcggagttctga

SEQ ID NO: 10122 - protein, 631 aa, Micromonas sp. RCC299
MALMTTRMMVRNGAECLGRSAPSLRSVLRCAPSTQRATLASPGAPTPVRLGVGGAGRSMVSIRASSVTTTADTAAATSASAPFKRHERIAAIKGKDQGKSRVGDTVQLRGWVRTVRAQKDLSFIEVNDGSSLSGIQAVVNGDVPGREHLDAGDITTGAAVVIKGIVVESPGGKQAVEVAVESIKLIGGADASTFPLQKKRHTLEYLRSIAHLRPRTNTIGAVTRVRNQLAYATHTFFQQHGFQYVNTPIVTASDCEGAGEQFQVTTLINGIDGPSVASAQSNVASEADITAAKAAAAEQGVVVKTLKDAKKEGKATKEEVDEAVAELLALKAKAESLENSPAAAAAGGDIPRDAAGAVDYGKDFFGKPSYLTVSGQLNAEIYACAMRDVYTFGPTFRAENSNTSRHLAEFWMVEPELAFADLQDDMDCAEAYLKHCLTHVLEHCDEDLEFFEKNISKDNLRERLRGVATSDFARITYTEAVDHVLKAKKKFEFPVEWGCDLQSEHERYLTEEVFKNRPVIVRDYPKAVKAFYMRENDDGKTVAAMDVLVPKVGELMGGSQREERLDVLERRIEEVGLEKESYWWYLDLRRYGSVPHAGFGLGFERLVQYVTGVENIRDVIPFPRYPGSAEF

SEQ ID NO: 10123 - DNA, 1452 bp, Candida tropicalis MYA-3404
  CDS (1)..(1452): transl_table=12
atgcttcgtcgttcaaataatacttttacaaaacttgtgaggttcaagtcagactatttgaaccctactatcaaacagcagcttggatcaccagcaaaagttggttccataatagaagcccgtggctttgtcaagagcattagaacatcaaaaaaagttggatttgttgatatttcagatggatcaattcacaagaacttaaacattgttctccagggatcagaacaacctaagtttaaagtaggtcaaagtataattgttaaaggagaatggtgtcaaggtaagggtactcaaccttttgaattgaaatacaatccaaaaaacccagatcataaaattacaatcttgggagatgtcacagaagattatccattacaaaagaaatccacatcaatgccatttttaagaacattccctgaattaaaacatagaactaatacattggcatcattcttgcgtttaagatctcacatggaattcaaattgatggaatttttccagcaacaagattttatcaaagtcacacccccattgattaccagttcagattgtgaaggtgccggtgaagtattttctgtgcatagtgcaagtgataaaccaaatgagaaattctttggtaagaatgcatatttaacagtgtcgacacaattgcatcttgaatgtttggcattagcattgaaccgtgcgtggacattaacaccttgttttagggctgaacaatcaaatactacaagacatttaagtgaattttggatgttagaagctgaaatttctcacgttgattctgttcatcaagtcacaaactttattgaagatatggtacgatatgtcacacaatcgttgatggatagtagttctgagtctagtgttaataatatcagtgctggtgatgggaatgattatttgaatggaagttatattgacaaggaattggtaaaagaaagatgggctaaaatgttaacaccagatagatggccaagaatgacctatacggatgctgtttctctattaaataagaccctaccagaaaacgaacaacttcagtggggtgactctttgcaattaaaacatgaacgaatgttagctgagaatagtcctattttcataacagattatccgtctgctcagaaaccattctatatgattaaatctgcaaattttgatccagaaaagcctactgttgcgtgctttgatttgttggtcccagaatttggtgagttagctggtggatcattaagagaacatgattatgaagtcttgaagaaaaatttagaagaccatcaaatggatatgcaagacatggattggtatttgaatttacgaagacaaggtactgttccacatggtggatttggtctaggatttgagagaatgatcacatttttggcaggttatgacaatgtcagagatgtttctgctttcccaagagctcctgatctatgcaattgttag

SEQ ID NO: 10124 - protein, 483 aa, Candida tropicalis MYA-3404
MLRRSNNTFTKLVRFKSDYLNPTIKQQLGSPAKVGSIIEARGFVKSIRTSKKVGFVDISDGSIHKNLNIVLQGSEQPKFKVGQSIIVKGEWCQGKGTQPFELKYNPKNPDHKITILGDVTEDYPLQKKSTSMPFLRTFPELKHRTNTLASFLRLRSHMEFKLMEFFQQQDFIKVTPPLITSSDCEGAGEVFSVHSASDKPNEKFFGKNAYLTVSTQLHLECLALALNRAWTLTPCFRAEQSNTTRHLSEFWMLEAEISHVDSVHQVTNFIEDMVRYVTQSLMDSSSESSVNNISAGDGNDYLNGSYIDKELVKERWAKMLTPDRWPRMTYTDAVSLLNKTLPENEQLQWGDSLQLKHERMLAENSPIFITDYPSAQKPFYMIKSANFDPEKPTVACFDLLVPEFGELAGGSLREHDYEVLKKNLEDHQMDMQDMDWYLNLRRQGTVPHGGFGLGFERMITFLAGYDNVRDVSAFPRAPDLCNC

SEQ ID NO: 10125 - DNA, 1407 bp, Lachancea thermotolerans CBS 6340
  CDS (1)..(1407)
atgcccgggttaccgcccacttttaagtctctcttcagaaacgcgtctaatccacccgctaaagttgagcttctctgtggttggataaagtccgttcgtctcttgaagaaactagccttcattgacttacaggatggcacaacgcctaatccattgaagctagtagtccgccgttcagaggatggctcggacatgttaaagcaactgcgcacggggcaatctcttatggtcaaggacgcgctgtggaaagccaccccttcacggcttcagccatttgagctcgaaacagacgcgtcccccgagtgccttcaggtcttgggacaggtgcccgcctcataccctcttcaaaagaagcatcactcgctcgcgtttcttagatctaaccctacgttaaaacaccggtcgaactacctgggctcgctcttgagattccggtcgtgtgttgagtcgtcactgacgcagttcttcgactcccaagactttacaaaggttagcccaccggtactgacctcaggcgactgtgaaggcgctggcgaactcttccgcgcagagtccaatgcgcatattgctcgcaaaacttcttacttcggcagaccgacgtatttaacagtctctacgcaactgcatctcgaagtgctcgcgatggcgctcaaccgtgtctggacgctaactccatgctttcgcgcagaagaaagcgacaccaaccgccatctcgcagagttttggatgctagagaccgagttgtgctacgtgcagaatgtcaaagggctcacgaaagtcgcagaacatatgctcaagcacgttgttgaaagttgcctggcacaaaagctcagtttacttccatctgtcgttccccaggaaaacgctgagtcccctgaaagtattgttgcgcggtgggagtctttgctgcactccgaatggcccagagttacctacacttccgccatcgaacttctgaaaagacaacactccgttagtcagtttagtttcgaaccacagtggggaaaagatcttcaaagcgagcacgagaaatggcttgcggctcattacaattctcctgtctttatcaccgactaccctcgcaactgcaaacccttctacatgaagcaaaattttgacgccgctgataccgtcgcttgttttgatctcatcgttccccagatgggcgaaatcataggaggcagcatcagggaagacaactacgataccttgatccaagaaatggatcgcagaggtatgaaatcggaggatctcgactggtacacttcactccgtcttaatggaggtgcgcctcatggagggtttggcttaggccttgaaaggtttgtatcgtggctttttggcgctcaaaatatcagggacgctatacctttttaccgaagcgcaggcggaactattaatatgtga

SEQ ID NO: 10126 - protein, 468 aa, Lachancea thermotolerans CBS 6340
MPGLPPTFKSLFRNASNPPAKVELLCGWIKSVRLLKKLAFIDLQDGTTPNPLKLVVRRSEDGSDMLKQLRTGQSLMVKDALWKATPSRLQPFELETDASPECLQVLGQVPASYPLQKKHHSLAFLRSNPTLKHRSNYLGSLLRFRSCVESSLTQFFDSQDFTKVSPPVLTSGDCEGAGELFRAESNAHIARKTSYFGRPTYLTVSTQLHLEVLAMALNRVWTLTPCFRAEESDTNRHLAEFWMLETELCYVQNVKGLTKVAEHMLKHVVESCLAQKLSLLPSVVPQENAESPESIVARWESLLHSEWPRVTYTSAIELLKRQHSVSQFSFEPQWGKDLQSEHEKWLAAHYNSPVFITDYPRNCKPFYMKQNFDAADTVACFDLIVPQMGEIIGGSIREDNYDTLIQEMDRRGMKSEDLDWYTSLRLNGGAPHGGFGLGLERFVSWLFGAQNIRDAIPFYRSAGGTINM

SEQ ID NO: 10127 - DNA, 1605 bp, Penicillium chrysogenum Wisconsin 54-1255
  CDS (1)..(1605)
atgcagatatggcggcggaccttcaccacatctgtgggcagacttacccatagctcaattaatacccgcccctctatcgtgcgatgcgcgcaaattctccaagctagcaagaacggtggggtctgcagtttcgaggaccaagaagtcaaagtgaatgggttcattcgctctgtacggaaacagaaacgatttgcgttcgcagaaatatcagatggctcgaccgtggagccattgcaggcaattctgaagcccgcgcaagcagcagatctgtcaactggaactgcgattgaaatatcgggcatatggaaggcttgcccaccgggcaaagagcaaactcatgagctccaaacaagcgatgttaaggttgtaggcgcatcggacgcggagacgtttccgatccagaagaagtaccacagccccgacttcctgcgtcagatcccacaccttcgcattcgaacacccttcaattctcttctttcgcgcttccgatccgagtgcatgttccaacttggcaatgtcttccactctcatcctgacggagctttcacacaagttcagcctcctcttataacgtcctcagattgcgaaggcgcaggtgaaacttttacactgacaccgcgcggtgctgcaacacccaccaccgagaacgagcatttcttccgagcgccaaaatacctcacagtatcgtcgcagcttcaccttgaagcgtatgcggcagagctgggcaacgtctggacattgacaccagtgttccgggcagagaagagcgatacaccacgccacctcagcgagttctacatgctagaagccgaggtcaatttcatgtccgatcttgactcgcttactgacttagtcgaacatctgctacgcgatctgacgcgtcgtctatataatactcctgtgggccaagagatcttgtcggcaaagcggtctggcgagccaggccaggaagctagcgaggagtcgggatctctacgaaaaagatggaccgatctaatggatgggccaaagtggcaccgcatcacatatacccaagcagtggagatgctccagcgtgctgtcaccgaagacggagcatcatttgagcattccccgacatggaacggaggtctacaacttgagcatgaaaagtatattgtcgaggtgctccatcaaggatgtcccgtcttcgtgacggactaccctaaatccgtcaagccgttctacatggccccttcacagaccgccgacggcagcaacacgcctggggagacagtggcatgtttcgacctgctcctccctgaagtcagcgaagtcgctgggggctccctgcgcgagcatcgcctgctcaatctcattcagaacatgcgcgagcacggcctgatcaagccccgacagattcccgaatctggtgatccagcttcaggcgaatcgctatatccccatctcacccccgacgaggacctgagccacctccaatggtacgctgacctccgacgctggggctctgctccccatggaggctttgggctcggattcgaccggttcctgggatatttgactggtgtctccagcgttcgagatatcgtatccttcccgcggtacttcggtcgcgctgattgctga

SEQ ID NO: 10128 - protein, 534 aa, Penicillium chrysogenum Wisconsin 54-1255
MQIWRRTFTTSVGRLTHSSINTRPSIVRCAQILQASKNGGVCSFEDQEVKVNGFIRSVRKQKRFAFAEISDGSTVEPLQAILKPAQAADLSTGTAIEISGIWKACPPGKEQTHELQTSDVKVVGASDAETFPIQKKYHSPDFLRQIPHLRIRTPFNSLLSRFRSECMFQLGNVFHSHPDGAFTQVQPPLITSSDCEGAGETFTLTPRGAATPTTENEHFFRAPKYLTVSSQLHLEAYAAELGNVWTLTPVFRAEKSDTPRHLSEFYMLEAEVNFMSDLDSLTDLVEHLLRDLTRRLYNTPVGQEILSAKRSGEPGQEASEESGSLRKRWTDLMDGPKWHRITYTQAVEMLQRAVTEDGASFEHSPTWNGGLQLEHEKYIVEVLHQGCPVFVTDYPKSVKPFYMAPSQTADGSNTPGETVACFDLLLPEVSEVAGGSLREHRLLNLIQNMREHGLIKPRQIPESGDPASGESLYPHLTPDEDLSHLQWYADLRRWGSAPHGGFGLGFDRFLGYLTGVSSVRDIVSFPRYFGRADC

SEQ ID NO: 10129 - DNA, 1500 bp, Clavispora lusitaniae ATCC 42720
  CDS (1)..(1500): transl_table=12
atgcatatactctcggggaaggctgtctttcaggtgcccaaagctcttgcttggagctggccgagcagatgtctttctggtatttcaaggaccattcaagaggtttttgataacccgccagaaacaaacagcaccatcacaactcatggccacatcaagtctattcgaactttcaagaatatcggattcatagacataaccgacggtaccatctttcagactctcaacgttgttctttcgaaccccgaggatgtctttgctctgggaaaatacaaagtaggtcagagtgtctccatttcaggactgtgggttcagtcgaaaggaaatcaaaagtacgagctacaatatgaccaccataaccctcaccattctatcaagttgattggagttgtctcagatgattatcctattcagaagaaagtacagtcattatcttatttgagaagcgtgcctcatcttcgccatcggacagccacattggcttccatcttgcgattcagatcccgcgttgagcaacacgctatgaatttctttgctaaaaatggattcacgaaagtggcaccaccactcatcacgtcctctgattgtgagggtgcaggcgaaatgttctcgatcgaaccattcaccaaagcagactcgaaggagaagttttttggccaagatgcttttttgaccgtttccacacaattgcatcttgaagtgttggctccctcattaaaccgagtttggactctcactccatgttttagggctgagcagtccaatactaatagacacctcagtgagttttggatgttagaagcagaagtttgttacgtggagaacatatcgcaattgaccgatttagttgaagattctattaggctgattgcaaaggacttaaaaacagatccgccattacaggctggaggcttgaatgacttgacgaaagcaagatactcggaatctgagcagctattagtccaacaacgatgcgactctttgttaggagaaaatcgttggccaagtattacttacacagaagccattgatattattaattctgtcaagaacaagggacgcctgaaaaatagaatgacctggggagattctattctgacagaacaggaaaaatggctagctggaacacattttcaatcgcctgtatttgtcacagattatccaagggaacagaagcctttctatatgcctctttccaaatatggcttggataaggaacgtccaactgtggcctgtttcgacttgatagttcctgaattcggtgaactcgtaggaggctcattgagagaacaccgccacgatgagttacaccaagaaatcattagacgaggtatgaatgccgaatcaatgcaatggtatctttctcttcgccaaaatggaacggtgccgcacggaggctttggcatgggcttcgaaagacttattgcataccttgcagccatagagaacatcaaagatatatctgcatttcctagagcaccgcagatatgtccttgctaa

SEQ ID NO: 10130 - protein, 499 aa, Clavispora lusitaniae ATCC 42720
MHILSGKAVFQVPKALAWSWPSRCLSGISRTIQEVFDNPPETNSTITTHGHIKSIRTFKNIGFIDITDGTIFQTLNVVLSNPEDVFASGKYKVGQSVSISGSWVQSKGNQKYELQYDHHNPHHSIKLIGVVSDDYPIQKKVQSLSYLRSVPHLRHRTATLASILRFRSRVEQHAMNFFAKNGFTKVAPPLITSSDCEGAGEMFSIEPFTKADSKEKFFGQDAFLTVSTQLHLEVLAPSLNRVWTLTPCFRAEQSNTNRHLSEFWMLEAEVCYVENISQLTDLVEDSIRSIAKDLKTDPPLQAGGLNDLTKARYSESEQLLVQQRCDSLLGENRWPSITYTEAIDIINSVKNKGRSKNRMTWGDSISTEQEKWLAGTHFQSPVFVTDYPREQKPFYMPLSKYGLDKERPTVACFDLIVPEFGELVGGSLREHRHDELHQEIIRRGMNAESMQWYLSLRQNGTVPHGGFGMGFERLIAYLAAIENIKDISAFPRAPQICPC

SEQ ID NO: 10131 - DNA, 1674 bp, Ajellomyces dermatitidis SLH14081
  CDS (1)..(1674)
atgctcgtatggcgtagatgcctgagcacctccaccactgcttcggcgattgcaggtcaaaaagccccgttgctactccgatgcgcgcagctgttggaggcatcccaaacaacccccaccgctgctgctgctgatcatgatggaggctctagttccttggacaaccgccagattcgggttcagggatttattcggtctgtgaggaagcagaaacggttcgcgtttgctgagatatcggatgggtcaacgattaagtcggtacaggcgattttgacgccggcgcaggctgctcgactatcgaccggttctgctattgatatttctggcgtgtggcaaccatgtcctgccggcaaaaagcaaagccatgagcttcacgcgacagaagttaagattactggagaggcggatcctgagaaataccacagcccagatttccttcgacaaataccacatctcaggctacggacacctttcaactccctcctctctcgatttagatcagaatgcattttccaactcggacaggtattccactcccggctcggcagcaatttcgtgcaggtccagccgccgctgatcacatcgtctgattgcgaaggtgctggggaagtgttcacagtggcgccaggagataaagttggggacggagagaagggggagttctttcgatctccaaaataccttacggtgtcaagccaacttcatctggaggcgtatgcggccgagctgggaaatgtgtggaccctctctcccaccttccgagcggagaagagtgatactccacggcatctcagcgagttctatatgttagaggtagaaatgaattttgtgcatagcttggattcgctcacggatactgtggagtcattaattcgtgaccttacgaaacgactatacgagagcccagttgcggaggaaatatttacagctaagaggacaggggagtctggacaagaaaatgttgatcagggattgcgcccgcgatggttgggcatagtagagagtgggaaatggcctcggattacgtataccaacgctatcgagttgcttcagaaggctgttgcatcgaaagcagccacttttaccataaccccggcctgggaggagggcctccacctcgagcatgaaaaattcatagtcgatgaagttgggaaggggtgtcccgtatttgtgactcactatccgaagatggtgaaaccattttacatggcaccttcaatcgtgctagaggaaccttcccccgcatcgccagcagaattatccaaccatgatccagcccaaacaatggagaccgttgcatgtttcgatcttttgatgcccgagatctgtgaagtggtcggtggctccattcgtgaacaccgacttccaaatcttatacagaacatgcgtgagcacgggcttattaggaaaatgcctgaggcggggccagacgcagattgtgcatcttcttcgtcacatttggcggcggagcagggttcgtcaatatacccttacctccaaccggatgaatatatcggcccaatgcaatggtatgccgatcttaggagatggggcagtgcacctcacggcgggtttggacttgggtttgaccggtacctgggatatctggctggcgtttctagtcttagggacgttgttccgttcccacgacattttggacgagctgaatgttaa

SEQ ID NO: 10132 - protein, 557 aa, Ajellomyces dermatitidis SLH14081
MLVWRRCLSTSTTASAIAGQKAPLLLRCAQLLEASQTTPTAAAADHDGGSSSLDNRQIRVQGFIRSVRKQKRFAFAEISDGSTIKSVQAILTPAQAARLSTGSAIDISGVWQPCPAGKKQSHELHATEVKITGEADPEKYHSPDFLRQIPHLRLRTPFNSLLSRFRSECIFQLGQVFHSRLGSNFVQVQPPLITSSDCEGAGEVFTVAPGDKVGDGEKGEFFRSPKYLTVSSQLHLEAYAAELGNVWTLSPTFRAEKSDTPRHLSEFYMLEVEMNFVHSLDSLTDTVESLIRDLTKRLYESPVAEEIFTAKRTGESGQENVDQGLRPRWLGIVESGKWPRITYTNAIELLQKAVASKAATFTITPAWEEGLHLEHEKFIVDEVGKGCPVFVTHYPKMVKPFYMAPSIVLEEPSPASPAELSNHDPAQTMETVACFDLLMPEICEVVGGSIREHRLPNLIQNMREHGLIRKMPEAGPDADCASSSSHLAAEQGSSIYPYLQPDEYIGPMQWYADLRRWGSAPHGGFGLGFDRYLGYLAGVSSLRDVVPFPRHFGRAEC

SEQ ID NO: 10133 - DNA, 1425 bp, Anopheles gambiae str. PEST
  CDS (1)..(1425)
atggctttgctgtgttgccgtgcaatcctgcgattctcgtcccgcagttaccactattaccgaataaaggatctttcgccggacaactgtaaaccgggcaataaagtgaacgttaaaggatgggtcaaatcgatccgaaacatgaagggcaatctgttcgtggacataaatgacggttcgggtccgcaaaacttccagctcgtgatcaacaaggagaaagccatcgacactgcgtacggctgttcggtcgatgcgtgcggagtgctcgtagcctcgccaaagaaccagcttgagctgcacgtggacaccctgaccgaggtgggcaaatgtcccctgaccgagggttacccgttctaccccaagaaatcgtacccgcccgagtacatccgcaatcatctgcatttgcgctcccgcgtaaactccatggcatcgacgttccgggtgcggcacgaggcaacgcgcgcgttcaacgagtacctgcagcgggggggttttgtccagattcacacgcccgtgctaacgtcaaatgactgcgaaggtgccggcgaagcgttcctggtgaagccgctgaacgaacagctgctgaaaggcatggcgaaggaaaacgttcccctcgaacacgcctacttcgatagagccaccttcctgacggtttccggccagctgcacctggaagcgatggcgcacggcttggacaaggtgtacacgttcgggccaacgttccgggcggagaactgcaagtccaacattcacctgtccgagttctacatgctggagctggaggaagcgttcatgggcacgctggacgagctaacgcaccgggtggaagatatgctgaaaagcgtcaccaagagtgtaattgatcgcagtgcggcagacctaagcgtggtgagaaaatcgaacagccaggacggtggtggccagctcgaggactgcttccgatggatcgataaaccattcccccggctaacgtacgacgaagcgatgcacatactgcaggcgaacgaggcgaaactgaagtctcccgtacggcgggaggagggcattaataaggagcaggaactgttcctcgtcgagcactgccagagtccggtgtttgtgtgtctctggccgaaggcaatcaagtcgttctatatgcgagaaaatgcgcaaaatccttccctggtcgacgcgctcgatctgctcgtcccgcacgtcggcgaactggtgggcggcagtgtgcgtgaggatagttacgatcgtttgcggcgcaagctgccgaacgcggacgtcctgcagtggtacttggagttgcgcaaattcggaagcgtcacgacggccggcttcgggatgggattcgagcgatacctggcgtggctactgaacgttcacaacgtgaaggatgtgataccgtttccccggtgggcacacaactgtgtgatgtag

SEQ ID NO: 10134 - protein, 474 aa, Anopheles gambiae str. PEST
MALLCCRAILRFSSRSYHYYRIKDLSPDNCKPGNKVNVKGWVKSIRNMKGNLFVDINDGSGPQNFQLVINKEKAIDTAYGCSVDACGVLVASPKNQLELHVDTLTEVGKCPLTEGYPFYPKKSYPPEYIRNHLHLRSRVNSMASTFRVRHEATRAFNEYLQRGGFVQIHTPVLTSNDCEGAGEAFLVKPLNEQLLKGMAKENVPLEHAYFDRATFLTVSGQLHLEAMAHGLDKVYTFGPTFRAENCKSNIHLSEFYMLELEEAFMGTLDELTHRVEDMLKSVTKSVIDRSAADLSVVRKSNSQDGGGQLEDCFRWIDKPFPRLTYDEAMHILQANEAKLKSPVRREEGINKEQELFLVEHCQSPVFVCLWPKAIKSFYMRENAQNPSLVDALDLLVPHVGELVGGSVREDSYDRLRRKLPNADVLQWYLELRKFGSVTTAGFGMGFERYLAWLLNVHNVKDVIPFPRWAHNCVM

SEQ ID NO: 10135 - DNA, 1605 bp, Gibberella zeae PH-1
  CDS (1)..(1605)
atgagatcgttccgtgcatcaacggttccaaaaacagtgagacaatggcctcaacgaaggtcttacgcggttagggttcctggcaagtgccagaaggatatcaagactgtggctgagctcaaagcttggggtccatcatctcctgtgcctgatgttgaggtttctgggtgggtaagatcagtacgaaagagctcaggggtacggttcatcgatatcaccgatggctcgtccatgagacctgttcaagtggtcgtggataagagtttagctgccgacatgcgtcctggtgcagctgtccgcctaaaaggaacttgggttgacgagagcgggaagaagactctcgctagtagctcagctcagcttcctgatacaaagggcgagtgcgagacttcaacaagtccagaacaacctgagctgaaagtctcagaggtggaattcctcggtggttctgaccccatgacatacccgattcagaacaaataccagtctcctgaaagccttcgaacaatctcccatcttcgatcgcgaacacctctcaactccactatgctacgcctgcggtcagatgcgaccgccatgctcacgcagttctttttccgtgagagatttcaacaaacgcatcctcctataatcacttcgtccgattgcgaaggagcgggcgaggcattcgttgtgaaggcatcttctccagatgagttcttccgtgcgcccaagtatctgacagtttcctctcaactccacctcgaagctctcgcccaatctctcggcaatgtctggactttgtctccaactttccgggctgagaagagcgatacgtcgaggcatctcagtgaattttacatgcttgaggcggagatgagctttgtcgatgacatgaacgaagtcatgaacctggcacaacgcatgctgaactcgttgaccagtggcttgaaggaactcaatgctgctaaggaactcaaaaaaaatcgagttgattcgaaggagccttcagagcgtcttgcgttcaaagaccttgttgaacaagaacagctggaccgccgatggcaaggcatgctcacaaccaaaacatggcctcgcattacatacagcgaagccattgagattttgaagcctatcgctgatcagttcaagcacaggcctcaatggggtgctggtttacagtctgagcatgagaagtaccttgctgagaggattggttatgacgagactacagatgcctatgttccagtattcatcacacaatacccgcgagatataaaggctttctacatgcggcagtcgtcttcgtctccatcatctggcttgacggttgattgttttgacctcttggttcccaacatgggtgagctggctggtggctctatgcgtgagcatcgactcccccaacttaaagagaatatgcgagcattgggactcgaggtccctagcaaacattctgctgggggcaaggagatggcatggtatctcgacttacgtcgctggggttgtcctcctcatggtggctttgggcttggtttcgatcgactcctgagctacctctctggcgtgccaaacgtccgcgatgttgtccccttcccacgccactaccaccgatgcgactgctga

SEQ ID NO: 10136 - protein, 534 aa, Gibberella zeae PH-1
MRSFRASTVPKTVRQWPQRRSYAVRVPGKCQKDIKTVAELKAWGPSSPVPDVEVSGWVRSVRKSSGVRFIDITDGSSMRPVQVVVDKSLAADMRPGAAVRLKGTWVDESGKKTLASSSAQLPDTKGECETSTSPEQPELKVSEVEFLGGSDPMTYPIQNKYQSPESLRTISHLRSRTPLNSTMLRLRSDATAMLTQFFFRERFQQTHPPIITSSDCEGAGEAFVVKASSPDEFFRAPKYLTVSSQLHLEALAQSLGNVWTLSPTFRAEKSDTSRHLSEFYMLEAEMSFVDDMNEVMNLAQRMLNSLTSGLKELNAAKELKKNRVDSKEPSERLAFKDLVEQEQLDRRWQGMLTTKTWPRITYSEAIEILKPIADQFKHRPQWGAGLQSEHEKYLAERIGYDETTDAYVPVFITQYPRDIKAFYMRQSSSSPSSGLTVDCFDLLVPNMGELAGGSMREHRLPQLKENMRALGLEVPSKHSAGGKEMAWYLDLRRWGCPPHGGFGLGFDRLLSYLSGVPNVRDVVPFPRHYHRCDC

SEQ ID NO: 10137 - DNA, 1404 bp, Candida glabrata CBS 138
  CDS (1)..(1404)
atgattagatatattgccaagcggcatgtatcgattaagaccttatatgactcagtgcccaaagatggccagaaattagatatggtcaacggatgggtgagatcggtgagactgatgaagaaagttgcgtttgtagacttatatgacggctcatcaaataaggatgtcaaaattgtgatcaagaatccacaagaatcttctttggttaggcaccttaaaacaggtcaatgtatatcagtcgattcaccgttgctgaaaatcactcaagggtctaggattcaaccatttgaactgttggttgaggactctgttaaggatctgaagctattgggtgatgtagagaccaactatccactacaaaagaaaagccactcacttgagtttctcaggacgttaccaactttaaaacataggtcactattctatggttcaatactaagatttcgatcgcatatggaagaatatgctattaacttcttcaacaaacaggagaacttcttgaaagttagtccaccaatttttaccacaaatgactgtgaaggtgcaggtgaacagtttgaagtgaaatctagtgtcttggagaataaaaaggctttcttaacagtatctacgcaattacaccttgaaatattatcgatggcaattgcaaattgttggactttatcaccatgcttcagagcagaaaagagtgctaccccaagacatttgatggagttctggatgctggaagcagagatgagcttcattgacaacttagaccagcttttagatttcacaagaaactttttacaaagtatggttactcagtgctacgagaatagagaggatttattgccggacaatatatcaaccctcataaataaagaaaagatacttgaaagatggcaaatgctaaggaattctgaaaattggaaaaggatcacatatacagacgctatacaaattcttaaagagaagcattcacaggagcccttccctagatacaagcctaaatggggggaagcgttacaaactgaacatgaaaaatggctagctgagaaatatttccagagtccagtttttgttactgattacccaatggactgtaaagcattttacatgaagtcaaacgaagacggtaagactgtggcatgctttgaccttcttgtccccgaaatgggagaaatcattggaggaagtatgagggaggataactacgagtccctacaatatcagatcaaaaaaagaggcatgaataatacaggtgaattggattggtacgttaacttacgtaaacaaggtgtggcaccacacggcggctttggcctcggatttgagagatttatttcttacttgctgggcattcagaatattaaggataccattccattccctagaagtgccagttcatctatagacctgtaa

SEQ ID NO: 10138 - protein, 467 aa, Candida glabrata CBS 138
MIRYIAKRHVSIKTLYDSVPKDGQKLDMVNGWVRSVRLMKKVAFVDLYDGSSNKDVKIVIKNPQESSLVRHLKTGQCISVDSPLLKITQGSRIQPFELLVEDSVKDLKLLGDVETNYPLQKKSHSLEFLRTLPTLKHRSLFYGSILRFRSHMEEYAINFFNKQENFLKVSPPIFTTNDCEGAGEQFEVKSSVLENKKAFLTVSTQLHLEILSMAIANCWTLSPCFRAEKSATPRHLMEFWMLEAEMSFIDNLDQLLDFTRNFLQSMVTQCYENREDLLPDNISTLINKEKILERWQMLRNSENWKRITYTDAIQILKEKHSQEPFPRYKPKWGEALQTEHEKWLAEKYFQSPVFVTDYPMDCKAFYMKSNEDGKTVACFDLLVPEMGEIIGGSMREDNYESLQYQIKKRGMNNTGELDWYVNLRKQGVAPHGGFGLGFERFISYLLGIQNIKDTIPFPRSASSSIDL

SEQ ID NO: 10139 - DNA, 1425 bp, Kluyveromyces lactis NRRL Y-1140
  CDS (1)..(1425)
atgatatctaaaatagaaggcatctcaggagaaacgctgcgctgtgggtcagtgcgtgtacgcgatcataaattatatactggtcccccagctatgagacttccagtaacgttaaaaagagtttttgaaactgctaggaccaatggtggaacacctgtcaagattgaccaagtatcaggctgggttaaaaacgttcgtcctttaaagacaatcacattcgttgaaattcaggatggaactactttgcaagatctaacagttgtgttgaaacaaggcgctccatctttcaaaccatctttgggccaatctgtcaccgttttgcatccggagatcgttcaacggaagaatcaacaattcgaaaccttgtgtatgccggaaaacttaaagctgattggacctacagtagagtatccggtccaaaacaaacagacttcattaccgacactaagaaaattacctgagttcaaacatcgtaccacttatttatctaaccttttaagatttcgtcataaggtagagtcacaattgacaaagacgttagatgggttagattttacgatggtgagaccaccaattttaacgtcaattgactgtgagggtgctggagaaatgtttaacttgaaacaagaccattgggacgaaatagtgaaccttacagtctcttcgcagttacatttagaagtgcttatgatggggcttggaagagtgtattgtttgcaaccttgttttcgtgctgagaagagtgatacaaacagacatctttgtgaattctggatgttagaagtggaagcatcgttcgttgataaaaatgagtctctcatggaccttgttgaacttatggtgaaaagcgttgtcttatcattatccgaaacaaaagatcttcccaaatatttcccagtcggatgtaatatcgatatcaccagcagatgggcgaaattactacaagattggaaaagaatcacttatactgatgcagtagaagcattgctatcgagtggtgtgaaattcgaacatgatttagcatggggcaaagatttaaacagtgaacatgaaagatggctctgtgatcattttggcggtcctgttttcgtgaccaattaccctcgcgattgcaaagcattttacatgaaattaaggcctgacggtactactgttgaatgtttcgatctcttgttcccagagattggagagatcgtaggaggaagtgtcagggaagatgattatgacactttaaagcaagaaattgaaagaagagatatggcatcaaatcaactcgattggtacttaaacctacgaaaagagggtacagtacctcatggtggatttggaattggtatcgaacggttagtatcttacttatacggaaatccaaacatccgggacagcattccattccatagaactgccggccaaattgatttatag

SEQ ID NO: 10140 - protein, 474 aa, Kluyveromyces lactis NRRL Y-1140
MISKIEGISGETLRCGSVRVRDHKLYTGPPAMRLPVTLKRVFETARTNGGTPVKIDQVSGWVKNVRPLKTITFVEIQDGTTLQDLTVVLKQGAPSFKPSLGQSVTVLHPEIVQRKNQQFETLCMPENLKLIGPTVEYPVQNKQTSLPTLRKLPEFKHRTTYLSNLLRFRHKVESQLTKTLDGLDFTMVRPPILTSIDCEGAGEMFNLKQDHWDEIVNLTVSSQLHLEVLMMGLGRVYCLQPCFRAEKSDTNRHLCEFWMLEVEASFVDKNESLMDLVELMVKSVVLSLSETKDLPKYFPVGCNIDITSRWAKLLQDWKRITYTDAVEALLSSGVKFEHDLAWGKDLNSEHERWLCDHFGGPVFVTNYPRDCKAFYMKLRPDGTTVECFDLLFPEIGEIVGGSVREDDYDTLKQEIERRDMASNQLDWYLNLRKEGTVPHGGFGIGIERLVSYLYGNPNIRDSIPFHRTAGQIDL

SEQ ID NO: 10141 - DNA, 1527 bp, Debaryomyces hansenii CBS767
  CDS (1)..(1527): transl_table=12
atgaggatacttaatgcaagctatagtcggatgccatcaagatgtgcatcgttaaattttaggtcttattttagtagcttaaaacctaccattaaagacttattcatatcacctcccagtatagagtccactatatcaacgcaaggacacattaaatctatccgtcagtttaagaatataggtttcattgacctatcagatggaactacatttcacaacttaagtgttgttctacaagacccagaatcaacgctttctgaattgcatttgaaagtgggccaaagcatcaatgtcgctggaaaatggattgcatcgaaaggaacccaaaaatatgaacttttatacaatcctgaagcaaatgaccataaccttcaagttattggagatgtagaggatgcatatcccattcaaaagaaatcgcaaacgtaccaattcttgagaggattgccaactttaagacatagaactgcatcattagcatctatgttacgattcagatcatttatggaaactaaactaatggaatttttcaatagtcagaattttacaaagacaacaccaccgttgattactagttctgattgtgaaggagccggtgaacaattcaaagtcgagcagttgcataaaaaagaagtcgttgttgatggtgctgttcaggaggagcatttctttgggaaaccagccttcttgaccgtttccactcaacttcatcttgaagtattgacgttatctttgaatagagcttggactttgaccccgtgtttcagagcagaggattctaatacaaatcgtcatctaagcgaattctggatgctagaggcagaaatatgctacatcgaccatgttagccaattaactgactttacagaggacatgataagatatgtcactggtgcattgaagtccgaagctataaatgaacaatctagtggccattcgactgatttactaagttccaggttcaagaaagaggaactcgaaaccttgaaaaacaggtgggaaaccattatggcacctcaaaaatggccttctgtaacgtattctgaggccattgatatcattaacaaggtcaaaaataagaataagctgaaaaatcgcttaacttggggcgacgatatccagactgaacacgaaaaatggcttgctggtacgcatttccagtctcctgtctttattacagactacccaagatctcaaaagccgttttacatgcccaagtctcattcaagtgtgtacaacccggaaaggcccactgttgcgtgctatgacttgattttaccagaaataggggagctagtaggtggttcaatgagagaacatgactacgagaacctagtacaagaaatgacaagaagaaatatgaacctaaaggagatggactggtatttatcaaccagacttaatggaacagttccgcatggtggtttcggtatgggctttgagagattactttcctacattggtgcaatggagaacgttaaggatgtcatcccctttcctcgtgttccccaatcatgtacctgttaa

SEQ ID NO: 10142 - protein, 508 aa, Debaryomyces hansenii CBS767
MRILNASYSRMPSRCASLNFRSYFSSLKPTIKDLFISPPSIESTISTQGHIKSIRQFKNIGFIDLSDGTTFHNLSVVLQDPESTLSELHLKVGQSINVAGKWIASKGTQKYELLYNPEANDHNLQVIGDVEDAYPIQKKSQTYQFLRGLPTLRHRTASLASMLRFRSFMETKLMEFFNSQNFTKTTPPLITSSDCEGAGEQFKVEQLHKKEVVVDGAVQEEHFFGKPAFLTVSTQLHLEVLTLSLNRAWTLTPCFRAEDSNTNRHLSEFWMLEAEICYIDHVSQLTDFTEDMIRYVTGALKSEAINEQSSGHSTDLLSSRFKKEELETLKNRWETIMAPQKWPSVTYSEAIDIINKVKNKNKLKNRLTWGDDIQTEHEKWLAGTHFQSPVFITDYPRSQKPFYMPKSHSSVYNPERPTVACYDLILPEIGELVGGSMREHDYENLVQEMTRRNMNLKEMDWYLSTRLNGTVPHGGFGMGFERLLSYIGAMENVKDVIPFPRVPQSCTC

SEQ ID NO: 10143 - DNA, 1422 bp, Yarrowia lipolytica CLIB122
  CDS (1)..(1422)
atgacccagcgggtgttcgaatcctctacggtccgatccatcaccactctgccccagacaatcaaccagatcaagactgaaaacaagcacattctcggcactcaggatgcttcacctgtgaccatcaacggttggatcaagtctgtacagaagctcaagaatgtcgcatttctcaacatttccgacggcaattgtgcccagggtgttatggctgtgctccaacccgatcaggtgacctccgatctcactacgggtgcatgtgtgtctgtcaagggcaacttggtcagttctcagggcaagaagcagggtctggaactccaggccgagtcggtcaaggttactggaacagtggacgaataccctattcaaaagaagttccacaaacaagagtttctgcgaaccctgcctgctctcagatggagaacttctgtcaactcctctactcttagatacagatcattctgtatggctcaaatgaccaacttcttcgccgagaacgactttgtgcagactaaccctcccctgctgacctcttctgattgtgagggtgccggtgaggtgttcaaggtggctggagggggcaaaggagacaagttcttcggagacaagcccgcatacctcactgtttccacccaattgcatctggaagttctggcagctgccgtaggtcgagtgtggaccttcacacctgctttccgtgctgaaaacagcgataccaatcgtcatctgagcgagttctggatggcagaagccgagatctcgttcattgacgacctggagcctctcatggacctcgctgagggaatggtgaagtcatgtcttgctcctcttatggaagaaggtaacaaggcgcgaaacgatcttttggatgctcggagaagcgctgaacagaaggaagagcttctcgatcgatgggacatggctaactgcgacttccccagactcacatacaagcaagcgatcaaaattcttaacctgcagcaccttaaggagcctttcgcccaccgacccgactatgaggttggcctccgaagtgaacatgagaagtggctggcaacagagtatttcatttcgcctgtgtttgtaactgactaccccaaggagcagaagcccttctacatgaagcagagccctcacgattcgcagactgtcgcctgtttcgatctccttatgccccacatcggagaagttattggaggttccgttcgagaagataactatgacactctgctgaagaacatcgagactacaggcatggacaagagtgctcttgagtggtaccttgagcttcgaaagcagggatctactcctcatggaggcttcggcatgggttttgagcgactcatcagctacgctacaggtattgagaacatcagagatgtgacagcattccccagatgggtagacaactgtagctgttaa

SEQ ID NO: 10144 - protein, 473 aa, Yarrowia lipolytica CLIB122
MTQRVFESSTVRSITTLPQTINQIKTENKHILGTQDASPVTINGWIKSVQKLKNVAFLNISDGNCAQGVMAVLQPDQVTSDLTTGACVSVKGNLVSSQGKKQGLELQAESVKVTGTVDEYPIQKKFHKQEFLRTLPALRWRTSVNSSTLRYRSFCMAQMTNFFAENDFVQTNPPLLTSSDCEGAGEVFKVAGGGKGDKFFGDKPAYLTVSTQLHLEVLAAAVGRVWTFTPAFRAENSDTNRHLSEFWMAEAEISFIDDLEPLMDLAEGMVKSCLAPLMEEGNKARNDLLDARRSAEQKEELLDRWDMANCDFPRLTYKQAIKILNLQHLKEPFAHRPDYEVGLRSEHEKWLATEYFISPVFVTDYPKEQKPFYMKQSPHDSQTVACFDLLMPHIGEVIGGSVREDNYDTLLKNIETTGMDKSALEWYLELRKQGSTPHGGFGMGFERLISYATGIENIRDVTAFPRWVDNCSC

SEQ ID NO: 10145 - DNA, 1599 bp, Cryptococcus neoformans var. neoformans JEC21
  CDS (1)..(1599)
atgtccgtcgatgggctagtgccgagcctaggacacatagaagcagatcaatacgccatgcgctcaactcagcgcaggctttcgtccctccctccgactatccgctctttgctctcttcgcgtcgttccactcttccgtctgtctcttccaccactcaccttgaaacggtatcatgcgcgaacgagcctgtggaagttaatggatggatcaagtctgtgagggctcacaagaatgtggcatttgtggaagtgagcgatggtagcactggcgagaatattcaagcggtgttgaaaggaaagagcaaggccgaaggtttgagtatcggggctagtgccaagctcaaaggaagattagagcagtcacgagggcgaggacaagatgtcgaacttgttgttgaagatgcccaagtgctgggtacatgtgatgccgaggcctatcccattcagaagaagtcgctacctgcttcagtccttcgggataatgcccatctgagattccggacgtctcaaacagcggcagtcatgcggatacgggatgcgttagctcgagactggcatgattggttcgagagtcacgattttgtccacgttcacacgccaatactgactgggtcggattgtgaaggcgctggagaagtcttcaccatcgttgatcacccacctccgtcgtcatctagctctcctcagccattcttccctcatccagtccatctcactgtttcagctcaactgcaccttgaagctcccacgcatgcgctctcccgaacctacaccctatctccctcttttcgagctgaaccctcattgacatctagacatttatccgaatttcatatgcttgaagccgaagtcgcttgggaaaatgatttggatggactgttgagcgtagttgaggaaggtgtgaaaagtactgttgggaatatattgaatggtgaaaaaaggggaaagaggttgagggacgacttgagtatcgtcgccaagtctcttcgcgatgttgatgaccttggatctgtgattgatccggctcaggaattcgcagaccccttatatcatttgcaactggtaatggacaagcctttcacccgtattacctacacgtcggctcttgagctactttcttctttgcacgccgattcgccctctacgatatccccaccacctttatggggtcaaggaatatccacagatcacgaaaagcttttggcggcgcatttcaacggaccggtatttgtgacgaggtatcccaaggagctaaagcccttttacatgctccccaccccttccaccatagaaaacgaaaaaacccacgcatcgcaaggttcaacggtggaatgctttgaccttctatttcctcactggggtgagatggctggcggctctcttcgtgagcatcgtttgactgaactcactcatgcgatcgaagaaatggggatgaaaaaggaagaatataattggtatcttgacttaagaaagtacggaagtgcgccccatgggggttggggtatgggatgggatagatgggttggatgggtgactggcttgggtaatgtgagagatgtggtgccgtatgccagatggaagggacattgcaaatattga

SEQ ID NO: 10146 - protein, 532 aa, Cryptococcus neoformans var. neoformans JEC21
MSVDGLVPSLGHIEADQYAMRSTQRRLSSLPPTIRSLLSSRRSTLPSVSSTTHLETVSCANEPVEVNGWIKSVRAHKNVAFVEVSDGSTGENIQAVLKGKSKAEGLSIGASAKLKGRLEQSRGRGQDVELVVEDAQVLGTCDAEAYPIQKKSLPASVLRDNAHLRFRTSQTAAVMRIRDALARDWHDWFESHDFVHVHTPILTGSDCEGAGEVFTIVDHPPPSSSSSPQPFFPHPVHLTVSAQLHLEAPTHALSRTYTLSPSFRAEPSLTSRHLSEFHMLEAEVAWENDLDGLLSVVEEGVKSTVGNILNGEKRGKRLRDDLSIVAKSLRDVDDLGSVIDPAQEFADPLYHLQLVMDKPFTRITYTSALELLSSLHADSPSTISPPPLWGQGISTDHEKLLAAHFNGPVFVTRYPKELKPFYMLPTPSTIENEKTHASQGSTVECFDLLFPHWGEMAGGSLREHRLTELTHAIEEMGMKKEEYNWYLDLRKYGSAPHGGWGMGWDRWVGWVTGLGNVRDVVPYARWKGHCKY

SEQ ID NO: 10147 - DNA, 1719 bp, Aspergillus fumigatus Af293
  CDS (1)..(1719)
atgcggacatggcagcggacctttgccacgtctgttgccagactaaatagtaacgcaacagggcgaagtggcggtaccactctcctgcgctgcgccgaagttctccggaagagtcaggctgggagcagcagttacgaggatcaagaaatcaagatcaacggtttcgttcgctctgttcgaaagcagaagcgcttcgcattcgcagagatcacagatggttcgactattgagccattgcaggcgtttctgaagcctgcgcaggcggcagggtacgttgagagagtcgcgatgacggtgtggatattgcggcttgagttaagtgctgatggtggttgtagattatctacgggaacggccgtcgagatctctgggttatggaaggcttgtccgcctggtaaagagcagacccatgaacttcaaacgactgaggtgaagattgtgggccaagcagaaccagagacatatcctatacaaaagaaataccacagtcctgacttcctccggtcgattccccaccttcgtctacgaacccccttcaactccgtcctctcgcgatttcgctctgaatgcctataccagctgggcaatgtctttcgggatgcgccaaatggcggctatgtgcaagttcaacctccattgattacatcatccgactgcgaaggagctggggagacatttacagtgctaccgcgtgaaacaattatggatcccaagtcggaggggaaccatttcttccgggcgcccaagtacctgacggtctcgtcgcagctccatctcgaggcctacgcagctgagctgggaaacgtctgggctatctcaccgacctttcgcgcggagaagagcgacacgccacgccatctcagtgagttctacatgctcgaggcggagatgaacttcatggacgatctcgactccctgacggatgcagtggaatatgtagtccgcgatcttactcgccggttgtaccagtcgccggtcggccaagagatcctgactgccaagcggtcaggcgagagcggccaggacgatgccgggaatggggccgtgccaaaccttcgacagcgatgggttgatctcatggaggggcctcgctggcgacgaatcacctatacgcaggcgatggagttgctcgaagcggcagtcgcgcggggagaggtctcgttcgagtatgctcctacgtggacggaaggcctccaactcgaacacgagaagtacattgtggacgtgatcaacgggggccaaccggtattcgtgacggactatcccaaggccatcaagccgttctacatggcgccgtcccacgtggcccccggcaaggaagaggacatccgtgcgcccggtgaaacggtcgcctgcttcgatcttctcctgccggaggtcagcgaagtcgcgggcggatcactccgtgaacaccgcctgcccaacatcatccagaacatgcgcgatcacgggttgatcaagcagcgcttatatcctgcggctggtgctggagagacgccgacgacccagacggcccctgagcagccgttatacccccatctccagccgtatgaggacttggggcatctgcagtggtacgcggatctgcgacggtgggggagcgcaccgcatggaggattcgggcttgggttcgaccggtttctcagttatctagctggagtttcgagtgtgcgggatgtggtggcttttccccgatactttggccgggctgattgttag

SEQ ID NO: 10148 - protein, 572 aa, Aspergillus fumigatus Af293
MRTWQRTFATSVARLNSNATGRSGGTTLLRCAEVLRKSQAGSSSYEDQEIKINGFVRSVRKQKRFAFAEITDGSTIEPLQAFLKPAQAAGYVERVAMTVWILRLELSADGGCRLSTGTAVEISGLWKACPPGKEQTHELQTTEVKIVGQAEPETYPIQKKYHSPDFLRSIPHLRLRTPFNSVLSRFRSECLYQLGNVFRDAPNGGYVQVQPPLITSSDCEGAGETFTVLPRETIMDPKSEGNHFFRAPKYLTVSSQLHLEAYAAELGNVWAISPTFRAEKSDTPRHLSEFYMLEAEMNFMDDLDSLTDAVEYVVRDLTRRLYQSPVGQEILTAKRSGESGQDDAGNGAVPNLRQRWVDLMEGPRWRRITYTQAMELLEAAVARGEVSFEYAPTWTEGLQLEHEKYIVDVINGGQPVFVTDYPKAIKPFYMAPSHVAPGKEEDIRAPGETVACFDLLLPEVSEVAGGSLREHRLPNIIQNMRDHGLIKQRLYPAAGAGETPTTQTAPEQPLYPHLQPYEDLGHLQWYADLRRWGSAPHGGFGLGFDRFLSYLAGVSSVRDVVAFPRYFGRADC

SEQ ID NO: 10149 - DNA, 1470 bp, Candida albicans SC5314
  CDS (1)..(1470): transl_table=12
atgcttatacagtcaaggttccctctcaaagctctacagcaagtactgtcgaaacgctttaatagcagtagtctcaaccctaccattaaaaaccaattatcaaatcctccaccaataggatcaataatagaagctagagggtttgttaaaagtattagatcatctaaaaaagttgggtttgtcgatataactgatggttctattagtaataatctaaacattgttcttcaaggtccagatcaaccaaaatttaaagttggacaaagtatagtcgtgaaaggagattggactgttgggaagggcaaacaaccatttgaattgaaatataatcctgaaaatccacaacatgctattactattttaggtgatgtgactgatgattacccattacaaaaaaaagccacttcaatgtcatttttaagaaattttcctgaaatcaagcatagaactagtacattagggtcatttttacgattacggtcacatttggaattcaaattgatggaatttttccaatcaagagattttattaaagttacacctccattaattaccagttccgattgtgaaggtgctggagaagtgtttaaaatagaaccattgaatgataataatcctaaggaaccatttttcggtaaaaatgcatatttgactgtgtctactcaattacatcttgaatgtttagcattggcattaaatcgtgcatggacattaactccgtgttttcgagctgaaaattcaaatacaacaagacatttaagtgaattttggatgttagaagcagaaatttctcatgttaataatgtggatcaagttacaaccttcactgaagacatgataaaatttgtcaccaaatcattggttgaaagtagtcatagtactgagcttagcgatcttggtgctggtaatggtaatgattacttgaatggaacttatatagagaaggatgttgtgcagtcgagatggtcaaatatattgagtgctgaaagatggccacgcatgacatacactgaagcaattgaatatttgaacaaaacattacctcaggatgaacaacttatatggggggattcattacaattgaaacatgaaagacttttagcagaaaaaagtccaatatttataactgattatccagaatcacaaaaaccattctatatgttgaaatcggccaattataacgctgaaaacccaacagtggcatgttttgatttattagtacctgaatttggagaattagctggaggatcgatgagagagcatgattaccaagtgttattggctaatatgaaacaagaaaatatgaatatagaagacatggaatggtatttgaacttgcgtaaacaaggaactatcccccatggtggatttggtttaggatttgagagattaatatcttatttggctggttatgataatgttagagatatatctgcttttccgagagctcctgaattgtgtaattgttaa

SEQ ID NO: 10150 - protein, 489 aa, Candida albicans SC5314
MLIQSRFPLKALQQVSSKRFNSSSLNPTIKNQLSNPPPIGSIIEARGFVKSIRSSKKVGFVDITDGSISNNLNIVLQGPDQPKFKVGQSIVVKGDWTVGKGKQPFELKYNPENPQHAITILGDVTDDYPLQKKATSMSFLRNFPEIKHRTSTLGSFLRLRSHLEFKLMEFFQSRDFIKVTPPLITSSDCEGAGEVFKIEPLNDNNPKEPFFGKNAYLTVSTQLHLECLALALNRAWTLTPCFRAENSNTTRHLSEFWMLEAEISHVNNVDQVTTFTEDMIKFVTKSLVESSHSTELSDLGAGNGNDYLNGTYIEKDVVQSRWSNILSAERWPRMTYTEAIEYLNKTLPQDEQLIWGDSLQLKHERLLAEKSPIFITDYPESQKPFYMLKSANYNAENPTVACFDLLVPEFGELAGGSMREHDYQVLLANMKQENMNIEDMEWYLNLRKQGTIPHGGFGLGFERLISYLAGYDNVRDISAFPRAPELCNC

SEQ ID NO: 10151 - DNA, 1470 bp, Neurospora crassa OR74A
  CDS (1)..(1470)
atgtcgattgccgagtgccttcggtgggagccagaatcggaggaggacaatgtggtggtccagggctacgtccggtccgtccggggcatgaaaacccaccgcttcgtttctctcggcgacgggtcctcgctggctcctctgcaggccgttgtccccgtcgacaccaaccaggccgaaggcctggccatcggtgctgctgtccgtctcactggcaaatgggtcccctcgcctggcgcgtcccagtctcacgaaatgcaagtcacccaggtcgacatcctgggcccatccgacgcaaagacgtttcccatccaaaagaaatatcagacaccagagtacctccgcacaatcccccacttgcggccgaggacccccatcaatgctgccttgctgagaatgcgctctgaggcggtcgcggccttgactcggttttttgccgagaaccactttacccaaacacatccgcccatcctcacttcgtcagattgcgaaggtgccggagaagtgtttactgtggctccggcgtccaacgtcaccgagctttcctccacggaggacaacaagagcaagatgttttttcgcaacaaaaagtatctcaccgtgtctactcagcttcatctcgaggccttggctcagtctgtcggtaatgtctggaccctttctcccgttttccgcgccgaaaagagcgatactgcccgtcatctcagcgaattttacatgctcgaggccgagatgaactttgtcaatgacctcgacgaggtcatggaccttgcagaggacatgatccgcaacatgtgcattaccatgtacgaatcacctacagtctatgagtttcttaaccgcgagggtcgcgtcggttccgacctcgtttctcccgaggaggtgaaggctcggtgggagggcatgatggcggatgagtggccgcgtataacgtacacggatgctatcgagtttctacaagagcatgccgacgagtttgaacataagcccgtctggactgaaggcctgcattcggagcacgaaaagttcattgccgaacacgttggagacggaaagcctgtcttcgtcaccgactatcctcgcgacattaaggccttctatatgcgtgaaggccagtcactcccggatatttcctccccgggtccgacggttgagtgtttcgacttgttggtgcccgacctctgcgagattgccggcggatccatgcgtgaacaccgtctggagccgttgttggaggccatgaagcgtcacaacatcgttgctggagagttcaccagctctatggatggcaatgctcccgccggggcgaaaactggccctcttgattggtatgtcgaccttcgccgttggggctgcgctccacatggcggctatggcatcggctttgatcgactcctctgctacttgactggcgtccagacgattcgagacatggtttctttccctcgctggtttggccgatgtgattgttaa

SEQ ID NO: 10152 - protein, 489 aa, Neurospora crassa OR74A
MSIAECLRWEPESEEDNVVVQGYVRSVRGMKTHRFVSLGDGSSLAPLQAVVPVDTNQAEGLAIGAAVRLTGKWVPSPGASQSHEMQVTQVDILGPSDAKTFPIQKKYQTPEYLRTIPHLRPRTPINAALLRMRSEAVAALTRFFAENHFTQTHPPILTSSDCEGAGEVFTVAPASNVTELSSTEDNKSKMFFRNKKYLTVSTQLHLEALAQSVGNVWTLSPVFRAEKSDTARHLSEFYMLEAEMNFVNDLDEVMDLAEDMIRNMCITMYESPTVYEFLNREGRVGSDLVSPEEVKARWEGMMADEWPRITYTDAIEFLQEHADEFEHKPVWTEGLHSEHEKFIAEHVGDGKPVFVTDYPRDIKAFYMREGQSLPDISSPGPTVECFDLLVPDLCEIAGGSMREHRLEPLLEAMKRHNIVAGEFTSSMDGNAPAGAKTGPLDWYVDLRRWGCAPHGGYGIGFDRLLCYLTGVQTIRDMVSFPRWFGRCDC

SEQ ID NO: 10153 - DNA, 1653 bp, Tribolium castaneum
  CDS (1)..(1653)
atgtctggtgacagcggaaatccaatttacacatctgagaaaaccggaaacgacgattccggtctcggcaccgaagacaagccctttcaaacgatccttcgagctatgcgtcacgctggggccgaaccatttcccgtaatctacgttgacggcaaagaaggcaccaaatatgaacccgcctccaaatcacaattgaaaaaaatccaaaaaatatggctccgagagacttacaaacaatcaagtgtcgccaaacgcgaggaagaagacgccgcaaaacgcgaaaaaaatctcgaagaagcgacaaaaatcacactaactgaagacaaatccttgccggcggccaaattgatcaaaatcgccaaaggcaaagagttcagagatcaaagagtgaagatttacggatgggtgcacaggctgcgccgacaggggaaaaacctgatgtttatcacgttgagggatgggacgggatttttgcaaagtgtactcactgataagctttgtcaaacttataacgcacttgttttatcgaccgagtcgtcggttttgctttatggtagtttgaaaaaagtaccagagggtaaaacagcgccaggtgggcatgagttggctgtggactactgggaattggtggggttagcgccacctggcggcgccgactcgatactaaacgagcaggctttgccagacgttcaggccgaaaatcgccacattatgataaggggcgaaaacacctcaaaaattttgcgaatgcgatcagtccttctacaggcgttcagggaccactatttggatcgcggttactgtgaagtaacaccgccatctatcgtccaaactcaatgtgaagggggctcgactttattcaaaatggactattttggtgaggaggcctacttgacccagagctcgcagctgtacttggagacgtgtttgccctccatgggggacgttttttgcattgcggagagttttagggctgagcagagccgcactaggcggcatttggccgaatacacacatgtggaggccgaatgccctttcatttccttcaatgatttgttggaccgtctcgaggaccttatttgtgatgttgttgaccgcgttttgaagtctccttatggagatattgtccatgaactgaacccagactttcaagtaccgacacgaccattcctccgaatgaactattccgatgccatcgactacctcaagaagaataatatcacaaaggaggatggcagtttttacgaatttggggaggatattcctgaaatgcctgaacgaaaaatgaccgaccagatcaacaaacccattatgttgtgccgttttccggcaaatattaaatcgttttacatgtccaaatgcccagaggatgcgcgtttgactgaaagtgtggacgttttgttgccgaatgttggcgaaattgttggagggtcgatgaggatacacaatttggaggaacttatggatgggtataaacgggaaggcatagacccgaccccgtacttctggtacacggaccagagaaagtacgggacgtgcccccatgggggctacggcctcggattggagcggtttgtctgttggttgttgaacagataccacattagagaggtgtgtctctacccccggtacttgcaccactgtaaaccctaa

SEQ ID NO: 10154 - protein, 550 aa, Tribolium castaneum
MSGDSGNPIYTSEKTGNDDSGLGTEDKPFQTILRAMRHAGAEPFPVIYVDGKEGTKYEPASKSQLKKIQKIWLRETYKQSSVAKREEEDAAKREKNLEEATKITLTEDKSLPAAKLIKIAKGKEFRDQRVKIYGWVHRLRRQGKNLMFITLRDGTGFLQSVLTDKLCQTYNALVLSTESSVLLYGSLKKVPEGKTAPGGHELAVDYWELVGLAPPGGADSILNEQALPDVQAENRHIMIRGENTSKILRMRSVLLQAFRDHYLDRGYCEVTPPSIVQTQCEGGSTLFKMDYFGEEAYLTQSSQLYLETCLPSMGDVFCIAESFRAEQSRTRRHLAEYTHVEAECPFISFNDLLDRLEDLICDVVDRVLKSPYGDIVHELNPDFQVPTRPFLRMNYSDAIDYLKKNNITKEDGSFYEFGEDIPEMPERKMTDQINKPIMLCRFPANIKSFYMSKCPEDARLTESVDVLLPNVGEIVGGSMRIHNLEELMDGYKREGIDPTPYFWYTDQRKYGTCPHGGYGLGLERFVCWLLNRYHIREVCLYPRYLHHCKP

SEQ ID NO: 10155 - DNA, 1371 bp, Tribolium castaneum
  CDS (1)..(1371)
atgttcataaacattctaaacaaaaatttctcttcaatctctcagatacttgacaaaagtggtgttggcgatgtcataacagtgaagggatggataaaatcgttacgggaccagaaagaacatgtgtttttcgacgtaagcgatggttcaactgccaaaaaactccaaattttgcttcctaaaaaatcaaaaccggaagatctatcgaccggggcttccgtagtagtttcaggaccccttactctatcaccgaaaggccagttggaattaacggcaaacagtatcgaagtctgcggtaaatgcgtcgtaagcgaaggctatccttttgcgccacgtaaacagtacgccgctgaatatatcaggcagtatctccacttcaggccaagaacacacaaatttggggcacttttgcgattacggaatgcggcaacgttggctatttataatcattttaattcggaaggttttgttaatgtgcatacgccagtcttgacttctaacgattgtgaaggggctggagaggtgtttaaagtagtccctgacaataaaaagttgatcaaatcaatggcgaaagagagccaagctgaagatgaggtctactttaatcagaaatcgtttttgacggtctcggggcagttgcatttagaagctgtagctcatggtttaagcaaagtttacactttcgggcccacttttagggccgaaaattccaaatcaagactgcatttgtccgaattttatatgttggagggagaaattgcgtttgtggaaaaactagatgggcttatgacctgcatagaacaattaattaaacaagttacaaaaaaactagtcaatgattcaattgaagacatcgaaaaatgccaagagaaaaaagtgtcgttcgattggttggataaaagttttcctgtggttacgtacaaagaagcggtaacaattttaagtcagaataaagataagtttagcgaaaattttgattccaaagatggttttggtaaagaacatgagatgttcctggttgaatatttcggaaaagtgcccacttttgtcatagactggccaaaagacatgaaacccttttatatgaaagacaatggggacggaaccgtggccgcacttgacttattggggcctaatgttggcgaggtcgttggcggaagtctgcgtgaaaataattacgagaaattgctagaaaaaatccccaattccaatgggcacttggactggtatttggacttgaggaaatttggatcggtgccaactggcggatttggtttaggttttgaaagatatttgcaactaattttgggaataagcaatatcaaagacacgattccctttcccagatggccgcataattgcagtttgtag

SEQ ID NO: 10156 - protein, 456 aa, Tribolium castaneum
MFINILNKNFSSISQILDKSGVGDVITVKGWIKSLRDQKEHVFFDVSDGSTAKKLQILLPKKSKPEDLSTGASVVVSGPLTLSPKGQLELTANSIEVCGKCVVSEGYPFAPRKQYAAEYIRQYLHFRPRTHKFGALLRLRNAATLAIYNHFNSEGFVNVHTPVLTSNDCEGAGEVFKVVPDNKKLIKSMAKESQAEDEVYFNQKSFLTVSGQLHLEAVAHGLSKVYTFGPTFRAENSKSRLHLSEFYMLEGEIAFVEKLDGLMTCIEQLIKQVTKKLVNDSIEDIEKCQEKKVSFDWLDKSFPVVTYKEAVTILSQNKDKFSENFDSKDGFGKEHEMFLVEYFGKVPTFVIDWPKDMKPFYMKDNGDGTVAALDLLGPNVGEVVGGSLRENNYEKLLEKIPNSNGHLDWYLDLRKFGSVPTGGFGLGFERYLQLILGISNIKDTIPFPRWPHNCSL

SEQ ID NO: 10157 - DNA, 1401 bp, Yersinia enterocolitica subsp. enterocolitica 8081
  CDS (1)..(1401): transl_table=11
atgagcgtagtgcctgtagtcgacgtactgcaaggccgtgctgcggttgacagtgaagtcaccgtgcgcggttgggtgcgtacccggagagattctaaagcgggtatctccttcgttgccgtttatgacggttcctgctttgacccgttacaggccgtcgtaaataatactttgcctaattatcaggacgaagtactgcatttaactaccggctgttcagtagaagtgactggcaccgtagtggcatcaccgggtgaagggcagagttttgaaattcaggccaccgctatcaaagtggtcggttgggttgatgatcccgatacttacccaatggcagcaaaacgtcacagtatcgaatacttgcgcgaagtcgctcacttgcgtccgcgcactaacctgatcggtgcagtggctcgtgttcgccatactttggcacaagctattcaccgtttcttcgatgagaacggttacttttgggtttcaacaccgctaatcacggcatctgatactgaaggtgcgggtgaaatgttccgtgtatcgacgttagatctggaaaacctgccgcgcactgatactggcgctgtcgatttcagtgaagatttcttcggtaaagaagccttcctgacggtatccggtcagcttaacggcgaaacctacgcctgcgcgttatccaaagtttacactttcggcccgactttccgtgctgaaaactctaacaccagccgtcatctggctgagttctggatggtagagccagaagtcgcctttgcgtcattagatgatgtcgccggtttagcagagaaaatgttgaaatacgtcttccaagcggtgttaaacgaacgcgctgacgacatgaagttctttgccgagcgcgtcgataaagatgcggttgatcgcttgcagcgctttgtcacctcggactttgctcaggttgactacactgatgctattgagatcttgctggcatcaggccagaagtttgagaatgatgtctcctggggcatagatttgtcttctgagcatgagcgctatttagctgagcaacactttaaagcgccagtagtggttaaaaactatccgaaagatatcaaagcattctatatgcggatgaacgaagatggtaaaaccgtggcagcaatggatgttctcgcaccgggtattggcgaaatcatcggtggttcacaacgtgaagagcgtttagatgtgctggatgcacgtttggcagaaatgggcctcaataaagaagattattggtggtatcgtgatctgcgtcgctatggcacggtgccacattcaggctttggccttggatttgagcgtttgatctcatatgtaacaggggttcaaaacgttcgggatgtcattccgttcccacgcacaccgagaaatgccagtttctaa

SEQ ID NO: 10158 - protein, 466 aa, Yersinia enterocolitica subsp. enterocolitica 8081
MSVVPVVDVLQGRAAVDSEVTVRGWVRTRRDSKAGISFVAVYDGSCFDPLQAVVNNTLPNYQDEVLHLTTGCSVEVTGTVVASPGEGQSFEIQATAIKVVGWVDDPDTYPMAAKRHSIEYLREVAHLRPRTNLIGAVARVRHTLAQAIHRFFDENGYFWVSTPLITASDTEGAGEMFRVSTLDLENLPRTDTGAVDFSEDFFGKEAFLTVSGQLNGETYACALSKVYTFGPTFRAENSNTSRHLAEFWMVEPEVAFASLDDVAGLAEKMLKYVFQAVLNERADDMKFFAERVDKDAVDRLQRFVTSDFAQVDYTDAIEILLASGQKFENDVSWGIDLSSEHERYLAEQHFKAPVVVKNYPKDIKAFYMRMNEDGKTVAAMDVLAPGIGEIIGGSQREERLDVLDARLAEMGLNKEDYWWYRDLRRYGTVPHSGFGLGFERLISYVTGVQNVRDVIPFPRTPRNASF

SEQ ID NO: 10159 - DNA, 1401 bp, Shewanella baltica OS155
  CDS (1)..(1401): transl_table=11
atgagcatcgcatctgtcgcatctgtatttaaaggtgagcacgccgtcggttctaaagtcacagttcgtggctgggtcagaacccgtcgtgactctaaagccggcatctcttttttagctgtttatgacggctcttgctttaatcctatccaaggtgtcgtgcccaatagcttagataattacgacaacgaagtgttaaagctgactgcgggttgttctgttgtgatgacaggcgacgtggtggagtctccaggcgcaggtcaagcatttgaactgcaagtgactgatattgaagtcgcgggctgggttgatgatccagacacttacccaatggccgctaaacgtcactcaattgaacatttacgtgaattagcgcacttacgcccacgcactaacattattggtgccgttgcccgcgtgcgtaactgtttatcccaagcgattcaccgcttctaccacgaagaaggctttatttgggtatcgaccccacttatcaccgcctctgactgtgaaggcgccggtgaaatgttccgcgtatcgaccttagatatggaaaacctgccacgtactgatgcagggaaagtcgattacgataaagatttcttcggtaaagaagctttcctaaccgtatctggccagttgaacgctgaaacatacgcctgtgcactgtcaaaagtgtatacctttggcccaactttccgtgctgaaaactcaaacaccagccgccacttagcggaattttggatggttgagcctgaagtggccttcgctaacttaaacgacatcgctggccttgccgaagctatgttgaaatacgcattcaatgccgtattgactgagcgtatggacgatttaactttcttcgcccagcacgttgataagacagtgatcgaccgtctgcaatctttcgtttcaagtgattttgctcaagtggattacacagatgcggttgaaattctgcaaaactgtggcagaaccttcgagttcccagtgtcttggggtatcgacttatcttctgagcatgagcgttacttagccgaagaacacttcaaagcccctgtggttgtgaagaactatccaaaagatatcaaagccttctacatgcgcttaaacgatgacggtaaaaccgttgccgcgatggacgtgttagccccaggtatcggtgaaatcatcggtgggtctcaacgtgaagagcgtttagacgtgctggatatgcgtttagccgaaatggatctgaaccaagaagattactggtggtaccgtgatatgcgccgttatggcacagtgccacacgccggttttggtctagggtttgagcgtttagtgtcttacgtgacgggcgttaacaacattcgtgatgttatcccgttcccacgtgcaccgcgcactgcgaacttctaa

SEQ ID NO: 10160 - protein, 466 aa, Shewanella baltica OS155
MSIASVASVFKGEHAVGSKVTVRGWVRTRRDSKAGISFLAVYDGSCFNPIQGVVPNSLDNYDNEVLKLTAGCSVVMTGDVVESPGAGQAFELQVTDIEVAGWVDDPDTYPMAAKRHSIEHLRELAHLRPRTNIIGAVARVRNCLSQAIHRFYHEEGFIWVSTPLITASDCEGAGEMFRVSTLDMENLPRTDAGKVDYDKDFFGKEAFLTVSGQLNAETYACALSKVYTFGPTFRAENSNTSRHLAEFWMVEPEVAFANLNDIAGLAEAMLKYAFNAVLTERMDDLTFFAQHVDKTVIDRLQSFVSSDFAQVDYTDAVEILQNCGRTFEFPVSWGIDLSSEHERYLAEEHFKAPVVVKNYPKDIKAFYMRLNDDGKTVAAMDVLAPGIGEIIGGSQREERLDVLDMRLAEMDLNQEDYWWYRDMRRYGTVPHAGFGLGFERLVSYVTGVNNIRDVIPFPRAPRTANF

SEQ ID NO: 10161 - DNA, 1404 bp, Actinobacillus pleuropneumoniae L20
  CDS (1)..(1404): transl_table=11
atgtctaaatttccaacagtttcggaaatcctatcgggcaaagtagcggtaggcgaagaagttgcggtacgcggttgggtacgtacccgccgtgactcaaaagcaggtttatcatttttagccgtttatgacggttcttgtttcgatccgatccaatcgatcattaataacgatttagcaaattataacgatgaagtattacgtttaaccgcaggttgttccgttatcgtcaccggtaaagtggttgaatcgccggcagaaggtcaagcggtcgaattacacgcaacgcacgtggaagtggtcggttgggttgaagatccggatacttatccgatggcggcaaaacgtcactcaatcgaatatttacgtgaagttgcgcacttacgtcctcgtaccaacttaatcggtgcggttgcgcgtgttcgtcactgcttagcacaagcgattcaccgtttctttaacgagcaaggtttctactgggtagcgactccgcttattactgcatcggatacggaaggcgcgggcgaaatgttccgtgtttcaacattagatttagaaaacttaccgcgcactgaggaaggcaaagtcgattttagccaagactttttcggtaaagagtctttcttaaccgtatcaggtcagttaaacggcgaaacttacgcttgtgcattaagcaaagtttatacgttcggcccgacattccgtgcggaaaactcaaataccactcgccacttagcggaattctggatggttgagcctgaatttgcattcgcaaccttagcggacaatgcaaaattagcggaagatatgctgaaatatgtgtttaaagcggtacttgaagagcgtaaagacgatatgcaattcttcgcaaaacacattgataaagatgtcattactcgcttagaaaactttatcgctgcaccgtttgcgcaagttgattacaccgatgcaattgaaatcttattaaaatcaggtaaagaatttgaattcccggtttcttggggtatcgatctttcttccgaacacgagcgtttcttagcggaagaatatttcaaatcgccggtggttgtgaaaaactatccgaaagacattaaagcattctatatgcgtttaaacgatgacggtaaaaccgtggcggcaatggacgtattagcaccgggaatcggtgagattatcggcggttcacagcgtgaagaacgtttagacgtattagacacacgtatggttgaaatgggcttaaatccggaagattactggtggtaccgcgatttacgtaaatacggtacggttccgcactccggcttcggcttaggttttgaacgtttaatcgtttatgtaaccggtttacaaaatatccgtgaagtaattccgttcccacgtgcaccgcgtaatgcgaatttctaa

SEQ ID NO: 10162 - protein, 467 aa, Actinobacillus pleuropneumoniae L20
MSKFPTVSEILSGKVAVGEEVAVRGWVRTRRDSKAGLSFLAVYDGSCFDPIQSIINNDLANYNDEVLRLTAGCSVIVTGKVVESPAEGQAVELHATHVEVVGWVEDPDTYPMAAKRHSIEYLREVAHLRPRTNLIGAVARVRHCLAQAIHRFFNEQGFYWVATPLITASDTEGAGEMFRVSTLDLENLPRTEEGKVDFSQDFFGKESFLTVSGQLNGETYACALSKVYTFGPTFRAENSNTTRHLAEFWMVEPEFAFATLADNAKLAEDMLKYVFKAVLEERKDDMQFFAKHIDKDVITRLENFIAAPFAQVDYTDAIEILLKSGKEFEFPVSWGIDLSSEHERFLAEEYFKSPVVVKNYPKDIKAFYMRLNDDGKTVAAMDVLAPGIGEIIGGSQREERLDVLDTRMVEMGLNPEDYWWYRDLRKYGTVPHSGFGLGFERLIVYVTGLQNIREVIPFPRAPRNANF

SEQ ID NO: 10163 - DNA, 1398 bp, Clostridium difficile 630
  CDS (1)..(1398): transl_table=11
atgcaaaaggaatttataacagtaaaagaattgtacagagaaaaagaacagtacatagggaagactgtaaaagtagctggatggataagaacatctagagtatctaaaaattttggatttatagagctaaatgatggaagcttctttaaaaatatgcagatagtatttgatgagaaagtagaaaattttaaagaggtaggaaaattagcaataagctcatctatacttgtagagggagagttagtatctacagaaggggctaaacaaccagtcgaaatacatgcaaaaagcatagttgtagaaggggaatcagatagttcgtatccactacaaaagaagagacatacgcttgaatatttaagaacgatagcacatttaagaccaagaagtaatactttttcagctgtatttagagtaagatcaatagctgcctatgcaatacacaaattcttccaagaaagaaactttgtatatgcacattctccaatcataacaggtagtgactgtgaaggtgcaggagagatgtttagaataacaactatggatttaaatgatattccaaaaactgaagatggcaaaatagactatactcaagatttctttggaaaagaggctaatttaacagttagtggtcaattaaatgccgagataatggcactttcttttagaaatgtttatacttttggacctacatttagagctgaaaactcttatacaggaagacatgcttcagaattttggatgatagagccagaaatagtttttgcagaccttgaagataacatggaacttgcagaagatatgataaaatatgttataagctatgtattagaaaatgctcctgaagaaatggaattttttaatagttttatagataaaggattgttagaaaggttaaataagatagtaaactctgagtttattagaataacgtatactaaagcagtggaattattaattgaatctgggcatgaatttgagtatcctgttgagtggggatgtgaccttcaaacagagcatgaaagatatataacggagcaaatatataattgtccagtgtttgttacagattatccaaaagatataaaagctttctatatgagaatgaatgaagatggtaaaactgttagagcaatggatttactagttcctggagttggagaaatcgtaggaggttctcaaagagaagaaagagaagatgtattgttagatagaattaatgaaatgggattaagagaagaagattattggtggtatttagaacttagaaagtttggtactgctactcactctggatttggtcttggatttgaaagaataattatgtatatgacaggtatgtctaacataagagacgttatacctttcccaagaactcctaaaaatgctgaattttaa

SEQ ID NO: 10164 - protein, 465 aa, Clostridium difficile 630
MQKEFITVKELYREKEQYIGKTVKVAGWIRTSRVSKNFGFIELNDGSFFKNMQIVFDEKVENFKEVGKLAISSSILVEGELVSTEGAKQPVEIHAKSIVVEGESDSSYPLQKKRHTLEYLRTIAHLRPRSNTFSAVFRVRSIAAYAIHKFFQERNFVYAHSPIITGSDCEGAGEMFRITTMDLNDIPKTEDGKIDYTQDFFGKEANLTVSGQLNAEIMALSFRNVYTFGPTFRAENSYTGRHASEFWMIEPEIVFADLEDNMELAEDMIKYVISYVLENAPEEMEFFNSFIDKGLLERLNKIVNSEFIRITYTKAVELLIESGHEFEYPVEWGCDLQTEHERYITEQIYNCPVFVTDYPKDIKAFYMRMNEDGKTVRAMDLLVPGVGEIVGGSQREEREDVLLDRINEMGLREEDYWWYLELRKFGTATHSGFGLGFERIIMYMTGMSNIRDVIPFPRTPKNAEF

SEQ ID NO: 10165 - DNA, 1401 bp, Enterobacter sp. 638
  CDS (1)..(1401): transl_table=11
atgagcgttgtgcctgtagccgacgtactccagggccgcgtcgccgttgaccaagaagtcaccgtgcgcggatgggtgcgtactcgccgagattctaaagctggcatctccttcctcgccgtctatgacggttcctgctttgatcctgtacaggccgtcattaataattctctgcccaattacaatgacgacgttctgcacctgacgaccggttgctccgtcatcgttacgggtgttgtggtcgcttccccgggtcaaggccagagctttgaactgcaggcgacggcaattgaagtcactggctgggttgaagatcctgacacctacccaatggcggctaaacgccatagcattgagtatctgcgtgaagtcgctcacctgcgcccgcgcaccaacatgatcggcgccgtggcccgtgtgcgccacactctggcgcaggccctgcatcgcttcttcgatgagcagggttacttctgggtttccaccccgctgatcaccgcatcagataccgaaggtgcgggcgaaatgttccgcgtttcaacattagatctggaaaacttaccgcgtacgcctgaaggcaaagtcgatttcgacaaagacttctttggtaaagaagcattcctgaccgtctccggccagctgaacggcgaaacttacgcctgtgcgctgtctaagatctataccttcggccctactttccgcgcggaaaactctaacaccagccgtcacctggcggagttctggatgcttgagccagaagtggctttcgcgaacctgaacgatgttgcgggtctggcagaagcaatgctgaagtacgtcttcaaagcagttctggaagaacgtgctgatgacatgaaattcttcgctgagcgtgtcgacagcgatgcggttgcacgtctggagcgtttcgtctccgctgatttcgctcaggtggattacaccgacgcggtggctatcctggaaaaatgcggtgagaaattcgagaacccggtttattggggcgtcgatttgtcttccgaacacgaacgttatctggctgagaaacactttaaagccccggtcgtggtgaaaaactatccgaaagacattaaggccttctatatgcgccttaacgaagacggtaaaaccgtcgccgcaatggacgtgcttgcgccaggcatcggtgaaatcatcggtggttcccagcgtgaagagcgcctggacgtgctggacgcacgtatggaagagatgggtctgaacccggcagattacagctggtatcgcgaccttcgtcgttacggcaccgtgccacactcaggctttggtctgggcttcgaacgtctgatcgcctatgtcaccggtgttcagaacgtacgtgacgtaatcgccttcccaagaacgccgcgcaacgccagtttctaa

SEQ ID NO: 10166 - protein, 466 aa, Enterobacter sp. 638
MSVVPVADVLQGRVAVDQEVTVRGWVRTRRDSKAGISFLAVYDGSCFDPVQAVINNSLPNYNDDVLHLTTGCSVIVTGVVVASPGQGQSFELQATAIEVTGWVEDPDTYPMAAKRHSIEYLREVAHLRPRTNMIGAVARVRHTLAQALHRFFDEQGYFWVSTPLITASDTEGAGEMFRVSTLDLENLPRTPEGKVDFDKDFFGKEAFLTVSGQLNGETYACALSKIYTFGPTFRAENSNTSRHLAEFWMLEPEVAFANLNDVAGLAEAMLKYVFKAVLEERADDMKFFAERVDSDAVARLERFVSADFAQVDYTDAVAILEKCGEKFENPVYWGVDLSSEHERYLAEKHFKAPVVVKNYPKDIKAFYMRLNEDGKTVAAMDVLAPGIGEIIGGSQREERLDVLDARMEEMGLNPADYSWYRDLRRYGTVPHSGFGLGFERLIAYVTGVQNVRDVIAFPRTPRNASF

SEQ ID NO: 10167 - DNA, 1407 bp, Parabacteroides distasonis ATCC 8503
  CDS (1)..(1407): transl_table=11
atggaaacaattaaacgaacaaaaattgtagacgtactgaaaagcgacgctttcggtactaccgtgaacgtgaaaggatgggttcgcacccgccgtggtagcaaacaggtgaattttatcgccttgaatgacggttctacaatcaataatgttcagatcgttgtggatgtagataaattgggtgatgagttcttgaaaccgattaccacgggagctagtatcagcgtaaacggtatcttgacacaatcccaaggcaaggggcaaagcgtggagatacaggctaccgagattgagatcttcggtacggctgatccagctacttatccgttgcagaaaaagggacactccatggagtttttacgtgagatcgctcacttgcgtcctcgtacgaatacatttggcgcggtattccgtattcgtcacaatatggcttacgctatccataagtttttccatgatagaggctttttctatttccatacgccgatcatcacggcttccgactgtgagggtgccggacagatgttccaagttactaccaaaaatttgtacgacttgaaaaaggatgagaatggctctatcatttatgaggacgatttcttcggcaagcaggctagcttgacggtttccggacagttggagggtgagttggcagctacagccttgggacagatttatacgtttggccctacgttccgcgctgagaactcaaatacgcctcgtcatttggcggaattctggatgattgagccggaagtcgcttttaatgatatcacggacaatatggagttggccgaggagttcattaaatattgcgtacaatgggcgttggataactgtatggaggatatcaagttcttgaacgatatgttcgataaggaattgatcgctcgtctggaaggggtcttgaaagactcattcgttcgcttgccgtacactgaaggaatcaagatattggaagaggctgtcgctaaaggacataaatttgagttccctgtttattggggtgtagacttggcttctgagcatgaacgtttcttggtggaggatcacttcaaacgtccggtaattttaacggattacccgaaagagatcaaggctttctatatgaagcaaaacgaggatggaaagacggtgcgtgccatggacgtattgttcccgaagatcggagagatcatcggcggttccgagcgtgaggccgactatgataagctaatgactcgtattgatgagttgggcatcccgatgaaggatatgtggtggtacttagatactcgccgttttggtacggtgcctcactctggtttcggtttgggctttgagcgtcttttgctgtttgttacaggcatggcaaatatacgtgacgtgatacctttcccgcgtacaccgaataatgctgagttctaa

SEQ ID NO: 10168 - protein, 468 aa, Parabacteroides distasonis ATCC 8503
METIKRTKIVDVLKSDAFGTTVNVKGWVRTRRGSKQVNFIALNDGSTINNVQIVVDVDKLGDEFLKPITTGASISVNGILTQSQGKGQSVEIQATEIEIFGTADPATYPLQKKGHSMEFLREIAHLRPRTNTFGAVFRIRHNMAYAIHKFFHDRGFFYFHTPIITASDCEGAGQMFQVTTKNLYDLKKDENGSIIYEDDFFGKQASLTVSGQLEGELAATALGQIYTFGPTFRAENSNTPRHLAEFWMIEPEVAFNDITDNMELAEEFIKYCVQWALDNCMEDIKFLNDMFDKELIARLEGVLKDSFVRLPYTEGIKILEEAVAKGHKFEFPVYWGVDLASEHERFLVEDHFKRPVILTDYPKEIKAFYMKQNEDGKTVRAMDVLFPKIGEIIGGSEREADYDKLMTRIDELGIPMKDMWWYLDTRRFGTVPHSGFGLGFERLLLFVTGMANIRDVIPFPRTPNNAEF

SEQ ID NO: 10169 - DNA, 1395 bp, Clostridium beijerinckii NCIMB 8052
  CDS (1)..(1395): transl_table=11
atggcaaaatcaattttaattagaagtctttacagaaatactgatgatttcttatcaaaagaaataacaatatcaggttggataagaactttaagatcatctaacgcttttggatttatagaagttaatgatggttctttctttaaaaatattcaagtagtttttgacgataagttaaataacttcaaagaaatatctaaattacctataagttcatcaatttcagttattggtatcttagttgctactcctgaagcaaaacaaccttttgaaattcaggctaagaatattattatcgaaggtatgtcaaactctgattatccacttcaaaaaaagagacacacttttgaatacttaagaacaatagctcatttgaggcctagaagtaatgcatttgctgcaacttttagagttcgctctgttgctgcttatgcaatacataagttctttcaagatcaaaatttcgtgtatactcacacaccaataataactggtagcgattgtgaaggtgctggagaaatgttcagggtaacaacgcttgatcctaaaactcctgaattaagtaaagatggaagtgtagatttcagcaaggatttctttggcaaagagactaatcttactgtatctggtcagttaaatgctgaatgctttgctttagcgtttagaaatatctatacatttggaccaacattcagagctgaaaattcaaacactacaagacatgctgctgaattttggatgattgaacctgaaattgcctttgcagatttacaagatgatatggaacttgctgaaaatatgcttaaatatgttattaaatatgttatggatgaatgtcctgaggaattagagttctttaatcaatttgttgataaaggtttattagaaagattaaatcacgtagtttcatcagattttgctaaagttacgtatacagaagctgttgaaatactacaaaagtgtggaaagaaatttgattacgatgtatcatggggcattgatttacaaacagagcacgaaagatatcttactgaagaacactttaaaaagccactatttgtaacagactatcctaaagatattaaagctttctatatgagattaaatgatgatggaaaaacagtagctgctactgatcttttggtaccaggaatcggagaaattataggtggtagccaaagagaagaaagactagatgtgctaaaagatagaatgactgaattaaacctatctgaagatgattactggtggtatttagaattaagaaaatatggagaaactaagcacgctggttttggtttaggtttcgaaagattaattatgtatataacaggaatgactaatattagagacgtagttccattccctagaactcctggaacaagcgagttctaa

SEQ ID NO: 10170 - protein, 464 aa, Clostridium beijerinckii NCIMB 8052
MAKSILIRSLYRNTDDFLSKEITISGWIRTLRSSNAFGFIEVNDGSFFKNIQVVFDDKLNNFKEISKLPISSSISVIGILVATPEAKQPFEIQAKNIIIEGMSNSDYPLQKKRHTFEYLRTIAHLRPRSNAFAATFRVRSVAAYAIHKFFQDQNFVYTHTPIITGSDCEGAGEMFRVTTLDPKTPELSKDGSVDFSKDFFGKETNLTVSGQLNAECFALAFRNIYTFGPTFRAENSNTTRHAAEFWMIEPEIAFADLQDDMELAENMLKYVIKYVMDECPEELEFFNQFVDKGLLERLNHVVSSDFAKVTYTEAVEILQKCGKKFDYDVSWGIDLQTEHERYLTEEHFKKPLFVTDYPKDIKAFYMRLNDDGKTVAATDLLVPGIGEIIGGSQREERLDVLKDRMTELNLSEDDYWWYLELRKYGETKHAGFGLGFERLIMYITGMTNIRDVVPFPRTPGTSEF

SEQ ID NO: 10171 - DNA, 1392 bp, Alkaliphilus metalliredigens QYMF
  CDS (1)..(1392): transl_table=11
atgaagacagtatcagttaaagaaatttatcgtcaaaccgagcaatatgcaggtcaatcaattcgtgttgaaggctggattcgaacattacgtgcatcaaaggcttttggttttattgaattgaatgatggaacattttttaaaaacattcagatcgtctttgatgaagatctacataactttagtgacgtaagtaaatttactattagttcagccatcataatagagggtacattagaaatcacacctggtgcaaagcagccctttgaaattaaggcaacaaatgtagaattagaagcgcactcccacaaggattatccacttcagaagaaacgacatacatttgagtacttaagacaaattgctcatttaagaccaaggagtaatgccttttcggctgtatttagagtaagatccattgcagcctttgccattcatcaattctttcaagagaagggctttgtttacacccatacccctattgtgacaggcagtgatgctgaaggggcaggagaaatgtttagagtttcaaccctagactttaaaaatatccctttagatgaagaacaacaagttgacttcaagaaagatttctttgggaaggaaacaagcctgacagtcagtggacaactagctgctgaggcctatgcattagccttcaagaaggtttatacatttggaccaacatttagagcagaaaattccaatactgctagacatgcatcagagttttggatgatcgagcctgagattgcctttgcagaccttcaggacaacatggaattagctgaggatatgttaaagtatatgattcggtacgtcatggaacaggcacctgaagagcttgaatttttcaatcagtttgttgataaaggattgatcgatagattaaaccatgtggcgaattctgaatttggaaaggtaacctatacagaggctgtcaaaatgttgcaagaatcaggagaggaatttgagtatcctgtggaatggggacatgaccttcaaacagaacatgaacgatacttaacagaaaaagtatttaaaaagccagtgtttgtcatggactatccaaaggatattaaggctttttatatgagaatgaatgatgataataaaactgttgcggctatggacttgttagtgccggggataggagaaattatcggtggaagtcaaagagaagaaagattagatgtattaacagatcgaatgaaacaaatgggattagatgaagaagagtattggtggtatttagaactaagaaaatatggtggtgtcaaacatgctggatatggacttggttttgaaagagcgattatgtatttaacaggaatggctaatattcgtgacgttatttcctatccaagaacaccaaaatctgcagaattttag

SEQ ID NO: 10172 - protein, 463 aa, Alkaliphilus metalliredigens QYMF
MKTVSVKEIYRQTEQYAGQSIRVEGWIRTLRASKAFGFIELNDGTFFKNIQIVFDEDLHNFSDVSKFTISSAIIIEGTLEITPGAKQPFEIKATNVELEAHSHKDYPLQKKRHTFEYLRQIAHLRPRSNAFSAVFRVRSIAAFAIHQFFQEKGFVYTHTPIVTGSDAEGAGEMFRVSTLDFKNIPLDEEQQVDFKKDFFGKETSLTVSGQLAAEAYALAFKKVYTFGPTFRAENSNTARHASEFWMIEPEIAFADLQDNMELAEDMLKYMIRYVMEQAPEELEFFNQFVDKGLIDRLNHVANSEFGKVTYTEAVKMLQESGEEFEYPVEWGHDLQTEHERYLTEKVFKKPVFVMDYPKDIKAFYMRMNDDNKTVAAMDLLVPGIGEIIGGSQREERLDVLTDRMKQMGLDEEEYWWYLELRKYGGVKHAGYGLGFERAIMYLTGMANIRDVISYPRTPKSAEF

SEQ ID NO: 10173 - DNA, 1392 bp, Bacillus cereus subsp. cytotoxis NVH 391-98
  CDS (1)..(1392): transl_table=11
atggaaaacacattagtaaaaagtctgtacagagaaacagataaatatgtagatcaaaaagtgcaagtatctggttggattcgtaacttacgtgattcaaaagtatttggctttatcgaattaaatgatggtagcttctttaaaagtgtacaaatcgtttttgatacagaattagataactttaaggaaattacaaaattaccgcttagctcctctattagagtagaagggaagttcattgcaacacctactgcaaaacaaccatttgaaattaaagcagaaaaaatcgaaattgaaggcttatcagattctgattacccacttcaaaagaaacgccatacgtttgaatacttacgtacaatcgctcacttacgtccaagaacaaatgcattctctgcaacgttccgtgtgcgttctatcgcagcttacgcgattcataagttcttccaggagcgcggctttgtccatgttcatacaccaattattactggtagcgatacagaaggtgcaggtgaaatgttccgcgtaacaacacatgacatgaacaacctaccaaaaggagaagatggacaagtagacgattcgaaagacttcttcggtagagaaacaaacttaacagtaagtggtcaacttcctgctgaagcttatgcattagcgttccgtgatgtatatacattcggacctacattccgtgcggaaaactcaaacacaactcgtcatgcagctgagttctggatggtggagccggaaattgcatttgctgaactggaagatgtaatggatcttacagaagatatgctaaaatatgcaatgaaatacgtgttagagcatgcaccagaagaaatggaattcttcaacaaatttgttgataaaacagttcttgagcgcatgaacaatgtcattaactctgactttggtcgcatcacatacacagaagcaattaaggtacttcaagaatcaggtgctgacttcaaatacccagtagaatggggcattgatttacaaacagagcatgaaagatatttatcagaacaagtctttaaacgtcctgtattcgtaacagactatccaaaagatattaaagcattctacatgcgtatgaacgatgatggtaaaacagtagctgctactgatcttcttgttcctggcatcggcgaattaatcggcggaagtcaacgtgaagaaagaatggatgttttagtagacagaatcaaagaattaggcatgaaagaagaagactactggtggtacttagaacttagaaaatacggcggtacaaaacacgctggattcggtctaggctttgaacgtttcttaatgtacatcactggtatggggaatatccgtgacgtaattccattcccaagaacgccaggttctgcggagttttaa

SEQ ID NO: 10174 - protein, 463 aa, Bacillus cereus subsp. cytotoxis NVH 391-98
MENTLVKSLYRETDKYVDQKVQVSGWIRNLRDSKVFGFIELNDGSFFKSVQIVFDTELDNFKEITKLPLSSSIRVEGKFIATPTAKQPFEIKAEKIEIEGLSDSDYPLQKKRHTFEYLRTIAHLRPRTNAFSATFRVRSIAAYAIHKFFQERGFVHVHTPIITGSDTEGAGEMFRVTTHDMNNLPKGEDGQVDDSKDFFGRETNLTVSGQLPAEAYALAFRDVYTFGPTFRAENSNTTRHAAEFWMVEPEIAFAELEDVMDLTEDMLKYAMKYVLEHAPEEMEFFNKFVDKTVLERMNNVINSDFGRITYTEAIKVLQESGADFKYPVEWGIDLQTEHERYLSEQVFKRPVFVTDYPKDIKAFYMRMNDDGKTVAATDLLVPGIGELIGGSQREERMDVLVDRIKELGMKEEDYWWYLELRKYGGTKHAGFGLGFERFLMYITGMGNIRDVIPFPRTPGSAEF

SEQ ID NO: 10175 - DNA, 1392 bp, Clostridium botulinum F str. Langeland
  CDS (1)..(1392): transl_table=11
atggatataactttagtaaaatcactttatagagaagcagaaaaatacatggataaagaagttaaaattaatggatgggtaagaactgtaagagattctaaaaactttgcctttgtagaagtaaatgacggaagtttctttaaaaatgttcaagtaatacttgagtcttctttagaaaactttaaggaactatgtaaaatgccaataagtacatcagtagaagtagagggaataattcaacctacaccaaatgcaaagcaacctttcgaaataaaggctacaagagtttcaatagaaggtaaatcaagcacagattatcctctacaaaagaaaagacatacctttgaatatttaagaactatagctcatttaagaccaagaagcaatgctttttcagcagtatttagagtacgttctttagcagcttatgcagtgcataaatttttccaagaaagaggatttgtttatacaaatactccaataataacaggtagtgactgcgaaggggcaggagaaatgttccaattaactactatggatttaaacaatataccaaaaactgaagaaggaaaaatagatttttcaaaggatttctttggatcacctgcaaaccttacagtaagtggtcagctttcagcagaaacttttgcgttagcttttagaaacgtatatacttttggaccaacttttagagctgaaaattcaaacactgcaagacacgcatcagaattttggatgatagaacctgaaatggcttttgcagaacttacagattatttagataatgcagagaatatggttaaatttgtaataaactatgtaatggaaaatgctccagaagaaatggcattcttcaatagtttcgtagataaaggcttatttgatagattagataacgttgtaaactctgacttcaagagaataacttatacagaagcagttgaattacttcaaaaatcaggaggaaaatttgattatgaagtagaatggggaatagaccttcaaactgaacatgaaagatatttaacagaacaaatatttaaaaaaccagtatttgtaacagattatccaaaggacataaaagctttctatatgagattaaatgatgatggaaaaactgttgcagcagcagacttgcttgtaccaggagtaggagaaataataggcggaagccaaagggaagaaagattagatgtattagaaaaaagaatggaagaattaaatctaaataaagaagattactggtggtatttagaattaagaaaatatggagaaactaaacactcaggatatggtttaggtttcgaaagaatattaatgtacatcacaggaatgactaatataagagacgtaataccattcccaagaactccaggctcagctgaattctaa

SEQ ID NO: 10176 - protein, 463 aa, Clostridium botulinum F str. Langeland
MDITLVKSLYREAEKYMDKEVKINGWVRTVRDSKNFAFVEVNDGSFFKNVQVILESSLENFKELCKMPISTSVEVEGIIQPTPNAKQPFEIKATRVSIEGKSSTDYPLQKKRHTFEYLRTIAHLRPRSNAFSAVFRVRSLAAYAVHKFFQERGFVYTNTPIITGSDCEGAGEMFQLTTMDLNNIPKTEEGKIDFSKDFFGSPANLTVSGQLSAETFALAFRNVYTFGPTFRAENSNTARHASEFWMIEPEMAFAELTDYLDNAENMVKFVINYVMENAPEEMAFFNSFVDKGLFDRLDNVVNSDFKRITYTEAVELLQKSGGKFDYEVEWGIDLQTEHERYLTEQIFKKPVFVTDYPKDIKAFYMRLNDDGKTVAAADLLVPGVGEIIGGSQREERLDVLEKRMEELNLNKEDYWWYLELRKYGETKHSGYGLGFERILMYITGMTNIRDVIPFPRTPGSAEF

SEQ ID NO: 10177 - DNA, 1392 bp, Clostridium kluyveri DSM 555
  CDS (1)..(1392): transl_table=11
atgaaaaaaacattagtaaaatctctttacagggaaactgaaaaatttatagataaagatattgaaatctcgggctggataagaaccataagagattctaaatcctttgctttcatagaattaaatgatggatcattttttaaaaatgttcaagtagttttagatgacaaaatagaaaattttaaagaaataataaaattacctattagttcgtcattgtctgtggagggcaccctaattttaacccctaatgcaaaacaatcttttgaaattaaagccaaaaagatatctttagaaggaaattcatcttcagaataccctcttcaaaagaagaggcatactcttgagtacttaagaactatagctcatttaagaccaagaagtaatactttctctgctgtatttagagttcgttccattgcggcctatgcagtacataaattctttcaggaaaaagattttgtatatgtaaatactcctataatcacaggcagtgactgcgagggagctggtgaaatgttcagaataactacaatggatttaaataacgttcctaaagaagaagataactctgtagacttttctaaagatttctttggtaaagaaacaaatttaactgtaagtggtcagttgtctgctgaaactatggctcttgcttttagaaatgtatatacatttggtcctacttttagagcggaagattcaaatacatcaagacatgcagctgaattctggatgatagaacctgaaatggcttttgctgaactgaaagattatatggatactgcagaagaactggtaaagtatataataaattatgtacttgaaaaagctcctgaagaaatggcctttttcaactcattcattgataaatctttatttgacagactaaataacgtggttaattcagaatttggaagaataacttacaccgaagctgtagacatcttacagaaaagtggggcatcttttcaatacccagtagaatggggtattgatcttcaaacagaacatgaaagatatttaacagaaaaagtgttcgaaaagcctatatttgttacagactatccaaaagctataaaagccttctacatgagagaaaatgaagacggaaagacagtagccgctgcagaccttttagtaccaggagtaggagaaatagtgggaggaagtcaaagagaagaaagattatctgtccttgaaaagaggatatcagaatttgggcttaacaaagaggattactggtggtatctcgaacttagaaaatatggtgaaaccaaacactctggttttggattgggttttgaaagaatacttatgtatataacaggtatgtctaacataagagatgtaattccatttcctagaacaccgggttctgctgaattttaa

SEQ ID NO: 10178 - protein, 463 aa, Clostridium kluyveri DSM 555
MKKTLVKSLYRETEKFIDKDIEISGWIRTIRDSKSFAFIELNDGSFFKNVQVVLDDKIENFKEIIKLPISSSLSVEGTLILTPNAKQSFEIKAKKISLEGNSSSEYPLQKKRHTLEYLRTIAHLRPRSNTFSAVFRVRSIAAYAVHKFFQEKDFVYVNTPIITGSDCEGAGEMFRITTMDLNNVPKEEDNSVDFSKDFFGKETNLTVSGQLSAETMALAFRNVYTFGPTFRAEDSNTSRHAAEFWMIEPEMAFAELKDYMDTAEELVKYIINYVLEKAPEEMAFFNSFIDKSLFDRLNNVVNSEFGRITYTEAVDILQKSGASFQYPVEWGIDLQTEHERYLTEKVFEKPIFVTDYPKAIKAFYMRENEDGKTVAAADLLVPGVGEIVGGSQREERLSVLEKRISEFGLNKEDYWWYLELRKYGETKHSGFGLGFERILMYITGMSNIRDVIPFPRTPGSAEF

SEQ ID NO: 10179 - DNA, 1479 bp, Citrobacter koseri ATCC BAA-895
  CDS (1)..(1479): transl_table=11
atgccaggtaacataggtatccccccaagcaggggggacaagtgtttattttttccgactattaacagagagaatattatgagcgttgtgcctgtagccgacgtactccagggccgcgtagccgttgacagcgaagtcaccgtgcgcggatgggtgcgtacccgccgagattcaaaagctggcatctccttcctcgccgtttatgacggttcctgctttgatcctgtacaggctgtcattaataattctctgcccaattacaatgaagacgtattgcgcctgacaaccggctgctcggttatcgtcacaggtaaagtcgttgcgtctccaggacaagggcaaagttttgaaattcaggccaccacggttgaagtaaccggttgggttgaagatcctgatacctatccgatggcggcaaaacgccacagtatcgaatatctgcgtgaagtcgcgcacctgcgtccgcgcaccaatatgattggcgcagtcgcgcgcgtgcgccatacgctggcgcaagcgctgcaccgtttctttgacgagcagggtttcttctgggtttcgacgccgttgattaccgcctccgataccgaaggcgcgggtgaaatgttccgtgtatcaacattggatctggaaaacctgccgcgtaacgaccagggcaaagtcgattttgataaagacttctttggtaaagaatctttcctgaccgtatccggccagttgaacggcgaaacctatgcgtgcgccctgtccaaaatctatacctttggccctacattccgtgcagaaaactccaacaccagccgccacctggctgagttctggatgctggagccggaagtcgcctttgccaacctgaatgacgtagctggccttgccgaagcgatgctgaaatacgtcttcaaagccgtactggatgaacgcgcggatgatatgaaattcttcgccgagcgtgtcgataaagatgcgatttctcgtctggaacgttttattgatgcagacttcgcccaggttgattacaccgatgcggtcacaattctggaaaactgcggtaggaaattcgaaaacccggtttactggggtgtggatctctcctctgagcacgaacgctatctggcagaagagcactttaaagcgccagtggtagtgaaaaactacccgaaagacattaaagcgttttatatgcgccttaacgaagacggtaaaaccgtggcggcaatggatgttctggcgccgggcattggtgaaatcattgggggttcccagcgtgaagagcgtctggacgtgctggatgcccgtatggcggaaatgggcctgaataaagaagattactggtggtatcgcgatctgcgccgctacggtactgttccgcattcaggtttcggtctcggcttcgaacgtctgatcgcttatgtcaccggcgtgcaaaacgttcgtgatgtgattccgttcccgcgtactccacgtaacgccagtttctga

SEQ ID NO: 10180 - protein, 492 aa, Citrobacter koseri ATCC BAA-895
MPGNIGIPPSRGDKCLFFPTINRENIMSVVPVADVLQGRVAVDSEVTVRGWVRTRRDSKAGISFLAVYDGSCFDPVQAVINNSLPNYNEDVLRLTTGCSVIVTGKVVASPGQGQSFEIQATTVEVTGWVEDPDTYPMAAKRHSIEYLREVAHLRPRTNMIGAVARVRHTLAQALHRFFDEQGFFWVSTPLITASDTEGAGEMFRVSTLDLENLPRNDQGKVDFDKDFFGKESFLTVSGQLNGETYACALSKIYTFGPTFRAENSNTSRHLAEFWMLEPEVAFANLNDVAGLAEAMLKYVFKAVLDERADDMKFFAERVDKDAISRLERFIDADFAQVDYTDAVTILENCGRKFENPVYWGVDLSSEHERYLAEEHFKAPVVVKNYPKDIKAFYMRLNEDGKTVAAMDVLAPGIGEIIGGSQREERLDVLDARMAEMGLNKEDYWWYRDLRRYGTVPHSGFGLGFERLIAYVTGVQNVRDVIPFPRTPRNASF

SEQ ID NO: 10181 - DNA, 1401 bp, Serratia proteamaculans 568
  CDS (1)..(1401): transl_table=11
atgagcgtagtgcctgtagtcgacgtactgcaaggccgtgctgcggttgacagtgaagtcaccgtacgcggttgggtgcgtacccggagagattctaaagctggtatctccttcctggccgtctatgacggttcctgctttgatccgttacaggccgtcgttaataattctctgccgaattatcaggatgaagtgctgcatctgaccacgggctgttccattgaagtcaccggcgttgtggtggcatctccgggcgaaggtcagagtttcgaactgcaggcaaccgcgattaaagtggttggctgggttgacgatccggacacctacccgatggcggccaaacgtcacagcatcgaatacctgcgcgaagtggctcacctgcgcccacgcaccaatctgatcggtgccgttgcccgcgtacgtcatacgctggcacaggccattcaccgtttctatcacgagaacggcttcttctgggtttccaccccgctgatcaccgcctccgataccgaaggtgccggtgaaatgttccgcgtttcaactctggatctggaaaatctgccgcgtaccgataagggtgcagtcgatttcagccaggactttttcggcaaagaagccttcctgaccgtttccggccagttgaacggcgagacctatgcctgtgcgctgtcgaaaatttacactttcggccccactttccgcgccgagaactccaacaccagccgccacctggcggagttttggatgatcgaaccggaagtggcgtttgccgatctcgaagacatcgccgagttggcggaaaaaatgctgaagtatgtattccaggccgtattgaacgagcgtatggatgacatgcagttcttcgccgagcgcgtagacaaagatgctatcgatcgcctgcagcgttttgttacttctgactttgctcaggttgattacaccgaagcggtggaaatcctgatcgcctcaggtcagactttcgaaaacccggtttcctggggtatcgacctgtcttccgaacatgagcgttatttggccgagaaacacttcaaagcgccggtagtagtgaaaaactacccgaaagacatcaaagctttctatatgcgtatgaacgatgacggtaaaaccgttgccgcaatggacgttctggctccgggcattggtgaaatcatcggcggtgctcagcgtgaagaacgtctggacgtactggatcagcgtctggaagccatggggctgaataaagaagactactggtggtatcgcgatcttcgtcgttacggcaccgttcctcatgccggtttcggtttgggctttgagcgtttaatcgcctatgtcaccggcgttcaaaacgtgcgtgatgtcattccgttcccgcggactccacgtaatgcaaccttttaa

SEQ ID NO: 10182 - protein, 466 aa, Serratia proteamaculans 568
MSVVPVVDVLQGRAAVDSEVTVRGWVRTRRDSKAGISFLAVYDGSCFDPLQAVVNNSLPNYQDEVLHLTTGCSIEVTGVVVASPGEGQSFELQATAIKVVGWVDDPDTYPMAAKRHSIEYLREVAHLRPRTNLIGAVARVRHTLAQAIHRFYHENGFFWVSTPLITASDTEGAGEMFRVSTLDLENLPRTDKGAVDFSQDFFGKEAFLTVSGQLNGETYACALSKIYTFGPTFRAENSNTSRHLAEFWMIEPEVAFADLEDIAELAEKMLKYVFQAVLNERMDDMQFFAERVDKDAIDRLQRFVTSDFAQVDYTEAVEILIASGQTFENPVSWGIDLSSEHERYLAEKHFKAPVVVKNYPKDIKAFYMRMNDDGKTVAAMDVLAPGIGEIIGGAQREERLDVLDQRLEAMGLNKEDYWWYRDLRRYGTVPHAGFGLGFERLIAYVTGVQNVRDVIPFPRTPRNATF

SEQ ID NO: 10183 - DNA, 1392 bp, Alkaliphilus oremlandii OhILAs
  CDS (1)..(1392): transl_table=11
atgaaatctatactagtgaaagacatttatagaaacacagagaagtatgcaggccaagaaattgtaattgaaggctggattagaactttaagggcatccaaagcattcggtttcattgaagtcaacgacgggagcttcttcaagaatattcaagttgtatttgaggaaggactagaaaattttgcggaagtatccaaactttctatcagtacagcgattatagtcaaaggaaaattggagatcacaccggatgcgaagcaaccttttgagattaaggcaaccagcatcgaagtcgagggagaatctgatagtgattatccactgcaaaagaaaagacatacctttgaatttttaagagagatcgctcacttaagaccgagaagtaatactttttctgcagtttttagggtacgttctttagctgcttttgcaattcaccaatttttccaggagagaggctttgtttacacccatacaccgatcatcactggcagcgatgcagaaggtgctggtgaaatgtttagaattacaaccttagatcctaaaaaccctgggctgaacgaagctggtgaggttgactttacaaaggacttctttggtaaggaaaccagcttaaccgttagtggacaattacaaggagaagcctatgcactggcttttagaaacatctatactttcggaccaacttttagagcagaaaactctcatacagcgcgacatgcttcagagttttggatgattgaacctgagatcgcctttgcggacttacaggataacatggaattagcagaagaaatgctaaaatacattattaactatgtcatggaaaatgcacctgaggaaatggagttcttcaatagcttcgttgataaaggattgttggatcgattaaacaatgtagcaacttctgactttggcagggtaacctatacagaggcaatcgaaatcttacagaaatctggtgaaaccttcgaataccctgtagcgtggggtaccgatttacaaacagagcatgaaagatatctaactgaaaaggtatttaaaaaacctgtatttgtaacggactatccaaaagatattaaagctttctatatgaagctgaatgaagatggaaaaaccgttgcagctatggacctactagtacctggtattggagaaattattggtggaagccaaagagaagataatttagcgctattagaagagagaatggatgccatgggtctggacaaagaagagtactggtggtacttagagcttagaaaatatggtagcgcaagacatgctggatacggactaggctttgaaagagcgattatgtatttaacaggaatgtccaatatcagagacgtaatatccttcccaagaacaccaaaatcagcagaattttaa

SEQ ID NO: 10184 - protein, 463 aa, Alkaliphilus oremlandii OhILAs
MKSILVKDIYRNTEKYAGQEIVIEGWIRTLRASKAFGFIEVNDGSFFKNIQVVFEEGLENFAEVSKLSISTAIIVKGKLEITPDAKQPFEIKATSIEVEGESDSDYPLQKKRHTFEFLREIAHLRPRSNTFSAVFRVRSLAAFAIHQFFQERGFVYTHTPIITGSDAEGAGEMFRITTLDPKNPGLNEAGEVDFTKDFFGKETSLTVSGQLQGEAYALAFRNIYTFGPTFRAENSHTARHASEFWMIEPEIAFADLQDNMELAEEMLKYIINYVMENAPEEMEFFNSFVDKGLLDRLNNVATSDFGRVTYTEAIEILQKSGETFEYPVAWGTDLQTEHERYLTEKVFKKPVFVTDYPKDIKAFYMKLNEDGKTVAAMDLLVPGIGEIIGGSQREDNLALLEERMDAMGLDKEEYWWYLELRKYGSARHAGYGLGFERAIMYLTGMSNIRDVISFPRTPKSAEF

SEQ ID NO: 10185 - DNA, 1392 bp, Acaryochloris marina MBIC11017
  CDS (1)..(1392): transl_table=11
atggaaattagacggattattgagttacttcgtcatgggacaccgggcgaaagcattaaagtgcaaggttgggttcgtacaaaacgagagctaaaagagtttgcattcctagatgtgaacgatgggtcatcgctacagggactgcaagtggttgtcaaccaaaacctgccagagtatgagcaaaccctcaaattattaaatactggatcctctgtatctattgagggcgagttggtggcatctcaaggaaaaaatcagcgtgttgagctagtcgccaaggcggtgcaagtgtggggaacagcggatttagagacctatccactccagaaaaagcgacattcttttgagtttttacggacgattgcccatttgagatcgcgcaccaataccttgggttcagttttcagaatccgtaatgcctgttcccaggccattcatcaatttttccaagaccgggactttatgtggattcacacacctatcatcacggctagtgactgtgagggggcaggagagcaattagcggtcaccagcttaaatcttcaggatgttcccctatcggaagatcaaacggttgactacagtcaagacttttttggcaaaccgacctatttgacggtgagcggacagttagaaggagagattatggcctctgccttctgtaatgtttatacttttggtccgacctttagagcagaaaattccaatacttcaaggcacctagcagaattttggatggtggaaccagaggttgcattctgtgatttacagggggatatggatctggcagaagcctttctcaaacatgtttttaaatcggtattagagcagtgtcctgaagattttgaatttttcaatctgcgaattgataaatctgttttagagacggctgacacaattatcaacagtgagtttgagcggattacctataccgaggccgtgaatcagctagagaaagccagccgcaagtttgagttccctgtggaatgggggttggatttacagtctgagcatgagcgctatttatccgaagaactgttcaaaaagccagttattgttacggattaccccaaacagatcaaagcgttctatatgcggatgaatgatgacgataaaacagtcgccgccatggatgttctggtccctaaaattggcgagattatcggtggctctcaacgagaggagcgtttggatctattggagcaacgaattgtcgctcaagggctgcccttagaagattattggtggtatctcgatcttcgccgttatggcacggttccccatgcgggctttgggctgggttttgaacgattggttcagtttatgacggggatggcgaacattcgagatgtgattccgttccctcgtacccccttgaatgctgagttttag

SEQ ID NO: 10186 - protein, 463 aa, Acaryochloris marina MBIC11017
MEIRRIIELLRHGTPGESIKVQGWVRTKRELKEFAFLDVNDGSSLQGLQVVVNQNLPEYEQTLKLLNTGSSVSIEGELVASQGKNQRVELVAKAVQVWGTADLETYPLQKKRHSFEFLRTIAHLRSRTNTLGSVFRIRNACSQAIHQFFQDRDFMWIHTPIITASDCEGAGEQLAVTSLNLQDVPLSEDQTVDYSQDFFGKPTYLTVSGQLEGEIMASAFCNVYTFGPTFRAENSNTSRHLAEFWMVEPEVAFCDLQGDMDLAEAFLKHVFKSVLEQCPEDFEFFNLRIDKSVLETADTIINSEFERITYTEAVNQLEKASRKFEFPVEWGLDLQSEHERYLSEELFKKPVIVTDYPKQIKAFYMRMNDDDKTVAAMDVLVPKIGEIIGGSQREERLDLLEQRIVAQGLPLEDYWWYLDLRRYGTVPHAGFGLGFERLVQFMTGMANIRDVIPFPRTPLNAEF

SEQ ID NO: 10187 - DNA, 1419 bp, Clostridium phytofermentans ISDg
  CDS (1)..(1419): transl_table=11
atgggatataggaaaggagaaatagggatggaacttgtacaagtaagagaactgtttcgtaataaggaacaatatctaggaaagaaaataacagtcggtggctgggtacgtagtgtcagagacacaaagacctttggctttatcgtaatgagcgatggtactttttttgaaacattacagattgtttatactgacaagctaagcaattttgcagaaatctctaaattcaatgtaggttctgcagttgttgtaaccggtacgcttgttgctactccagatgcaaaacagccatttgagattcaagcagaggaggtacttttagagggagcttctacttctgattacccacttcaaaagaaaagacactccttagaatttttaagagcaatgacacatcttcgcccaagaacaaatactttccaagcggtatttcgtgttcgttctttagttgcttatgcaattcataagtttttccaagagagagatttcgtttatgttcatacaccattaattactggaagtgattgcgagggtgctggagagatgttccaggtaactactcttgatttaaacaacattccaaagacaaaagagggtcaggtcgattttgaccaagatttctttaataagccaaccaacttaacagttagtggacagttaaatggcgagacttatgcgatggcatttaaaaacatctataccttcggaccaaccttccgtgcagaaaattcgaataccacaagacatgctgcagaattctggatgattgagccagaaattgcttttgctgacttaaaggatgatatgattttagcagagtctatgcttaaatatgtaattaagtatgtattagagcatgcaccagaagagatggagttctttaactcatttgtagatcaaggtttacttgagagattacagcatgttgctaactcagattttggtcatgtaacatatactgaggcaattgaaatcttagagaagaataacgataagtttgagtacaaggtttcctggggatgtgacttacaaacagagcatgagcgctttttaacagagcagatatttaaaaagcctgttttcgttactgattatccaaaggaaatcaaagcattttatatgaagttaaacgaagataataaaacggttgcagcgatggatcttttagttcctggcatcggtgaaattatcggcggaagtcagagagaggatgattatgacaagttagtcgcaaagatgaaggaaagcgacttaaacgaagaagattatgatttctatctcgacctaagaaaatatggttctgcaagacacgcaggattcggtcttggttttgagcgttgcgtaatgtatcttacaggtatgggtaacatccgtgatgttattccattcccaagaacagttaataactgcgatttataa

SEQ ID NO: 10188 - protein, 472 aa, Clostridium phytofermentans ISDg
MGYRKGEIGMELVQVRELFRNKEQYLGKKITVGGWVRSVRDTKTFGFIVMSDGTFFETLQIVYTDKLSNFAEISKFNVGSAVVVTGTLVATPDAKQPFEIQAEEVLLEGASTSDYPLQKKRHSLEFLRAMTHLRPRTNTFQAVFRVRSLVAYAIHKFFQERDFVYVHTPLITGSDCEGAGEMFQVTTLDLNNIPKTKEGQVDFDQDFFNKPTNLTVSGQLNGETYAMAFKNIYTFGPTFRAENSNTTRHAAEFWMIEPEIAFADLKDDMILAESMLKYVIKYVLEHAPEEMEFFNSFVDQGLLERLQHVANSDFGHVTYTEAIEILEKNNDKFEYKVSWGCDLQTEHERFLTEQIFKKPVFVTDYPKEIKAFYMKLNEDNKTVAAMDLLVPGIGEIIGGSQREDDYDKLVAKMKESDLNEEDYDFYLDLRKYGSARHAGFGLGFERCVMYLTGMGNIRDVIPFPRTVNNCDL

SEQ ID NO: 10189 - DNA, 1392 bp, Acholeplasma laidlawii PG-8A
  CDS (1)..(1392): transl_table=11
atggatttaacaattagaacaatatataaagatcctgcaaggtatgcaggtcaagaagttatattaaaggggtggattagaaaccaccgtgatcaaaaagaatttgggtttattaacctaaatgatggtagtttttttgaaaacatccaagtagtatatgaaagggcaacaacaaaagactttgatgcagtgacacgtttatctgtaggtgcatccattgaagttataggtacgcttgttttaacaccagatagaagccaaccatttgaaattaaggcactagaagtgagactaataggggattcaggtgaaaactatccaatccaaccaaaacgccacacaagagagtttttaagagaggttgcacaccttcgtccaagaacgaatttattttctgcagtatttagagttagaagtatagctgcttatgcaatacataaattctttcaggaacaagactttgtctatgtacacacaccaattttaactgcaaacgatggtgaaggcgcaggcgctatgtttaaagttactacactagacatgaataagccacctagaaatgaagactcaagtattgactatagtaaagatttctttggtagagaagctaaccttactgttacaggacaactcgaaggagaagcttatgcacacgcatttagaaatatctatacatttggtccaacatttagagcagaaaactctaatactacaacccatgcatcagagttttggatgattgaaccagagattgcatttgcagacttaaatgacaatatggaacttattgaacgtatggtgaaatatgttacatcttatgtcttagaacatgcaaaagaagaaatggcattttttgataaatttgtagaaaaaggattattaaccaagttagataacctactaaaatcatcatttaaacgtattactcatgaagaagcaattaatatcttactaaaatccaaccacaaatttgaaaaccaaccaaaacatggtgaagacttagctaaagaacatgaaagatatctaacagaaaaagcattccatggtccagtgtttgtaaaagactggccaaaagatattaaagcattctatatgagattaaatgacgatcaaaaaacagttgctgcagtagacctattagtacctggttcaggcgaattagtgggtggatctcaaagagaagaaagattagatgttttacttaaacgtatggaagatatgcatgtaccggttaaagaccttgattggtatttagatcttagacgttatggtggtgttcaaacatctggttttggattaggttttgaaagatacttaatctatgtaactggtgtagaaaatattagagacgttattccattccctagaacacctaaaaacattttattttaa

SEQ ID NO: 10190 - protein, 463 aa, Acholeplasma laidlawii PG-8A
MDLTIRTIYKDPARYAGQEVILKGWIRNHRDQKEFGFINLNDGSFFENIQVVYERATTKDFDAVTRLSVGASIEVIGTLVLTPDRSQPFEIKALEVRLIGDSGENYPIQPKRHTREFLREVAHLRPRTNLFSAVFRVRSIAAYAIHKFFQEQDFVYVHTPILTANDGEGAGAMFKVTTLDMNKPPRNEDSSIDYSKDFFGREANLTVTGQLEGEAYAHAFRNIYTFGPTFRAENSNTTTHASEFWMIEPEIAFADLNDNMELIERMVKYVTSYVLEHAKEEMAFFDKFVEKGLLTKLDNLLKSSFKRITHEEAINILLKSNHKFENQPKHGEDLAKEHERYLTEKAFHGPVFVKDWPKDIKAFYMRLNDDQKTVAAVDLLVPGSGELVGGSQREERLDVLLKRMEDMHVPVKDLDWYLDLRRYGGVQTSGFGLGFERYLIYVTGVENIRDVIPFPRTPKNILF

SEQ ID NO: 10191 - DNA, 1392 bp, Bacillus weihenstephanensis KBAB4
  CDS (1)..(1392): transl_table=11
atggaaaacacattagtaaaaagtctgtatagagatacagataaatacgcagatcaaacagtacaagtatcgggttggattcgtaacttacgtgattcaaaagcatttggtttcatcgaattaaacgacggtagcttcttcaaaggtgttcaaatcgttttcgatacagaattagagaacttcaaagaaattgcaaagcttccactaagctcttcagttaaagtagaaggtaaagtaattgcaacgcctggagcgaagcaaccatttgaaattaaagcagaaaaaattgatgtcgagggcttatcagattctgattacccacttcaaaagaagcgtcatacgtttgaatatttacgtacaatcgctcacttacgtccaagaacaaatgcattctctgcaacgttccgtgtgcgttctatcgcagcatttgcgattcaccagttcttccaagagcgtggattcgtacatgttcacacaccaatcatcactggtagtgatacagaaggtgcaggcgaaatgttccgcgtaacaacgcaagatttaaacaacgtacctaaaggtgaagacggacaagttgacgaatcaaaagacttcttcggtaaagaaacaaatttaacagtaagtggacagcttaatgctgaagcttatgcgttagcattccgtgatgtgtacacattcggtcctacattccgtgcagaaaactcaaacacaactcgccacgcagctgagttctggatggttgagcctgagattgcattcgctgagttaggcgatgtaatggatcttacagaagatatgctgaaatatgcaatgaaatacgtactagagcatgcaccagaagaaatggacttcttcaacagcttcgttgataaaacagttctagagcgcatgaacaacgtaatcaactctgacttcggtcgcatcacttatacagaagcaattaaagtacttcaagaatcaggtgctgaattcaaatacccagtagaatggggtattgacttacaaacagagcacgaaagatacttatcagaagaaatcttcaaacgccctgtattcgtaactgactatccgaaagacattaaagcattctacatgcgtatgaacgaagatggtaaaacagtagcagctactgaccttctagttcctggcatcggcgaattaatcggcggaagtcaacgtgaagaaagaatggacgttttagtagacagaattaaagaattaggtatgaacgaagaggactactggtggtacttagaacttagaaaatacggcggtacaaaacacgctggattcggtctaggtttcgagcgcttcctaatgtacattactggcatggctaacatccgtgacgtaattccattcccaagaactccaggttcttctgagttctaa

SEQ ID NO: 10192 - protein, 463 aa, Bacillus weihenstephanensis KBAB4
MENTLVKSLYRDTDKYADQTVQVSGWIRNLRDSKAFGFIELNDGSFFKGVQIVFDTELENFKEIAKLPLSSSVKVEGKVIATPGAKQPFEIKAEKIDVEGLSDSDYPLQKKRHTFEYLRTIAHLRPRTNAFSATFRVRSIAAFAIHQFFQERGFVHVHTPIITGSDTEGAGEMFRVTTQDLNNVPKGEDGQVDESKDFFGKETNLTVSGQLNAEAYALAFRDVYTFGPTFRAENSNTTRHAAEFWMVEPEIAFAELGDVMDLTEDMLKYAMKYVLEHAPEEMDFFNSFVDKTVLERMNNVINSDFGRITYTEAIKVLQESGAEFKYPVEWGIDLQTEHERYLSEEIFKRPVFVTDYPKDIKAFYMRMNEDGKTVAATDLLVPGIGELIGGSQREERMDVLVDRIKELGMNEEDYWWYLELRKYGGTKHAGFGLGFERFLMYITGMANIRDVIPFPRTPGSSEF

SEQ ID NO: 10193 - DNA, 1365 bp, Microcystis aeruginosa NIES-843
  CDS (1)..(1365): transl_table=11
atgactaccagaatcaaggaaatctttcaaacaggacaacccgatcaatccgtcaccgtgcagggttgggtgagaacaaaacgagaattaaaagaatttactttcctggaagttaatgatggctcatccctagccaacttacaagttatcctcgaaccgactttacccgattatgaaaatgtactaaaaacaattagtacaggagcagcgatcgctgtttcgggaaatttggttccttccccgggtaaagggcaaaatatcgagttaaaagcggccgaaatcaccctttatggtgactgtcccccggattatcccctacaaaagaaacgtcattcctttgaattcctaagaactattgcccatctgcgagcaagaaccaacaccctaggggcagtaatgcgggttagaaacgcttgcgccaccgctatccacagttttttccaagaaaagggctttatttgggtacatactcccattattaccgctaacgactgcgaaggtgcgggggaattatttactgtcaccagtttagatttaaaaaaacccgccaattttgccgaggatttctttggtaaacgggcctatttaaccgtcagtggacaattacaagcggaagtaatggccatggctttatctaatgtttacacttttggcccgacttttcgcgccgaaaattctaatacttcccgtcatctggccgagttttggatggtggaaccggaaatggctttttgtgatctggaaggagatcaggatttagcggaagcttttctgaaatatatctttaaattcgtcttagaaaattgtcccgaagatttgcagttttttaacgaacgtatcgataaaacggtgttaagtacggccgagaatatcgttaatagtgagtttggccggattacctacagtgaagcgatcgagttattagaaaaagccgatcgtcagttcgagtttccggtagaatggggcgtagatttacagtcagaacacgaacgttatctagcggaggaactatttaaaaaacccgtgattgtcaccaattatcccaagacaatcaaagctttttatatgcgtctagatgacaataataaaaccgtttccgctatggatattttagcacccaagatcggcgaaattatcggcggttcccaacgggaagaacgattagatgtattaatccaaagaatgcaggaacagggaatgaatcccgatgatttgtggtggtatttagatctgcgtcgctacggttccgttccccacgctggttttggtttaggattcgagcgtctggtacaattcatgaccggaatgaccaatattcgcgatgtgattcctttcccccgtacccctttaagtgccgacttttag

SEQ ID NO: 10194 - protein, 454 aa, Microcystis aeruginosa NIES-843
MTTRIKEIFQTGQPDQSVTVQGWVRTKRELKEFTFLEVNDGSSLANLQVILEPTLPDYENVLKTISTGAAIAVSGNLVPSPGKGQNIELKAAEITLYGDCPPDYPLQKKRHSFEFLRTIAHLRARTNTLGAVMRVRNACATAIHSFFQEKGFIWVHTPIITANDCEGAGELFTVTSLDLKKPANFAEDFFGKRAYLTVSGQLQAEVMAMALSNVYTFGPTFRAENSNTSRHLAEFWMVEPEMAFCDLEGDQDLAEAFLKYIFKFVLENCPEDLQFFNERIDKTVLSTAENIVNSEFGRITYSEAIELLEKADRQFEFPVEWGVDLQSEHERYLAEELFKKPVIVTNYPKTIKAFYMRLDDNNKTVSAMDILAPKIGEIIGGSQREERLDVLIQRMQEQGMNPDDLWWYLDLRRYGSVPHAGFGLGFERLVQFMTGMTNIRDVIPFPRTPLSADF

SEQ ID NO: 10195 - DNA, 1386 bp, Finegoldia magna ATCC 29328
  CDS (1)..(1386): transl_table=11
atgatattaattaaagatttgattaaagattacgaaaagtattctgacaaagaagttgaagttggaggttggattaaaaactcaagatttagtaaaaatgttggttttattgaactaaatgacggaactttcttcaatcctgttcaaattgttgtaggaaaagataatgaggattttgaaagggctgaaaagttaaaactaagctctgcaattattgttgtaggtaaattagttttgactccaaattctaagcaaccatttgaaattcaagcgtcaaaagttattgtagaaggagaatctactgatgattatccactacaaaagaaaagacatacatttgaatttttgagaacaattttacacttaagaccaagaacaaatacatttaatgctgtatttagagttagaagcagattagcatttgctattcataaattctttaatgaaagaggattcgtttatgttcatactccaattataacaggcagtgatgctgaaggtgctggagaaatgttcagagttacaacattggatttggataatcttccaaaagatgatgacggaaatgttgatttcacacaagatttcttctcaaaatctactaacttaactgtaagtggtcaattgcaagcagaagcttacgcactagctttcagaaatgtatatacatttggaccaacttttagaagtgaacattctaatactcctagacatgcggcagaattttggatgatggaacctgaaatatgtttcgcagatttggatgatgtgtgtagcttagccgaagatatggttagatatatcataaaagatgttatggaaaattgtgaagaggaaattaaattctttaatagttttgtagacaagaacttgattgaaagattgacaaaagttgcaaacaaatcattcaaaaaattaacttatactgaagctattgatattctaaaaaaatcaggagaaaagtttgaataccctgttaaatggggaatggatctacaaacagaacacgaaaaatatttgagtgaaaaagttgttgacggtccagtgtttgttactgattatccaaaagaaatcaaagctttttacatgagacttaatgacgacaaaaaaacagttgctgcaactgaccttttagttccaggaattggtgagttaattggtggaagccaaagagaagaaagatttgaattattggatcaaaaaatggatgagctaggtttcaacaaagaagaatataaatggtatcttgatttaagaaaatacggtggggttaaacacggcggatttggacttggatttgaaagaatggtaatgtacatgacaggaatgtcaaatataagagatgtcattccgttcccaagaactgttggacattgtgaatattaa

SEQ ID NO: 10196 - protein, 461 aa, Finegoldia magna ATCC 29328
MILIKDLIKDYEKYSDKEVEVGGWIKNSRFSKNVGFIELNDGTFFNPVQIVVGKDNEDFERAEKLKLSSAIIVVGKLVLTPNSKQPFEIQASKVIVEGESTDDYPLQKKRHTFEFLRTILHLRPRTNTFNAVFRVRSRLAFAIHKFFNERGFVYVHTPIITGSDAEGAGEMFRVTTLDLDNLPKDDDGNVDFTQDFFSKSTNLTVSGQLQAEAYALAFRNVYTFGPTFRSEHSNTPRHAAEFWMMEPEICFADLDDVCSLAEDMVRYIIKDVMENCEEEIKFFNSFVDKNLIERLTKVANKSFKKLTYTEAIDILKKSGEKFEYPVKWGMDLQTEHEKYLSEKVVDGPVFVTDYPKEIKAFYMRLNDDKKTVAATDLLVPGIGELIGGSQREERFELLDQKMDELGFNKEEYKWYLDLRKYGGVKHGGFGLGFERMVMYMTGMSNIRDVIPFPRTVGHCEY

SEQ ID NO: 10197 - DNA, 1392 bp, Clostridium botulinum B1 str. Okra
  CDS (1)..(1392): transl_table=11
atggatataactttagtaaaatcactttatagagaaacagaaaaatacatggataaagaagttaaaattaatggatgggtaagaactgtaagagattctaaaaactttgcctttgtagaagtaaatgacggaagtttctttaaaaatgttcaagtaatacttgagtcttctttagaaaactttaaggaactatgtaaaatgccaataagtacatcagtagaagtagagggaataattcaacctacaccaaatgcaaagcaacctttcgaaataaaggctacaagagtttcaatagaaggtaaatcaagcacagattatcctctacaaaagaaaagacatacctttgaatatttaagaactatagctcatttaagaccaagaagtaatgctttttcagcagtatttagagtgcgttctttagcagcttatgcagtgcataaatttttccaagaaagaggatttgtctatacaaatactccaataataacaggtagtgactgcgaaggagcaggagaaatgttccaattaactactatggatttaaaaaatataccaaaaactgaagaaggcaaaatagatttttcaaaagatttctttggatcacctgcaaaccttacagtaagtggtcagctttcagcagaaacttttgcgttagcttttagaaatgtatatacttttggaccaacttttagagctgagaattcaaacactgcaagacacgcatcagaattttggatgatagaacctgaaatggcctttgcagaacttacagattatttagataatgcagaggatatggttaaatttgtgataaactatgtaatggaaaatgctccagaagaaatggcattcttcaatagtttcgtagataaaggtttatttgataggttagataatgttgtaaactctgacttcaagagaataacttatacagaagcagttgaattacttcaaaaatcaggagcaaaatttgattatgaagtagaatggggaatagaccttcaaactgaacatgaaagatatttaacagaacaaatatttaaaaaaccagtatttgtaacagattatccaaaggacataaaagctttctatatgagattaaatgatgatagaaaaactgttgcagcagcagacttacttgtaccaggggtaggagaaataataggtggaagtcaaagggaagaaagattagatgtactagaaaaaagaatggaagaattaaacctaaataaagaagattactggtggtatttagaattaagaaaatatggagaaactaaacactcaggatatggtttaggtttcgaaagaatattaatgtacatcacaggaatgactaatataagagacgtaataccattcccaagaactccaggctcagctgaattctaa

SEQ ID NO: 10198 - protein, 463 aa, Clostridium botulinum B1 str. Okra
MDITLVKSLYRETEKYMDKEVKINGWVRTVRDSKNFAFVEVNDGSFFKNVQVILESSLENFKELCKMPISTSVEVEGIIQPTPNAKQPFEIKATRVSIEGKSSTDYPLQKKRHTFEYLRTIAHLRPRSNAFSAVFRVRSLAAYAVHKFFQERGFVYTNTPIITGSDCEGAGEMFQLTTMDLKNIPKTEEGKIDFSKDFFGSPANLTVSGQLSAETFALAFRNVYTFGPTFRAENSNTARHASEFWMIEPEMAFAELTDYLDNAEDMVKFVINYVMENAPEEMAFFNSFVDKGLFDRLDNVVNSDFKRITYTEAVELLQKSGAKFDYEVEWGIDLQTEHERYLTEQIFKKPVFVTDYPKDIKAFYMRLNDDRKTVAAADLLVPGVGEIIGGSQREERLDVLEKRMEELNLNKEDYWWYLELRKYGETKHSGYGLGFERILMYITGMTNIRDVIPFPRTPGSAEF

SEQ ID NO: 10199 - DNA, 1392 bp, Clostridium botulinum A3 str. Loch Maree
  CDS (1)..(1392): transl_table=11
atggatataactttagtaaaatcactttatagagaaacagaaaaacacatggacaaagaagttaaaattaatggatgggtaagaactgtaagagattctaaaaactttgcgtttgtagaagtaaatgacggaagtttctttaaaaatgttcaagtaatacttgagtcttctttagaaaactttaaagaactatgcaaaatgccaataagtacatcagtagaggtagaaggaatagttcaacctacaccaaatgcaaagcaacctttcgaaataaaggctacaagagtttcaatagaaggtaaatcaagcacagattatcctctacaaaagaaaagacatacttttgaatatttaagaactatagctcatttaagaccaagaagtaatgctttttcagcagtatttagagtacgttctttagcagcttatgcagtgcataaatttttccaagaaaaaggattcgtttatacaaatactccaataataacaggtagtgactgcgaaggtgcaggagaaatgttccaattaactactatggatttaaacaatataccaaaaactgaagaaggaaaaatagatttttcaaaggatttctttggatcacctgcaaaccttacagtaagtggtcagctttcagcagaaacttttgctttagcttttagaaatgtatatacttttggaccaacttttagagctgaaaattcaaatactgcaagacacgcatcagaattttggatgatagaacctgaaatggcttttgcagagcttacagattatctagataatgcagaagaaatggttaagtttgtaataaactatgtaatggaaaatgctccagaagaaatggcattctttaatagtttcgtagacaaagggttatttgatagattagataacgttgttaactctgacttcaagagaataacttatacagaagcagtagaactacttcaaaaatcaggagcaaaatttgattatgaagtagaatggggaatagatcttcaaactgaacatgaaagatatttaacagaacaaatatttaaaaaaccagtttttgtaacagattatccaaagggcataaaagctttctatatgagattaaatgatgatggaaaaactgttgcagcagcagacttacttgtaccaggagtaggagaaataataggcggaagccaaagggaagaaagactagatgtattagaaaaaagaatggaagaattaaacctaaataaagaagattactggtggtatttagaattaagaaaatatggagaaactaaacactcaggatatggcttaggtttcgaaagaatactaatgtacatcacaggaatgactaatataagagacgtaataccattcccaagaactccaggttcagctgaattctaa

SEQ ID NO: 10200 - protein, 463 aa, Clostridium botulinum A3 str. Loch Maree
MDITLVKSLYRETEKHMDKEVKINGWVRTVRDSKNFAFVEVNDGSFFKNVQVILESSLENFKELCKMPISTSVEVEGIVQPTPNAKQPFEIKATRVSIEGKSSTDYPLQKKRHTFEYLRTIAHLRPRSNAFSAVFRVRSLAAYAVHKFFQEKGFVYTNTPIITGSDCEGAGEMFQLTTMDLNNIPKTEEGKIDFSKDFFGSPANLTVSGQLSAETFALAFRNVYTFGPTFRAENSNTARHASEFWMIEPEMAFAELTDYLDNAEEMVKFVINYVMENAPEEMAFFNSFVDKGLFDRLDNVVNSDFKRITYTEAVELLQKSGAKFDYEVEWGIDLQTEHERYLTEQIFKKPVFVTDYPKGIKAFYMRLNDDGKTVAAADLLVPGVGEIIGGSQREERLDVLEKRMEELNLNKEDYWWYLELRKYGETKHSGYGLGFERILMYITGMTNIRDVIPFPRTPGSAEF

SEQ ID NO: 10201 - DNA, 1392 bp, Cyanothece sp. ATCC 51142
  CDS (1)..(1392): transl_table=11
atgcaaaccaaacgagttagagacatcttacgccacggaaaacccgatgaaaccgttacgattcaaggatgggtacgcacgaaacgggaactaaaagaatttgcgtttatggaagttaatgacggttcgtccctcaacagtttacaggtggttctcgatgaaagtgtccccaactatcaagatgctctcaaactccttaatacaggagcttctgtggaagtttcaggaaccctggtacaatcccccggaaagggccaaaacatcgagttaaaggctgctaaagtgcaggtatatggcacatctgaccccgaaacctatcccctccagaaaaaacgccattcctttgaatttttacgcactattggacatctgcgatcgcgtaccaatacgttaggggcggttatgcgcgtgagaaatgcttgtgcaacggctattcataaattttttcaagaacgggattttatttggattcatacccccattattaccgctagtgactgcgaaggggcaggggaattattcaccgtaacgaattttgatttaggtaaagttcctctcgataaacaacaaaaaatagactacactcaagacttttttggtaagcaagcttatttaaccgtaagtggacaattagaagcagaagtcatggccatggcctttcaaaatgtttatacctttgggcctacctttcgggcagaaaattctaacacctctcgtcatttagctgagttttggatggtagaaccagaaatggccttttgtgatattgaaggagatcaagacttagccgaagaattcttaaaatatatttttaaatatgtcttaaaaacttgtcccgaagacatggaattttttaataagcgtattgataaatcggtgttggaaacagcagacaatatcattaacaatgaatttgaaagaattacttacaccaaagcgatagagttacttgaaaagtctaataaaaagtttgaatatgctgtggagtggggcattgacttacaatccgaacatgagcgatatttagcggaagaattgtttaaaaagcctttaattgtcactaattatcccacaggaattaaagcgttttatatgcgtttaaatgatgataataaaacggttgctgcgatggatgttttagccccgaaaattggggaaattatcggcggttcccaacgggaagaaagactggatatattagaaaaacggattaatgaaatgggtattattcccgatgatttgtggtggtatttagacctcagaagatatggaaccgtcccccatgccggatttggtttaggctttgaaagagtcgtccaatttatgacaggaatggctaatattcgggatgtaattcctttccctcgtacccccttaagtgcagagttttaa

SEQ ID NO: 10202 - protein, 463 aa, Cyanothece sp. ATCC 51142
MQTKRVRDILRHGKPDETVTIQGWVRTKRELKEFAFMEVNDGSSLNSLQVVLDESVPNYQDALKLLNTGASVEVSGTLVQSPGKGQNIELKAAKVQVYGTSDPETYPLQKKRHSFEFLRTIGHLRSRTNTLGAVMRVRNACATAIHKFFQERDFIWIHTPIITASDCEGAGELFTVTNFDLGKVPLDKQQKIDYTQDFFGKQAYLTVSGQLEAEVMAMAFQNVYTFGPTFRAENSNTSRHLAEFWMVEPEMAFCDIEGDQDLAEEFLKYIFKYVLKTCPEDMEFFNKRIDKSVLETADNIINNEFERITYTKAIELLEKSNKKFEYAVEWGIDLQSEHERYLAEELFKKPLIVTNYPTGIKAFYMRLNDDNKTVAAMDVLAPKIGEIIGGSQREERLDILEKRINEMGIIPDDLWWYLDLRRYGTVPHAGFGLGFERVVQFMTGMANIRDVIPFPRTPLSAEF

SEQ ID NO: 10203 - DNA, 1389 bp, Opitutus terrae PB90-1
  CDS (1)..(1389): transl_table=11
atgcttaaaccgaccacggtcaaggacgcgctccacagcgagtccgcccaagacaccatcctcgttcacggctgggtgcggacccggcgtgacgccaagacgttttcgttcctcgaactcaacgacggctcgtgcctgaaaaacctgcaggtgatcgcgccggcgacgctggccaactacacggacgtgcaacacctgaccaccggggcgtccgtgaccgtccgcggtaagctggtgccgtcgcagggccaggggcaaaagtgggaggtcacggcggaggatgtgaccgtgatcggcacggcggatgcgacttatccactgcagaagaaaggacacacaccggagtttctgcgcgagatcgcgcacctgcggccacggtcgaacctgttcggcgcggtgttccggacgcggagtcggctggcgtttgcgatccaccggtttttccaggagcgcggattcgtctacgtgcacacgccgatcatcaccggcagcgattgcgaaggggcgggcgaattgttccgggtgacaacgcacgacctcgcgaatccgccgaagcgcgaggatggcttgatcgacgacgcgaaggactttttcgcgcggcgcacgtatctcacggtgagcgggcaactcgaggcggaggccttcgcctgcgcgctggggaaggtctacaccttcggtccgacgttccgggcggagaattcgaacacctcgcggcatgcgaatgagttttggatgatcgagcccgaggtggcgttctgcgacctgcaggggaatatggatctcgccgaggagttcgtgaaggcgctgatccgcgaggtgaggacgaactgcgccgaggacctcgagctgtttgccaagttcgtcgacaaggaactgctggcgcggctggacttcgtgctcgagcggccgtttcagcgcgtgagctacacggaggcgatcgagctattgaagaagagcggcaagcagttcgagtatcccgtcgagtatggcacgaacctgcagtcggagcacgagcgttacctgacggaagtcgtcttcaaatgtccgacgacggtctacaactatccgaaggagataaagccgttctacatgcggctgaacgacgacgacaaaacggtgacggcgatggacgtgctggtgccggggatcggcgaaatcgtcggcggcagtcagcgtgaagagcggctcgacgtgctcgaagcgaacatgcgccggcacggagtcgatccgaaggactacgggtggtatctcgatctgcgccgctacggtaccgtgccgcacgcggggtttgggctcgggttcgagcggatgctgatgttcgtcacaggagtgccgaatatccgcgatgtgatcccgttcgcgcggacgccggggaatgcagcgttctga

SEQ ID NO: 10204 - protein, 462 aa, Opitutus terrae PB90-1
MLKPTTVKDALHSESAQDTILVHGWVRTRRDAKTFSFLELNDGSCLKNLQVIAPATLANYTDVQHLTTGASVTVRGKLVPSQGQGQKWEVTAEDVTVIGTADATYPLQKKGHTPEFLREIAHLRPRSNLFGAVFRTRSRLAFAIHRFFQERGFVYVHTPIITGSDCEGAGELFRVTTHDLANPPKREDGLIDDAKDFFARRTYLTVSGQLEAEAFACALGKVYTFGPTFRAENSNTSRHANEFWMIEPEVAFCDLQGNMDLAEEFVKALIREVRTNCAEDLELFAKFVDKELLARLDFVLERPFQRVSYTEAIELLKKSGKQFEYPVEYGTNLQSEHERYLTEVVFKCPTTVYNYPKEIKPFYMRLNDDDKTVTAMDVLVPGIGEIVGGSQREERLDVLEANMRRHGVDPKDYGWYLDLRRYGTVPHAGFGLGFERMLMFVTGVPNIRDVIPFARTPGNAAF

SEQ ID NO: 10205 - DNA, 1371 bp, Akkermansia muciniphila ATCC BAA-835
  CDS (1)..(1371): transl_table=11
atgatgaacagaacattggtgaaacatgtcctggacagtgaggaggaaatgccggacgtactgattcagggatgggtgcgtacgcgccgtgattccaaggctttttcctttctggaggtgaatgacggttcctccgtcgcctccctgcaggtcgtggcggatgagggtatccccggctatgaacggattggagaaatggctacggggtctgccgtgagcatccgcggcgctctggttgccgggcagggaaggcagcgatgggaattgcgcgccgcttccctggagctggtgggggctgttccggattcctatcccttgcagaaaaaggggcatacgccggagtttctgcgttccatcgcccatttgcgcccccgcaccaacctgtttggagccgtgttccgcatgcgcagcaggctggccttcgccatccaccgctttttccaggaaagggatttttcctgggtcagcactcccattattaccgccagtgactgcgaaggggccggagaaatgttccgcgtgacgactttggatgtgggagacgctacttcccgtgacgcctcccgggatttcttcggcaaggcggcctacctcacggtaagcggccagctggaaggggaagcgttcgcgtgcgccctgagcaacatttatacctttggccccacgttccgggcggagaactccaatactacgcgccatgcggcggaattctggatggtggagcctgaaatggcattctgcgacctgtatggagacatggacatggcggaagagtttgtccgttttctcgtcggcgatgccttggcaaacagcgcggaagaagtggaattcctgacccgttttgtagacaaggggctgcgggaacgcctggagcatgtgaaggaaacgccgtttgtgcgctgttcctatacggaagccgtggatatcctgctcaagagcggcaaaacatttgattaccccgtttcctggggcatcaatctgcagagcgaacatgaacgcttcctgacggaggagcattttaaatgccccgtcatcgtgtacaactacccgaaggagattaaacccttctatatgcgcctgaatgaagacggaaagaccgttaccgccatggatgtgctggtgcccggcattggtgaaatcgtgggtggcagccagcgtgaggagcggctggatattctggaggaaaacatgcgcagcatgggcatgaatgcggaagcgtaccggtggtatgcggatctgcgccgctacggcacggtgccgcacgccggattcggtgccgggtttgaacgcctgttgatgttcgtgaccggggtgaccaacatccgcgacgtcctgccttttgcccgtaccccgcggaattgcgagttctga

SEQ ID NO: 10206 - protein, 456 aa, Akkermansia muciniphila ATCC BAA-835
MMNRTLVKHVLDSEEEMPDVLIQGWVRTRRDSKAFSFLEVNDGSSVASLQVVADEGIPGYERIGEMATGSAVSIRGALVAGQGRQRWELRAASLELVGAVPDSYPLQKKGHTPEFLRSIAHLRPRTNLFGAVFRMRSRLAFAIHRFFQERDFSWVSTPIITASDCEGAGEMFRVTTLDVGDATSRDASRDFFGKAAYLTVSGQLEGEAFACALSNIYTFGPTFRAENSNTTRHAAEFWMVEPEMAFCDLYGDMDMAEEFVRFLVGDALANSAEEVEFLTRFVDKGLRERLEHVKETPFVRCSYTEAVDILLKSGKTFDYPVSWGINLQSEHERFLTEEHFKCPVIVYNYPKEIKPFYMRLNEDGKTVTAMDVLVPGIGEIVGGSQREERLDILEENMRSMGMNAEAYRWYADLRRYGTVPHAGFGAGFERLLMFVTGVTNIRDVLPFARTPRNCEF

SEQ ID NO: 10207 - DNA, 1395 bp, Clostridium botulinum B str. Eklund 17B
  CDS (1)..(1395): transl_table=11
atgaaaaatacagttttaattaagaaaatttatagagaaactgatcaatttctttcaaaggaagtaatgatatcaggttggataagaactttaagagcatctaatgcttttggtttcattgaaataaatgatggttctttctttaaaaatatccaagtagtttttgatgacaaattaggtaactttaaagaaatttcaaaattaccaataagctcttcaatctcagttgttggtacattagttgctacaccagatgctaaacaaccatttgaaattcaagctaaagaaatagttattgaaggaatgtcaaattctgattacccacttcaaaagaaaagacatacttttgaatacttaagatcaattgcacatttaagaccaagaagtaacgcattctcagcaacatttagagtacgttcagttgctgcctttgcaatacataaattcttccaagaacaaggttttgtatatactcatactccaataattacaggtagtgactgtgaaggtgctggggagatgtttagagtaactactcttgaccctaaagcccctgaattaactaaagaaggagatattgattatactaaagacttctttggtaaagaaactaatcttactgtttctggtcaattaaatgctgaatgtttcgcattagcattcagaaatatatatacatttggacctacattcagagctgaaaattctaacactacaagacatgcagctgaattctggatgatagaacctgaaatagcatttgctgatttacaagacgatatggaacttgcagaagcaatgcttaaatacgttataaaatatgttatggatgaatgtccagaagaattacaattcttcaattcatttgttgataaaggattactagaaagattaaatcatgttgtttcatcagactttgctaaagttacatacacagaagctgttgaaatcttagaaaaatgtgataaagaatttgattatgacgtatcttggggtatcgatttacaaactgaacacgaaagatatcttacagaagaacactttaaaaagccactatttgtaacagattatcctaaagaaattaaagcattctatatgagaatgaatgaagataataaaactgttgctgcaactgatcttttagtaccaggtatcggagaaatcattggtggtagccaaagagaagaaagacttgatgttttagaagctagaatggctgaattaggtcttaagaaagaagattactggtggtacttagaattaagaaaatatggagaaactaaacatgctggatttggtttaggatttgaaagattaatcatgtacatcactggtatgacaaatatcagagatgtaataccattccctagaactcctggaacttctgaattctag

SEQ ID NO: 10208 - protein, 464 aa, Clostridium botulinum B str. Eklund 17B
MKNTVLIKKIYRETDQFLSKEVMISGWIRTLRASNAFGFIEINDGSFFKNIQVVFDDKLGNFKEISKLPISSSISVVGTLVATPDAKQPFEIQAKEIVIEGMSNSDYPLQKKRHTFEYLRSIAHLRPRSNAFSATFRVRSVAAFAIHKFFQEQGFVYTHTPIITGSDCEGAGEMFRVTTLDPKAPELTKEGDIDYTKDFFGKETNLTVSGQLNAECFALAFRNIYTFGPTFRAENSNTTRHAAEFWMIEPEIAFADLQDDMELAEAMLKYVIKYVMDECPEELQFFNSFVDKGLLERLNHVVSSDFAKVTYTEAVEILEKCDKEFDYDVSWGIDLQTEHERYLTEEHFKKPLFVTDYPKEIKAFYMRMNEDNKTVAATDLLVPGIGEIIGGSQREERLDVLEARMAELGLKKEDYWWYLELRKYGETKHAGFGLGFERLIMYITGMTNIRDVIPFPRTPGTSEF

SEQ ID NO: 10209 - DNA, 1395 bp, Clostridium botulinum E3 str. Alaska E43
  CDS (1)..(1395): transl_table=11
atgaaaaatacagttttaattaaaaaaatttatagagaaactgatcaatttctttcaaaggaagtaatgatatcaggttggataagaactttaagagcatccaatgcttttggtttcattgaaataaacgatggttctttctttaaaaatatccaagtagtttttgatgacaaattaggtaactttaaagaaatttcaaaattaccaataagctcttcaatctcagttgttggtacattagttgctacaccagatgctaaacaaccatttgaaattcaagctaaagaaatagttattgaaggaatgtcaaattctgattacccacttcaaaagaaaagacatacttttgaatacttaagatcaattgcacatttaagaccaagaagtaatgcattctcagcaacatttagagtacgttcagttgccgcctttgcaatacataaattcttccaagaacaaggttttgtatatactcatactccaataattacaggtagtgactgtgaaggtgctggagaaatgtttagagtaactactcttgaccctaaggctcctgaattaactaaagaaggaaatattgattatactaaagacttctttggtaaagaaactaatcttactgtttctggtcaattaaatgctgaatgtttcgcattagcattcagaaatatatatacatttggacctacattcagagctgaaaattctaacactacaagacatgcagctgaattctggatgatagaacctgaaatagcctttgctgatttacaagatgatatggaacttgcagaagcaatgcttaaatacgttataaaatatgttatggatgaatgtccagaagaattacaattcttcaattcatttgttgataaaggattactagaaagattaaatcatgttgtttcatcagactttgctaaagttacatacacagaagctgttgaaatcttagaaaaatgtgataaagaatttgattatgacgtatcttggggtatcgatttacaaactgaacatgaaagatatcttactgaagaacactttaaaaaaccactatttgtaacagattatcctaaagaaattaaagcattctatatgagaatgaatgaagataataaaactgttgctgcaactgaccttttagtaccaggtatcggagaaatcattggtggtagccaaagagaagaaagacttgatgttttagaagctagaatggctgaactaggtcttaagaaagaggattactggtggtacttagaattaagaaaatatggagaaactaaacatgctggatttggtttaggatttgaaagattaattatgtacatcactggtatgacaaatatcagagacgtaataccattccctagaactcctgggactagcgagttctaa

SEQ ID NO: 10210 - protein, 464 aa, Clostridium botulinum E3 str. Alaska E43
MKNTVLIKKIYRETDQFLSKEVMISGWIRTLRASNAFGFIEINDGSFFKNIQVVFDDKLGNFKEISKLPISSSISVVGTLVATPDAKQPFEIQAKEIVIEGMSNSDYPLQKKRHTFEYLRSIAHLRPRSNAFSATFRVRSVAAFAIHKFFQEQGFVYTHTPIITGSDCEGAGEMFRVTTLDPKAPELTKEGNIDYTKDFFGKETNLTVSGQLNAECFALAFRNIYTFGPTFRAENSNTTRHAAEFWMIEPEIAFADLQDDMELAEAMLKYVIKYVMDECPEELQFFNSFVDKGLLERLNHVVSSDFAKVTYTEAVEILEKCDKEFDYDVSWGIDLQTEHERYLTEEHFKKPLFVTDYPKEIKAFYMRMNEDNKTVAATDLLVPGIGEIIGGSQREERLDVLEARMAELGLKKEDYWWYLELRKYGETKHAGFGLGFERLIMYITGMTNIRDVIPFPRTPGTSEF

SEQ ID NO: 10211 - DNA, 1398 bp, Candidatus Phytoplasma mali
  CDS (1)..(1398): transl_table=11
atgatagtttttttaaaagatttatttaataatccattattgtatgaaaataaaaaaatttttttaaaaggttggattagaaattgtcgttttcaaaaaaaattattttttattgattttaatgatggaacatttatcaatgatttgcaaattgtttgtaaaaaagataaaaatttttttcttgaaaaaattaaaaaaaaattacaaataggagcatctatagaaattgaaggttttttagttaaaaattttaaaatcaatgatatttttgaattagaagcggaaaaaatcaatattttaggttctagttcttttgaatatttaattcaacctaaaaatcactcaaaagcttttttaagaaaaattcctcatttaagattaagaactaaaatttttggatctgtttttcgtattagaagtgctgtttttttagctatacatgaatttttcaaaaatgaagattttttattaaccaacacccccattattactgttaatgatggtgaaggagcaggtgatttatttcaaataactactttgaatttagaaaaattagttttaacaaaagataagaaaattgattatcttaaagattttttcggtagaaaaacttttttaagtgtaacaggccaattagaattagaagctttagcaacatctttcaataaagtttatagtttgggtcctatttttagagctgataactccaatactattaaacatgttgcagaattttggatgttagaagtggaaatggctttctctaatttagaaaaaaatatggaaattatcgaaagaatgttaaaaaaagtagttaaatcttgtctattaacaaatcaaaatgatttaaaatttttagatgaaaatgaatctcccggtttgattaaaaaattaaatgaatttattggattaaaatcatttccaaaaattaaatataaagaagctatggatattttaatcaaaagcggtgttgattttgaatttaaaccttttcacggtagtgatttttataccgaacatgaaaaatatttaactgaagttcattttaaaagtcctgtttttattattgattggccaaaagaaatcaaagctttttatatgaaaattaatccagataaaaaaacagttgcttgtgtagatcttttagttccttttgttggcgaattggttggaggatcacaaagagaagaaaatttagaaattttaaaaaatagaatgaaagaattaaatatttcttcagaaaatttagaatggtatttagatttacgtcgttttggtagttgtgtacattctggttttggtttaggatttgaaagattattaatttatttaaccggagtcgaaaacattagagatgttattgcttttcctcttagcagcaaaagtattaatttttaa

SEQ ID NO: 10212 - protein, 465 aa, Candidatus Phytoplasma mali
MIVFLKDLFNNPLLYENKKIFLKGWIRNCRFQKKLFFIDFNDGTFINDLQIVCKKDKNFFLEKIKKKLQIGASIEIEGFLVKNFKINDIFELEAEKINILGSSSFEYLIQPKNHSKAFLRKIPHLRLRTKIFGSVFRIRSAVFLAIHEFFKNEDFLLTNTPIITVNDGEGAGDLFQITTLNLEKLVLTKDKKIDYLKDFFGRKTFLSVTGQLELEALATSFNKVYSLGPIFRADNSNTIKHVAEFWMLEVEMAFSNLEKNMEIIERMLKKVVKSCLLTNQNDLKFLDENESPGLIKKLNEFIGLKSFPKIKYKEAMDILIKSGVDFEFKPFHGSDFYTEHEKYLTEVHFKSPVFIIDWPKEIKAFYMKINPDKKTVACVDLLVPFVGELVGGSQREENLEILKNRMKELNISSENLEWYLDLRRFGSCVHSGFGLGFERLLIYLTGVENIRDVIAFPLSSKSINF

SEQ ID NO: 10213 - DNA, 1395 bp, Stenotrophomonas maltophilia R551-3
  CDS (1)..(1395): transl_table=11
atgacggtggtcagcgttgaacatgcgcttgccgggaaaatcccggaaggcggcgaagtcacggtacgcggatgggtgcgcacggtgcgcggttcagcaaatctggctttcgtgaatgtgaccgacggctcctgcttcgccccgatccaggtcgtggccggcgacgcgctggccaacttcgacgagatcaagcgcctgaccaccggctgctcgctggtggccaccggcacgctggtgaagtcgcagggcaagggccagtcgttcgagatccaggccagcgcggtcgaggtggtcggctgggtcgaagacccgctcacctacccgatccagcccaagccgatgacgccggagttcctgcgtgaagtggcgcacctgcgcccgcgcaccaacctgttcggcgcggtcacccgcatccgcaactgcctggcccaggccgtgcaccgtttcttccacgagaacggcttcaactggatcagcaccccgatcatcaccacctccgacgccgaaggcgccggccagatgttccgcgtgtccaccctggacatggtgaacctgccgcgtgacgcccagggcgggatcgacttcagccgcgatttcttcggcaaggaaaccttcctgaccgtgtccggccagctgaacgtcgaggcctactgcctggcgctgagcaaggtgtacaccttcggcccgaccttccgcgccgagaacagccacaccacccgccacctggcggaattctggatgatcgagccggaaatcgccttcgccgacctggccgaagacgcacgcctggccgaggaattcctgaagtacctgttccgcgcggtgctcaacgagcgcggcgacgacctggccttcatcgccgagcgcgtggacaagaacgcgatcaccaagctggaagacttcatcaacgcgccgttcgaacgcatcgactacaccgatgcggtcagcctgctgcagaagtccggaaagaagttcgacttcccggtcgaatggggcctggacctgcagaccgagcacgagcgctggctgaccgaggaacacgtcggtcgcccggtggtggtgaccaactaccccgagcacatcaaggccttctacatgcgcctgaacgatgacggcaagaccgtcgcggcgatggacgtgctggccccgggcatcggcgagatcatcggtggcagccagcgcgaagagcgcctggacgtgctggatgcacgcatggcgcagttcggcctggatcgcgagcactacagctggtaccgcgatttccgccgctacggctcggtaccgcacgccggcttcggtctgggcttcgagcgcctggtggtgtacgtctgcggcctgtccaacatccgcgatgcgatcccctacccgcgcgccccgggcagcgcggacttctaa

SEQ ID NO: 10214 - protein, 464 aa, Stenotrophomonas maltophilia R551-3
MTVVSVEHALAGKIPEGGEVTVRGWVRTVRGSANLAFVNVTDGSCFAPIQVVAGDALANFDEIKRLTTGCSLVATGTLVKSQGKGQSFEIQASAVEVVGWVEDPLTYPIQPKPMTPEFLREVAHLRPRTNLFGAVTRIRNCLAQAVHRFFHENGFNWISTPIITTSDAEGAGQMFRVSTLDMVNLPRDAQGGIDFSRDFFGKETFLTVSGQLNVEAYCLALSKVYTFGPTFRAENSHTTRHLAEFWMIEPEIAFADLAEDARLAEEFLKYLFRAVLNERGDDLAFIAERVDKNAITKLEDFINAPFERIDYTDAVSLLQKSGKKFDFPVEWGLDLQTEHERWLTEEHVGRPVVVTNYPEHIKAFYMRLNDDGKTVAAMDVLAPGIGEIIGGSQREERLDVLDARMAQFGLDREHYSWYRDFRRYGSVPHAGFGLGFERLVVYVCGLSNIRDAIPYPRAPGSADF

SEQ ID NO: 10215 - DNA, 1401 bp, Proteus mirabilis HI4320
  CDS (1)..(1401): transl_table=11
atgatcgttgcgcctgtagtcgacgtactgcaaggccgtatcgcggttggcgaagacgtcaccgttcgcggttgggtacgtacaagaagagattcaaaagctggtatctcattccttaccgtctatgacggttcctgctttaatccagtacaggccatcattaataataatttaccgaattatcaagatgaagtgctgcacttaaccacaggttgctctgtggaagtcaccggtaaaattgttgaatctccgggtcaaggtcagaactttgaaattcatgcgaccaaagttgtggtagtaggaatggttgatgatccggaaacttatccgatggccgctaaacgtcacagcgttgagtatctgcgtgaagttgctcatcttcgtccacgcacaaacttaattggtgctgttgcacgtgttcgccataccttggcacaagcactacatcgtttcttcgatgagcaaggctttttctgggtttctacgccattaattacggcggcggataccgaaggtgcgggtgaaatgttccgtgtctctaccttagatatgaacaacctgccacgtactgataaaggtgaagttgattttagcgaagacttttttggtcgcgaagctttcttaaccgtatcaggacaattaaacggcgaaacttatgcctctgcattaagtaaagtctatactttcggcccaactttccgcgctgagaattcaaatactagtcgtcacttggctgaattctggatggttgaacctgaagtggcttttgctgatctgaatgatatcgccggattagcagaaaaaatgctgaaatatgccttttctgccgtgttagctgagcgcagagatgatatggagttttttgctcaacgcgttgataaagaagccattacacgtttagagcactttatcgcttctgatttcgcacaaattgactacacagatgcgattactgtgttagaaaattgcggccagaaatttgaaaacccagtttattggggtgttgacctctcctccgagcatgagcgctatcttgctgagaaacactttaaagcccctgtggttgtgaagaactacccgaaagatatcaaagcattctatatgcgtatgaatgaagacggtaaaacagttgcggcaatggatgtgttagcaccaggtatcggtgaaatcattggtggttctcaacgtgaagaacgtttagagatgtttgataaacgtttagctgagatgggtatgaataaagaagactactggtggtatcgtgatttacgccgttatggcacagtaccacactctggttttggtctcggctttgaacgcttagttgcttatgtgactggtgtcacaaatattcgtgaagtgatcccattcccacgtacaccaagaaatgtcgatttctaa

SEQ ID NO: 10216 - protein, 466 aa, Proteus mirabilis HI4320
MIVAPVVDVLQGRIAVGEDVTVRGWVRTRRDSKAGISFLTVYDGSCFNPVQAIINNNLPNYQDEVLHLTTGCSVEVTGKIVESPGQGQNFEIHATKVVVVGMVDDPETYPMAAKRHSVEYLREVAHLRPRTNLIGAVARVRHTLAQALHRFFDEQGFFWVSTPLITAADTEGAGEMFRVSTLDMNNLPRTDKGEVDFSEDFFGREAFLTVSGQLNGETYASALSKVYTFGPTFRAENSNTSRHLAEFWMVEPEVAFADLNDIAGLAEKMLKYAFSAVLAERRDDMEFFAQRVDKEAITRLEHFIASDFAQIDYTDAITVLENCGQKFENPVYWGVDLSSEHERYLAEKHFKAPVVVKNYPKDIKAFYMRMNEDGKTVAAMDVLAPGIGEIIGGSQREERLEMFDKRLAEMGMNKEDYWWYRDLRRYGTVPHSGFGLGFERLVAYVTGVTNIREVIPFPRTPRNVDF

SEQ ID NO: 10217 - DNA, 1386 bp, Fusobacterium nucleatum subsp. polymorphum ATCC 10953
  CDS (1)..(1386): transl_table=11
atgattactgtaaaagatatttttagacatggagagaactacctaaacaaagagatagagctttttggttgggtaagaaagataagagaccaaaagaaatttggttttattgaattaaatgatggctcattctttaaaggagttcaaatagtttttgaagaaggacttgaaaattttgatgaggtttcaagactttcaatagcttctactattaaagtaaaaggaactcttgttaaatcagaaggtagtgggcaagatttagaagttaaagctcataaaattgaaatattccaaaaagctgacttggaatatccattacaaaataaaagacatacttttgaatatttaagaacaaaagcacatttaagacctagaacaaatactttctcagcagtatttagagttagatctgtacttgcttatgcaatacataaatttttccaagaaaataactttgtttatgtccacactccaattataactggttctgatgctgaaggtgctggagaaatgtttagaattacaactcttgacttaaataaagtacctaaaaaagaaaatggagaagttgatttctctaaagacttctttggtaaatctacaaacttaacagttagtggtcaattaaatgttgaaactttctgtgctgcatttagaaatgtttatacttttggaccaacatttagagcagaatactcaaatacagcaagacatgcttctgaattttggatgatagaacctgaaatagcttttggggatttaggtgctaatatggagcttgcagaagctatggttaaatatataattaaatatgttatggataattgtcctgaagaaatggaattctttaactcatttattgaaaaaggactatttgataaattaaataatgtacttaacaatgattttggaagagttacttatacagaagcaattgaaattttagaaaaatctggaaagaaatttgaatttcctgttaaatggggaatagacttacaaagtgaacatgaaagatatttagcagaagaatattttaaaaaacctgtgtttgtaacagattatccaaaagatattaaggctttctatatgaaacttaatgaagataataaaacagttagagctatggacttattagcaccaggaattggagaaataattggtggttctcaaagagaagataactatgaacttcttacaaaaagaatgaaagaacttggacttaatgaagaagactatgaattttatttagatttaagaagatttggaagtttccctcactctggatatggattaggttttgaaagaatgatgatgtatctaactggtatgcaaaatattagagatgtaatacctttcccaagaactccaaataatgcagaattttaa

SEQ ID NO: 10218 - protein, 461 aa, Fusobacterium nucleatum subsp. polymorphum ATCC 10953
MITVKDIFRHGENYLNKEIELFGWVRKIRDQKKFGFIELNDGSFFKGVQIVFEEGLENFDEVSRLSIASTIKVKGTLVKSEGSGQDLEVKAHKIEIFQKADLEYPLQNKRHTFEYLRTKAHLRPRTNTFSAVFRVRSVLAYAIHKFFQENNFVYVHTPIITGSDAEGAGEMFRITTLDLNKVPKKENGEVDFSKDFFGKSTNLTVSGQLNVETFCAAFRNVYTFGPTFRAEYSNTARHASEFWMIEPEIAFGDLGANMELAEAMVKYIIKYVMDNCPEEMEFFNSFIEKGLFDKLNNVLNNDFGRVTYTEAIEILEKSGKKFEFPVKWGIDLQSEHERYLAEEYFKKPVFVTDYPKDIKAFYMKLNEDNKTVRAMDLLAPGIGEIIGGSQREDNYELLTKRMKELGLNEEDYEFYLDLRRFGSFPHSGYGLGFERMMMYLTGMQNIRDVIPFPRTPNNAEF

SEQ ID NO: 10219 - DNA, 1404 bp, Mannheimia haemolytica PHL213
  CDS (1)..(1404): transl_table=11
atgtctaaatttccaacagtttcggaaatcctatccggcaagatagcggtaggtgaagaagcgacagtgcgtggttgggtgcgtacccgccgtgattcaaaagccggtttatctttcttgagcgtttacgatggttcttgctttgacccaattcaagcgattattaataacgatctaccaaattataatgccgaagtattacatttaaccgcaggttgctctgtggtggtgaccggtaaagttgtggaatcccctgctgaaggtcaagccgttgaattacaagcaagtaaagtggaagtgcttggttgggtggaagatcctgatacctacccaatggcagcgaaacgccactctatcgaatatctgcgtgaagtcgctcacttacgccctcgtacgaacttaatcggtgcagttgctcgtgttcgtcactgtttagctcaagctatccaccgtttcttccacgagcaaggtttctattgggtagcaacacctgtaattaccgcctcagatactgaaggtgcaggtgaaatgttccgtgtttctacgctggatttagaaaatctacctcgtggcgaaaacggcaaagtggattttaaccaagatttcttcggtaaagaatcgttcttaaccgtatccggccagttaaatgcggaaacctatgcgtgtgccttaagtaaagtttatactttcggtccgacattccgtgcagaaaactcaaacacaactcgccatcttgcagaattctggatgatggagccggaagttgcctttgccgacttaaacgacaatgcaaaattagccgaagatatgctgaaatatgtgtttaaagcggtgcttgcagaacgtaaagatgatatggaatttttcgttaaacacgttgataaagaagcgattagtcgtttagaaaactttatcaattcgccatttgctcaagtagattacaccgatgcgattgagatcttattgaaatccggcaaagaatttgaattcccggtgtcttggggaatcgatctttcctctgaacacgagcgtttcttagccgaagaacactttaaatcgccggtggtcgtgaaaaactatccaaaagacattaaagccttctatatgcgtttaaatgatgacggcaaaacggttgccgcaatggacgttttagctccgggaatcggtgaaattatcggtggttctcaacgtgaagaacgtttagaagtgttagatcagcgtatgaatgaaatgggcttaaaccctgaagattactggtggtatcgtgatttgcgtaaatacggtacagtgccacactcaggtttcggtttaggtttcgagcgtttaatcgtgtatgtaaccgggttacaaaacattcgtgatgtaatcccattcccacgtgctccacgcaatgcgaacttctaa

SEQ ID NO: 10220 - protein, 467 aa, Mannheimia haemolytica PHL213
MSKFPTVSEILSGKIAVGEEATVRGWVRTRRDSKAGLSFLSVYDGSCFDPIQAIINNDLPNYNAEVLHLTAGCSVVVTGKVVESPAEGQAVELQASKVEVLGWVEDPDTYPMAAKRHSIEYLREVAHLRPRTNLIGAVARVRHCLAQAIHRFFHEQGFYWVATPVITASDTEGAGEMFRVSTLDLENLPRGENGKVDFNQDFFGKESFLTVSGQLNAETYACALSKVYTFGPTFRAENSNTTRHLAEFWMMEPEVAFADLNDNAKLAEDMLKYVFKAVLAERKDDMEFFVKHVDKEAISRLENFINSPFAQVDYTDAIEILLKSGKEFEFPVSWGIDLSSEHERFLAEEHFKSPVVVKNYPKDIKAFYMRLNDDGKTVAAMDVLAPGIGEIIGGSQREERLEVLDQRMNEMGLNPEDYWWYRDLRKYGTVPHSGFGLGFERLIVYVTGLQNIRDVIPFPRAPRNANF

SEQ ID NO: 10221 - DNA, 1386 bp, Borrelia duttonii Ly
  CDS (1)..(1386): transl_table=11
atgcacaaaagtatcaaagaaatattaaacaaccctataacaaacagtacaatcacagtcaaagggtggattagaacaaaacgaagcaatggtaaaatttcatttttagaaattaatgacggctcaaatattaaaggaattcaagctgttattgatgaaaacaatcctcaatttgaaaaaaaagaatttaaaaagctcacaacaggtgcaagcatatccttaacaggaatcttaattttaagccctgcaaaaggacaaacttatgaaattaaaacaacaaatttttatataattggggaatcagatcaagaaacatatcctttacaaaaaaaaagacattcttttgaattcttaagagaaatccctcatctaagaatacgcactaatacatttggtgctgttgccagaattaaaaaccaaatttcttataaaattcatgaatattttcaaaaaaacggatttttttatattcatacacccattattacatcaaacgatggtgaaggagtaggtgaaatatttcgtgtatctaccctaaaccttaataatattgaaaacaaaaaagaaattgattttaaagatgatttttttggcaaacaagcatttcttacagtaactggacaattgcatggagaagcttatgcaatggctttatcaaaaatatatacatttggtcctacctttagagcagaaaattcaaatacaacacgccatgcctcagaattctggatgattgaacctgaaatggcattttttacgcttgaagataacataaatttagcagaagattttttaaaatacgtcctaagcgaaactttaaatcactgtcatgaagatatggaattttttgataacttcattgaaaagggagtaataaaaaagattgaagatgtaataaattctaaatttgaagttattacctatactcaagcaattaaaaaactcgaaaatgcaacaaaaacatttgaaataaaaccttattggggcatggatttacaaacagaacatgaaaggtatttaacagaagaaattattaaaaaacctactacagttattgactatccaaaagaatttaaagcattttacatgaaaatgaatcaagacaataaaactgtaaaaggaatggatattttagttccacgaattggagaaatcattgggggcagtgaaagagaagataatctagataaattgaataatagaataaaagagctaaatttagaaacagagactcttaattggtatttagatttaagaagattcggctcaactccgcattctggatttggacttggacttgaaagactactgcaatatacaacaggaatggctaatattagagatgttataccatttccaagaactccgaaaactcttcatttctaa

SEQ ID NO: 10222 - protein, 461 aa, Borrelia duttonii Ly
MHKSIKEILNNPITNSTITVKGWIRTKRSNGKISFLEINDGSNIKGIQAVIDENNPQFEKKEFKKLTTGASISLTGILILSPAKGQTYEIKTTNFYIIGESDQETYPLQKKRHSFEFLREIPHLRIRTNTFGAVARIKNQISYKIHEYFQKNGFFYIHTPIITSNDGEGVGEIFRVSTLNLNNIENKKEIDFKDDFFGKQAFLTVTGQLHGEAYAMALSKIYTFGPTFRAENSNTTRHASEFWMIEPEMAFFTLEDNINLAEDFLKYVLSETLNHCHEDMEFFDNFIEKGVIKKIEDVINSKFEVITYTQAIKKLENATKTFEIKPYWGMDLQTEHERYLTEEIIKKPTTVIDYPKEFKAFYMKMNQDNKTVKGMDILVPRIGEIIGGSEREDNLDKLNNRIKELNLETETLNWYLDLRRFGSTPHSGFGLGLERLLQYTTGMANIRDVIPFPRTPKTLHF

SEQ ID NO: 10223 - DNA, 1401 bp, Klebsiella pneumoniae 342
  CDS (1)..(1401): transl_table=11
atgagcgttgtgcctgtagccgacgtactccagggccgcgttgccgttgacagcgaagtcacggtccgcggatgggtgcgtacccgccgagattctaaagctggcttttcattcctcgccgtctatgacggttcctgctttgatcctgtacaggccgttattaataattctctgcccaattacaatcaggaagtgctgcgtctgaccaccggttgctcggtgattgtcaccggtaaagtcgtggcttcccagggccagggtcaaagctttgagatccaggcgaccagcgtggaagtcaccggctgggtggaagacccggacacctacccgatggcggccaagcgccacagcatcgagtatctgcgtgaagtagcgcacctgcgtccgcgcaccaatctgattggcgcggtagctcgcgtgcgtcataccctggcgcaggcgctgcaccgattcttcgacgaacagggcttcttctgggtttccaccccgctgatcaccgcttccgataccgaaggcgccggcgaaatgttccgcgtgtcgacgctggatctggaaaacctgccgcgtaacgatcagggcaaagtcgacttcgataaagacttctttggtaaagagtcgttcctgaccgtatccggccagctgaacggcgagacctatgcctgcgcactgtcgaaaatctacaccttcggcccaaccttccgcgccgaaaactccaacaccagccgccacctggcggagttctggatgctggagccggaagtcgccttcgcgagcctgaacgatgttgctggtctggcggaagcgatgctcaagtacgtctttaaggcggtactcgaagagcgtgcggatgacatgcagttcttcgccgagcgcgtagacaaagacgctatcgaccgtctgcagcgtttcgtctccgctgattttgctcaggtggattacaccgatgccgtcactatcctggaaaactgcggcaagcagtttgagaacccggtttactggggcgtggatctctcctccgagcacgagcgttatctggctgaagaacacttcaaagcgccggtcgtggtgaaaaactatccgaaagacattaaggccttctacatgcgccttaacgaagacggtaaaaccgtcgcggcaatggacgtgctggcgccgggcatcggcgagatcatcggtggttcccagcgtgaggagcgtctcgacgtgctggacgcgcgtatggcagagatggggctcaacaaagaagactactggtggtatcgcgacctgcgccgctacggcaccgtaccgcactccggcttcggtctgggcttcgaacgtctgatcgcttacgtcaccggcgtgcagaacgtccgcgatgtcattccgttcccgcgtaccccgcgcaacgcgacattctaa

SEQ ID NO: 10224 - protein, 466 aa, Klebsiella pneumoniae 342
MSVVPVADVLQGRVAVDSEVTVRGWVRTRRDSKAGFSFLAVYDGSCFDPVQAVINNSLPNYNQEVLRLTTGCSVIVTGKVVASQGQGQSFEIQATSVEVTGWVEDPDTYPMAAKRHSIEYLREVAHLRPRTNLIGAVARVRHTLAQALHRFFDEQGFFWVSTPLITASDTEGAGEMFRVSTLDLENLPRNDQGKVDFDKDFFGKESFLTVSGQLNGETYACALSKIYTFGPTFRAENSNTSRHLAEFWMLEPEVAFASLNDVAGLAEAMLKYVFKAVLEERADDMQFFAERVDKDAIDRLQRFVSADFAQVDYTDAVTILENCGKQFENPVYWGVDLSSEHERYLAEEHFKAPVVVKNYPKDIKAFYMRLNEDGKTVAAMDVLAPGIGEIIGGSQREERLDVLDARMAEMGLNKEDYWWYRDLRRYGTVPHSGFGLGFERLIAYVTGVQNVRDVIPFPRTPRNATF

SEQ ID NO: 10225 - DNA, 1401 bp, Aliivibrio salmonicida LFI1238
  CDS (1)..(1401): transl_table=11
atgacttacgcgcctgtaacagacgtattaagcggcaaactagcggttgacagtgaagtaactgttcgcggttggatccgttcgcgtcgcgattctaaagcgggaatttcattcctagctatttatgacggttcttgtttcgatccgattcaggccgtggttcctaatgacttaaataattacaatgaagaagtcctaaaactaacaacaggttgttctgttgaagttacggggactatcgttgcatctcctgctaaaggtcaagatttcgaacttgctgcaaccgcagtaaaagtcgttggtttagttgaagacccagatacctacccaatggcgaaaactcgtcactcaattgagtatttacgagaagttgctcaccttcgcccacgtactaacgtgattggcgcggttgcacgtgttcgtaactgtttgtctcaagcgattcaccgtttttaccacgagcaaggttacttatggatgtctgcaccactaatcacatcatctgatgctgaaggtgctggtgagatgttccgcgtttcgacattagatcacgcgaacgtgcctcttgatgacaaaggcaatgttgattacgacaaagacttctttggtaaagagacattccttacggtatctggtcaattaaatgctgaaacttacgcttgtgcattaagcaaagtgtacacatttggcccgactttccgtgctgaaaactcacacacaagtcgccacctagctgaattctggatggttgaacctgaggttgcttttgctgacctagatgacgttgcaaaactggctgaagacatgcttaagtatgtattcgaagcggttcttgctgagcgtcgtgatgatcttgaattctttgcttctcgcattgataaagaagcaatcactcgtctagagcaatttgtaagttctgattttgcacaagtagattacactgacgcaatccaaatccttatcgactctggtaagaaatttgaatttgacgttgagtggggcatcgatatgtcttctgagcatgagcgtttccttgctgaagaacatttcaaagcaccggttatcgttaaaaactaccctaaagacattaaagcattctacatgcgtcaaaatgacgatggtaagacagttgctgcgatggatgttcttgcaccaggcattggtgagatcatcggtggttctcaacgtgaagagcgtttagacgttcttgatgcacgtatgattgaaatgggtatcgaccctgaacacatgacttggtaccgcgatttacgtcgttacggtactgtacctcacgctggcttcggtcttggttttgagcgtctagtgtcttacgtaactggtatgggcaacgttcgtgacgttatcccgttcccacgtactccgcgttcagctaacttctaa

SEQ ID NO: 10226 - protein, 466 aa, Aliivibrio salmonicida LFI1238
MTYAPVTDVLSGKLAVDSEVTVRGWIRSRRDSKAGISFLAIYDGSCFDPIQAVVPNDLNNYNEEVLKLTTGCSVEVTGTIVASPAKGQDFELAATAVKVVGLVEDPDTYPMAKTRHSIEYLREVAHLRPRTNVIGAVARVRNCLSQAIHRFYHEQGYLWMSAPLITSSDAEGAGEMFRVSTLDHANVPLDDKGNVDYDKDFFGKETFLTVSGQLNAETYACALSKVYTFGPTFRAENSHTSRHLAEFWMVEPEVAFADLDDVAKLAEDMLKYVFEAVLAERRDDLEFFASRIDKEAITRLEQFVSSDFAQVDYTDAIQILIDSGKKFEFDVEWGIDMSSEHERFLAEEHFKAPVIVKNYPKDIKAFYMRQNDDGKTVAAMDVLAPGIGEIIGGSQREERLDVLDARMIEMGIDPEHMTWYRDLRRYGTVPHAGFGLGFERLVSYVTGMGNVRDVIPFPRTPRSANF

SEQ ID NO: 10227 - DNA, 1365 bp, Ureaplasma urealyticum serovar 10 str. ATCC 33699
  CDS (1)..(1365): transl_table=4
atgcaattaaaaattaaagagatttttgatcaagattatacaaaacttgaaggtcaaaaagtacaaattaaagcttgagttcgttcaaatcgtgattcaaaaaaaattggttttttagttttaaatgatggaagttctctaacaaatttacaagctgtatatcgtgttgataaaattagtaattatgaagaaataactgcggcacgaatgtgagcagcagttgctattgaaggtgtaattaaattaactccaacagctaaacaaccattagaactagaagtattaaatgctcaaattttaaaacaaagtgatgaagattttttattatcaaataatgatttaagtttagaaacattgcgtttaaatgcccatttaagaccaagaacaaatttatttcatgccattatgaaagtgcgagcaacacttgcttttgcagttcatgaatttatgaatcaaaacgaatatagttgattagctgcaccattgtttacaggaaatgatgctgaaggagcaggggaaacttttagtattcaaaaatttgataatgaagaattctttggtaaacaaactcatttatcggtaacagggcaattacaagctgaagcatacgcacaagcttttggtaatgtatatacatttggccctacttttagagctgaaaaatcgcacacaaatcgtcatttagctgaattttgaatgattgaaccagaaatggcttttgttgatttaaaaggtatgcaagatattgttgaaaatttaattaaacatgttattaaggctgttttagaaaaaaatcaacaagaattagaatttttagcacaaagaaacgatgaaaatttaattaaaaaacttcaaaaagttgttgattctaagtttgaacgtattgaatataaagatgcagttaaaattctagctaatgctgttaaaagtggtcatcaattcgaagataatgaaatcttttttggaatggatttaggttcagaacatgaaagatatatgtgcgaaacttatcatcaaggacctgttttcttacaaaattatccaaaagatattaaagcattttatatgaaattaaatgatgatcaacaaactgtagcttcaacagatttactaattccaggtgttggtgaattagtaggtggttcacaacgtgaagataattatgaaaaattattgaaacgatgtcaagaattaaaaatgccaattgaaagtttacaatgatatttagatttacgtcgttttggatattatatgtcatcaggttttggaattggttttgaacgtttagtgatgtatgtaacaggagttaataatattaaagatacaattccatttccacgaagtcatggccaaattgaattttaa

SEQ ID NO: 10228 - protein, 454 aa, Ureaplasma urealyticum serovar 10 str. ATCC 33699
MQLKIKEIFDQDYTKLEGQKVQIKAWVRSNRDSKKIGFLVLNDGSSLTNLQAVYRVDKISNYEEITAARMWAAVAIEGVIKLTPTAKQPLELEVLNAQILKQSDEDFLLSNNDLSLETLRLNAHLRPRTNLFHAIMKVRATLAFAVHEFMNQNEYSWLAAPLFTGNDAEGAGETFSIQKFDNEEFFGKQTHLSVTGQLQAEAYAQAFGNVYTFGPTFRAEKSHTNRHLAEFWMIEPEMAFVDLKGMQDIVENLIKHVIKAVLEKNQQELEFLAQRNDENLIKKLQKVVDSKFERIEYKDAVKILANAVKSGHQFEDNEIFFGMDLGSEHERYMCETYHQGPVFLQNYPKDIKAFYMKLNDDQQTVASTDLLIPGVGELVGGSQREDNYEKLLKRCQELKMPIESLQWYLDLRRFGYYMSSGFGIGFERLVMYVTGVNNIKDTIPFPRSHGQIEF

SEQ ID NO: 10229 - DNA, 1395 bp, Candidatus Azobacteroides pseudotrichonymphae genomovar. CFP2
  CDS (1)..(1395): transl_table=11
atgaaaatgaaaagggcgagaatagtagacttattgagtacacctgattttaacagaaaggtatgtgtaaaggggtgggtacgaactcgtcgaggaaataaaaatatctctttcatagagttgaacgatggctctactgttcatggtattcaaattgtagtaaacgttgtaaagttaggagaggactctctgaaatctattactacgggagcctgtattgctataaatggtttgttagtgaaatcgaaaggggaaggtcaaaaagttgaaattcaagctgatgaaattgaaatttacggaatagcagaccctagtgtttatcctttgcagaaaaaatggcattcactggaatttttaagggagatcgcatatttacgtcctcgtacaaacacttttggatgtattttgcggattcgtcatcatttggcatacgctattcataaatattttaataaacaaggttttttctatttccatacaccaataataacgagttctgatgcagagggagcaggttctatgtttcaaataaccgatctggatattgctaactgtccgaaaacaaaagatggggaagtggattatacacgagatttttttggatgttcgaccaatttaactgtttctggacaattagagggggaattgggagctttagcattaggtggaatttatacttttggtcctatctttcgagccgaaaaatctaatactcctcgtcatttagcggaattttggatgattgaaccagagatagccttttatgatatcaatgacaatatggatttagcagaagattttttgaaatatattatttcatatgcaatgaaatattgcaaggatgatatagaatttttaaacaatacatacaataatgaattaattgagcatttgaattttgtacttagtaatagatttgttagactggcttattccgaaggaataagaatccttgagcaaagtaatgaggaatttgaatttcctatctattggggtattgatttacaatcagaacatgaacgctatttagtagaaaaatattttaagtgtccagtaattatgactaattatccaaaggatattaaatcgttttatatgaaacagaacgatgatggaagaaccgtacgagggatggatgttttatttccaagaattggagaaattattggtggttcagaacgagaatcagatcatcaaaaattactgaaacgtataaaggaactaaatatgtctatggataatttatggtggtatttggatacacgccgttttgggacagctcctcattccggatttggcttaggttttgaaagattagttttgtttgtcacaggcatgcaaaatattcgtgacgtaatacctttcccacgcacacctaaaaatgcagaattttag

SEQ ID NO: 10230 - protein, 464 aa, Candidatus Azobacteroides pseudotrichonymphae genomovar. CFP2
MKMKRARIVDLLSTPDFNRKVCVKGWVRTRRGNKNISFIELNDGSTVHGIQIVVNVVKLGEDSLKSITTGACIAINGLLVKSKGEGQKVEIQADEIEIYGIADPSVYPLQKKWHSLEFLREIAYLRPRTNTFGCILRIRHHLAYAIHKYFNKQGFFYFHTPIITSSDAEGAGSMFQITDLDIANCPKTKDGEVDYTRDFFGCSTNLTVSGQLEGELGALALGGIYTFGPIFRAEKSNTPRHLAEFWMIEPEIAFYDINDNMDLAEDFLKYIISYAMKYCKDDIEFLNNTYNNELIEHLNFVLSNRFVRLAYSEGIRILEQSNEEFEFPIYWGIDLQSEHERYLVEKYFKCPVIMTNYPKDIKSFYMKQNDDGRTVRGMDVLFPRIGEIIGGSERESDHQKLLKRIKELNMSMDNLWWYLDTRRFGTAPHSGFGLGFERLVLFVTGMQNIRDVIPFPRTPKNAEF

SEQ ID NO: 10231 - DNA, 1392 bp, Bacillus cereus B4264
  CDS (1)..(1392): transl_table=11
atggaaaacacattagtaaaaagtctgtatagagatacagataaatacgcaggtcaaacagtacaagtatcagggtggattcgtaacttacgtgattcaaaagcatttggtttcatcgaattaaacgacggtagcttcttcaaaagcgttcaaatcgttttcgatacagaattagataacttcaaagaaattgcaaaacttccacttagctcttcagttaaagtagaaggtaaagtaattgcaacgcctggagcgaagcaaccatttgaaattaaagcagaaaaaattgatatcgagggcttatcagattctgattacccacttcaaaagaagcgtcatacgtttgaatacttacgtacaatcgctcacttacgtccaagaacaaatgcattctctgcaacgttccgcgtacgttctatcgcagcatttgcgattcaccaattcttccaagagcgtggattcgtacatgttcacacgccaatcatcactggtagtgatacagaaggtgcaggcgaaatgttccgcgtaacaacgcaagatttaaacaacgtaccaaaaggcgaagacggacaagttgatgaaacaaaagacttcttcggcaaagaaacaaacttaacagtaagtggacagctgaacgctgaagcttatgcattagcattccgtgatgtatacacattcggacctacattccgtgcagaaaactcaaacacaactcgccacgctgccgagttctggatggttgagcctgagattgcattcgctgaactaggtgacgtaatgaaccttacagaagatatgctgaaatatgcaatgaaatacgtattagagcatgcaccagaagaaatggaattcttcaacagcttcgttgataaaacagttctagagcgtatgaataacgtaattaactctgacttcggtcgcatcacttatacagaagcaattaaagtacttcaagaatcaggtgctgacttcaaatacccagtagaatggggtattgacttacaaacagagcacgaaagatacttatcagaagaaatcttcaaacgccctgtattcgtaactgactatccgaaagacattaaagcgttctacatgcgcttaaatgacgacggtaaaacagtagctgctactgaccttctagttcctggcatcggcgaattaatcggcggcagtcaacgtgaagaaagaatggacgttttagtagacagaattaaagaattaggtatgaacgaagaggactactggtggtacttagaacttagaaaatacggcggtacaaaacacgctggattcggtctaggtttcgagcgcttcctaatgtacatcactggcatggctaacatccgtgacgtaattccattcccaagaactccaggttcttctgagttctaa

SEQ ID NO: 10232 - protein, 463 aa, Bacillus cereus B4264
MENTLVKSLYRDTDKYAGQTVQVSGWIRNLRDSKAFGFIELNDGSFFKSVQIVFDTELDNFKEIAKLPLSSSVKVEGKVIATPGAKQPFEIKAEKIDIEGLSDSDYPLQKKRHTFEYLRTIAHLRPRTNAFSATFRVRSIAAFAIHQFFQERGFVHVHTPIITGSDTEGAGEMFRVTTQDLNNVPKGEDGQVDETKDFFGKETNLTVSGQLNAEAYALAFRDVYTFGPTFRAENSNTTRHAAEFWMVEPEIAFAELGDVMNLTEDMLKYAMKYVLEHAPEEMEFFNSFVDKTVLERMNNVINSDFGRITYTEAIKVLQESGADFKYPVEWGIDLQTEHERYLSEEIFKRPVFVTDYPKDIKAFYMRLNDDGKTVAATDLLVPGIGELIGGSQREERMDVLVDRIKELGMNEEDYWWYLELRKYGGTKHAGFGLGFERFLMYITGMANIRDVIPFPRTPGSSEF

SEQ ID NO: 10233 - DNA, 1401 bp, Escherichia fergusonii ATCC 35469
  CDS (1)..(1401): transl_table=11
atgagcgttgtgcctgtagccgacgtactccagggccgtgtagccgttgacagcgaagtcaccgtgcgcggatgggtacgtacccgccgagattcaaaagctggcatctccttcctcgccgtttatgacggttcctgctttgatcctgtacaggctgtcatcaataattctctgcccaattacaatgaagacgtcctgcgtctgaccaccggttgctcggtcattgtgacgggtaaagtcgtggcgtctccaggccaggggcaacaatttgaaattcaggccagcaaggttgaagttgctggttgggttgaagatccagacacttacccgatggcggcaaaacgccacagcattgagtatctgcgtgaagtcgctcacctgcgtccgcgcacaaacctgattggtgccgtcgcgcgcgttcgccatacgttggcgcaggcgctgcatcgcttctttaacgagcaggggttcttctgggtttcaacgccactgattactgcgtctgataccgaaggtgctggcgaaatgttccgcgtttctacgctggatctggaaaacctgccgcgtaacgatcagggcaaagtggatttcgacaaagacttcttcggtaaagagtctttcctgaccgtatctggtcagttgaacggcgagacctacgcttgcgcattgtctaaaatttataccttcggcccgactttccgtgctgaaaactccaacaccagccgtcacctggcggaattctggatgctggagccggaagtggcgtttgctaacctgaacgatatcgcgggtctggctgaagccatgctgaaatatgtcttcaaagcggttctcgaagagcgcgcagacgacatgaaattcttcgctgaacgcgtagataaagatgccgtttcacgtctggaacgcttcattgaggccgatttcgcgcaggtggattacaccgacgcagtgaccattctcgaaaactgcggtaagaaatttgagaacccggtttactggggcgttgatctctcttctgagcatgaacgttatctggcggaagaacactttaaagcaccggtagtggttaaaaactatccgaaagacattaaagcgttctatatgcgccttaacgaagacggaaaaaccgttgcggcaatggacgttctggcaccgggcatcggtgagatcatcggtggttcccagcgtgaagagcgtctggatgtgctggacgagcgtatgctggaaatgggcctgaacaaagaggattactggtggtatcgcgatctgcgtcgctacggaactgttccgcattccggattcggtcttggttttgaacgcctgattgcttacgtaacaggcgtgcagaacgtgcgtgacgtgattccgttcccgcgtactccgcgtaacgccagcttctaa

SEQ ID NO: 10234 - protein, 466 aa, Escherichia fergusonii ATCC 35469
MSVVPVADVLQGRVAVDSEVTVRGWVRTRRDSKAGISFLAVYDGSCFDPVQAVINNSLPNYNEDVLRLTTGCSVIVTGKVVASPGQGQQFEIQASKVEVAGWVEDPDTYPMAAKRHSIEYLREVAHLRPRTNLIGAVARVRHTLAQALHRFFNEQGFFWVSTPLITASDTEGAGEMFRVSTLDLENLPRNDQGKVDFDKDFFGKESFLTVSGQLNGETYACALSKIYTFGPTFRAENSNTSRHLAEFWMLEPEVAFANLNDIAGLAEAMLKYVFKAVLEERADDMKFFAERVDKDAVSRLERFIEADFAQVDYTDAVTILENCGKKFENPVYWGVDLSSEHERYLAEEHFKAPVVVKNYPKDIKAFYMRLNEDGKTVAAMDVLAPGIGEIIGGSQREERLDVLDERMLEMGLNKEDYWWYRDLRRYGTVPHSGFGLGFERLIAYVTGVQNVRDVIPFPRTPRNASF

SEQ ID NO: 10235 - DNA, 1392 bp, Desulfitobacterium hafniense DCB-2
  CDS (1)..(1392): transl_table=11
atggaaaacaccttgatcaagtcgatttatcgcgatactccagcttacctcaaccaagagctgcagatttccggatgggtccgtaccctgagggtatctaaatcctttggttttattgaaatcaacgatgggtctttttttaagggtatccaggtggtttttgaagaagatttaaataacttcgaggagattgccaaagtcgccacagggagctcattgatcataaaaggcctgctggtagagtccccgggtgcaaagcagccctttgagctgaaggcgcagtccatcatgatcgagggagcctgcagcggggattatcctctgcagaaaaaacgccactcctttgaatatctgcggactatcgctcaccttagacctaggaccaacacttttgcggcggtattccgtgttcgctccctggtggcctatgctatacataagtttttccaggataaagggtttgtctatattcatactccgatcattacgggcagtgatgctgaaggagccggagaaatgttccgggttaccaccttggatttggatgctctgcccaggactgaggagggtcgaatcgattatgccaaagatttctttggcaaagaaaccaacctgacggtaagcggccagctcaatgccgaaacctattgcatggcttttcgcaatgtctatacctttggtcccaccttccgggctgagaactccaatacagcccgccatgccgcggaattctggatgattgaaccggagattgcttttgccgacttgcaggatgatatggaacttgccgaagaaatgatgaaatacttgatcagctatgtcttggaacatgctccggaagaaatggcttttttcaatgaattcgtggataaaaccttgtttgatcgtttggacaacattgtcaactcagattttggccgccttacctatacggaagccattgagattctgcaaaaagagaaagagcgctttgaatttcccgtggaatggggagcagatctccagactgagcatgaacgcttcttgacggaacaaatcttcaagaaaccggtgtttgttgtcgattatcccaaggatatcaaagctttctacatgcgcttgaatgacgatcagaaaactgtggcagctatggatctgctcgttcccggagtaggggaaatcatcggcggcagtcagcgtgaagagcgtttagactatctggagaagaggatggctgagctggggctgcataaggaagactacagctggtacctggatctccgtaaatacggcggaacccgtcatgcgggctatggactgggctttgaacgggtgattatgtatttaaccggaatatccaatatccgcgatgtggtggctttcccaagaacggttaaaaatgcggacttctaa

SEQ ID NO: 10236 - protein, 463 aa, Desulfitobacterium hafniense DCB-2
MENTLIKSIYRDTPAYLNQELQISGWVRTLRVSKSFGFIEINDGSFFKGIQVVFEEDLNNFEEIAKVATGSSLIIKGLLVESPGAKQPFELKAQSIMIEGACSGDYPLQKKRHSFEYLRTIAHLRPRTNTFAAVFRVRSLVAYAIHKFFQDKGFVYIHTPIITGSDAEGAGEMFRVTTLDLDALPRTEEGRIDYAKDFFGKETNLTVSGQLNAETYCMAFRNVYTFGPTFRAENSNTARHAAEFWMIEPEIAFADLQDDMELAEEMMKYLISYVLEHAPEEMAFFNEFVDKTLFDRLDNIVNSDFGRLTYTEAIEILQKEKERFEFPVEWGADLQTEHERFLTEQIFKKPVFVVDYPKDIKAFYMRLNDDQKTVAAMDLLVPGVGEIIGGSQREERLDYLEKRMAELGLHKEDYSWYLDLRKYGGTRHAGYGLGFERVIMYLTGISNIRDVVAFPRTVKNADF

SEQ ID NO: 10237 - DNA, 1404 bp, Cyanothece sp. PCC 7425
  CDS (1)..(1404): transl_table=11
gtgcagagcaacactgaacggatgatccatctgctgcgtcagggggagccgggaacccgtgtcaaggttaagggctgggttcggaccaagcgggagcagaaagaattcacatttctggaagtcaacgatgggtcctctctgcaaagtctacaggtgattcttaagcgggatttgccgaactataccgaagtcctgaaacagcttaataccggggcctccgtgaccgtagcgggtatgctggtggcctcccagggcaaaaatcagcgaattgaactgcaggctgaccaggtgcaggtgtggggagaggcagacccggagacctatccgttgcaaaagaagcgccacagtctggagtttttaagaacgatcggccacctgcgatcgcgcaccaacaccttaggagccgtgtttcggattcgcaatgcctgtgcccgtgcgattcaccagttctttcaggaacggggctttctctgggtgcataccccgatcattaccgccagtgattgtgaaggggcgggggaaatgtttgcggtcaccagtctggatttaagcaaggttcccctcacgccagaccaaaaagtagactacagccaggatttttttggacgtcccacttacttaacggtgagtggccagttagaggcggaaattatggccatggctttcaccaacgtctacacctttggtcccaccttccgggctgaaaactccaatacctcccgtcacctggcggagttctggatggtggagccggagatggcgttctgcgatctggagggggatatggatctggcggaagcgtttctgaagtttatctttcagcacgtgctcgatacctgcccggaagatctagccttctgtaatcaatgggtggatgagagcaaatctgttctggcgacggcagaaaatattatcagccatcagtttgagcgcattacctacacggaagcgatcgcgctgttagagaaaagtaaccacccgtttgaatttccggtgcaatgggggctggatttacaatctgaacacgaacgttacctggcggagcaattgttcaagaagccagtgattgtgacggattatcccaaacaaattaaagcgttttacatgcgcttgaacgaggacggcaaaaccgtgcgggccatggatgtgctagcgcccaaaattggggaaattattggcggttcccagcgggaggaacggctggaggtgctggaacaacgcatcagtgagcagggtttagatttggctccctactggtggtatctggatttacgtcgctatggcacagttccccacgctgggtttggtctgggctttgaacggctggtccaatttatgacggggattggcaatatccgcgatgtgattccctttccccgtacaccccaaaatgccgatttttaa

SEQ ID NO: 10238 - protein, 467 aa, Cyanothece sp. PCC 7425
MQSNTERMIHLLRQGEPGTRVKVKGWVRTKREQKEFTFLEVNDGSSLQSLQVILKRDLPNYTEVLKQLNTGASVTVAGMLVASQGKNQRIELQADQVQVWGEADPETYPLQKKRHSLEFLRTIGHLRSRTNTLGAVFRIRNACARAIHQFFQERGFLWVHTPIITASDCEGAGEMFAVTSLDLSKVPLTPDQKVDYSQDFFGRPTYLTVSGQLEAEIMAMAFTNVYTFGPTFRAENSNTSRHLAEFWMVEPEMAFCDLEGDMDLAEAFLKFIFQHVLDTCPEDLAFCNQWVDESKSVLATAENIISHQFERITYTEAIALLEKSNHPFEFPVQWGLDLQSEHERYLAEQLFKKPVIVTDYPKQIKAFYMRLNEDGKTVRAMDVLAPKIGEIIGGSQREERLEVLEQRISEQGLDLAPYWWYLDLRRYGTVPHAGFGLGFERLVQFMTGIGNIRDVIPFPRTPQNADF

SEQ ID NO: 10239 - DNA, 1392 bp, Halothermothrix orenii H 168
  CDS (1)..(1392): transl_table=11
atggattattttgaacgtaccagaattaaaaacatattggagaaaaatattgataactataaagatgtaattgtactgggatgggtgagaaccaagagagtttctaaaaacattgcttttctggaaatcaatgatggaagtacgttaaagaacctgcaaatagttatccttcaaccagataaattcccgcttgacagtattaataccggagccagtgtaaaaattaaaggttatcttgaggaagttaagggtagagaacagagtattgaaatgaaggctgaggaaattacattaatcggtgaagcacctgttgattatcccatgcagaaaaaaagacatacctttgaatttttacgggaaattgcccacctgcgcccccggaccaataccttcggtgttgttaatcgtttccgcagtaaaatggcatatgcaatccacaaatttttccaggatcgtggctttcactatatccattcaccgataattacgaccggtgacgctgaaggagcaggtgaggtttttacagttaccacctttgacctgcaaaatcctcccttaagcgaaggtggagaaattgattttagccaggatttttttggggaagaagccgggcttactgttagtggtcagctggaagcagaattaatggcaactgctctcggggatgtttataccttcgggcctacattcagggcagagaattcaaatacttcccgccatgcctcagaattctggatgattgagcctgaaatggccttctgtgatcttgaggaaatgatggacattattgaggaatttattaagtttttatttaaatatgcccttgatgaatgtcctgaggagatggaattttttaataaatggattgacaaaggtcgaatagatattttaaaaaaaattatagacgctgaatttgcccatataacttatactgaagctatagatatactggaaaaatcgggtgaggattttgaatttccggtaaaatggggtatggatttacagtcggaacacgaacggtatttaacagaaaaacactttaaaaaaccggtcatggtgactgactaccccaaggatataaaggctttttacatgagggttaatgatgatgacaaaaccgtaagggcagtggactgtctggtaccccaggttggagaaataatcggtggtagtcagagggaagaacggtatgatgtcctgctcaagaggatgaaagaacttgatatgaatattgagaaataccagtggtttctggatattagaaagtatggaacagtaccccattctggttttggactgggatttgagaggctattaatgtatatctctggtatgaagaatatcagggatgttattccctttcccagaactcccggtaatgccaaattttaa

SEQ ID NO: 10240 - protein, 463 aa, Halothermothrix orenii H 168
MDYFERTRIKNILEKNIDNYKDVIVLGWVRTKRVSKNIAFLEINDGSTLKNLQIVILQPDKFPLDSINTGASVKIKGYLEEVKGREQSIEMKAEEITLIGEAPVDYPMQKKRHTFEFLREIAHLRPRTNTFGVVNRFRSKMAYAIHKFFQDRGFHYIHSPIITTGDAEGAGEVFTVTTFDLQNPPLSEGGEIDFSQDFFGEEAGLTVSGQLEAELMATALGDVYTFGPTFRAENSNTSRHASEFWMIEPEMAFCDLEEMMDIIEEFIKFLFKYALDECPEEMEFFNKWIDKGRIDILKKIIDAEFAHITYTEAIDILEKSGEDFEFPVKWGMDLQSEHERYLTEKHFKKPVMVTDYPKDIKAFYMRVNDDDKTVRAVDCLVPQVGEIIGGSQREERYDVLLKRMKELDMNIEKYQWFLDIRKYGTVPHSGFGLGFERLLMYISGMKNIRDVIPFPRTPGNAKF

SEQ ID NO: 10241 - DNA, 1386 bp, Geobacter sp. FRC-32
  CDS (1)..(1386): transl_table=11
atgactggcagaatcaggatatgcgacgcattgactgcgaaagaggcgggtggagagcttctggtaaagggatgggcgaggacggtacgggcaggcaaggacgtagctttccttgccgtcaatgacggctcatgcatagcgaacctgcaggtggtcgtcgaaccagatatagtcaactatccggaagtgagcaggctcggcaccggcagcgccgtggccgtaaggggtgttttacgtgagtcgcctgcagctggacagaggtatgagctttctgccacacagattgagatcatcggccaggcagacgaatcctatccactacagaaaaaacgccatagctttgaatacctgcggactattgcccacctgaggccccgtaccaataccttcggcgctgtcttcagggtccgctcatccctagcccaggccattcatcgcttctttgccgagcgaggctttctctatgtccatacacccataatcaccgcaaatgattgcgagggggcaggggagttgttccgcgtcacgaccctcaatatggcaaagccgccgctgaaggcaggcgaagttgattattccggcgattttttcgcccaggcaaccgggcttaccgtcagtggacaattggagggagagcttttcgcccaggcattttcaaatatctataccttcggcccgactttccgggctgaaaattccaatacggcgcgtcatgcggcagaattctggatgatagagccggagatggccttcgctgatcttatggctgatgcggctctggctgaagactttttgaagtttctctgccgtcatgttctggacaactgcacagaggatatgcggtttttcaacgaccagatcgacaagggccttctgtcgcggatcgaggcggtggcttcatcatcctttgccgtcatggaatataccgaggcaatcgatcatctgaaaaaagcggctgtcccttttacctttcctgttgaatggggactggacctgcagtcggaacatgagcgttacataaccgagcaggttgttggaggtcctgttttcctcatcaattatccaaaggatatcaaggcattttacatgcggcagaatgacgacggcaggacggttgcagcaatggacctgctggtgcccaaggtgggagagatcattggcggcagccagcgggaagagcggtttgatctgcttcttgagcgcatgggggagctgggtataaatgaagaagggctctggtggtacctggacagccgccgctggggctcctgtccacatgccggcttcggtttgggattcgagcgcctgctcatgtatcttaccggcatggaaaacatccgcgacgtcattccttttccccgtacgcccaggcatgccgagttttga

SEQ ID NO: 10242 - protein, 461 aa, Geobacter sp. FRC-32
MTGRIRICDALTAKEAGGELLVKGWARTVRAGKDVAFLAVNDGSCIANLQVVVEPDIVNYPEVSRLGTGSAVAVRGVLRESPAAGQRYELSATQIEIIGQADESYPLQKKRHSFEYLRTIAHLRPRTNTFGAVFRVRSSLAQAIHRFFAERGFLYVHTPIITANDCEGAGELFRVTTLNMAKPPLKAGEVDYSGDFFAQATGLTVSGQLEGELFAQAFSNIYTFGPTFRAENSNTARHAAEFWMIEPEMAFADLMADAALAEDFLKFLCRHVLDNCTEDMRFFNDQIDKGLLSRIEAVASSSFAVMEYTEAIDHLKKAAVPFTFPVEWGLDLQSEHERYITEQVVGGPVFLINYPKDIKAFYMRQNDDGRTVAAMDLLVPKVGEIIGGSQREERFDLLLERMGELGINEEGLWWYLDSRRWGSCPHAGFGLGFERLLMYLTGMENIRDVIPFPRTPRHAEF

SEQ ID NO: 10243 - DNA, 1392 bp, Microcoleus chthonoplastes PCC 7420
  CDS (1)..(1392): transl_table=11
atgcaaaagaaaccgatcgcacaacttttacgcacgggtcagccggatgaaaccgtaaccatccagggctgggtacgcacaaaacgagaactcaaagagtttgcctttatggaggtgaatgatggctcctgcttggcaaacttgcaagtcatcctgaatcccgacgtacccgattatcaaacgactctccaacgggttaatacgggggcgtctgtagaagttgctggcgtattggtgccgtctccgggaaaaggacaacggattgagttgagggcaaattcggtgcaggtgtatggggaagctgatcccgccacctatccactacagaaaaaacgccattcctttgagtttttgcgaaccattggacatctgcgatcgcgtaccaatacaatcggtgctgtgttacgggtgcgtaatgcttgtgctaatgctatccaccaattctttcaggaacgggggtttttgtggattcacagcccgattatcaccgcaagcgattgtgaaggggcgggagaactgtttacggtaaccaatctcaacctcaacgagattcccaaaaccgaagatcaattggtcgattttagccaagacttctttggacgccaagcctacctgacggttagtgggcaactgcaagccgaggtaatggcgatgacatttggcaatgtgtatacctttggtccgacattccgggcggaaaattcaaatacctcccgccatttagccgagttttggatggtggaaccggaaatggcgttctgtgatttacagggcgatatggacttggcggaggagtttcttaagtatgtattctcctcggtactagagaactgtcccgaagacatggaatttttcaataagcggatagataatagcgttctggcaacggcggacaatattatcaacaatcagtttgagcggattacctatactgatgcgatcgcgcaattagaaaaagctgaccgtaaatttgagtatccggttgagtgggggacagatttacagtcggaacacgagcgctatttggcagaggaattatttcagaaaccggttattgttagcgactaccctgtagggatcaaggcattctatatgcgtttgaacgaggacggcaaaaccgtcgccgccatggatgtgctagcaccgaagattggcgagattatcggtggttcccaacgggaggaacgcctcgatgttctccagcagcgcatccagaatcagggaatgaatccagaggagttttggtggtatctagacttgcggcgctatggtactgttgcccatgcagggtttggtttaggatttgagcgattggtgcagtttatgacggggatgggaaatatacgagatgtgattcccttcccccgcacacccttgagtgccgaattttaa

SEQ ID NO: 10244 - protein, 463 aa, Microcoleus chthonoplastes PCC 7420
MQKKPIAQLLRTGQPDETVTIQGWVRTKRELKEFAFMEVNDGSCLANLQVILNPDVPDYQTTLQRVNTGASVEVAGVLVPSPGKGQRIELRANSVQVYGEADPATYPLQKKRHSFEFLRTIGHLRSRTNTIGAVLRVRNACANAIHQFFQERGFLWIHSPIITASDCEGAGELFTVTNLNLNEIPKTEDQLVDFSQDFFGRQAYLTVSGQLQAEVMAMTFGNVYTFGPTFRAENSNTSRHLAEFWMVEPEMAFCDLQGDMDLAEEFLKYVFSSVLENCPEDMEFFNKRIDNSVLATADNIINNQFERITYTDAIAQLEKADRKFEYPVEWGTDLQSEHERYLAEELFQKPVIVSDYPVGIKAFYMRLNEDGKTVAAMDVLAPKIGEIIGGSQREERLDVLQQRIQNQGMNPEEFWWYLDLRRYGTVAHAGFGLGFERLVQFMTGMGNIRDVIPFPRTPLSAEF

SEQ ID NO: 10245 - DNA, 1392 bp, Clostridium botulinum A2 str. Kyoto
  CDS (1)..(1392): transl_table=11
atggatataactttagtaaaatcactttatagagaaacagaaaaatacatggataaagaagttaaaattaatggatgggtaagaactgtaagagattctaaaaactttgcctttgtagaagtaaatgacggaagtttctttaaaaatgttcaagtaatacttgagtcttctttagaaaactttaaggaactatgtaaaatgccaataagtacatcagtagaagtagagggaatagttcaacctacaccaaatgcaaagcaacctttcgaaataaaggctacaagagtttcaatagaaggtaaatcaagcacagattatcctctacaaaagaaaagacatacctttgaatatttaagaactatagctcatttaagaccaagaagcaatgctttttcagcagtatttagagtacgttctttagcagcttatgcagtgcataaatttttccaagaaagaggatttgtttatacaaatactccaataataacaggtagtgactgtgaaggggcaggagaaatgttccaattaactactatggatttaaacaatataccaaaaactgaagaaggaaaaatagatttttcaaaggatttctttggatcacctgcaaaccttacagtaagtggtcagctttcagcagaaacttttgcgttagcttttagaaacgtatatacttttggaccaacttttagagcagaaaattcaaacactgcaagacacgcatcagaattttggatgatagaacctgaaatggcctttgcagaacttacagattatttagataatgcagaggatatggttaaatttgtaataaactatgtaatggaaaatgctccagaagaaatggcattcttcaatagtttcgtagataaaggtttatttgatagattagataatgttgtaaactctgacttcaagagaataacttatacagaagcagttgaattacttcaaaaatcaggagcaaaatttgattatgaagtagaatggggaatagaccttcaaactgaacatgaaagatatttaacagaacaaatatttaaaaaaccagtatttgtaacagattatccaaaggacataaaagctttctatatgagattaaatgatgatggaaaaactgttgcagcagcggatttacttgtaccaggagtaggagaaattataggtggaagccaaagggaagaaagattagatgtattagaaaaaagaatggaagaattaaaccttaataaagaagattactggtggtatttagaattaagaaaatatggagaaactaaacactcaggatatggtttaggtttcgaaagaatattaatgtacatcacaggaatgactaatataagagatgtaataccattcccaagaactccaggctcagctgaattctaa

SEQ ID NO: 10246 - protein, 463 aa, Clostridium botulinum A2 str. Kyoto
MDITLVKSLYRETEKYMDKEVKINGWVRTVRDSKNFAFVEVNDGSFFKNVQVILESSLENFKELCKMPISTSVEVEGIVQPTPNAKQPFEIKATRVSIEGKSSTDYPLQKKRHTFEYLRTIAHLRPRSNAFSAVFRVRSLAAYAVHKFFQERGFVYTNTPIITGSDCEGAGEMFQLTTMDLNNIPKTEEGKIDFSKDFFGSPANLTVSGQLSAETFALAFRNVYTFGPTFRAENSNTARHASEFWMIEPEMAFAELTDYLDNAEDMVKFVINYVMENAPEEMAFFNSFVDKGLFDRLDNVVNSDFKRITYTEAVELLQKSGAKFDYEVEWGIDLQTEHERYLTEQIFKKPVFVTDYPKDIKAFYMRLNDDGKTVAAADLLVPGVGEIIGGSQREERLDVLEKRMEELNLNKEDYWWYLELRKYGETKHSGYGLGFERILMYITGMTNIRDVIPFPRTPGSAEF

SEQ ID NO: 10247 - DNA, 1446 bp, Vibrio cholerae O395
  CDS (1)..(1446): transl_table=11
atggcattgggatgtctttatatctcaacggagactgtaataaacatgacttacgcgcctgtaaatgacgtactcagcggcaagctcgcagtagacagtgaagtcactgttcgcggctggattcgcacacgtcgtgattccaaagctggaatttcgtttcttgccatctatgacggctcttgtttcaacccgattcaggccgtggttcctaataatctcaataattacgacaacgaagttctgaagctcactacaggctgttccgttgaagtaaccggtaagattgttgaatctccagcttcaggccaagcatttgaactggctgcgtctgacgtaaaagtcgtcggttgggttgaagatgctgacacttacccaatggcgaaaacgcgtcattcgattgaatatctgcgtgaagtggctcacctgcgtccacgtactaacgtgatcggtgcggttgcgcgtgttcgtaactgcttggcacaagcgattcaccgtttctaccatgaacaaggttacttctgggtttcagcgcctcttatcaccgcttctgatgcagaaggcgcaggtgaaatgttccgcgtttcaacgctggatatggaaaacctaccgcgtactgatgcaggtaaagtggattacaaccaagacttctttggtaaagaaaccttcctgaccgtatcaggccagctcaacgcggaagcttacgcttgtgcgatcagcaaagtgtacactttcggtccaacattccgtgcggaaaactcaaacaccagccgtcacttggcggaattctggatggttgaacctgaagttgcattcgctgacctgaacactgtagcaaaactggctgaagacatgctgaagtacgtgttcaaagccgtactggcagagcgtcgtgacgatcttgagttctttaacgatcgtattaataacgaagtgattgcgcgtcttgagcaatttgttgaatctgatttcgcacaagtggattacactgatgcgattgaaattctgaaaaactgcggcaaaacgtttgaattccctgttgaatggggcattgatttggcttctgagcacgagcgtttccttgcagaagagcacttcaaagcaccggttatcgtgaagaactatccaaaagacatcaaagcgttttacatgcgtatgaacgaagatggcaaaaccgttgcggcgatggacgtcttggcaccgggcattggtgaaataatcggcggttcacagcgtgaagagcgtttggatattcttgatgcgcgtatgcgtgaatttggcatcgatcctgagcacatggactggtatcgcgacctgcgccgttacggcacagtgccgcacgcgggctttggtctgggcttcgagcgtctcgtgtcttacgtaactggtatgggtaacgtacgtgacgttattccgttcccacgtactccacgtagcgcgagtttctaa

SEQ ID NO: 10248 - protein, 481 aa, Vibrio cholerae O395
MALGCLYISTETVINMTYAPVNDVLSGKLAVDSEVTVRGWIRTRRDSKAGISFLAIYDGSCFNPIQAVVPNNLNNYDNEVLKLTTGCSVEVTGKIVESPASGQAFELAASDVKVVGWVEDADTYPMAKTRHSIEYLREVAHLRPRTNVIGAVARVRNCLAQAIHRFYHEQGYFWVSAPLITASDAEGAGEMFRVSTLDMENLPRTDAGKVDYNQDFFGKETFLTVSGQLNAEAYACAISKVYTFGPTFRAENSNTSRHLAEFWMVEPEVAFADLNTVAKLAEDMLKYVFKAVLAERRDDLEFFNDRINNEVIARLEQFVESDFAQVDYTDAIEILKNCGKTFEFPVEWGIDLASEHERFLAEEHFKAPVIVKNYPKDIKAFYMRMNEDGKTVAAMDVLAPGIGEIIGGSQREERLDILDARMREFGIDPEHMDWYRDLRRYGTVPHAGFGLGFERLVSYVTGMGNVRDVIPFPRTPRSASF

SEQ ID NO: 10249 - DNA, 1392 bp, Clostridium botulinum Ba4 str. 657
  CDS (1)..(1392): transl_table=11
atggatataactttagtaaaatcactttatagagaaacagaaaagcacatggacaaagaagttaaaattaatggatgggtaagaactgtaagagattctaaaaattttgcctttgtagaagtaaatgacggaagtttctttaaaaatgttcaagtaatacttgagtcttctttagaaaactttaaggaactatgtaaaatgccaataagtacatcagtagaagtagagggaatagttcaacctacaccaaatgcaaagcaacctttcgaaataaaggctacaagagtttcaatagaaggtaaatcaagtacagattatcctctacaaaagaaaagacatacctttgaatatttaagaactatagctcatttaagaccaagaagcaatgctttttcagcagtatttagagtacgttctttagcagcttatgcagtgcataaatttttccaagaaagaggatttgtttatacaaatactccaataataacaggtagtgactgcgaaggggcaggagaaatgttccaattaactactatggatttaaacaatataccaaaaactgaagaaggaaaaatagatttttcaaaggatttctttggatcacctgcaaaccttacagtaagtggtcagctttcagccgaaacttttgctttagcttttagaaacgtatatacttttggaccaacttttagagctgaaaattcaaacactgcaagacacgcatcagaattttggatgatagaacctgaaatggcatttgcagaacttacagattatttagataatgcagaggatatggttaaatttgtaataaactatgtaatggaaaatgctccagaagaaatggcattcttcaatagtttcgtagataaaggtttatttgatagattagataatgttgtaaactctgacttcaagagaataacttatacagaagcagtagaattacttcaaaaatcaggagcaaaatttgattatgaagtagaatggggaatagaccttcaaactgaacatgaaagatatttaacagaacaaatatttaaaaaaccagtatttgtaacagattatccaaaggacataaaagctttctatatgagattaaatgatgatggaaaaactgttgcagcagcagacttacttgtaccaggggtaggagaaataataggtggaagtcaaagggaagaaagattagatgtattagaaaaaagaatggaagaattaaatctaaataaagaagattactggtggtatttagaattaagaaaatatggagaaactaaacactcaggatatggtttaggtttcgaaagaatattaatgtacatcacaggaatgactaatataagagacgtaataccattcccaagaactccaggttcagctgaattctaa

SEQ ID NO: 10250 - protein, 463 aa, Clostridium botulinum Ba4 str. 657
MDITLVKSLYRETEKHMDKEVKINGWVRTVRDSKNFAFVEVNDGSFFKNVQVILESSLENFKELCKMPISTSVEVEGIVQPTPNAKQPFEIKATRVSIEGKSSTDYPLQKKRHTFEYLRTIAHLRPRSNAFSAVFRVRSLAAYAVHKFFQERGFVYTNTPIITGSDCEGAGEMFQLTTMDLNNIPKTEEGKIDFSKDFFGSPANLTVSGQLSAETFALAFRNVYTFGPTFRAENSNTARHASEFWMIEPEMAFAELTDYLDNAEDMVKFVINYVMENAPEEMAFFNSFVDKGLFDRLDNVVNSDFKRITYTEAVELLQKSGAKFDYEVEWGIDLQTEHERYLTEQIFKKPVFVTDYPKDIKAFYMRLNDDGKTVAAADLLVPGVGEIIGGSQREERLDVLEKRMEELNLNKEDYWWYLELRKYGETKHSGYGLGFERILMYITGMTNIRDVIPFPRTPGSAEF

SEQ ID NO: 10251 - DNA, 1392 bp, Bacillus anthracis str. A0248
  CDS (1)..(1392): transl_table=11
atggaaaacacattagtaaaaagtctgtatagagatacagataaatacgcaggtcaaacagtacaagtatcagggtggattcgtaacttacgtgattcaaaagcatttggtttcatcgaattaaacgacggtagcttcttcaaaagcgttcaaatcgttttcgatacagaattagataacttcaaagaaattgcaaaacttccacttagctcttcagttaaagtagaaggtaaagtaattgcaacgcctggagcgaagcaaccatttgaaattaaagcagaaaaaattgatatcgagggcttatcagattctgattacccacttcaaaagaaacgtcatacgtttgaatacttacgtacaatcgctcacttacgtccaagaacaaatgcattctctgcaacgttccgcgtacgttctatcgcagcatttgcgattcaccaattcttccaagagcgtggattcgtacatgttcacacaccaatcatcactggtagtgatacagaaggtgcgggcgaaatgttccgcgtaacaacgcaagatttaaacaacgtaccaaaaggcgaagacggacaagttgatgaatcaaaagacttcttcggcaaagaaacaaacttaacagtaagtggacagctgaacgctgaagcttatgcattagcattccgtgatgtatacacattcggacctacattccgtgcagaaaactcaaacacaactcgccacgcagctgagttctggatggttgagcctgagattgcatttgctgaactaggtgacgtaatgaaccttacagaagatatgctgaaatatgcaatgaaatacgtattagagcatgcaccagaagaaatggaattcttcaacagcttcgttgataaaacagttctagagcgcatgaacaacgtaatcaactctgacttcggtcgcatcacttatacagaagcaattaaagtacttcaagagtcaggtgctgacttcaaatacccagtagaatggggtattgacttacaaacagagcacgaaagatacttatcagaagaaatcttcaaacgccctgtattcgtaactgactatccgaaagacattaaagcattctacatgcgcttaaatgacgacggtaaaacagtagctgctactgaccttctagttcctggcatcggcgaattaatcggcggaagccaacgtgaagaaagaatggacgttttagtagacagaattaaagaactaggcatgaacgaagaggactactggtggtacttagaacttagaaaatacggcggtacaaaacacgctggattcggtctaggtttcgagcgcttcctaatgtatatcactggcatggctaacatccgtgacgtaattccattcccaagaactccaggttcttctgaattctaa

SEQ ID NO: 10252 - protein, 463 aa, Bacillus anthracis str. A0248
MENTLVKSLYRDTDKYAGQTVQVSGWIRNLRDSKAFGFIELNDGSFFKSVQIVFDTELDNFKEIAKLPLSSSVKVEGKVIATPGAKQPFEIKAEKIDIEGLSDSDYPLQKKRHTFEYLRTIAHLRPRTNAFSATFRVRSIAAFAIHQFFQERGFVHVHTPIITGSDTEGAGEMFRVTTQDLNNVPKGEDGQVDESKDFFGKETNLTVSGQLNAEAYALAFRDVYTFGPTFRAENSNTTRHAAEFWMVEPEIAFAELGDVMNLTEDMLKYAMKYVLEHAPEEMEFFNSFVDKTVLERMNNVINSDFGRITYTEAIKVLQESGADFKYPVEWGIDLQTEHERYLSEEIFKRPVFVTDYPKDIKAFYMRLNDDGKTVAATDLLVPGIGELIGGSQREERMDVLVDRIKELGMNEEDYWWYLELRKYGGTKHAGFGLGFERFLMYITGMANIRDVIPFPRTPGSSEF

SEQ ID NO: 10253 - DNA, 1401 bp, Tolumonas auensis DSM 9187
  CDS (1)..(1401): transl_table=11
atgactcacgttcccgtagttgacgtgctgcagggtaaatatgccgttggcacgactctgacagtaaaaggctggatccgcacccgtcgtgattccaaagccggtatttcgttcctggccatccatgatggttcctgttttgcgcctgtacaggccgtagtaccaaataccctgtcaaattacgaaagcgatgtgctgcgtctgactacctcctgctccgttgaagtaaccggtgttattcaggcttctgcaggtactggccagcaatttgaaattctggctgacagcgtaactgtgctcggttttgttgaagatccggatacctacccaatggcaccaaaacgccattctgtagaatacctgcgtgaacatgctcacttgcgtgtgcgtaccaacatgatgggtgccgtgacccgtgtgcgtaactgtatcgctcaggctatccatcgtttcttccacgatgaaggctttatgtggatcgctactccgctgatcacagcttctgactgcgaaggtgccggtgaaatgttccgtgtatccacgctggatatggaaaacctgccacgtactgacaaaggcagcatcgattacaaccaggatttcttcggtaaagaagccttcctgacagtatccggtcagctgaacctggaaacgtatgcctgtgccatgtccaaggtgtataccttcggcccgactttccgcgcagaaaactccaacaccagccgtcatctggctgagttctggatggttgaaccggaaattgcatttgccgatctgaacgacaacgccgcgatggctgaaaaactgctgaaatatgtctttagcgccgttctgaatgaacgccgtgacgatatggaattcttcgctgagcgcgtggataaagacgctattacccgtctggaacaattcgtcagcgctgattttgcacaggttgattacacggatgcgattgaaattctgaaaaacagcggtcgtacctttgagttcccggtggaatggggtatcgacatgtcttccgagcatgagcgttatctggcggaagaacatttcaaagcaccggtagtcgttaaaaactacccgaaagatatcaaagcattctacatgcgtctgaacgatgacggcaaaaccgtggctgcaatggacgttctcgcaccaggcatcggcgaaatcatcggtggttcacaacgtgaagaacgtttagacgtactggatgcccgtctggctgaaatgggtctgaacaaagaagactactggtggtatcgcgacctacgtcgttacggcacagtgccacattccggttttggtctgggctttgaacgtctggtggtttacgttaccggcatgggtaacgtgcgtgatgttattccattcccacgtaccccgcgtaacgctgaatactaa

SEQ ID NO: 10254 - protein, 466 aa, Tolumonas auensis DSM 9187
MTHVPVVDVLQGKYAVGTTLTVKGWIRTRRDSKAGISFLAIHDGSCFAPVQAVVPNTLSNYESDVLRLTTSCSVEVTGVIQASAGTGQQFEILADSVTVLGFVEDPDTYPMAPKRHSVEYLREHAHLRVRTNMMGAVTRVRNCIAQAIHRFFHDEGFMWIATPLITASDCEGAGEMFRVSTLDMENLPRTDKGSIDYNQDFFGKEAFLTVSGQLNLETYACAMSKVYTFGPTFRAENSNTSRHLAEFWMVEPEIAFADLNDNAAMAEKLLKYVFSAVLNERRDDMEFFAERVDKDAITRLEQFVSADFAQVDYTDAIEILKNSGRTFEFPVEWGIDMSSEHERYLAEEHFKAPVVVKNYPKDIKAFYMRLNDDGKTVAAMDVLAPGIGEIIGGSQREERLDVLDARLAEMGLNKEDYWWYRDLRRYGTVPHSGFGLGFERLVVYVTGMGNVRDVIPFPRTPRNAEY

SEQ ID NO: 10255 - DNA, 1401 bp, Klebsiella pneumoniae NTUH-K2044
  CDS (1)..(1401): transl_table=11
atgagcgttgtgcctgtagccgacgtactccagggccgcgttgccgttgacagcgaagtcacggtccgcggatgggtgcgtacccgccgagattctaaagctggcttttctttcctcgccgtctatgacggttcctgctttgatcctgtacaggccgttattaataattctctgcccaattacaatcaggaagtgctgcgtctgaccaccggctgctcggtgattgtcaccggtaaagtcgtagcttctcagggtcaaggtcaaagctttgagatccaggcgaccagcgtggaagtgaccggctgggtggaagacccggacacctacccgatggcggccaagcgccacagcatcgagtatctgcgtgaagtagcgcacctgcgtccgcgcaccaacctgattggcgcggtagcccgcgtgcgtcacaccctggcgcaggcgctgcaccgcttcttcaacgaacagggcttcttctgggtttccaccccgctgatcaccgcctccgataccgaaggcgccggcgaaatgttccgcgtgtcgacgctggatctggaaaacctgccgcgtaacgatcagggcaaagtcgatttcgacaaagacttcttcggtaaagagtcgttcctgaccgtttccggccagctgaacggcgagacctacgcctgtgcgctgtcgaagatttataccttcggcccgaccttccgcgccgagaactccaacaccagccgccacctggcggaattctggatgctggagccggaagtggccttcgccaacctgaacgacgttgccggcctggcggaagcgatgctcaagtacgtcttcaaagcggtactggaagagcgtgcggacgacatgcagttcttcgccgagcgcgtggataaagacgctatcgaccgtctgcagcgctttatcaccgctgattttgcccaggtggattacaccgacgccgtcaccattctggaaaactgcggcaaacagttcgagaacccggtgtactggggcgtggatctctcctctgagcacgaacgttacctggccgaagagcacttcaaagcgccggtggtggtgaaaaactacccgaaagacattaaagcgttctatatgcgccttaacgaagacggtaaaaccgtcgcggcaatggacgttctggcgccgggcatcggcgagattatcggcggttcccagcgtgaagagcgtctcgacgtgcttgacgcgcgtatggcagagatggggcttaacaaagaagactactggtggtatcgcgacctgcgtcgctacggcaccgtgccgcattccggcttcggtctgggcttcgaacgcctcatcgcttacgtcaccggcgtgcagaacgtccgcgatgttattccgttcccgcggacgccgcgcaacgcgacattctaa

SEQ ID NO: 10256 - protein, 466 aa, Klebsiella pneumoniae NTUH-K2044
MSVVPVADVLQGRVAVDSEVTVRGWVRTRRDSKAGFSFLAVYDGSCFDPVQAVINNSLPNYNQEVLRLTTGCSVIVTGKVVASQGQGQSFEIQATSVEVTGWVEDPDTYPMAAKRHSIEYLREVAHLRPRTNLIGAVARVRHTLAQALHRFFNEQGFFWVSTPLITASDTEGAGEMFRVSTLDLENLPRNDQGKVDFDKDFFGKESFLTVSGQLNGETYACALSKIYTFGPTFRAENSNTSRHLAEFWMLEPEVAFANLNDVAGLAEAMLKYVFKAVLEERADDMQFFAERVDKDAIDRLQRFITADFAQVDYTDAVTILENCGKQFENPVYWGVDLSSEHERYLAEEHFKAPVVVKNYPKDIKAFYMRLNEDGKTVAAMDVLAPGIGEIIGGSQREERLDVLDARMAEMGLNKEDYWWYRDLRRYGTVPHSGFGLGFERLIAYVTGVQNVRDVIPFPRTPRNATF

SEQ ID NO: 10257 - DNA, 1401 bp, Candidatus Hamiltonella defensa 5AT (Acyrthosiphon pisum)
  CDS (1)..(1401): transl_table=11
atgaaaacagtccccctggtggatgtactacaaggacatattgaccttggccacacaatcattgtgcgtggttgggtacgcacacgccgggattctaaatccgggatttcctttgttgcactttatgatggctcctgttttgacacactccagatcgtgattgaggattcgctcgaaaattatcacgatgacattctgcatttaaccaccggttgctcaatagaagtgagcggcacagtggttgcttctcaaggtaaggggcaaaaatttgaaatcagggcaaaccacctaaaggtcataggttgggtggaagatcccgaaacctatcctatgagccctaaacgtcatagcgttgaatatttacgcgaagtggcacatttgcgccctcgtacgaatttgataggggctgtcacacgaatacgtcatcatttggcgcaagccattcatcgtttttttcatgaaaaaggctatttttggatcgcgacacccatcatcactacctcagacacagaaggagcgggtgaaatgtttcgggtgtctaccttagatttggccaatatctcaaaaacggcggatcagaaaatagattttagtgaagatttttttggtaaagaggcttttttaaccgtctcaggtcagctcaatgcagaaacctatgcctgtgctttatcaaaggtatacaccttcggcccgactttccgggcagaaaattctcataccagccgtcatttagccgaattctggatggtagaacctgaagtcgcgtttgcaaccttggaggatgtcgcgcttttggcggaagaaatgctgaaatatgttttttcggccattttgaaagaaagagaagatgatctggatttttttacagagcgtgtggataaaaaagccaaaaaacgtttagaagagtttatttcttcagatttcgctcgtattgattataccgaagcgatagagattttgcggcactgtaaccattcttttgtgcatcccgtgtcttggggcattgatctctcttctgaacatgaacgttatctggcagagacacattttaaagcgccggtgatcgtcaaaaattatcccaaggacattaaagcgttttatatgcgtctgaatgaagatggaaaaaccgtagccgccatggatgtgctggcgcccggaataggtgaaatcatagggggctcacagcgtgaagaacgccttgataacctggatcaacgtttaacagaaatggggcttaatagagaagattatgcttggtatcgtgatttgcgccgatatggaagcgtgccccatgccggttttggcttaggttttgaacgtttggtcgcctacgtcaccggtgtagaaaatgttcgtgaagcgattgctttccctcgcacgcctaaaaatgcgtctttctga

SEQ ID NO: 10258 - protein, 466 aa, Candidatus Hamiltonella defensa 5AT (Acyrthosiphon pisum)
MKTVPLVDVLQGHIDLGHTIIVRGWVRTRRDSKSGISFVALYDGSCFDTLQIVIEDSLENYHDDILHLTTGCSIEVSGTVVASQGKGQKFEIRANHLKVIGWVEDPETYPMSPKRHSVEYLREVAHLRPRTNLIGAVTRIRHHLAQAIHRFFHEKGYFWIATPIITTSDTEGAGEMFRVSTLDLANISKTADQKIDFSEDFFGKEAFLTVSGQLNAETYACALSKVYTFGPTFRAENSHTSRHLAEFWMVEPEVAFATLEDVALLAEEMLKYVFSAILKEREDDLDFFTERVDKKAKKRLEEFISSDFARIDYTEAIEILRHCNHSFVHPVSWGIDLSSEHERYLAETHFKAPVIVKNYPKDIKAFYMRLNEDGKTVAAMDVLAPGIGEIIGGSQREERLDNLDQRLTEMGLNREDYAWYRDLRRYGSVPHAGFGLGFERLVAYVTGVENVREAIAFPRTPKNASF

SEQ ID NO: 10259 - DNA, 1401 bp, Edwardsiella ictaluri 93-146
  CDS (1)..(1401): transl_table=11
atgagcgtagtgcctgtagtcgacgtactgcaaggccgcgtggcggtggacactgaggtcaccgttcgtggctgggtacgtacccggagagattctaaagccggtatctccttcctcgccgtttatgacggctcctgctttaatccgttacaggccgtcgtaaataattctctgccgaattatgaaagcgaggtgctgcgcctgaccaccggttgctcccttgaggtcagcggccgggtcgtcgcgtcaccgggcgagggccagagcttcgagctgcaggccaccgccattaaggtggttggctgggtcgatgatccggacacctatccgatggccgccaagcgccacagcatcgaatacctgcgcgaggtcgcccacctgcgtccgcgcaccaacctgatcggtgccgtcgcccgcgtgcgtcacaccttggcacaggccattcatcgctatttcaacgaaaacggctacttctgggtctctacgccgctgatcaccgcgtcggataccgaaggcgccggtgaaatgttccgcgtctccaccctggatatggaaaacctgccgcgcaacgacgcgggcaaggtggactacagcgaggacttcttcggccgcgaagcgttcctgacggtgtccggtcagctgaacggggaaacctatgcctgcgcgctgtccaaggtgtacacctttggcccgaccttccgtgccgaaaactccaacaccagccgccatctggctgaattctggatggtcgagccggaggtcgcctttgccgatctgaacgatatcgccggtgtcgcagagggcatgctgaagtatgtctttaacgcggtgctggaggagcgcgccgacgatatggccttcttcgcccagcgcgtggataaagacgccattgatcgcctgcagcgcttcgtctcctccgatttcgcccaggtggactacaccgatgccatcaccattctggagagctgcggcaagcagtttgagaacccggtattctggggcgtcgatctctcttctgagcacgaacgctatctggccgaacagcattttaaggcaccggtggtggtgaaaaactacccgaaagatatcaaggcgttctatatgcgccttaacgaagacggtaagaccgtcgctgccatggacgtgctggcgccggggatcggtgaaatcatcggcggttcgcagcgtgaggaacgtctcgatatgctggacaaacgtctggatgagatggggctgaagaaagaggactactggtggtatcgcgatctgcgccgctacggtaccgtgccgcacgccggcttcggcctcggcttcgagcgtctggtcgcctacgttaccggggttcagaacgtacgtgatgtcatccccttcccacgcacgccacgtaacgcaacattctaa

SEQ ID NO: 10260 - protein, 466 aa, Edwardsiella ictaluri 93-146
MSVVPVVDVLQGRVAVDTEVTVRGWVRTRRDSKAGISFLAVYDGSCFNPLQAVVNNSLPNYESEVLRLTTGCSLEVSGRVVASPGEGQSFELQATAIKVVGWVDDPDTYPMAAKRHSIEYLREVAHLRPRTNLIGAVARVRHTLAQAIHRYFNENGYFWVSTPLITASDTEGAGEMFRVSTLDMENLPRNDAGKVDYSEDFFGREAFLTVSGQLNGETYACALSKVYTFGPTFRAENSNTSRHLAEFWMVEPEVAFADLNDIAGVAEGMLKYVFNAVLEERADDMAFFAQRVDKDAIDRLQRFVSSDFAQVDYTDAITILESCGKQFENPVFWGVDLSSEHERYLAEQHFKAPVVVKNYPKDIKAFYMRLNEDGKTVAAMDVLAPGIGEIIGGSQREERLDMLDKRLDEMGLKKEDYWWYRDLRRYGTVPHAGFGLGFERLVAYVTGVQNVRDVIPFPRTPRNATF

SEQ ID NO: 10261 - DNA, 1392 bp, Eubacterium rectale ATCC 33656
  CDS (1)..(1392): transl_table=11
atggaacttacaaacatacgcgagattttccgcaacaaggacaaattcgctgacaaagaggtgactatcggaggatgggtcagaagcaatcgtaattcaaagaattttggatttatcgtggtaaacgatggtacattttttgagccaatccaggttgtatacggaaatggcttagacaactatgatgaggttggcaagatcaatgtcggagctgcaattatcgtaagaggtacacttgtgcttactccggatgcaaagcagccatttgagattcaagccgcagaggtgactgttgagggggcatccacaccggattatcctctgcagaagaagagacatacatttgagtatcttcgtacaatctcacacttaagacctcgtacaaatacttttgaggcagttttcagggtgcgctcactctgcgcatatgctattcacaaattcttccaggagagggattttgtgtacgtgcacacaccgcttatcacaggaagtgactgtgagggtgcaggagagatgttccaggtgaccacacttgatttgaacaatctccctatgacagaggaaggaaaggtggatttctcaaaggatttctttaataagcctaccaaccttactgtttcaggacagttaaacggcgagacatatgctatggcattcaagaatatctacaccttcggacctaccttccgtgcggagaattcaaacaccacacgtcatgcggcagagttctggatgattgagcctgagattgcttttgcagaccttgaggatgatatgatgcttgcagagagcatgctcaagtatgttatcagctatgtgcttgaaaatgcacctgaggagatggcatttttcaacaatttcgtggacaagggactccttgacagattaagaaatgttgttgaaaatgattttgcccgtgtgacatacacagaggctatcgacatcctttcaaagcacaatgacaagtttgattacaaggtatcatggggctgtgatttacagacagagcatgagagataccttacagagcagatttataagcgccctgtatttgtcacagattatccgaaggagataaaggccttctacatgaagctgaatgacgacggaaagaccgttgcagcagttgactgtcttgtaccgggaatcggagaaatcatcggtggaagccagagagaggatgactacgacaagctccttgccagaataaatgagcttggactttcagaggatgactacaagttctaccttgacttaagaaaatacggctctgcaagacacgcgggctttggattgggctttgagagatgcgtaatgtatcttaccggcatgggcaatatccgtgacgttatcccattccctagaacagttaataactgtgagctgtaa

SEQ ID NO: 10262 - protein, 463 aa, Eubacterium rectale ATCC 33656
MELTNIREIFRNKDKFADKEVTIGGWVRSNRNSKNFGFIVVNDGTFFEPIQVVYGNGLDNYDEVGKINVGAAIIVRGTLVLTPDAKQPFEIQAAEVTVEGASTPDYPLQKKRHTFEYLRTISHLRPRTNTFEAVFRVRSLCAYAIHKFFQERDFVYVHTPLITGSDCEGAGEMFQVTTLDLNNLPMTEEGKVDFSKDFFNKPTNLTVSGQLNGETYAMAFKNIYTFGPTFRAENSNTTRHAAEFWMIEPEIAFADLEDDMMLAESMLKYVISYVLENAPEEMAFFNNFVDKGLLDRLRNVVENDFARVTYTEAIDILSKHNDKFDYKVSWGCDLQTEHERYLTEQIYKRPVFVTDYPKEIKAFYMKLNDDGKTVAAVDCLVPGIGEIIGGSQREDDYDKLLARINELGLSEDDYKFYLDLRKYGSARHAGFGLGFERCVMYLTGMGNIRDVIPFPRTVNNCEL

SEQ ID NO: 10263 - DNA, 1401 bp, Dickeya dadantii Ech703
  CDS (1)..(1401): transl_table=11
atgagcgttgtgcctgtagtcgacgtactgcaaggccgtgttgccgttgacagcgaagtcaccgtgcgcggctgggtgcgtacccggagagactctaaagccggtatttctttcatcgccgtctacgacggttcctgctttaatccgctacaggctgtcgtcaataatcatctggacaattatcagagtgagattctccgcctgacgaccggctgttcggtggaagtcaccggcaacgtggtcgaatccccgggagaaggccaaagctttgagttacaagccacccatgtcgccgtcgtcggttgggttgacgaccccgatacgtatccaatggccgcgaagcgccacagtatcgaatatctgcgcgaagtggctcacctgcgccctcgcaccaatctgattggcgccgtagcgcgtgtacgccacacgttggcacaggctattcaccgtttcttccatcagaatggtttctattgggtatccactccgctgattaccgcgtcagataccgaaggtgctggagaaatgttccgtgtatccacgttggatttggagaatttgccccgtaccgaaaatggtaaagtggacttcggcgaggactttttcggtaaggaagcatttctgacggtatccggccagctcaacggcgaaacttacgcctgtgcgctgtctaaaatctataccttcggcccgactttccgggcggaaaactctaacaccagccgccatctggctgagttttggatgattgagccggaagttgctttcgcgtcgctggacgatatcgcagcgctggcagaaaacatgttgaaatttgtgttcaaagccgtgcttgaagagcgggcagatgacatggcgttctttgccgagcgtgtcgacaaagaagcggttgagcgtctggagcgttttatccattcagacttcgcccaggtcgattacaccgatgccatcacaattttgcaaaattcagggcaatcttttgaaaacccggtctcttggggaatcgacctctcttcagaacatgaacggtatctggcagagaaacatttcaaagcgccggtggtagtgaaaaattacccgaaagacatcaaagcgttctatatgcgaatgaacagcgatggtaaaaccgttgccgccatggatgtcttggcgccgggcatcggcgaaatcatcgggggctctcaacgcgaagagcgtttgcaacagttggatgcccgcctggaagaaatgggcctgaataaagaagattactggtggtatcgcgatctgcgccgttacggcaccattccacactctgggttcggcctcggatttgaacgtcttatcgcttatgttaccggcgttcaaaatgtgcgtgatgtgattcctttcccgcgcactccacgtaatgccagcttctaa

SEQ ID NO: 10264 - protein, 466 aa, Dickeya dadantii Ech703
MSVVPVVDVLQGRVAVDSEVTVRGWVRTRRDSKAGISFIAVYDGSCFNPLQAVVNNHLDNYQSEILRLTTGCSVEVTGNVVESPGEGQSFELQATHVAVVGWVDDPDTYPMAAKRHSIEYLREVAHLRPRTNLIGAVARVRHTLAQAIHRFFHQNGFYWVSTPLITASDTEGAGEMFRVSTLDLENLPRTENGKVDFGEDFFGKEAFLTVSGQLNGETYACALSKIYTFGPTFRAENSNTSRHLAEFWMIEPEVAFASLDDIAALAENMLKFVFKAVLEERADDMAFFAERVDKEAVERLERFIHSDFAQVDYTDAITILQNSGQSFENPVSWGIDLSSEHERYLAEKHFKAPVVVKNYPKDIKAFYMRMNSDGKTVAAMDVLAPGIGEIIGGSQREERLQQLDARLEEMGLNKEDYWWYRDLRRYGTIPHSGFGLGFERLIAYVTGVQNVRDVIPFPRTPRNASF

SEQ ID NO: 10265 - DNA, 1401 bp, Dickeya zeae Ech1591
  CDS (1)..(1401): transl_table=11
atgagcgtagtgcctgtagtcgacgtactgcaaggccgtgtcgccgttgacagtgacgtcaccgtgcgcggctgggtacgtacccggagagactctaaagccggtatttcctttattgccgtctatgacggttcctgctttgattcgctacaggctgtcgtcaataataatcttgccaattaccaaagcgatgtgctgcgtctgacgaccggctgctcggtggaagtcaccggcaaggtggtggaatctcccggcgaaggccaaagttttgaactgcaggcaaccgagctcaaggtggtcggttgggtggaagacccggatacctatccgatggccgccaagcgccacagtatcgaatacctgcgtgaagtggcgcatctgcgcccgcgcaccaacctgatcggcgccgtcgcccgagtgcgtcatacgctagcccaggctatacatcgtttctttcatcagagcggtttctattgggtatccaccccgcttattaccgcctccgataccgaaggcgccggtgaaatgttccgggtctccacgctggatctggaaaacctgccgcgtgacgatcagggcaaagtcgatttcagtgaagacttcttcggtaaagaagcgtttctgaccgtatccggccagcttaacggcgaaacctacgcctgcgcgctgtctaaaatctatactttcggccccaccttccgcgcggaaaattccaataccagccgccatctggcagagttctggatgatcgaaccggaagtggcgttcgccacgctggacgatattgccgcgctggcggaaaacctgctgaagtttgtgttcaaggccgtgttggaagagcgcgccgacgacatgaaattctttgctgaacgtgtagataaagacgcggttagccgtctggagcgttttgtcagttctgatttcgtccaggttgactacaccgatgccatcaccattctggaaaactgcgggcagactttcgaaaacccggtgtcctggggtatcgacctgtcttccgagcacgaacgctatctggctgagaagcacttccaggcccctgtcgtcgtcaaaaactacccgaaagacattaaagccttttatatgcgcatgaacagcgacggtaaaaccgtggcggcaatggacgtgctggcaccggggattggcgaaatcatcggtggctctcagcgcgaagagcgtctggaacaactggacatccgtctggaagaaatgggactcagtaaagaggactactggtggtatcgcgacctgcgtcgttacggcaccatccctcattcaggtttcggcctcggttttgaacgtttgattgcttatgtaaccggtgtacaaaatgtgcgcgatgttattccgttcccgcgcacaccacgcagcgccaccttctaa

SEQ ID NO: 10266 - protein, 466 aa, Dickeya zeae Ech1591
MSVVPVVDVLQGRVAVDSDVTVRGWVRTRRDSKAGISFIAVYDGSCFDSLQAVVNNNLANYQSDVLRLTTGCSVEVTGKVVESPGEGQSFELQATELKVVGWVEDPDTYPMAAKRHSIEYLREVAHLRPRTNLIGAVARVRHTLAQAIHRFFHQSGFYWVSTPLITASDTEGAGEMFRVSTLDLENLPRDDQGKVDFSEDFFGKEAFLTVSGQLNGETYACALSKIYTFGPTFRAENSNTSRHLAEFWMIEPEVAFATLDDIAALAENLLKFVFKAVLEERADDMKFFAERVDKDAVSRLERFVSSDFVQVDYTDAITILENCGQTFENPVSWGIDLSSEHERYLAEKHFQAPVVVKNYPKDIKAFYMRMNSDGKTVAAMDVLAPGIGEIIGGSQREERLEQLDIRLEEMGLSKEDYWWYRDLRRYGTIPHSGFGLGFERLIAYVTGVQNVRDVIPFPRTPRSATF

SEQ ID NO: 10267 - DNA, 1404 bp, Aggregatibacter aphrophilus NJ8700
  CDS (1)..(1404): transl_table=11
atgacgaaaattgcatcaattgtagatgtactacaaggcaaaattgcaattggcgaaaaagtgactgtgcgcggttgggtgcgcacccgtcgcgattccaaagcaggcctatcctttcttgccgtttatgacggttcttgcttcgcaccaattcaagctatcgtaaataatgacatcaccaattatgaatctgaagtgttacgtttaaccgccggctgttccgttattgtggcagggaccgtagttgaatccccggctgaaggacaagccgttgagttacaagcggaaaacgtagaagttgctggttgggtggaagatccggaaacctatccaatggcagccaaacgccactctatcgaatatctacgcgaagtagcacacttgcgtcctcgcacaaatatcattggtgccgttgcacgtgttcgtcactgcttagcgcaagccattcatcgtttcttccacgagcaaggtttctattgggtagccaccccgttaatcactgcttctgatacagagggcgcaggtgaaatgttccgtgtttctaccttagacttggaaaacttgccacgcacagacaaaggtacggtggattttagcgaagatttctttggtaaagaatcgtttttaaccgtatccggccaattaaacggtgaaacttatgcttgcgcattaagtaaaatctatacttttggaccaacattccgcgccgaaaactcaaatactacacgccatttagcggaattctggatgattgaaccagaagtggctttcgcaacactcgccgacaacgcaaaacttgccgaagatatgttgaaatatgttttccgcgcagttttagctgagcgccgcgatgatttagaattctttgcgaaacatgttgacaatgatgtcattaatcgcttggaacgtttcattaattctgattttgcacaagtagattacaccgatgctattgagattttattgaaatccggcaaaacctttgaattcccggtttcttggggtatcgatctttcttctgaacatgaacgctatttggcagaagaatatttcaaatcccctgttgtagtgaaaaactatccgaaagacatcaaagccttctatatgcgtttaaacgatgacggaaaaacagttgcagcgatggatgtgttagcaccgggaatcggtgaaatcatcggtggttcacaacgtgaagaacgtttgaatatgttagataaacgtatggcagaaatgggtttaaatccggaagattattggtggtaccgtgatttacgtcgttacggtactgtgccgcattccggttttggtttaggttttgagcgtctaatcgtgtatgtgacagggttacaaaacatccgtgatgttatcccgttcccacgagcgccacgcaatgccaatttctaa

SEQ ID NO: 10268 - protein, 467 aa, Aggregatibacter aphrophilus NJ8700
MTKIASIVDVLQGKIAIGEKVTVRGWVRTRRDSKAGLSFLAVYDGSCFAPIQAIVNNDITNYESEVLRLTAGCSVIVAGTVVESPAEGQAVELQAENVEVAGWVEDPETYPMAAKRHSIEYLREVAHLRPRTNIIGAVARVRHCLAQAIHRFFHEQGFYWVATPLITASDTEGAGEMFRVSTLDLENLPRTDKGTVDFSEDFFGKESFLTVSGQLNGETYACALSKIYTFGPTFRAENSNTTRHLAEFWMIEPEVAFATLADNAKLAEDMLKYVFRAVLAERRDDLEFFAKHVDNDVINRLERFINSDFAQVDYTDAIEILLKSGKTFEFPVSWGIDLSSEHERYLAEEYFKSPVVVKNYPKDIKAFYMRLNDDGKTVAAMDVLAPGIGEIIGGSQREERLNMLDKRMAEMGLNPEDYWWYRDLRRYGTVPHSGFGLGFERLIVYVTGLQNIRDVIPFPRAPRNANF

SEQ ID NO: 10269 - DNA, 1401 bp, Candidatus Ishikawaella capsulata Mpkobe
  CDS (1)..(1401): transl_table=11
atgaaaactatgctggtagcggatatactaaatggtaggataaaagtagaaaataaagttattatacgtggatgggtccgtactagaagagattcaaaagcaggtatttcttttattgctatttatgatggttcttgtgtaaatactgtgcaggttatagctaataataatcttaaaaattacaagagtgagatcctacacctgacatcaggttgttctgtatcaattgccggatatgtaaaaaagtctccaagtaaaggccaatctgttgagatttatgctatacaaattgatgtaatagggtggatagacaaacctgaaacttacccaatagctcctaaaaaacacagtatggaatatttgagagaaatagcacacctacgtcctcgaacaaatttgataggttcagtgacacgtatccgtcatactttagcattagctctccatcaattttttgatcaacatggatactactggatatctactcctttaataacttcttcgaatacagaaggagctggtgagatgtttagagtatctacgttagatatagaaaatataccacgtaatttaaataataaggtagactatagcaaggatttttttggtaaagaaacatttttaacggtatctggtcaattaaatgctgaagcttatgcatgtgctttatcaaaagtatatacttttggtccagtttttagagctgaaaattctaatacaagccgtcacttagcagaattttggatgttagaaccagaaatagcatttgctaatcttaatgatataattatattagccgaatctatgttaaagtatgttgtaaaggttattttagaaaatcgtgcagaagatctttcatatcttgataaaaattcaaataaatcaataatatcacgtttagaaaaattacttttatctaactttttgtgcttagattatacagaagttattgatattttgcagaaacaccatgaatattttaatataccgataacttggggaatggatctagcttctgaacatgaacgttatttaacagataaatattttgaaagttcagtagtaattaaaaattatccaaaacaaattaaagcattttatatgcgtctcaatgatgatatgaaaacagtatctgcaatggatatattggtaccgggaataggagaaattatcggcggttctcaacgagaagaacgtctggaaatattagataaacgtttagatgaaattggacttaacaagagtgattattggtggtatcgtgatttacgtcgttatggtacagttcctcatgcaggttttggtttaggttttgagcgcttaattgcttatattactggaatacataatgtaagagaagttattccctttcctagaagtccatacaatattgatttttaa

SEQ ID NO: 10270 - protein, 466 aa, Candidatus Ishikawaella capsulata Mpkobe
MKTMLVADILNGRIKVENKVIIRGWVRTRRDSKAGISFIAIYDGSCVNTVQVIANNNLKNYKSEILHLTSGCSVSIAGYVKKSPSKGQSVEIYAIQIDVIGWIDKPETYPIAPKKHSMEYLREIAHLRPRTNLIGSVTRIRHTLALALHQFFDQHGYYWISTPLITSSNTEGAGEMFRVSTLDIENIPRNLNNKVDYSKDFFGKETFLTVSGQLNAEAYACALSKVYTFGPVFRAENSNTSRHLAEFWMLEPEIAFANLNDIIILAESMLKYVVKVILENRAEDLSYLDKNSNKSIISRLEKLLLSNFLCLDYTEVIDILQKHHEYFNIPITWGMDLASEHERYLTDKYFESSVVIKNYPKQIKAFYMRLNDDMKTVSAMDILVPGIGEIIGGSQREERLEILDKRLDEIGLNKSDYWWYRDLRRYGTVPHAGFGLGFERLIAYITGIHNVREVIPFPRSPYNIDF

SEQ ID NO: 10271 - DNA, 1401 bp, Pectobacterium carotovorum subsp. carotovorum PC1
  CDS (1)..(1401): transl_table=11
atgagcgtagtgcctgtagtcgatgtactgcaaggccgtgtcgccgttgacagcgaagtcaccgtgcgcggctgggtacgtacccggagagattctaaagccggtatctcctttatcgccgtttatgacggctcctgctttaatccgttacaggctgtcgttaataataatctctccaattatcaggatgacgtactgcgtctgaccactggttgctccgtagaaatcaccggtaacgtcgtcgcctctccgggtgaaggccaaagcttcgagctgcaagcaaccaacgtcaacgtcgtcggctgggttgacgatcccgatacttatccgatggcagcaaagcgtcacagcatcgaatacctgcgtgaagtcgcccacctgcgtccacgcaccaacctgatcggcgccgttgcgcgcgttcgtcatacgctggcgcaggccattcaccgtttcttccacgagaacggctacttctgggtatctactccgctgattaccgcatccgataccgaaggcgcgggtgaaatgttccgtgtatctactctcgatctggaaaacctgccgcgtaccgaacagggcaaagtggatttcagcgaagacttcttcggtaaagaagcgttcctgaccgtatctggtcagttgaatggcgaaacctacgcctgtgcgctgtccaatgtgtatacctttggccctacgttccgtgcggaaaactccaacaccagccgccatctggccgagttttggatgatcgaaccggaagtcgcgtttgctacattggatgacgtcgcaggtctggccgaaaacctgctgaaatatgttttccaggccgtgctgaacgagcgtgccgatgatatggcgttttttgcagaacgcgtagataaagaagccatcacgcgactggaaaaattcgtcagctccgatttcgcccaggtggattacaccgatgccgtcgagatcctgctgaactgcgggaagcaattcgagaatccggtttattggggcgttgacctctcctccgaacatgagcgttatctggcggaacagcacttcaaagcaccggttgtcgttaaaaactacccgaaagacatcaaagccttctacatgcgtatgaatgacgacggtaagactgttgccgcaatggatgttctggcgccgggaatcggtgaaatcatcggtggatctcagcgtgaagagcgtctggcagagttggatagccgtctggaagagatgggactgaataaagaagactactggtggtatcgtgatttacgtcgttacggcaccattccacattccggtttcggtttaggttttgagcgcctgattgcttatgttaccggtgtacaaaatgtgcgcgatgtgattcctttcccacgcacaccgaggaacgccagtttctaa

SEQ ID NO: 10272 - protein, 466 aa, Pectobacterium carotovorum subsp. carotovorum PC1
MSVVPVVDVLQGRVAVDSEVTVRGWVRTRRDSKAGISFIAVYDGSCFNPLQAVVNNNLSNYQDDVLRLTTGCSVEITGNVVASPGEGQSFELQATNVNVVGWVDDPDTYPMAAKRHSIEYLREVAHLRPRTNLIGAVARVRHTLAQAIHRFFHENGYFWVSTPLITASDTEGAGEMFRVSTLDLENLPRTEQGKVDFSEDFFGKEAFLTVSGQLNGETYACALSNVYTFGPTFRAENSNTSRHLAEFWMIEPEVAFATLDDVAGLAENLLKYVFQAVLNERADDMAFFAERVDKEAITRLEKFVSSDFAQVDYTDAVEILLNCGKQFENPVYWGVDLSSEHERYLAEQHFKAPVVVKNYPKDIKAFYMRMNDDGKTVAAMDVLAPGIGEIIGGSQREERLAELDSRLEEMGLNKEDYWWYRDLRRYGTIPHSGFGLGFERLIAYVTGVQNVRDVIPFPRTPRNASF

SEQ ID NO: 10273 - DNA, 1488 bp, Photorhabdus asymbiotica
  CDS (1)..(1488): transl_table=11
atggcaagtaacatagaacaagttgccccctatgggtatatacattttcacaaacctgaattgataatatacagaagagagaaatttatgagcgtagcgcctgtagtcgacgtactgcaaggccgggttgcggttgatagtgaagtcaccgttcgcggctggatacgtacaaggagagattctaaagctggtatctctttcctcgccgtctatgacggttcctgctttaatccattacaggccgtcgttaataataatttacccaattatcaggatgaagttctgtatttaactaccggctgttctgtagaagtgacagggacagtcgttgcttcccttggtcaagggcagaattttgaactacaagcgacgaaagtcgtggtcattggcaaagttgaagatcctgacacttatccgatggcagctaaacgccatagcattgagtatctgcgagaagtggctcacctgcgcccacgtaccaacctgattggtgccgttgcccgtatgcgtcatacccttgcacaagcactacaccgtttctttcatgagaacggttatttctgggtttctactccattgatcaccgctgctgatacagaaggtgccggtgagatgttccgagtctccacactggatctgcaaaatttacctttgactgataaaggtgaagtggatttcaatgaagatttcttcggacgggaagcttttttgaccgtatcaggccaattgaacggtgaagcatatgcttgtgcattaagtaaagtctacacattcggtccaactttccgtgcggaaaactctaacaccagccgccatctggcagaattctggatgcttgaaccagaagttgcttttgctgatctcgacgatgctgcatcgctagctgaaaatatgctgaaatatgttttcaaagccgcactagaagaacgcgccgatgatctgcaattctttgctgaacgtgtagataaagacgtcatcactcgtctggaaaaattcatcaattctgactttgctcagattgattacactgatgcgattgaaattctgcaaaactgcggccagaaatttgagaacccagtattctggggagttgacctttcttcagaacatgaacgttatctggcagaaaaacacttccaggctccagttgtcgtgaaaaactatccaaaagatattaaagccttctatatgcgcatgaacgatgatggcaaaactgtcgctgcaatggatgtacttgcaccgggcatcggcgaaattatcggcggctcacagcgtgaagagcgtctggatatgctggataagcgcatggaagaaatgggccttaataaagaagattactggtggtaccgcgatctacgtcgctatggcactgtacctcactccgggttcggtcttggctttgaacgtctggtctcttatgtgaccggtgtcccaaatgtgcgtgatgtcatcccattcccacgcacgccgagaagtgccaacttctga

SEQ ID NO: 10274 - protein, 495 aa, Photorhabdus asymbiotica
MASNIEQVAPYGYIHFHKPELIIYRREKFMSVAPVVDVLQGRVAVDSEVTVRGWIRTRRDSKAGISFLAVYDGSCFNPLQAVVNNNLPNYQDEVLYLTTGCSVEVTGTVVASLGQGQNFELQATKVVVIGKVEDPDTYPMAAKRHSIEYLREVAHLRPRTNLIGAVARMRHTLAQALHRFFHENGYFWVSTPLITAADTEGAGEMFRVSTLDLQNLPLTDKGEVDFNEDFFGREAFLTVSGQLNGEAYACALSKVYTFGPTFRAENSNTSRHLAEFWMLEPEVAFADLDDAASLAENMLKYVFKAALEERADDLQFFAERVDKDVITRLEKFINSDFAQIDYTDAIEILQNCGQKFENPVFWGVDLSSEHERYLAEKHFQAPVVVKNYPKDIKAFYMRMNDDGKTVAAMDVLAPGIGEIIGGSQREERLDMLDKRMEEMGLNKEDYWWYRDLRRYGTVPHSGFGLGFERLVSYVTGVPNVRDVIPFPRTPRSANF

SEQ ID NO: 10275 - DNA, 1449 bp, Pedobacter heparinus DSM 2366
  CDS (1)..(1449): transl_table=11
atgatacacagagaaaaagtaaagagtctgctcgagacagaagagtttaacagagaagtaacagttatgggttgggtacgtaccttccgtaacaatcagtttatagctataaatgatggctcctgcatgggaaacatccaggttgttgttgattttaatcatacggatgaagccttattgaaacgcattactactggtgcagcaattgctgtaaatggtattattgtggaatccgttggaaaaggacaaagagttgatataaaagcaacctccatagaaatactaggtgatagtgatccggagaaattccctttacaacctaaaaaacatagcttagagtttttaagggaaatcgcacacctgcgttttcgtaccaatacttttaatgcgatatttaaggtacgccatgcactggcctttgcaatacaccagttttacaatgaaagaggctttgtgtatatgcacacaccaattattacagcttcagatgctgaaggtgccggagaaatgttcagagtaacgacacttgacctggaaaacccgccacgcactgaagatggtaaggtagatttttctgaggatttctttgcccgctctacaaacctaacagtttcaggtcagctggaaggcgagcttgcggctatggcatttggacagatttatactttcggaccaacctttagggctgaaaactcaaatacaacacgccatctggctgaattctggatggtagagcctgaggttgcttttgccgacctggaagacaacatgcagctggcagaggacatgctcaaatacgtgatccgttatgctttggacaactgcgcaacagaaattgatttcttaaacaacaggttactggaagaagagaaatcaaaaccacaaaatgagcgcagtgaaatgtcgctgattgaaaaattaaatttctgtctggataatgattttgaaaggttaacgtataccgaagccattaaaattttaaaatcgtcgaaaccaaatcagaaaaaacagttcaaatacctgattgatgaatggggtgctgacctgcaatcggaacacgagcgctacctggttgaaaaacattttaagaaaccggtaatcctgacagattaccctgccgatattaaatcattttacatgagacaaaatgaacccgatgaagtgggaagaaaaacggtagccgcaatggatatccttttccctggaataggagaaatggttggaggttcacaaagggaagaacgtatggataaattggttgccagaatggaagaactaaatattccacaggaagaactttggtggtttttagacaccagacgtttcggttcggcaccgcactctggttttggccttggctttgaaagacttgttctttttgtaagtggcatgaccaacatcagggatgttattgcatttccccgtttccctaagaatgcagaattttaa

SEQ ID NO: 10276 - protein, 482 aa, Pedobacter heparinus DSM 2366
MIHREKVKSLLETEEFNREVTVMGWVRTFRNNQFIAINDGSCMGNIQVVVDFNHTDEALLKRITTGAAIAVNGIIVESVGKGQRVDIKATSIEILGDSDPEKFPLQPKKHSLEFLREIAHLRFRTNTFNAIFKVRHALAFAIHQFYNERGFVYMHTPIITASDAEGAGEMFRVTTLDLENPPRTEDGKVDFSEDFFARSTNLTVSGQLEGELAAMAFGQIYTFGPTFRAENSNTTRHLAEFWMVEPEVAFADLEDNMQLAEDMLKYVIRYALDNCATEIDFLNNRLLEEEKSKPQNERSEMSLIEKLNFCLDNDFERLTYTEAIKILKSSKPNQKKQFKYLIDEWGADLQSEHERYLVEKHFKKPVILTDYPADIKSFYMRQNEPDEVGRKTVAAMDILFPGIGEMVGGSQREERMDKLVARMEELNIPQEELWWFLDTRRFGSAPHSGFGLGFERLVLFVSGMTNIRDVIAFPRFPKNAEF

SEQ ID NO: 10277 - DNA, 1497 bp, Flavobacteriaceae bacterium 3519-10
  CDS (1)..(1497): transl_table=11
ttgtcaggaagaaaccacagagtttcgaccataaaaaaattaatgccagcaatgagaaccacgattaacgaactgctttcagattataaaaaactattacatcacgatataaccgttcagggttgggtccgcgcattccgctccaaccgttttatcgctctgaatgacggttccaccatcaacaaccttcagatcgttgtggattttgaaaaatttgatgaagacacactcaaaaatatcagtacagcggcatcattaaagatcgttggcgaagtggttgaaagtcagggagctggccagagcattgaaatcatcgccaggaaaattatcattctgggcgataacttcaccgaagaaagagataaaaccatccttcagccgaagaaacattcgcttgaaattctgcgtgagcaggcacatctccgtttccgtaccaatcttttcggttcggttttccgtgtgagaagtgcggtgagtttcgcgattcatcagtttttcaataaaaaccagttcttctacatgaacacgcccattattaccggcgcagatgcagagggagctggcgaaatgttcagtgtgacgaacttcgacatcaatgatcttccaaaagatgaaaacggcgaaatagattattcccaggattttttcggtaagaaaacaaaccttacggtttcaggacagctcaatgtggaaactgcgatgatgggacttggacgtgtttacacattcgggcctaccttccgcgctgaaaactcgaatacaacgcgtcaccttgcagaattctggatggtggagcctgaagttgcttttaataaccttgaagacaacatcgatctggctgaagatttcctaaaatatgtcatcggttatgttcttgaaaactgtaaagatgatctcgagtttcttgataagagattcgctgaggaacagaagcaaaaacctgagaaagacagagcttccgaaggtttaattgaaaaacttcagaatgtaattcaaaaaagattcaagcgcgtatcttatacggaagcgattgatattcttaaaaattcaaaagaaaacaagaaaggcaaattccagttcccgattgaagaatggggcgcggatttacagagcgaacatgaaagatttctggtggaaaaacatttcgaaagcccggtggtgctattcgattatcccaaagaaatcaaggctttttacatgaaactgaacgaagacggcaaaaccgtagccgcaatggacgtgcttttcccgggtatcggcgaaattatcggaggctcgcagcgtgaagataaatttgatgtgcttacggaaaaaatgaaagccatgaacgttgatgaacacgagctttggtggtatttagacaccagaaaattcggttccgtgccgcacgccggtttcggtttgggcctcgagagacttgtgctttttgtaacgggaatgacgaatatccgcgacgtgatacctttcccgcgaacgcctaacaacgctgagttctaa

SEQ ID NO: 10278 - protein, 498 aa, Flavobacteriaceae bacterium 3519-10
MSGRNHRVSTIKKLMPAMRTTINELLSDYKKLLHHDITVQGWVRAFRSNRFIALNDGSTINNLQIVVDFEKFDEDTLKNISTAASLKIVGEVVESQGAGQSIEIIARKIIILGDNFTEERDKTILQPKKHSLEILREQAHLRFRTNLFGSVFRVRSAVSFAIHQFFNKNQFFYMNTPIITGADAEGAGEMFSVTNFDINDLPKDENGEIDYSQDFFGKKTNLTVSGQLNVETAMMGLGRVYTFGPTFRAENSNTTRHLAEFWMVEPEVAFNNLEDNIDLAEDFLKYVIGYVLENCKDDLEFLDKRFAEEQKQKPEKDRASEGLIEKLQNVIQKRFKRVSYTEAIDILKNSKENKKGKFQFPIEEWGADLQSEHERFLVEKHFESPVVLFDYPKEIKAFYMKLNEDGKTVAAMDVLFPGIGEIIGGSQREDKFDVLTEKMKAMNVDEHELWWYLDTRKFGSVPHAGFGLGLERLVLFVTGMTNIRDVIPFPRTPNNAEF

SEQ ID NO: 10279 - DNA, 1392 bp, Candidatus Sulcia muelleri SMDSEM
  CDS (1)..(1392): transl_table=11
atgaaaaaaaaaattcaatgttttaattcaattaaagaattaatttttaattataaattttttctatcaaaagaaattaagataaaaggttgggtaaaacattttcgttataattgttttattattataaatgatggatcgacaattaacaatttacaaatttttattgagaaaaaattttcttcacttgttaaaaaaattaatattggaatttcaatagaagttataggagttttggttttaagccaaggcaaagaacaaaatatagaaatatatgctaataaaataaaaattattggaaaattttctcctgaggaacttcaaaagacaattttacaacctaaaacccatagttttaaaaaattaagagaacaagcctatttaagatttagaacaagtatatttagttcaattttgagaattcgtcataatatttctttttcaatccataaatttttttttaaaaaaaattttatttatattaatactccgataataacaacttatgattctgaaggagcaggagagatgtttagagtaacaaattttgatttaaaaaaaattcctttaaatgaaaaaggagaattaaataataatttagatttttttggaacttctacatatttaacagtatctggacaattgcaaggagaagctgcagcttcagggttaggaaaaatttatacatttgggcctacttttcgtgcagaaaaatctaatacttttagacatttatctgaattttggatgatagaacctgaaatgtcattttataaattagttcataatatgaattttgccgaaaagttattaaaatatgttattaaatttgtaattaataattcttatgaagatttattttttcttgaaaaaaaaaacaaaagaaaaatctttaaaagattaaataatgttttagaatcttcttttgaaagaataagttatacaaatgctataaaaattcttaaatctagtaaaaagggtattaattggggggaagatcttaaatctgaacatgaaaaatttttagcagaaaattattttaataatccaataataatttataattatccattaaaaattaaacctttttatatgcgtataaataatgataataaaacggtagcggctatggatattatatttccttatataggtgaaataataggaggctctcaaagagaagaaagatataatgttttattaaaacggattttggaattaaatttaaatattaaatcactttggtggtatttaaatattagacgttttggatctgttcctcatagtggctttggattaggatttgaaagattaattcaatatattacaaatatagataatattaaagatgttattccttttcctagatatcccaatcatgcagatttttaa

SEQ ID NO: 10280 - protein, 463 aa, Candidatus Sulcia muelleri SMDSEM
MKKKIQCFNSIKELIFNYKFFLSKEIKIKGWVKHFRYNCFIIINDGSTINNLQIFIEKKFSSLVKKINIGISIEVIGVLVLSQGKEQNIEIYANKIKIIGKFSPEELQKTILQPKTHSFKKLREQAYLRFRTSIFSSILRIRHNISFSIHKFFFKKNFIYINTPIITTYDSEGAGEMFRVTNFDLKKIPLNEKGELNNNLDFFGTSTYLTVSGQLQGEAAASGLGKIYTFGPTFRAEKSNTFRHLSEFWMIEPEMSFYKLVHNMNFAEKLLKYVIKFVINNSYEDLFFLEKKNKRKIFKRLNNVLESSFERISYTNAIKILKSSKKGINWGEDLKSEHEKFLAENYFNNPIIIYNYPLKIKPFYMRINNDNKTVAAMDIIFPYIGEIIGGSQREERYNVLLKRILELNLNIKSLWWYLNIRRFGSVPHSGFGLGFERLIQYITNIDNIKDVIPFPRYPNHADF

SEQ ID NO: 10281 - DNA, 1440 bp, Chitinophaga pinensis DSM 2588
  CDS (1)..(1440): transl_table=11
atgagccaaagagtaaaagtcaagcagatactgctagacgaaaaaacagactacaatgtagtggtaaagggttggatacggtctttccgtaacaatcagtttatagcactgaacgatggctcaaccaataataacatccaggtagtaatagaccaggaatccgttaccccagaactgctgaaacgccttaccacaggggctgctatcagcgtgtccggtcaggtgatcccttctatgggtaaaggccagcgtgtagaaataaaagcaattgaactggaaatactgggcgattgcgatccggaaaaatacccgcttcagctgaaaaaccgccccagcctggaatatctgcgtgaaattgcacacctgcgtttccgtaccaataccttcggagccatcttccgtctgcgccacgccctggcatttgccgtacacaaattctttaacgaaaaaggctttgtatacctgcatacgccgatcatcactgcttctgacgcagaaggcgctggtgaaatgttccatgtaacatccttcgatcttaaaaatccgccgctgacagaaagtggtgagatcaactataaagaagatttcttcggccgcgctaccaacctgactgtatccggtcagctggaaggcgagcttggcgcaatggcgtttggtgatatctacacttttggtcctaccttccgtgcagaaaattccaacacagcccgccacctggctgaattctggatgatcgagcctgaaatggccttctatgatctggaagaaaacatgaacctggcagaagctttcatcaagtatgtactgagctacgcactggaaaataacagggaagacctggaattcctggcgcaacgcctcctggaggaagaaaaacaaaagcctcagcaggaacgcagcgagatgggccttatcgaaaaactggaattcgtgctgaacaacgagtttgtacgtatcacttacactgaagcgatcgacatcctcaaaaacagcaagccaaacaaaaccaaaaagttcaattacctgatcgaagaatggggtgctgacctccagagtgagcacgaacgctacctggtagaaaaacacttcaagaaaccagtgatccttaccgattacccgaaagctatcaaagcgttttacatgaaacagaacgaagatggcaaaacagtaagagcaatggatatcctgttccctggtatcggcgaaatcgtaggtggttcacaacgtgaagaaaactacgataaactggtaacccgcatggaagaaatgcacctgccggtagaagaaatgagctggtacctggatacacgccgcttcggatccgcaccacacgcaggtttcggtcttggtttcgaaagactggtgctgtttgcatccggtatgggtaacatcagagacgtgattcctttcccaagaacgccgaagagcgcggaattctaa

SEQ ID NO: 10282 - protein, 479 aa, Chitinophaga pinensis DSM 2588
MSQRVKVKQILLDEKTDYNVVVKGWIRSFRNNQFIALNDGSTNNNIQVVIDQESVTPELLKRLTTGAAISVSGQVIPSMGKGQRVEIKAIELEILGDCDPEKYPLQLKNRPSLEYLREIAHLRFRTNTFGAIFRLRHALAFAVHKFFNEKGFVYLHTPIITASDAEGAGEMFHVTSFDLKNPPLTESGEINYKEDFFGRATNLTVSGQLEGELGAMAFGDIYTFGPTFRAENSNTARHLAEFWMIEPEMAFYDLEENMNLAEAFIKYVLSYALENNREDLEFLAQRLLEEEKQKPQQERSEMGLIEKLEFVLNNEFVRITYTEAIDILKNSKPNKTKKFNYLIEEWGADLQSEHERYLVEKHFKKPVILTDYPKAIKAFYMKQNEDGKTVRAMDILFPGIGEIVGGSQREENYDKLVTRMEEMHLPVEEMSWYLDTRRFGSAPHAGFGLGFERLVLFASGMGNIRDVIPFPRTPKSAEF

SEQ ID NO: 10283 - DNA, 1440 bp, Leptotrichia buccalis DSM 1135
  CDS (1)..(1440): transl_table=11
atgtgtgaatatttatatagattatttctatatttagtcatacagagatatatgttattagaattaagggaacttcaaaagaatacaaaagagtatttaggaaaagaaattgaaattaatggttgggtaaaaaaaattagaagtcaaaaaaactttggatttattgagttgaatgatggaactttttttactgggattcaagttgtgtttgaagaaggattggaaaattttgaggaaatttctaaacttacgatttcgacttcagttaaagttacaggaattgtagtagaatcagtagggaaagggcaggcttacgaaattaaagcaacaaaaatttctgtttatcaaaaagctgattcagattatccgttgcaaaataaaaggcattcatttgaatttttgagaacgattgcacatttacgtcctagaactaatgcgttttttgcaacttttagagtacgttcaattttgtcttatgcaattcataaattttttcaagaaaaaaactttgtgtatgtgcaaacacctataattactggaagtgatgcagaaggtgctggagaaatgtttagacttacgacgcttgatataaacaatattccaaaaactgaaaatggaagtattgattttaaacaggatttctttggtaaagaggcaaatcttacggttagtgggcagttaaatgttgaaacttttgcaactgcatttaaaaatacgtatacttttgggcctacattcagagctgaaaaatcgaacactccaaaacatgctgcggagttttggatgatggagcctgaaattgcatttgcagacttggacgtaaatatggatgttattgaggaaatgataaaatacattgtaaattatgtaagggaaaatgctaaggaagaaatggaattttttaataaatttgtagacaaggacttgtttaacaggcttgatactttagtaaacaatgaatttgggagaattacttatacagaagcaattgaaattttgaaaaattcaaaacagaaatttgaatatgaagtggaatggggaattgatttacagactgaacacgaaagatatttggcagaaaaacactttaaaaagcctgtatttgtaactgattatccaaaagatataaaggcattttatatgaagttaaatgaagatgggaaaactgtaagagcagttgacttattggcaccgggaattggagaaatcgtaggtggaagccaaagggaagatgattatgaaattcttttaggaaaaatcaatgaaatgggattaaaagaggaagattactggtggtacctagacttgagaaaatatggaagtgtgccacattcaggatttgggcttggatttgacagaatgcttatgtacattactggaatgacaaacataagggatgtgattccgttcccaagaacaactaaaaacttggagttctaa

SEQ ID NO: 10284 - protein, 479 aa, Leptotrichia buccalis DSM 1135
MCEYLYRLFLYLVIQRYMLLELRELQKNTKEYLGKEIEINGWVKKIRSQKNFGFIELNDGTFFTGIQVVFEEGLENFEEISKLTISTSVKVTGIVVESVGKGQAYEIKATKISVYQKADSDYPLQNKRHSFEFLRTIAHLRPRTNAFFATFRVRSILSYAIHKFFQEKNFVYVQTPIITGSDAEGAGEMFRLTTLDINNIPKTENGSIDFKQDFFGKEANLTVSGQLNVETFATAFKNTYTFGPTFRAEKSNTPKHAAEFWMMEPEIAFADLDVNMDVIEEMIKYIVNYVRENAKEEMEFFNKFVDKDLFNRLDTLVNNEFGRITYTEAIEILKNSKQKFEYEVEWGIDLQTEHERYLAEKHFKKPVFVTDYPKDIKAFYMKLNEDGKTVRAVDLLAPGIGEIVGGSQREDDYEILLGKINEMGLKEEDYWWYLDLRKYGSVPHSGFGLGFDRMLMYITGMTNIRDVIPFPRTTKNLEF

SEQ ID NO: 10285 - DNA, 1428 bp, Robiginitalea biformata HTCC2501
  CDS (1)..(1428): transl_table=11
atgacgcgtatacgatccatcctcagcgaagccccgttgctcagtgaagtcagcgtatccggctgggtccgaacctttcgttccaaccgcttcatcgccctgaacgacgggtcgacgctggagaacctgcaatgtgtcgtggattttgaaaattttgacgaggcaacactccgccggatcaacaccggggcagccctgaccgtacggggaacgctcgtggaaagtcagggccgcggccaaaaggtggaggtacaggtaagccagctggaaatccacggggatgccgacccggaaagctatccgattcagcccaagaaacactccatggaatttctccgggagcaggcccacctgcgaatccgcaccaatacgttcgccgcggtgatgcgggtgcgttccgccctggcctttggcgtacacgagtatttcaccaggaacgggttctactattttcacgccccgatcatcaccggatccgatgcggaaggggccggggagatgttccgggtgagcaccctcgatccgctgacaccccccagggacgagtccggcaatgtggatttcggggaagactttttcgggaaggaaacaaacttgacggtttcgggtcaattggaagccgaggcgtacgccatggccctgggcaaggtctataccttcggccccaccttccgggcggaaaactccaatacctcccgccacctggccgagttctggatgatcgaacccgagatggccttttacgacctggatgcgaacatggacctggcggaggatttcatccaggaggttatccgctatgtcctgaagcattgcgaggaagacctggcctttttggataaacgcctggaggatgaagaaaagcggaaaccgcaggccgaacgctcgggcatggggctgattgaaaaactgcgctttgtcacggaccagccgtttaagcgggttacctatacggaggctatcgaaatcctgcgaaacagcaagcccaacaagaaaaagaaattccagtaccccatagacgcctggggcgccgatttacaaagcgagcacgagcgctacctggtggaaaaacacttccagtgcccggtgattttgtttaactacccggcagaaatcaaggccttctacatgcggctgaacgacgatgggaaaaccgtccgggccatggacattctgtttccggggatcggggaaatcgtcgggggttcccagcgggaagaacgcctggatgtcctgcaggaaaagatgcagcaactgggcatagacgaaaaagaactctggtggtacctggacctgcgtcgcttcgggacggccgtccacagcggctttggcctgggctttgaacgcctggtgcaatttgcgaccggcatggggaacatccgggacgtaatccccttcccccgaacgccacagaacgcagaattctga

SEQ ID NO: 10286 - protein, 475 aa, Robiginitalea biformata HTCC2501
MTRIRSILSEAPLLSEVSVSGWVRTFRSNRFIALNDGSTLENLQCVVDFENFDEATLRRINTGAALTVRGTLVESQGRGQKVEVQVSQLEIHGDADPESYPIQPKKHSMEFLREQAHLRIRTNTFAAVMRVRSALAFGVHEYFTRNGFYYFHAPIITGSDAEGAGEMFRVSTLDPLTPPRDESGNVDFGEDFFGKETNLTVSGQLEAEAYAMALGKVYTFGPTFRAENSNTSRHLAEFWMIEPEMAFYDLDANMDLAEDFIQEVIRYVLKHCEEDLAFLDKRLEDEEKRKPQAERSGMGLIEKLRFVTDQPFKRVTYTEAIEILRNSKPNKKKKFQYPIDAWGADLQSEHERYLVEKHFQCPVILFNYPAEIKAFYMRLNDDGKTVRAMDILFPGIGEIVGGSQREERLDVLQEKMQQLGIDEKELWWYLDLRRFGTAVHSGFGLGFERLVQFATGMGNIRDVIPFPRTPQNAEF

SEQ ID NO: 10287 - DNA, 1404 bp, Cronobacter turicensis
  CDS (1)..(1404): transl_table=11
attatgagcgttgtgcctgtagccgacgtactccagggccgcgttgccgttgacagtgaagtcaccgtgcgcgggtgggtgcgtacccgaagagattcaaaagctggcatctccttcctcgccgtttatgacggttcctgctttgatccgatacaggctgtcattaataattctctgcccaattataatgaagaggttttgcacctcacgacgggctgctcagttatcgtcaccggcaaagtggttgaatccccgggcgaaggccagagcttcgaactgcaggccacgcaggttgaagtgaccggctgggtggacgatccggatacctacccgatggcggccaagcgccacagcatcgagtatctgcgtgaagtggcgcatctgcgtccgcgcaccaacctgattggcgccgtggcacgcgtacgccacacgctggcgcaggcgctgcaccgtttcttccacgagcagggcttcttctgggtctccacgccgcttatcaccgcgtctgataccgaaggcgcgggtgaaatgttccgcgtgtcgacgctggatctggaaaacctgccgcgcgacgatcagggtaaaatcgatttcgacaaagactttttcggcaaagaagcgttcctgaccgtttccggtcagttgaacggcgaaacctacgcctgcgcgctgtcgaaagtctataccttcggcccgaccttccgcgctgaaaactccaacaccagccgccacctcgcggagttctggatgctggagccggaagtggcgttcgctaacctgaacgacgtggcgggcctcgcggaagcgatgctgaaatatgtcttcaaagcggtgctggatgaacgcatggacgacatgaagttcttcgccgagcgcgtggataaagaagccatcgaccgtctggagcgtttcatctccgcagacttcgcgcaggtggactacaccgacgcggtcgccattctggagaaaagcggcgagaaattcgagaacccggtttactggggcgtagatctggcatccgagcatgaacgctatctcgccgagaaacacttcaaagcgccggtggtagtgaaaaactacccgaaagacatcaaggcgttctatatgcgccttaacgaagatggcaaaaccgtggcggcgatggacgtcctcgcgccgggcatcggtgaaatcatcggcggctcccagcgtgaagagcgtctcgacgtgctggatgcgcgcatggaagaaatgggccttaataaagaagactactggtggtatcgcgacctgcgccgttacggcaccgtgccgcacgccggttttggtctcggctttgaacgtctgatcgcctacgtaaccggcgttcagaacgtgcgcgacgttatccccttcccgcgtaccccgcgcaacgcgaacttctaa

SEQ ID NO: 10288 - protein, 467 aa, Cronobacter turicensis
MMSVVPVADVLQGRVAVDSEVTVRGWVRTRRDSKAGISFLAVYDGSCFDPIQAVINNSLPNYNEEVLHLTTGCSVIVTGKVVESPGEGQSFELQATQVEVTGWVDDPDTYPMAAKRHSIEYLREVAHLRPRTNLIGAVARVRHTLAQALHRFFHEQGFFWVSTPLITASDTEGAGEMFRVSTLDLENLPRDDQGKIDFDKDFFGKEAFLTVSGQLNGETYACALSKVYTFGPTFRAENSNTSRHLAEFWMLEPEVAFANLNDVAGLAEAMLKYVFKAVLDERMDDMKFFAERVDKEAIDRLERFISADFAQVDYTDAVAILEKSGEKFENPVYWGVDLASEHERYLAEKHFKAPVVVKNYPKDIKAFYMRLNEDGKTVAAMDVLAPGIGEIIGGSQREERLDVLDARMEEMGLNKEDYWWYRDLRRYGTVPHAGFGLGFERLIAYVTGVQNVRDVIPFPRTPRNANF

SEQ ID NO: 10289 - DNA, 1404 bp, Aggregatibacter actinomycetemcomitans D11S-1
  CDS (1)..(1404): transl_table=11
atgacaaaaattgcatcaattgtaaatgtgctgcaaggcaaaattgcaattggcgaaaaagtgactgtgcgcggctgggtgcgcacccgtcgcgactccaaagcaggcctatcctttcttgccgtttatgacggttcttgcttcgcacccattcaagctattgtaaataatgacattgccaattatgaatctgaagttttacgcttaacggcgggttgttccgtggttgtcaccggcaccgtagtcgaatcgccggcagaaggtcaggcagtagaattacaagcggaaaaagtggaagtcaccggttgggtagaagatccggaaacttacccgatggcggcaaaacgtcactctatcgaatatttacgcgaagtggcgcacctacgcccgcgcaccaatattatcggtgcagttgcccgtgttcgtcattgcttggcacaagccattcatcgtttctttcatgaacaaggtttctactgggttgccaccccactaatcaccgcttccgataccgaaggtgcgggtgaaatgttccgcgtttccaccttagatttagaaaatttgccacgtaccgacaaaggtgcggtggattttagccaggatttcttcggtaaagaatctttcctcacagtgtccggtcagttaaacggtgaaacctatgcttgcgcattaagtaaaatttacaccttcgggccaaccttccgcgctgaaaactccaacacaacccgtcacttagcggaattctggatgattgaaccggaagtggcattcgccacgcttgccgataatgccaaacttgccgaagatatgttgaaatacgtcttccgtgccgtattggcagaacgtcgcgatgatttggaattctttgccaaacacgttgacggcgatgtgattaatcgtttggaacgtttcattaactccgatttcgcacaagtggattacaccgacgccattgagattttactgaaatccggtaaaacctttgaattcccggtttcttggggcattgacctttcctccgaacatgagcgctatttggcagaagattatttcaaatcccctgttgtggtgaaaaactatccgaaagaaattaaagccttctatatgcgcttaaatgacgatggacaaaccgttgcggcaatggatgttttagcgccgggcattggtgaaattatcggcggttcgcaacgtgaagaacgtttagacgtattagacaaacgcatggcggaaatggggctaaatccggaagattattggtggtatcgtgatttgcgtcgttacggcacggttccgcattccggctttggcttgggctttgaacgtttaattgtttatgtgacagggttgcaaaatattcgtgatgtgatcccgttcccacgtgctccgcgtaacgcaaatttctaa

SEQ ID NO: 10290 - protein, 467 aa, Aggregatibacter actinomycetemcomitans D11S-1
MTKIASIVNVLQGKIAIGEKVTVRGWVRTRRDSKAGLSFLAVYDGSCFAPIQAIVNNDIANYESEVLRLTAGCSVVVTGTVVESPAEGQAVELQAEKVEVTGWVEDPETYPMAAKRHSIEYLREVAHLRPRTNIIGAVARVRHCLAQAIHRFFHEQGFYWVATPLITASDTEGAGEMFRVSTLDLENLPRTDKGAVDFSQDFFGKESFLTVSGQLNGETYACALSKIYTFGPTFRAENSNTTRHLAEFWMIEPEVAFATLADNAKLAEDMLKYVFRAVLAERRDDLEFFAKHVDGDVINRLERFINSDFAQVDYTDAIEILLKSGKTFEFPVSWGIDLSSEHERYLAEDYFKSPVVVKNYPKEIKAFYMRLNDDGQTVAAMDVLAPGIGEIIGGSQREERLDVLDKRMAEMGLNPEDYWWYRDLRRYGTVPHSGFGLGFERLIVYVTGLQNIRDVIPFPRAPRNANF

SEQ ID NO: 10291 - DNA, 1425 bp, Blattabacterium sp. (Periplaneta americana) str. BPLAN
  CDS (1)..(1425): transl_table=11
atgatagaaaaatattcaattaaagaattattggaaaaaggaaaaaaatttttaaataaaaaagttttagttgagggatggattcgttcttttcgaaattacattttcatcacattaaatgatggatcgacaataaagaatcttcaaattattttatctaaaaatttagaaaaggagtttttgaaaaaaattaccattgggagttccattaaagttataggtctaatcatagaaagtttaggaaaaaaacaatctatagaattaaaatctttagagataaggatctatggagaagtagatcaaaaaagttttcaaaaaactattttacaaccgaaaaaacatagtttagaaaccttacgaaaacaagcacatctacgctttcgtacaaatatttttagtagtattatgcgtgtacgtcatcatgtagctttttctatacataaatattttcatgaacatggttttttttatatcaatactccaattattactacttcaaatgctgaaggagctggaaaaatgtttcaggtaacaactatggatttaaaaaatattccacatataagagaaaatgtagattatacaaaagatttttttcagtgcaaaacctatttgagtgtatctggacaattagaagcagaaaccgcttctttagctttaggaaaagtatatacatttggacctgcttttcgtgcagaaaattccaatacttcacgacatttatctgaattttggatgatagaaccagaaatggctttttgtcatttagaagaaaatatggatagagctgaggattttttaaaatttgttatacaatatatcattgaaaattgcatagaagatctatcctttttaaaggaccatatagaaaaatggaatcaaaaacagaaatctacacttttagaaagattagagcttctattaaaatttccgtttcaaagaattagttacacggaagtaataaatattctggaaaaaagcatccagaaaaaaatggtaaaatttgttcatccagttatttggggaatggatttacaatcagaacatgaacaatatctagtaaaaaaatgttttcaatatcctgtaattgtttttgattatccttcttgtattaaagccttttatatgcgtataaataatgatggaaaaacagttagagctatggatattttatttccagaaataggagaaatcattggaggatctcaacgggaagaacgttatgatattttattaaagcgtatcaaagataaaaacatagatgacaggaaactttggtggtatttagatacacgtcgttttggttctgttcctcatagtggatttggcctaggatttgatcgtttagttcaattcattacagggatgaaaaatattcgggatgttattccttttccaagaactccacataaggcagaattctaa

SEQ ID NO: 10292 - protein, 474 aa, Blattabacterium sp. (Periplaneta americana) str. BPLAN
MIEKYSIKELLEKGKKFLNKKVLVEGWIRSFRNYIFITLNDGSTIKNLQIILSKNLEKEFLKKITIGSSIKVIGLIIESLGKKQSIELKSLEIRIYGEVDQKSFQKTILQPKKHSLETLRKQAHLRFRTNIFSSIMRVRHHVAFSIHKYFHEHGFFYINTPIITTSNAEGAGKMFQVTTMDLKNIPHIRENVDYTKDFFQCKTYLSVSGQLEAETASLALGKVYTFGPAFRAENSNTSRHLSEFWMIEPEMAFCHLEENMDRAEDFLKFVIQYIIENCIEDLSFLKDHIEKWNQKQKSTLLERLELLLKFPFQRISYTEVINILEKSIQKKMVKFVHPVIWGMDLQSEHEQYLVKKCFQYPVIVFDYPSCIKAFYMRINNDGKTVRAMDILFPEIGEIIGGSQREERYDILLKRIKDKNIDDRKLWWYLDTRRFGSVPHSGFGLGFDRLVQFITGMKNIRDVIPFPRTPHKAEF

SEQ ID NO: 10293 - DNA, 1401 bp, Edwardsiella tarda EIB202
  CDS (1)..(1401): transl_table=11
atgagcgtagtgcctgtagtcgacgtactgcaaggccgcgtggcggtagacactgaggtcaccgttcgtggctgggtacgtacccggagagattctaaagccggtatctccttcctcgccgtttatgacggctcctgctttaatccgttacaggccgtcgtgaataattctctgccgaattatgaagatgaagtgctgcgcctgaccaccggctgctccgtggaagtcagcggccgggtcgttgcgtcgccgggcgaaggccagagcttcgagctgcaggccaccgccattaaggtggtcggctgggtcgacgatccggatacctatccgatggccgccaagcgccacagcatcgaatacctgcgcgaggtcgcccacctgcgtccgcgcaccaacctgatcggcgccgtcgcccgcgtgcgtcacaccctggcacaggctattcaccgctatttcaacgaaaatggctacttctgggtctcgacgccgctgatcaccgcgtcggataccgaaggcgccggtgaaatgttccgcgtctccacgctggacatggaaaacctgccgcgcaccgacgcgggcaaggtggactacagcgaagacttcttcggccgcgaagcgttcctgacggtgtccggtcagctgaacggtgaaacctatgcctgtgcgctgtccaaggtgtacacctttggtccgaccttccgcgccgaaaactccaacaccagccgccatctggccgagttctggatggttgagccggaggtcgcctttgccgacctgaacgacatcgccggcgtcgccgagggcatgctgaagtatgtctttaacgcggtgctggaagagcgcgctgacgatatggccttctttgcccagcgcgtggataaagacgccatcgatcgcctgcagcgctttgtctcctccgatttcgcccaggtggactacaccgatgccatcaccatcctggagacctgcggaaagcagtttgagaacccggtattctggggcgtcgatctctcctctgagcacgagcgctatctggccgagcagcactttaaagcaccggtggtggtgaagaactacccgaaagacattaaggcgttctatatgcgcctcaacgaagacggcaagaccgtcgccgccatggacgtgctggcgccggggatcggtgaaatcatcggcggttcgcagcgtgaagagcgtctcgacatgctggataagcgtctggatgagatgggcctgaagaaagaggactactggtggtatcgcgatctgcgccgctacggcaccgtgccgcacgccggcttcggtctcggcttcgaacgcctggtggcctatgttaccggcgttcagaatgtgcgcgacgttattccgttcccgcgcaccccgcgcaacgcaacattctaa

SEQ ID NO: 10294 - protein, 466 aa, Edwardsiella tarda EIB202
MSVVPVVDVLQGRVAVDTEVTVRGWVRTRRDSKAGISFLAVYDGSCFNPLQAVVNNSLPNYEDEVLRLTTGCSVEVSGRVVASPGEGQSFELQATAIKVVGWVDDPDTYPMAAKRHSIEYLREVAHLRPRTNLIGAVARVRHTLAQAIHRYFNENGYFWVSTPLITASDTEGAGEMFRVSTLDMENLPRTDAGKVDYSEDFFGREAFLTVSGQLNGETYACALSKVYTFGPTFRAENSNTSRHLAEFWMVEPEVAFADLNDIAGVAEGMLKYVFNAVLEERADDMAFFAQRVDKDAIDRLQRFVSSDFAQVDYTDAITILETCGKQFENPVFWGVDLSSEHERYLAEQHFKAPVVVKNYPKDIKAFYMRLNEDGKTVAAMDVLAPGIGEIIGGSQREERLDMLDKRLDEMGLKKEDYWWYRDLRRYGTVPHAGFGLGFERLVAYVTGVQNVRDVIPFPRTPRNATF

SEQ ID NO: 10295 - DNA, 1389 bp, Sebaldella termitidis ATCC 33386
  CDS (1)..(1389): transl_table=11
atgttactggaaattagggaaatatacaaaaaacatgctgaattattaaataaagagctagaattaaacggatggataagaaagagaagagatcagaaaaattttggttttcttgaagtaaatgatggaactttttttaatggaattcaggtagtttttgatgacagtctgtcaaatttcgatgaaatatcaagactaagcatatcatcatcggtacatgtaaagggagttttagtgcagtcagaaggaaagggacagacttttgaaataaaagcaaaggaaataactatttataataaagctgatctggattatccgcttcagaacaaaagacacacactggaatatctacgtactattgctcatctgagacctagaacaaatacatttatggcagtattcagagtgagatctcttatgtcttatgcaatacataaattttttaatgaaagaggatttgtatatgttcatactccgatcataacaggaagcgatactgaaggtgccggggaaatgttccagcttactacattggatcttaaggatattccaaaaaatgacaagggagaagtggagtataaagatgacttctttggaaaacaggctaaccttacggtaagcggacagctgaacgtagagactttttgtatggcatttaaaaatacttatacattcggacctacattcagagcagaaaagtcaaacactccaaagcatgtttcggaattctggatgatggagccggaaattgcatttgccgatctggatgtaaatatggacattgctgaagacatgatgaaatatataataagatatgtattggaaaatgctcctgaagaaatgcagttttttaaccaatttatagataagacgcttctggacagattaaacgggcttgtgaattctgaatttggaagagttacttatacagaagctatagaaattttgaaaaaagcggataaaaaattcgaatatcctgtggaatggggaatagatcttcagacagagcatgaaagatatcttgctgaagaacatttcaaaaaacctgtatttgttactgattatccaaaggatataaaagctttttatatgaagctgaatgaagacgggaaaactgtaagagctatggatcttcttgctccgggaataggagaaataatagggggaagccagagagaagataattttgaaaagctggaacagagaataaaagatatgaacctaaatgaaaaagattactggtggtatatggaattgagaaaatacggaagtgttcctcattcagggtatggtctgggatttgaacgggctattatgtatgtaacaggaatgttaaatataagagatgtaattccgtttccaagaggacctaagagtctggaattttaa

SEQ ID NO: 10296 - protein, 462 aa, Sebaldella termitidis ATCC 33386
MLLEIREIYKKHAELLNKELELNGWIRKRRDQKNFGFLEVNDGTFFNGIQVVFDDSLSNFDEISRLSISSSVHVKGVLVQSEGKGQTFEIKAKEITIYNKADLDYPLQNKRHTLEYLRTIAHLRPRTNTFMAVFRVRSLMSYAIHKFFNERGFVYVHTPIITGSDTEGAGEMFQLTTLDLKDIPKNDKGEVEYKDDFFGKQANLTVSGQLNVETFCMAFKNTYTFGPTFRAEKSNTPKHVSEFWMMEPEIAFADLDVNMDIAEDMMKYIIRYVLENAPEEMQFFNQFIDKTLLDRLNGLVNSEFGRVTYTEAIEILKKADKKFEYPVEWGIDLQTEHERYLAEEHFKKPVFVTDYPKDIKAFYMKLNEDGKTVRAMDLLAPGIGEIIGGSQREDNFEKLEQRIKDMNLNEKDYWWYMELRKYGSVPHSGYGLGFERAIMYVTGMLNIRDVIPFPRGPKSLEF

SEQ ID NO: 10297 - DNA, 1401 bp, Dickeya dadantii Ech586
  CDS (1)..(1401): transl_table=11
atgagcgtagtgcctgtagtcgacgtactgcaaggccgtgtcgccgttgacagtgacgtcaccgtgcgcggctgggtacgtacccggagagactctaaagccggtatttcctttattgccgtctatgacggttcctgctttgattcgctacaggctgtcgtcaataataatcttgctaattatcagagcgacatcttgcgcctgaccaccggctgctcggtagaagtcaccggcaaggtagtggaatctcccggcgaaggccaaagcttcgaactgctggccaccgaactcaaagttgtcggctgggtggatgacccggacacgtacccgatggcggctaagcgccacagtatcgaatatctgcgtgaagtcgcgcatttacgccctcgtaccaacctgatcggtgctgtcgcccgtgtgcgccacacactggcgcaggctattcatcgcttcttccatcagaacggtttctattgggtctctacccctatcattaccgcttccgataccgaaggcgcaggtgaaatgttccgcgtttccacgctggacctggaaaacctgccgcgtgacgatcagggcaaagtcgatttcagcgaagacttcttcggtaaagaagcttttctgaccgtatccggccagcttaacggcgaaacctacgcctgcgccctgtctaaaatctataccttcgggccgaccttccgtgcggaaaactccaataccagccgccacctggcagagttttggatgattgaaccggaagtcgccttcgcgacactggatgacgttgctgcgctggcggaaaacctgctgaaatttgtatttaaggccgtactggaagaacgtgctgatgacatgaaattcttcgccgaacgcgtggataaagacgctgtcagccgtctggagcgttttgtcacctctgatttcgctcaggtggattacaccgacgccatcacgattctggaaaactgcgggcagacgttcgagaacccggtatcctggggtatcgatctctcctccgagcacgaacgctatctggcagagaaacacttccaggccccggtcgtggtgaagaactacccgaaagacatcaaagccttttatatgcgtatgaacaacgacggcaaaaccgtggcggcgatggacgtactggcaccgggcatcggcgagattatcggtggctcacaacgtgaagagcgtctggagcaactggatatccgtctggaagagatgggactgagtaaagaagactactggtggtaccgcgatttgcgtcgctacggcaccatcccgcattcgggttttggtctcggttttgaacgtttgatagcgtatgtaaccggtgtacaaaatgtgcgcgatgtcattccgttcccgcgtacgccgcgcaacgccacgttctaa

SEQ ID NO: 10298 - protein, 466 aa, Dickeya dadantii Ech586
MSVVPVVDVLQGRVAVDSDVTVRGWVRTRRDSKAGISFIAVYDGSCFDSLQAVVNNNLANYQSDILRLTTGCSVEVTGKVVESPGEGQSFELLATELKVVGWVDDPDTYPMAAKRHSIEYLREVAHLRPRTNLIGAVARVRHTLAQAIHRFFHQNGFYWVSTPIITASDTEGAGEMFRVSTLDLENLPRDDQGKVDFSEDFFGKEAFLTVSGQLNGETYACALSKIYTFGPTFRAENSNTSRHLAEFWMIEPEVAFATLDDVAALAENLLKFVFKAVLEERADDMKFFAERVDKDAVSRLERFVTSDFAQVDYTDAITILENCGQTFENPVSWGIDLSSEHERYLAEKHFQAPVVVKNYPKDIKAFYMRMNNDGKTVAAMDVLAPGIGEIIGGSQREERLEQLDIRLEEMGLSKEDYWWYRDLRRYGTIPHSGFGLGFERLIAYVTGVQNVRDVIPFPRTPRNATF

SEQ ID NO: 10299 - DNA, 1404 bp, Candidatus Protochlamydia amoebophila UWE25
  CDS (1)..(1404): transl_table=11
atgcgtacaaaaattaaaagccttagaggtacgactccagaggttcgtgctttgatcggacacgatataacattaaaaggatgggtgagaactgttcgtaatcaaaagacctttacttttattgaaatcaatgatggttctactctttctaattttcaaattatagcgactccagatatagcgggttatgatcaactaattaatcaactttcaacaggagtttctgtttcagcaataggtacaattgtagaaagcccaggtaaagagcaaaatttagaaatgcaagcaacagcgattaccattattggaaaatgtgaccctgaagtttatctcttgcaaaaaaaacggcatacttttgaatttttgcgatcaattgcgcatcttagacctcgcactaatacgattggagctgttacacgagttcgtaatgcattagcctttgcaacgcatcagttttttcaaaaacgcggatttctatatatccatactccaattattacagggtctgattgtgagggggcgggtaaaatgtttcaagtgacaacgttagatcaaaacaatcccgctagaacaccagaaggaagagttgattatacacaagatttttttggcaagcctacttatttgacagtttctgggcagttaaatggagagatttatgcttgtgcgttatcagatgtttatacatttggtccaacatttcgggcagaaaattccaatacttcccgtcatttagcagaattttggatgattgaacccgaaatggcttttgcagatttaaacgataatatggactgtgcggaagattatcttaagtatattttaaaatatgtcttagacaattgccaagaagatatggagtttttcaacaagcacgttgcgacagatttaatttctagacttgagcatgtcattaacacttcatttgagagagcttcttatacttatgctgtaagaattttagagaaagcggataaaaaatttgaatatccagttaagtggggattagatttgcaatctgagcatgagcgttttttggcagaagaattttttggtaagccagtcattttgacagattatccaaaagacattaaagcattttatatgcgtaccaatgaagataataagaccgtggctgcgatggatgttctcgtcccaaaagtgggagaaattatcggaggtagccaacgggaagaaaggcttagtgtattagagtcaaaattaaaagaattcaatttaccagcagaagaatattggtggtatttagaacttcgtaaattcgggagtgttcctcactctggttttggtgcgggttttgaacgtttagttcaatttacaactggaatggaaaatatacgtgatgtcattcctttcccaaggcaccctggaaaagctgatttttaa

SEQ ID NO: 10300 - protein, 467 aa, Candidatus Protochlamydia amoebophila UWE25
MRTKIKSLRGTTPEVRALIGHDITLKGWVRTVRNQKTFTFIEINDGSTLSNFQIIATPDIAGYDQLINQLSTGVSVSAIGTIVESPGKEQNLEMQATAITIIGKCDPEVYLLQKKRHTFEFLRSIAHLRPRTNTIGAVTRVRNALAFATHQFFQKRGFLYIHTPIITGSDCEGAGKMFQVTTLDQNNPARTPEGRVDYTQDFFGKPTYLTVSGQLNGEIYACALSDVYTFGPTFRAENSNTSRHLAEFWMIEPEMAFADLNDNMDCAEDYLKYILKYVLDNCQEDMEFFNKHVATDLISRLEHVINTSFERASYTYAVRILEKADKKFEYPVKWGLDLQSEHERFLAEEFFGKPVILTDYPKDIKAFYMRTNEDNKTVAAMDVLVPKVGEIIGGSQREERLSVLESKLKEFNLPAEEYWWYLELRKFGSVPHSGFGAGFERLVQFTTGMENIRDVIPFPRHPGKADF

SEQ ID NO: 10301 - DNA, 1389 bp, Borrelia garinii PBi
  CDS (1)..(1389): transl_table=11
atgttttcaagcattaaagatattttagaaaatccaattttaaacagcaatgttacaataaacggctggattagaactaagagaagtaatggtaagattggatttatagaaattaatgatggctcaacgcttaaaggaattcaagctgtcataaatgaagaagaaaatcaatttactgaaaaagatctgaaaaaactaacaacaggggcaagtatatcgttaacgggcctattagtggaaagtcctgcaaaaggacaaaattatgaaataaaaatatatagttttaatgtaatcggagaagcagattcaaaaacttacccattgcaaaaaaagagacatacttttgaattcttaagagaaatacctcatttaagaataagaaccaatacatttggagccattgctagggtaagaaataaaatttcatacaagattcatgaatatttccaaaaaaatggttttttttatattaatacaccaataattacatcaaatgatggggaaggtgctggggaaatgtttagagtttccacactaaaatttaataaaccaaacaattcgcttagcaatattgatttcaaggacgatttttttggaaaagaagcttttctctctgtcaccggtcaattgcacggagaagcgtatgcaatggctttatctaaaatatatacattcggaccaacatttcgagcagaaaattctaacaccacacgccacgcttcagaattttggatgatagaaccggaaatggctttttacaagcttaacgacaatattagcctagcagaagatctcttaaaataccttttaagttcaattttaaacgaatgctcacaagatatggatttcttagaaaattacattgaaaaaggtttaattaaaaaactagaaaacgtaataaattccaattttgaagttattacctatactaaagcaattgaaattcttgaaagttcaaaaaaaaattttgaaataaaaccttgctggggaatagatttgcaaacagatcacgaaagatacttaacagaggagatttttaaaaaaccaatagcagtcattgattatccaaaaaatttcaaagcattttacatgaaaataaacaaagacaataaaaccgtcaaaggaatggacatacttgttccaagaattggagagattataggaggaagcgaaagagaagatgacttgcaaaaattagaaaatagaataaaagaattaaacctaaacattgagcatctaaactggtatcttgatctaagaagatttggttctactccccattctggttttggacttggacttgaaagattggtgcaatacacaacgggaatatctaatataagagattcaataccattcccaagaactcctaaaaatctttatttttaa

SEQ ID NO: 10302 - protein, 462 aa, Borrelia garinii PBi
MFSSIKDILENPILNSNVTINGWIRTKRSNGKIGFIEINDGSTLKGIQAVINEEENQFTEKDLKKLTTGASISLTGLLVESPAKGQNYEIKIYSFNVIGEADSKTYPLQKKRHTFEFLREIPHLRIRTNTFGAIARVRNKISYKIHEYFQKNGFFYINTPIITSNDGEGAGEMFRVSTLKFNKPNNSLSNIDFKDDFFGKEAFLSVTGQLHGEAYAMALSKIYTFGPTFRAENSNTTRHASEFWMIEPEMAFYKLNDNISLAEDLLKYLLSSILNECSQDMDFLENYIEKGLIKKLENVINSNFEVITYTKAIEILESSKKNFEIKPCWGIDLQTDHERYLTEEIFKKPIAVIDYPKNFKAFYMKINKDNKTVKGMDILVPRIGEIIGGSEREDDLQKLENRIKELNLNIEHLNWYLDLRRFGSTPHSGFGLGLERLVQYTTGISNIRDSIPFPRTPKNLYF

SEQ ID NO: 10303 - DNA, 1404 bp, Legionella pneumophila subsp. pneumophila str. Philadelphia 1
  CDS (1)..(1404): transl_table=11
atgacagaagtctttactataaaacaatgtctcgacggcgaaatcagtattgatgaaaccgttacggtaagaggatgggtgaaaactcgaagagattcaaaagctggcttgtctttcatcagccttcatgatggctcttgcttttctcccatacaaatcgtcgctaccgatcagttatccaactaccacaaagaagtaacaaaattaactgctggctgttcaatgatagcgactggaaaattggtagcatcacaaggaaaagggcaattttttgaaatccaggccgaatctattgaagtggtgggatgggttgaaaacccagacacataccctattcaagccaaacgccatactcttgagtttttaagagaagtggctcatctgcgccccagaaccaataccataagcgctgtcaccagagtacgtcattctttggcgcaagccattcatcgtttttatcacgaacaaggctttttttgggtgcatacaccgatcattactgccagcgactgtgaaggagcaggagaaatgttcagagtatctactctggatttattaaatatccctaagaatgataaaggacaaatcgatttcagtaaggatttttttggcagagaaacgttcttaactgtttctggccaactaaatgtcgaagcttattgtatggccatgtctaaggtctacacttttggaccaacatttcgggctgaaaattcgaatacaagccgacatttggctgaattctggatgatcgaaccagaaatcgcttttgcaaatctggaagacatttgtaaactcagccaaaatatgctgcgttatctctgtaaaacggttcttgaagagcgtgccgatgatatggactttttcaatcaatttgtcgccccaggttgtatagaacgtatggaacatattgcggattctgaatttgaaattatgacctatactgatgcgataaaagcacttgaggcgagtgaccaaaaatttgaatttccagttagctgggggctggatctgcaatcagagcatgaacgttacctggctgaagtgctttgcaaaaagcctgtcattgtgacaaattacccgcaagaaattaaggggttttacatgcgtcttaatgacgatgggaaaacggtagccgccatggacgttttagctccaggcatcggagagattatcggcggcagccaacgcgaagagcgcttggaaatactggatagacgcatggacgaatgcaacctgaataaagaacattaccaatggtatagagacttgcgtcgttatggcactgttcctcatgccgggtttggcttgggctttgaacgccttatcagctatgttacaggagtatccaatgtgcgagatgtgatacctttccctcgcacaccaggccatgccgattattaa

SEQ ID NO: 10304 - protein, 467 aa, Legionella pneumophila subsp. pneumophila str. Philadelphia 1
MTEVFTIKQCLDGEISIDETVTVRGWVKTRRDSKAGLSFISLHDGSCFSPIQIVATDQLSNYHKEVTKLTAGCSMIATGKLVASQGKGQFFEIQAESIEVVGWVENPDTYPIQAKRHTLEFLREVAHLRPRTNTISAVTRVRHSLAQAIHRFYHEQGFFWVHTPIITASDCEGAGEMFRVSTLDLLNIPKNDKGQIDFSKDFFGRETFLTVSGQLNVEAYCMAMSKVYTFGPTFRAENSNTSRHLAEFWMIEPEIAFANLEDICKLSQNMLRYLCKTVLEERADDMDFFNQFVAPGCIERMEHIADSEFEIMTYTDAIKALEASDQKFEFPVSWGLDLQSEHERYLAEVLCKKPVIVTNYPQEIKGFYMRLNDDGKTVAAMDVLAPGIGEIIGGSQREERLEILDRRMDECNLNKEHYQWYRDLRRYGTVPHAGFGLGFERLISYVTGVSNVRDVIPFPRTPGHADY

SEQ ID NO: 10305 - DNA, 1401 bp, Photobacterium profundum SS9
  CDS (1)..(1401): transl_table=11
atgacttacgcgcctgtaacagacgtactaagcggaaagctagcagtagacagtgaagttactgttcgaggctggatccgttcacgtcgtgattccaaagctgggatttcttttcttgccatttatgacggctcttgtttcgacccgattcaggccgtggtcccgaatgagttaaataattatcaagaagaagtcctaaaactaactactggttgctctgttgaggtaacgggtaagattgttgagtctccagctaaaggtcaagattttgagcttgctgcaactgaagttaaagttgtaggtttagttgaagaccctgatacatacccaatggcaaaaactcgtcactcaattgagtaccttcgtgaagttgcgcacctacgtccgcgtactaacattattggtgctgtcgcgcgtgtacgtaactgtctgtctcaggcaattcaccgcttctaccacgagcaaggtttcttctggatgtctgctccacttatcacagcgtctgactgtgaaggtgcgggtgagatgttccgtgtatcaacacttgatatggctaacgttccgatgacggacgctggcgaagttgattacgataaagacttcttcggtaaagaaacattcctaacagtatctggccagttgaacgctgaaacctatgcttgtgcattaagcaaagtatacacattcggccctactttccgtgctgaaaactcaaacaccagccgccaccttgcggaattttggatggttgaacctgaagttgctttcgccgatcttgatgacgcagcgaaactggctgaagacatgcttaagtacgtattcaaagccgtacttgaagaacgtcgtgatgaccttgagttctttgcacagcgtattaacaaagaagcaatcactcgtctagagcagtttgtaacatctgactttgcacaagttgattacactgatgcaatccagatcctacaagattctggtcgtaagtttgagtttgatgttgagtggggcattgatatgtcttctgaacacgaacgctaccttgcagaagagcacttcaaagcacctgtagttgttaaaaactacccgaaagatatcaaagcattctacatgcgtatgaatgacgacggtaaaacggttgctgctatggacgttctagcaccaggcatcggtgagattatcggtggttctcagcgtgaagagcgtttagagcatctcgataagcgtattgctgagatgggtatcgatgcaagccacatcgaatggtaccgcgacttacgccgttacggtacagttcctcactctggcttcggtctaggttttgagcgtttggttacttacgttactggtatgcaaaacatccgtgacgtaattccgttcccacgcgcaccacgttctgcaaacttctaa

SEQ ID NO: 10306 - protein, 466 aa, Photobacterium profundum SS9
MTYAPVTDVLSGKLAVDSEVTVRGWIRSRRDSKAGISFLAIYDGSCFDPIQAVVPNELNNYQEEVLKLTTGCSVEVTGKIVESPAKGQDFELAATEVKVVGLVEDPDTYPMAKTRHSIEYLREVAHLRPRTNIIGAVARVRNCLSQAIHRFYHEQGFFWMSAPLITASDCEGAGEMFRVSTLDMANVPMTDAGEVDYDKDFFGKETFLTVSGQLNAETYACALSKVYTFGPTFRAENSNTSRHLAEFWMVEPEVAFADLDDAAKLAEDMLKYVFKAVLEERRDDLEFFAQRINKEAITRLEQFVTSDFAQVDYTDAIQILQDSGRKFEFDVEWGIDMSSEHERYLAEEHFKAPVVVKNYPKDIKAFYMRMNDDGKTVAAMDVLAPGIGEIIGGSQREERLEHLDKRIAEMGIDASHIEWYRDLRRYGTVPHSGFGLGFERLVTYVTGMQNIRDVIPFPRAPRSANF

SEQ ID NO: 10307 - DNA, 1401 bp, Idiomarina loihiensis L2TR
  CDS (1)..(1401): transl_table=11
atgtcgtatgcttctgtagtggatgttctgacgggaaaagtcgctgtcgatgagaccgtcacagtccggggctgggtacgcacccgccgtgactcgaaagccggtatttcatttattaacttgcacgatggctcatgctttgatgccattcaggccgtggttccggcagaacttcccaattacagtaatgaagtgcagaaactgacgaccggttgttctgtagctattaccggtgttgttgtcccttctcagggcaaaggtcagtcatttgaactgcaggcaaccaaagttcatgtatatggctgggtggaagatcccgatacctaccctatggctcctaaacgtcatagcatggaatacttacgtgaatacgcgcatttgcgtccgcgtaccaacattaccggtgcggtcatgcgtgttcgtaatgcgttatctcaggctattcatcgcttcttccatgaggaaggttatttgtgggtgagtacaccaatcatcacgacttccgattgtgaaggtgccggtgagatgttccgtgtttcaacactggacatgctgaatatcccgaaaacagataaaggcgaagtcgactactctgaagactttttcggtaaagaagcgtttttaacggtgtcgggtcagctgaacgtagagtcttacgcttgctctttatctaaagtttatacattcggcccaaccttccgtgctgaaaactcgaacaccagccgtcacttgtctgaattctggatggtagaacccgagctggcgtttgcaactttagatgatgttgccggcttagccgaagccatgcttaagtatgtgtttaaagccgttctggaagagcgcccggacgacatggcgttctttgccgaacgcattaactctgacgctatcagccgtttagaagccattgtaaataatgactttgtgcacatggattacaccgacgccattgagatactgaagaactgcgatagaaaattcgaatacgcggttgaatggggtgtggatttacaatcagagcacgagcgttatttagctgaagaacatgtcggcgcaccaattattctgaaaaactatccgcgcgatattaaagccttttacatgcgccagaacgaagatggcaaaaccgttgccgctatggacgttttagcgccgggtattggggaaattatcggtggttccgcccgtgaagaacgtttagacattcttgaccagcgaattgacgaaatgaacctgccaaaagaagaatacggcttctaccgcgatttgcgtcgttacggtaccgttcctcacgccggttttggcctgggttttgagcgcttagtggcttatgtcaccggcgtacaaaatattcgtgacgttatacctttcccacgggctccgaaaagtgccgaattttaa

SEQ ID NO: 10308 - protein, 466 aa, Idiomarina loihiensis L2TR
MSYASVVDVLTGKVAVDETVTVRGWVRTRRDSKAGISFINLHDGSCFDAIQAVVPAELPNYSNEVQKLTTGCSVAITGVVVPSQGKGQSFELQATKVHVYGWVEDPDTYPMAPKRHSMEYLREYAHLRPRTNITGAVMRVRNALSQAIHRFFHEEGYLWVSTPIITTSDCEGAGEMFRVSTLDMLNIPKTDKGEVDYSEDFFGKEAFLTVSGQLNVESYACSLSKVYTFGPTFRAENSNTSRHLSEFWMVEPELAFATLDDVAGLAEAMLKYVFKAVLEERPDDMAFFAERINSDAISRLEAIVNNDFVHMDYTDAIEILKNCDRKFEYAVEWGVDLQSEHERYLAEEHVGAPIILKNYPRDIKAFYMRQNEDGKTVAAMDVLAPGIGEIIGGSAREERLDILDQRIDEMNLPKEEYGFYRDLRRYGTVPHAGFGLGFERLVAYVTGVQNIRDVIPFPRAPKSAEF

SEQ ID NO: 10309 - DNA, 1404 bp, Bacteroides fragilis NCTC 9343
  CDS (1)..(1404): transl_table=11
atggaaaagattagtagaacaaaaattgtcgacctgatgaagcgcgaagattttggcgctatggtcaatgtgaaaggatgggttcgcacccgcagaggcagcaaacaagttaactttatcgcactgaatgacggttctacaataaataatgtgcaggtcgtagtcgatctggcgaactttgatgaagagatgctgaagcaaatcacgaccggtgcttgtctgagcgtgaacggtgtgttgacggagtcggtaggcgccggacagaaggctgaagtgcaggctcgtgaaattgaagtgctgggaacttgtgacaatacgtatccactacagaagaaagggcactctatggagtttttgcgtgagatagcccatttgcgtccgcgtaccaatacttttggagcagtattccgtattcgtcacaatatggctattgctatccataaattcttccatgaaaagggattcttctattttcatacacctatcattacagcgtctgactgtgaaggtgccggacagatgtttcaggtgactaccatgaacctgtatgatctgaaaaaagatgcaaacggttctatcgtgtatgatgatgacttctttggcaaacaagccagtttgactgtttcgggacagttggaaggtgagttagctgctaccgctttaggtgcaatctatacgtttggtcctactttccgtgccgaaaattctaacactccgcgtcacttggccgagttttggatgattgaaccggaggtagctttcaacgaaattcaggagaatatggatttggctgaagagttcattaaatattgtgtgagatgggctttggataactgcgcagatgatgtgaaattcctgaacgacatgttcgataaaggattaattgaacgtttggaaggtgtacttaaagaagacttcgtccgtctgccatacacggaaggtattaaaatactggaagaagctgttgccaaaggacataaattcgaattcccggtttactggggagttgatttggcttctgaacacgagcgttatctggtggaagaccactttaaacgtccggtgatcctgactgactatccgaaggaaataaaggccttctatatgaaacagaatgaggatggtaagactgtgcgtgccatggatgtacttttccctaaaatcggagagatcattggcggttcggaacgtgagtctgattataacaaattgatgacgcgtattgaagaaatgcatattccgatgaaggatatgtggtggtatctggatactcgtaagttcggtacttgtcctcactccggattcggactgggatttgaacgcttgttgctcttcgtgacgggtatgtctaatatccgcgatgtaattccgttcccgcgtaccccacgtaatgccgatttttaa

SEQ ID NO: 10310 - protein, 467 aa, Bacteroides fragilis NCTC 9343
MEKISRTKIVDLMKREDFGAMVNVKGWVRTRRGSKQVNFIALNDGSTINNVQVVVDLANFDEEMLKQITTGACLSVNGVLTESVGAGQKAEVQAREIEVLGTCDNTYPLQKKGHSMEFLREIAHLRPRTNTFGAVFRIRHNMAIAIHKFFHEKGFFYFHTPIITASDCEGAGQMFQVTTMNLYDLKKDANGSIVYDDDFFGKQASLTVSGQLEGELAATALGAIYTFGPTFRAENSNTPRHLAEFWMIEPEVAFNEIQENMDLAEEFIKYCVRWALDNCADDVKFLNDMFDKGLIERLEGVLKEDFVRLPYTEGIKILEEAVAKGHKFEFPVYWGVDLASEHERYLVEDHFKRPVILTDYPKEIKAFYMKQNEDGKTVRAMDVLFPKIGEIIGGSERESDYNKLMTRIEEMHIPMKDMWWYLDTRKFGTCPHSGFGLGFERLLLFVTGMSNIRDVIPFPRTPRNADF

SEQ ID NO: 10311 - DNA, 1392 bp, Anabaena variabilis ATCC 29413
  CDS (1)..(1392): transl_table=11
atggtaaaccgacgaattgcagaaatattgcggagtggtcaacctgatgaatctctggtggttcaaggctgggtaagaacgaagcgtgaactcaagggatttgcttttattgaagttaatgacggctcatcactaggtaatttgcaagttgtcatcaatcaggatttgccagactacgcagtaattgtcaaacaactaaatacaggtgcgtcagttgaagttaatggcgtattggtggcttcccaaggaaaaggacagcgtattgaattaaaagccgaagcagtgaaagtctacggtgaagctgaccccgaaacttatccattgcaaaagaaacgccactcttttgaatttttacgcacaattggacatttgcgatcgcgtactaattccttcggtgcagtcttccgtgtccgtaatgcttgttccgccgccattcaccaattcttccaagaaaggggctttttgtgggtacacacccccattatcacagccagcgattgtgaaggcgcaggggagttatttagcgtcaccagcctggatttaaagcagattccccgcacagaaaaccaaggaattgattacagccaagacttttttgctaaacccacttacttaacagtgagtggacaactggaagccgaagttatggcgatggcttttagcaacgtctacaccttcggccctaccttccgtgcagaaaactccaacacttcccgccacctagcagaattttggatggttgagccagaaatggcattttgcgacttagaaggcgatatggatttagctgaggcttttctcaaacacatttttaatcatgtgttggaaaaatgcccagaagacatggaatttttcaatcaacgcattgataatactgtcttagcaacagccgaaaatattattaataatcaatttgagcgtttaacttacaccgatgccatcaaacttttagaaaaagctgatgttaaatttgaatatcctgtaagttggggcttagatttacaatcagaacacgaacgttacctagcagaacaactgttcaaaaagccagtcatcgttacagattatcccgcacagattaaagccttttatatgcggttgagcgacgatgaaaaaacagtccgcgcgatggatgtccttgcaccaaaaattggcgaaatcatcggtggttcccaaagagaagaacgtttagatgtattggaacgccgaatattagcgcaagggatgcagccagaagatttatggtggtatctcgacttacgtcgttatggtactgttcctcacgctggtttcggcttgggttttgaacgactcgtgcaatttatcaccggaatgggcaatattcgggatgtgattcccttcccccggacaccacaaaacgctgagttttag

SEQ ID NO: 10312 - protein, 463 aa, Anabaena variabilis ATCC 29413
MVNRRIAEILRSGQPDESLVVQGWVRTKRELKGFAFIEVNDGSSLGNLQVVINQDLPDYAVIVKQLNTGASVEVNGVLVASQGKGQRIELKAEAVKVYGEADPETYPLQKKRHSFEFLRTIGHLRSRTNSFGAVFRVRNACSAAIHQFFQERGFLWVHTPIITASDCEGAGELFSVTSLDLKQIPRTENQGIDYSQDFFAKPTYLTVSGQLEAEVMAMAFSNVYTFGPTFRAENSNTSRHLAEFWMVEPEMAFCDLEGDMDLAEAFLKHIFNHVLEKCPEDMEFFNQRIDNTVLATAENIINNQFERLTYTDAIKLLEKADVKFEYPVSWGLDLQSEHERYLAEQLFKKPVIVTDYPAQIKAFYMRLSDDEKTVRAMDVLAPKIGEIIGGSQREERLDVLERRILAQGMQPEDLWWYLDLRRYGTVPHAGFGLGFERLVQFITGMGNIRDVIPFPRTPQNAEF

SEQ ID NO: 10313 - DNA, 1398 bp, Pseudoalteromonas haloplanktis TAC125
  CDS (1)..(1398): transl_table=11
atgagccatttagcgatttcagagctattaaaaggcaaggtatcggtagacagccaagttacagtaaaaggctggatccgtactcgccgcgattcaaaagcaggaatttcatttttagccgttcatgacggttcgtgttttgatcctattcaagcggtagttcctaattcacttaataattatgatgaagtcactagcctaacagccggttgttctgtgtcggttaccggtgttttagtgcaatctgctggccaaggtcagtcttatgagattcaagctaactcggttactgtattaggttgggtagaaaacccagattcgtaccctatggctgcaaagcgtcatagtattgagtacttacgtgagcacgctcaccttcgccctcgtactaacatgattggtgccgtaacccgtgtacgtaactgtttagctcaagctattcatcgcttttaccatgagcaaggttttttatggataagcacccctattatcacagcaagtgactgtgaaggcgcaggtgaaatgttccgcgtatcaacgcttgatatgcaaaacttaccgcttaccgataaaggcgaagtagattacagcgaagatttttttggtaaagaagcatttcttactgtatctggccagttaaatggtgaaacttacgcgtcggcaatgtcaaaaatttatacgtttggcccaaccttccgcgcagaaaactcaaatacttcgcgccaccttgccgagttttggatggtagaacctgaattagcatttgctgatttagaagatattgcaaaactagcagagcagatgttgaagtatgtgtttaaagccgtactagaagagcgccgcgatgacatggaattttttgcacaacgtgtagaaaaaacagccattactcgccttgaagaatttgtagaaaaagactttgcacaagttgattacaccgaagcggtagaaatattaaaagcctgtggtaaaaagtttgagtacgctgttgaatggggcgtagatttacagtctgaacacgagcgttacttagcagaagaacactttaaagcaccggttgttattaaaaactacccacgcgatattaaagcgttttacatgcgccaaaacgaagacggtaaaaccgttgccgcaatggacatagtagcgccaggtattggtgagatcattggtggctcacaacgtgaagagcgcctagatattctcgatgctcgtttagacgaaatgggcttaaacaaagacgactacagctggtaccgcgatttacgtaaatacggtactgtgccgcactcaggctttggcttaggttttgagcgtttagttgcttatgttaccggtatgggcaacgtacgtgacgttattgccttccctcgtactaaaggcagcgcaacgtactaa

SEQ ID NO: 10314 - protein, 465 aa, Pseudoalteromonas haloplanktis TAC125
MSHLAISELLKGKVSVDSQVTVKGWIRTRRDSKAGISFLAVHDGSCFDPIQAVVPNSLNNYDEVTSLTAGCSVSVTGVLVQSAGQGQSYEIQANSVTVLGWVENPDSYPMAAKRHSIEYLREHAHLRPRTNMIGAVTRVRNCLAQAIHRFYHEQGFLWISTPIITASDCEGAGEMFRVSTLDMQNLPLTDKGEVDYSEDFFGKEAFLTVSGQLNGETYASAMSKIYTFGPTFRAENSNTSRHLAEFWMVEPELAFADLEDIAKLAEQMLKYVFKAVLEERRDDMEFFAQRVEKTAITRLEEFVEKDFAQVDYTEAVEILKACGKKFEYAVEWGVDLQSEHERYLAEEHFKAPVVIKNYPRDIKAFYMRQNEDGKTVAAMDIVAPGIGEIIGGSQREERLDILDARLDEMGLNKDDYSWYRDLRKYGTVPHSGFGLGFERLVAYVTGMGNVRDVIAFPRTKGSATY

SEQ ID NO: 10315 - DNA, 1407 bp, Pelobacter carbinolicus DSM 2380
  CDS (1)..(1407): transl_table=11
atggcgacaaatcatggcctgcgttcgcgcaggattcgtattaaagagatactgccctcatcgcagccgatgtcagcgttgtgtgtatgtggctgggtgcgtagcgtacgacgcggtaaggaggtcaccttcatcgctctgaacgacggttcgtgtatggccaatttgcaggtggtgctgacccccgaggtggacggtttcgcaacggtatcacgttgcggaaccggagccgccatgcaggtggagggcgaactgatagcttcgcccgccgccgggcaggagtgggaactgcacgcccgacaggtgaaaatcctcggggataccgacagtgactatccccttcagaaaaagcgccatagtttcgagttcctgcgttccatcgcgcatctgcgtccgcgcgccaacacctttggtgcggttttccgcatgcgcagcgccttgtcgttcgccatccaccgctttttccgtgaacgcggtttcctctatgtgcatacccccatcattaccgccaacgactgcgagggggcgggggaaatgtttcgcgtcagtaccctgccggcggatcggccgcccctgacggaggggaaaatcgattggcggcaggactttttcggcgaaaagaccggtttaaccgtcagcggtcagctgcagggggaattgttcgcgacggccttttccgatatctacacgtttgggcctacttttcgtgccgagaattcccataccagtcgccatgccgccgaattctggatgatcgaaccggagatcgcttttgcggatctggccgacgattgcgccctggctgaggagtttctgcgttatctggtgcgctttgccctggacgaatgcggcgaagatctggcctttttcaatcaacggatcgagcccggtctgatcgacaaactcgaaacactggcccgcgccgatttttccgtcatgacctacagcgaggcgatcaggcgcctgcagcaggcgcccgtcgatttcgagtatccggtggcctggggcgcggatctgcagtccgagcacgaacgctacctgaccgagcaggtggtcggaggacctttgttcgtgaccgactatccggccgatatcaaggcgttttacatgcgtctgaacgatgacggtcgtaccgtggcggccatggatctgctggtgccgcgggtcggagagattatcggcggcagccagcgcgaagagcgtctcgacgtgttgatgggcaaaatgaactccgtcggcatcgaggcgcagcatctcgactggtatctcgacacccgccgctggggcagttgcccccatgccggtttcggacttggtttcgagcgtctgttgatgtatgtcaccggtatggaaaatattcgcgatgtgattccgtttccgcggacaccgggacatgctcgtttttga

SEQ ID NO: 10316 - protein, 468 aa, Pelobacter carbinolicus DSM 2380
MATNHGLRSRRIRIKEILPSSQPMSALCVCGWVRSVRRGKEVTFIALNDGSCMANLQVVLTPEVDGFATVSRCGTGAAMQVEGELIASPAAGQEWELHARQVKILGDTDSDYPLQKKRHSFEFLRSIAHLRPRANTFGAVFRMRSALSFAIHRFFRERGFLYVHTPIITANDCEGAGEMFRVSTLPADRPPLTEGKIDWRQDFFGEKTGLTVSGQLQGELFATAFSDIYTFGPTFRAENSHTSRHAAEFWMIEPEIAFADLADDCALAEEFLRYLVRFALDECGEDLAFFNQRIEPGLIDKLETLARADFSVMTYSEAIRRLQQAPVDFEYPVAWGADLQSEHERYLTEQVVGGPLFVTDYPADIKAFYMRLNDDGRTVAAMDLLVPRVGEIIGGSQREERLDVLMGKMNSVGIEAQHLDWYLDTRRWGSCPHAGFGLGFERLLMYVTGMENIRDVIPFPRTPGHARF

SEQ ID NO: 10317 - DNA, 1386 bp, Geobacter metallireducens GS-15
  CDS (1)..(1386): transl_table=11
atgagcgcacgcatacgtatccggaacgccctggccggcgaagggctggggaatgagataatggtaaaagggtgggtgaggaccatccggacagggaaagaggtcgccttcctggccctgaacgacggctcctgcttcgccaatctccaggtggtggccgagccagggcttgccacttttgccgatgtctgcgccattggcaccggcgccgccgtggcggtccgggggcgtctcgtggattcgccggccagcggccagtgctatgagctccacgccgatgaggtggcggtgatcggcctcgccgacgagagctatcccctccagaaaaagcgtcactccttcgagtacctgcggagtatcgcccacctccgcccccgttccaacaccttcggggcggttttccgggtccgctcctccgtggcccaggcggtgcaccgcttctttgccgagcggggattcctctatgtccacacccccatcatcaccaccagtgactgcgagggggcaggggagatgtttcgggtcaccacccttgatccggccgctccaccgcttctggagggggaggttgacttcagccgcgacttcttcgccgcccaggcggggctcaccgtgagcggccagcttgagggggagcttttcgcccaggccttcagcgatatttatacctttggccccaccttccgggccgagaactccaacaccccccgccacgccgccgagttctggatgatcgagcccgagatggcctttgccgatctcatggctgacgcagccctggccgaggagttcttccgctacctctgccgccatgtccttgacgcctgcggggaggatatggcgttcttcaacgaccacatcgacaagggactcattgcccgggtggagcaggtggcgaactcctccttcgccatcatggagtacggcgaggccatcgagcgcctcaagaaggcgaccgtgacattcgagtaccccgtggagtgggggctcgacctccagaccgagcatgagcgctatctcaccgagcaggtggtggggggaccggtctttgttatcaactaccccaagcacatcaaggcgttctacatgcgggtgaacgacgacaacaagaccgtggccgccatggatcttctcgtccccaaggtgggtgagatcatcggcgggagccagcgggaggaacggctccctgtcctcgaagggcgcatggccgaggtgggggtcaatcccgaggggctctggtggtatctcgactcccgccgctggggctccaccccccacgccggtttcggtctcggcttcgagcggctcatcatgtacctcaccggcatggagaacatccgcgacgtgattccgttcccccgcacccctcgccacgcggaattttga

SEQ ID NO: 10318 - protein, 461 aa, Geobacter metallireducens GS-15
MSARIRIRNALAGEGLGNEIMVKGWVRTIRTGKEVAFLALNDGSCFANLQVVAEPGLATFADVCAIGTGAAVAVRGRLVDSPASGQCYELHADEVAVIGLADESYPLQKKRHSFEYLRSIAHLRPRSNTFGAVFRVRSSVAQAVHRFFAERGFLYVHTPIITTSDCEGAGEMFRVTTLDPAAPPLLEGEVDFSRDFFAAQAGLTVSGQLEGELFAQAFSDIYTFGPTFRAENSNTPRHAAEFWMIEPEMAFADLMADAALAEEFFRYLCRHVLDACGEDMAFFNDHIDKGLIARVEQVANSSFAIMEYGEAIERLKKATVTFEYPVEWGLDLQTEHERYLTEQVVGGPVFVINYPKHIKAFYMRVNDDNKTVAAMDLLVPKVGEIIGGSQREERLPVLEGRMAEVGVNPEGLWWYLDSRRWGSTPHAGFGLGFERLIMYLTGMENIRDVIPFPRTPRHAEF

SEQ ID NO: 10319 - DNA, 1386 bp, Desulfovibrio desulfuricans subsp. desulfuricans str. G20
  CDS (1)..(1386): transl_table=11
atgaaacgtacgcagatactcgacgccctcaacgcatccgccccctgcgacgatatccgcatctgcggatgggtgcgcacccgccgtgatgccaaaggcttttcctttctcgaactcaacgacgggtcgtgcctgaccaatatacaggttatcgtcgatgaagagaccgatgcctaccgttcggtgggagaagccaccacgggcgcctcggtggacatccgcgggcagctggtggaatcgccgggcaaagggcagaaatgggaagtgcgcgccgcaaccatgacgctgctgggcaaagccgaccccgaaacttttccgctgcagaaaaaacgccattccgacgaatacctgcgcaccatcgcgcatctgcgtccgcgcaccaacaaatttggcgccgcgttccgcatccgcgcggaagcaagctacgcggtgcactcatttttccgcgaaaacggctttttcaacgtgcacacgcccattctcaccggttcggactgtgaaggcgccggagaaatgttccgggtgaccaccctgcccgcggtgggcgcatcggcacccgcagaaggttcggtgtttgacggggactttttcggcaaggaatgcagcctgaccgtttccggtcagctggaagctgaaataatggcacagagtctcggcaaggtttacaccttcggccccaccttccgcgccgaaaattccaacactccgcgccatgccgccgaattctggatggtcgagccggaaatggcctttgccgaccttgaagacgacatgcagctggcagaagacatggtcaagtatgtaatcagccatgtgatgaagcattgcgcagctgacctggacctgttctgcaagtttgtggataaagagctttccgcgcggcttgaaaacattctcgcccacccctttgcccgcgtcagctacacggaagccatcgaaatcctgaaagccagcggcagaaaatttgaataccccgccgagtggggcgcagatctgcagaccgaacatgagcgctatctggccgaagaacactttaaaaagcctgtggctgtctatgactaccccaaagaaatcaaggctttttacatgcgtctgaatgatgacggcaaaaccgtggccgccatggacctgctggtgccgcgcatcggcgaactggttggcggttcgcagcgcgaagagcggctggacgtgctggaagcccgcataaaagaactgggccagaatcctgatgattactggtggtacctggaactgcgcaaattcggcaccgctccccacgccggcttcggcatggggtttgagcgtctgctcatgctgcttaccggcatcggcaacatccgcgacgtcattccctttccccgtacgccgcggcatctggaattttag

SEQ ID NO: 10320 - protein, 461 aa, Desulfovibrio desulfuricans subsp. desulfuricans str. G20
MKRTQILDALNASAPCDDIRICGWVRTRRDAKGFSFLELNDGSCLTNIQVIVDEETDAYRSVGEATTGASVDIRGQLVESPGKGQKWEVRAATMTLLGKADPETFPLQKKRHSDEYLRTIAHLRPRTNKFGAAFRIRAEASYAVHSFFRENGFFNVHTPILTGSDCEGAGEMFRVTTLPAVGASAPAEGSVFDGDFFGKECSLTVSGQLEAEIMAQSLGKVYTFGPTFRAENSNTPRHAAEFWMVEPEMAFADLEDDMQLAEDMVKYVISHVMKHCAADLDLFCKFVDKELSARLENILAHPFARVSYTEAIEILKASGRKFEYPAEWGADLQTEHERYLAEEHFKKPVAVYDYPKEIKAFYMRLNDDGKTVAAMDLLVPRIGELVGGSQREERLDVLEARIKELGQNPDDYWWYLELRKFGTAPHAGFGMGFERLLMLLTGIGNIRDVIPFPRTPRHLEF

SEQ ID NO: 10321 - DNA, 1389 bp, Synechococcus elongatus PCC 7942
  CDS (1)..(1389): transl_table=11
atggcttcagcgcgaattgtggatctccttagccagggtcaacctggccaaaccgttgtggtgcgggggtggattcgcactgctcggcaactgaaggagttcaccttcgtcgaagtcaacgacgggtcttgcctcaagggcatccaggtcgttctggggcaggagctggctgactatgagatgcttgccaagcagttagatacgggtgctgcgatcgctgttgaaggacagttggtggcgtcgcccgctaaaggtcagcgcgttgaactgcaggcagcttcggttgaaattgttggtggtgctgatcctgagcaatatccgctccagaaaaaacgccattcgttcgaatttctgcgcacgatcgctcacctgcggccacgaaccaattccctcggagcggtgatgcgggttcgcaatgctgcggcaactgcgattcatgacttcttccaagagcgcggcttcctctgggtgcatacgccgattatcacggcgagtgactgcgaaggcgcaggtgaactgttcacggtcaccaatctcgatctcgacaagctagggcagtcacagcaagcaccagattttgaacaggacttttttggcaaacgtgcctatttaaccgtcagcggccagctcgaagccgagattatggcgctggcgttcagcaacgtctacacctttggcccgacttttcgcgctgagaactccaatacctcccgtcacttggcagagttttggatggtcgagccggagatggctttttgcgatcttggcggcgacatggacttggccgaagccttcttgaaatttgtcttccagcgagtcagcgatcgctgcagcgaagatctagagttcttcaatcagcgcattgattcggaggtgctaaaccgcgctgagacgatcctcaataacgactttgagcgcgttagctataccgatgcgatcgctctcctcgaaaaagctgatcgcagcttcgactatcccgtggcttggggcattgacctgcaatcagaacatgagcgctacttggctgaggagtatttccgcaagccgttgatcgtctatgattacccgcgcgaaatcaaagccttttatatgcggctcaacgacgatcaaaaaacagtggctgcaatggacgtgctggcacctggcatcggtgaaatcatcggcggttctcagcgggaagaacggctcgatgtcctaaagcagcgtcttgctgaagcgaatctgcccgaggagaactactggtggtacttggatctgcggcgctacggcagtgttccccatgccggatttggcctaggctttgagcgactggtgcaattcatcacaggcatgggcaacatccgcgatgtgattccctttccccgcacgccccaaaacgccgagttttag

SEQ ID NO: 10322 - protein, 462 aa, Synechococcus elongatus PCC 7942
MASARIVDLLSQGQPGQTVVVRGWIRTARQLKEFTFVEVNDGSCLKGIQVVLGQELADYEMLAKQLDTGAAIAVEGQLVASPAKGQRVELQAASVEIVGGADPEQYPLQKKRHSFEFLRTIAHLRPRTNSLGAVMRVRNAAATAIHDFFQERGFLWVHTPIITASDCEGAGELFTVTNLDLDKLGQSQQAPDFEQDFFGKRAYLTVSGQLEAEIMALAFSNVYTFGPTFRAENSNTSRHLAEFWMVEPEMAFCDLGGDMDLAEAFLKFVFQRVSDRCSEDLEFFNQRIDSEVLNRAETILNNDFERVSYTDAIALLEKADRSFDYPVAWGIDLQSEHERYLAEEYFRKPLIVYDYPREIKAFYMRLNDDQKTVAAMDVLAPGIGEIIGGSQREERLDVLKQRLAEANLPEENYWWYLDLRRYGSVPHAGFGLGFERLVQFITGMGNIRDVIPFPRTPQNAEF

SEQ ID NO: 10323 - DNA, 1401 bp, Shigella dysenteriae Sd197
  CDS (1)..(1401): transl_table=11
atgagcgttgtgcctgtagccgacgtactccagggccgcgtagccgttgacagcgaagtcaccgtacgcggatgggtacgtacccgccgagattcaaaagctggcatctccttcctcgccgtttatgacggttcctgctttgatcctgtacaggctgtcatcaataattctctgcccaattacaatgaagacgtcctgcgtctgaccaccggctgctcggtcattgtgacgggtaaagtagtggcgtcgccgggccaggggcaacaatttgaaattcaggccagcaaggttgaagttgctggttgggttgaagatccagacacttacccgatggcggcaaaacgccacagcattgagtatctgcgtgaagtcgctcacctgcgtccgcgcacaaacctgattggtgccgtcgcgcgcgttcgtcatacgctggcgcaggcgctgcatcgcttctttaacgagcagggattcttctgggtttcaacgccactgattaccgcatctgataccgaaggtgcaggcgaaatgttccgcgtttctacgctggatctggaaaacctgccgcgtaacgatcagggcaaagtggatttcgacaaagacttctttggtaaagagtctttcctgaccgtatctggccagttgaacggcgaaacctacgcttgcgcattatccaaaatttataccttcggcccgactttccgtgctgaaaactccaacaccagccgtcacctggcggaattctggatgctggagccggaagtggcgtttgctaacctgaacgatatcgcaggtctggctgaagccatgctgaaatatgtcttcaaagcggttctcgaagaacgcgctgacgacatgaaattcttcgctgaacgcgtagataaagatgccgtttcacgtctggaacgcttcattgaagccgattttgcgcaggtggattacaccgacgcagtgaccattctcgaaaactgcggcaggaagtttgaaaacccggtttactggggcgttgatctctcttctgagcatgagcgttatctggcggaagaacactttaaagcaccggtagtggttaaaaactatccgaaagatattaaagcgttctatatgcgccttaacgaagacggtaaaaccgttgcggctatggacgttctggctccgggcatcggtgagatcattggtggctcccagcgtgaagaacgtctggacgtgctggacgtgcgtatgctggaaatgggcctgaataaagaagattactggtggtatcgcgatctgcgtcgctacggtactgttccgcattcaggtttcggtcttggttttgaacgcctgattgcttacgtaactggtgtgcaaaacgtgcgtgatgtgattccgttcccacgtactccgcgtaacgccagcttctaa

SEQ ID NO: 10324 - protein, 466 aa, Shigella dysenteriae Sd197
MSVVPVADVLQGRVAVDSEVTVRGWVRTRRDSKAGISFLAVYDGSCFDPVQAVINNSLPNYNEDVLRLTTGCSVIVTGKVVASPGQGQQFEIQASKVEVAGWVEDPDTYPMAAKRHSIEYLREVAHLRPRTNLIGAVARVRHTLAQALHRFFNEQGFFWVSTPLITASDTEGAGEMFRVSTLDLENLPRNDQGKVDFDKDFFGKESFLTVSGQLNGETYACALSKIYTFGPTFRAENSNTSRHLAEFWMLEPEVAFANLNDIAGLAEAMLKYVFKAVLEERADDMKFFAERVDKDAVSRLERFIEADFAQVDYTDAVTILENCGRKFENPVYWGVDLSSEHERYLAEEHFKAPVVVKNYPKDIKAFYMRLNEDGKTVAAMDVLAPGIGEIIGGSQREERLDVLDVRMLEMGLNKEDYWWYRDLRRYGTVPHSGFGLGFERLIAYVTGVQNVRDVIPFPRTPRNASF

SEQ ID NO: 10325 - DNA, 1365 bp, Mycoplasma capricolum subsp. capricolum ATCC 27343
  CDS (1)..(1365): transl_table=4
atggaaatcaaacaagtatttgaacaaaactcagaattaattgaccaagaaattgaattaatagctagagttagatctaatagacaaggtaaattcgtttcatttatgatcttaaatgatggaactacttttactgatttacaagtagtttataaaactaaaaccaaaggatatgaacaagcacttcaagcaagagttagttcaattgttaaagtcattggaagagttgttttaactccagaaaaacaacaaaaatttgaagtacaagctgatgctatcgaacttattgatcaagcaattgaagattatccactacaaaaaaaagaacatacaactgagtatttaagagaaatagcgcacttaagagcaaaaacaaaaacttttaatgctatttttaaaataagatctgctgctgcttatgctattcataagttctttaatgacagaggttttgtttacatacattctccaattattacttcaaatgatgctgaaggagcaggtgaagcttttttagtaacaactagagaagatgcagattatgaaaaagacttttttgctaaaaaggcaagcctaacagtttcaggtcaattacacgcagaagcatttgctcaagcttttaaaaaagtttatacatttggtcctacttttagagctgaaaattcaaatactgcaaaacatgctgctgagttttgaatgattgaaccagaagttgcttttgctgatttaaaagataatatacaactaattcaagatatggttaaatatatcattaattacatttttaaacacaatagaagagaactagaattttgtaatgaacacttagaagatggattaattgataaattaaacagtgttagaaattcagaatttaaagttacaacttatactgaagcaattgaaattttaaaacaagcggttgctaatggtcacaaattcgaagtttcagatattgaatttggattagatttaggaactgagcatgaaagatatatttgtgaacaagtaaataaagctccaacttttgtaactaattatccaaaagaaattaaagcattttatatgaaacaaaatgaggataataaaacagttgctgctgttgatttattagttcctggaattggagaattagttggtggaagtcaacgtgaagataattatgaaaaactaattaaaagatgtaaagaagtaaatatagatattgatcaattagagtgatacaacaacttaagattgtatggatactataaatcagctggatttggtttaggatttgaaagattgattatgtatattactggagcatcaaatattagagatgttattccattcccaagaactccaaaaaacttattattctaa

SEQ ID NO: 10326 - protein, 454 aa, Mycoplasma capricolum subsp. capricolum ATCC 27343
MEIKQVFEQNSELIDQEIELIARVRSNRQGKFVSFMILNDGTTFTDLQVVYKTKTKGYEQALQARVSSIVKVIGRVVLTPEKQQKFEVQADAIELIDQAIEDYPLQKKEHTTEYLREIAHLRAKTKTFNAIFKIRSAAAYAIHKFFNDRGFVYIHSPIITSNDAEGAGEAFLVTTREDADYEKDFFAKKASLTVSGQLHAEAFAQAFKKVYTFGPTFRAENSNTAKHAAEFWMIEPEVAFADLKDNIQLIQDMVKYIINYIFKHNRRELEFCNEHLEDGLIDKLNSVRNSEFKVTTYTEAIEILKQAVANGHKFEVSDIEFGLDLGTEHERYICEQVNKAPTFVTNYPKEIKAFYMKQNEDNKTVAAVDLLVPGIGELVGGSQREDNYEKLIKRCKEVNIDIDQLEWYNNLRLYGYYKSAGFGLGFERLIMYITGASNIRDVIPFPRTPKNLLF

SEQ ID NO: 10327 - DNA, 1398 bp, Hahella chejuensis KCTC 2396
  CDS (1)..(1398): transl_table=11
atgactcattacgccatttcagacttactcaagaacaaagcggagatcggcagcgaagtgaccgtcaaaggctgggtaaggtcaagaagggactccaaggcgggcgtctcttttatccacgttcatgacggctcctgctttgacgcgattcaggcggttgtcgcgaaagagctgcccaattacgacgctgacgttctgcgtttgacgaccggctgctccctaatcgtcaccggcaccctggtagagtcgcccgggcaaggacaatcctgtgagattcaggcgacttcagtggaattggtcggcctggtggatgatccggaaacttatccggtcgccaagaaaagacatacctttgaattcctgcgcggcgtcgctcacttgcgtccccgcactaacgcgttcggcgccgtaacacgtgtgcgtacgacgctgtctcacgctgtgcaccatttcttctatgagcaaggctttcaatggatcaatacgccgatcctgaccgccagcgactgtgaaggcgccggcgagctgtttcgcgtcagcacgctggacatggccaacctgcccaagacggacagcggcaagattgactacagcaaagacttcttcggtaaagagacgttcctgaccgtgtctggtcagttgaacgtagaagcctactgtctggcgatgtccaaggtgtacaccttcgggcctacgttccgtgcggaaaactccaacaccagccgtcacttggcggagttctggatgatcgagccggagatcgccttcgccgacttgaatgatgatgccgacctggcggagcgcttcctcaagcacatgttcaaggtggtgctggacgagcgcagcgacgacatggcgttcttcgccgaacgcatcaatcctgacgtggtttcgcgtctggagaatatggtcgacaaggaatttgtgcgtatcgactactctgaggccatcaagattctgcagaactgcggcaagaaattcgaatacccggtgcagtgggggctggatctgcaatccgagcatgaacgctatctggcggaaacccatgtgggcgcgccagtgatcgtgatgaactatcctaaggaaatcaaagcgttctacatgcgcctgaacgacgatgataagaccgttgccgccatggatgttctggcgccgggtatcggtgaaatcatcggcggcagccagcgcgaagaccgtctggatgtcttggacgcgcgcattggcgatatgcatcacaaagaggaactgtggtggtatcgcgatctgcgtcgctacggcagcgtaccccacgccggttttggtctgggcttcgagcgcctgatcgcctacgtgaccggcatggaaaacgtgcgcgatgtcatcccgttcccaagaacgccggacaacgcccagttctag

SEQ ID NO: 10328 - protein, 465 aa, Hahella chejuensis KCTC 2396
MTHYAISDLLKNKAEIGSEVTVKGWVRSRRDSKAGVSFIHVHDGSCFDAIQAVVAKELPNYDADVLRLTTGCSLIVTGTLVESPGQGQSCEIQATSVELVGLVDDPETYPVAKKRHTFEFLRGVAHLRPRTNAFGAVTRVRTTLSHAVHHFFYEQGFQWINTPILTASDCEGAGELFRVSTLDMANLPKTDSGKIDYSKDFFGKETFLTVSGQLNVEAYCLAMSKVYTFGPTFRAENSNTSRHLAEFWMIEPEIAFADLNDDADLAERFLKHMFKVVLDERSDDMAFFAERINPDVVSRLENMVDKEFVRIDYSEAIKILQNCGKKFEYPVQWGLDLQSEHERYLAETHVGAPVIVMNYPKEIKAFYMRLNDDDKTVAAMDVLAPGIGEIIGGSQREDRLDVLDARIGDMHHKEELWWYRDLRRYGSVPHAGFGLGFERLIAYVTGMENVRDVIPFPRTPDNAQF

SEQ ID NO: 10329 - DNA, 1512 bp, Aster yellows witches'-broom phytoplasma AYWB
  CDS (1)..(1512): transl_table=11
atgaaaatttctatcaaagatatttttcaaaaaccagagttattttatcaaaaaaaaatattattaaatggttgggttagaaattgtcgttatcaaaaaaaattaatttttatcgatttaaatgacggtacttttttggaaaatttacaaattgtttgtaaagaaatcaaaaacatcgaaactgccgacattaacgaatttcaagaaaatcaaaaattcaacaacaacaacaaatcttcaaataacattaatttagaaaaattaaaagaaattttgcaaattggggcttctttgcaagtagaaggtattctaaaagcaaccaataatctcaaaactccttttgaaattagtgcccaaaatatttctcttttaggcacaagtgatttttcttatccacttcaacccaaaaaacattcaaaggtttttttgagacaaatatctcatctaagagtgcgaactaaactttttggagcagtttttcgcattagaaatacagctttttttgcccttcacagtttttttcaaaaaaaaggcttttttcatatcaacactcccattatcactcctaatgatggagaaggcgtgggtgaattatttcaaattacaacccttaatttagaagttttgccacaaacaaaaaacattccaaatgctttcaaacctgtcaacgaaaataccagtaaaaaaggaattgattataaaaaagatttttttggcaaaaaagtttttttaacagtaacaggtcaactagaagcagaagcgatggctttgggtttgaataaagtctacacttttggtcctacttttagatctgaaaaatcaaatactacaagacatgccgctgaattttggatgttagaacctgaaatggctttttgcgatttatctcaaaatttaaaagtcgcccaagaaatgttacaattcgttatttctaaatgtttagaacaaaattatcaagatatagaatttttggacaagacagaaaaaaacggtttaattgaagaattacaaaacatcgctgaggaaaaagaatttttgacagtaaaatacgaacaagctttagaaattttgcaaaaaagtaacaccaaatttgaaaatccccttttttatggagtcgatttggcaaccgaacatgaaaaatacttaaccgaaaaacactttaaaaaacctgtttttattgttgattggcccaaagaaattaaagctttttacatgaaaaataatcccgatcaaaaaacagtagccgcaatggatcttttgtttccacgtgtaggagaattaattggtggatcacaaagagaagaaaatttatcagttttaattgaaaaaatgaaccaaatgaaaatttctcaaaaagatttggaatggtatttagatttgcgccgttttggtggatgcattcattcaggttttggcttaggatttgaaagacttctaatttttttaacaggattagacaatattcgtgatgtaattgcttttccaagaacttatcataatttggttttttaa

SEQ ID NO: 10330 - protein, 503 aa, Aster yellows witches'-broom phytoplasma AYWB
MKISIKDIFQKPELFYQKKILLNGWVRNCRYQKKLIFIDLNDGTFLENLQIVCKEIKNIETADINEFQENQKFNNNNKSSNNINLEKLKEILQIGASLQVEGILKATNNLKTPFEISAQNISLLGTSDFSYPLQPKKHSKVFLRQISHLRVRTKLFGAVFRIRNTAFFALHSFFQKKGFFHINTPIITPNDGEGVGELFQITTLNLEVLPQTKNIPNAFKPVNENTSKKGIDYKKDFFGKKVFLTVTGQLEAEAMALGLNKVYTFGPTFRSEKSNTTRHAAEFWMLEPEMAFCDLSQNLKVAQEMLQFVISKCLEQNYQDIEFLDKTEKNGLIEELQNIAEEKEFLTVKYEQALEILQKSNTKFENPLFYGVDLATEHEKYLTEKHFKKPVFIVDWPKEIKAFYMKNNPDQKTVAAMDLLFPRVGELIGGSQREENLSVLIEKMNQMKISQKDLEWYLDLRRFGGCIHSGFGLGFERLLIFLTGLDNIRDVIAFPRTYHNLVF

SEQ ID NO: 10331 - DNA, 1404 bp, Baumannia cicadellinicola str. Hc (Homalodisca coagulata)
  CDS (1)..(1404): transl_table=11
atgatcatactacccatagcaaaaatattacaaggaattattttagcagctgatcatgaagtcattgtacaaggttgggtgcgtactcgtagggattctaaagcaggaatttcatttctttctatttacgatggatcatgtttagattcattacaagtaataattaatcatgatcttccaaattataaaagtgatgttttgcatttaactacaggctgctcagtagtaataactggaagtatcgttacatcaattggtgttggtcagcactttgagatacaggctaaaaatattaaagtactagggtgggttaaaaatccagaaacatatcctataacagctaaaaagcatagtcttgaatttttaagagaagtagcacacttacgcccacgtactaatatcattggcgcagttactagagtacgacatactttagcacaggctattcatcgttttatgcatatagaaggctttttctgggtttcgactccattaattactacttttaattgtgaaggtgccggcgaaatgttccgtgtttctacactagatttagaaaatttaccttataccagtaaaggtaagataaactatgaaaaagatttttttggtaaggaagctttcctaacagtttcaggtcagttgaatggagaaagttatgcctgtgctttatctaaaatatatacttttggccctacatttcgagcagaaaactcgaatactagtcgtcatttagcagagttttggatggttgaacctgaagttgcatttgctaatttaacagatattgctattcttgcagaaaaaatgctgaagtatattttcaatgctattttaatagaacgtgttgatgatatcaatttttttgcagaacagattaacaaaaatattattaaaagattagaacaatttattagttctaattttgctcaaatagactataccgaagcaatagatatcttacaaaattgtaagcaaaagtttgatcatactgtattttggggtatggatctgtttgctgagcatgaacgctatcttgctgataaacattttcaagctccagtcgtcgtaacgaattatccaaaggatatcaaagctttttatatgcgtattaacgatgacggtaaaactgtagcagcgatggatgtgctagctccaggcattggtgaaattataggtggttcacaacgtgaagaacgcctggctaagctagatcaacgcttagctgacagaggactaaatatcgaagattattggtggtatcgtgatttacgtagttacggaactgtgcctcattcaggttttggattaggtttagagcgattaatgatttatataacaggaatgcataatattcgtgatgttataccatttcctagaaatccgcggcaggcctcattttga

SEQ ID NO: 10332 - protein, 467 aa, Baumannia cicadellinicola str. Hc (Homalodisca coagulata)
MIILPIAKILQGIILAADHEVIVQGWVRTRRDSKAGISFLSIYDGSCLDSLQVIINHDLPNYKSDVLHLTTGCSVVITGSIVTSIGVGQHFEIQAKNIKVLGWVKNPETYPITAKKHSLEFLREVAHLRPRTNIIGAVTRVRHTLAQAIHRFMHIEGFFWVSTPLITTFNCEGAGEMFRVSTLDLENLPYTSKGKINYEKDFFGKEAFLTVSGQLNGESYACALSKIYTFGPTFRAENSNTSRHLAEFWMVEPEVAFANLTDIAILAEKMLKYIFNAILIERVDDINFFAEQINKNIIKRLEQFISSNFAQIDYTEAIDILQNCKQKFDHTVFWGMDLFAEHERYLADKHFQAPVVVTNYPKDIKAFYMRINDDGKTVAAMDVLAPGIGEIIGGSQREERLAKLDQRLADRGLNIEDYWWYRDLRSYGTVPHSGFGLGLERLMIYITGMHNIRDVIPFPRNPRQASF

SEQ ID NO: 10333 - DNA, 1368 bp, Lawsonia intracellularis PHE/MN1-00
  CDS (1)..(1368): transl_table=11
atgctacctagtactattgtagaaattctttgttcgaaaacagcacaagcagatgttcatgttggtggatggatacggacaaggcgtaatgctaaggggtttgtgtttcttgaacttaatgatggttcatgtctaaagaatatacaatgtattataaatgaaggtagtgctgcttgggatatgcttgacggtgttaatacaggagcttgtgtatctgtttatggtaagcttgtaccttctcctggcagaggtcaagactgggaaattcaagtagaaaaaatggttgtacatggtcttgctgctcctgaggtatttcctttacaaaagaaacgtcattctgatgaattcttaagaactattgcacatctacgagttcgtacaaataagtatggcgctatttttagaatccgtgctgaggctgcacaggctatccataattatttttataagaaagggttttattacatccatactccaattcttacaggctctgattgtgaaggagctggtgaaatgtttagagttactacagcacactcaagcaatgattctcaatctagtgataatttttttggtaaggaatgtagtcttacagtctcaggacaacttgaggctgaatgtttagctatgggacttggaaaagtatatacatttggtcctacttttcgtgcagaaaattctaatacacctcgacatgcagcagagttttggatggttgagcctgaaatggcatttgctgatttacaagataatatgaatctagcagaagagttaacctgtgaagttattaggaaagttcttcagtgtcatatagatgacataatgttacttgataaatatgttcaaccaggacttattaaggcgttagagaatattattgccaagccatttatacgttgttcatatcatgatgctattacaatattattatctagccataaagattttgaatttccagttacttttgggttagatcttcaatctgagcatgaaaaatatcttactgaagaatattttaaacatcctgtcattatttttgactatccaaaagaaataaaagcattttacatgcgccaaaatgatgacgaagaaactgttgcagcaatggatttacttgttcctcgtataggcgaactgattggagggagtcaacgtgaggaaagacttgataatcttttgtctcgaattagagaactaggtcaatctatagaagagtattggtggtacctggatttacgacgatttggtactgtcccacatgctggttttggtctagggtttgaaaggttagtgatgcttttaacaggtgtttctaatattcgtgatgtattaccatttcccagaacaccaggttatttagaattttaa

SEQ ID NO: 10334 - protein, 455 aa, Lawsonia intracellularis PHE/MN1-00
MLPSTIVEILCSKTAQADVHVGGWIRTRRNAKGFVFLELNDGSCLKNIQCIINEGSAAWDMLDGVNTGACVSVYGKLVPSPGRGQDWEIQVEKMVVHGLAAPEVFPLQKKRHSDEFLRTIAHLRVRTNKYGAIFRIRAEAAQAIHNYFYKKGFYYIHTPILTGSDCEGAGEMFRVTTAHSSNDSQSSDNFFGKECSLTVSGQLEAECLAMGLGKVYTFGPTFRAENSNTPRHAAEFWMVEPEMAFADLQDNMNLAEELTCEVIRKVLQCHIDDIMLLDKYVQPGLIKALENIIAKPFIRCSYHDAITILLSSHKDFEFPVTFGLDLQSEHEKYLTEEYFKHPVIIFDYPKEIKAFYMRQNDDEETVAAMDLLVPRIGELIGGSQREERLDNLLSRIRELGQSIEEYWWYLDLRRFGTVPHAGFGLGFERLVMLLTGVSNIRDVLPFPRTPGYLEF

SEQ ID NO: 10335 - DNA, 1401 bp, Myxococcus xanthus DK 1622
  CDS (1)..(1401): transl_table=11
atgcaggtcgtcagtgtgaagaaggccctcgcgggaggggtggaggaggggacgaaggtggaggtccgcggctgggtgcgcacgcgccgcgactccaaggcgggcatcagcttcgtcaacgtcagcgacgggtcgacgttcgaccccatccaggtcgtcgctccgaattcgctgcccaactacgagaaggaaatcctgcacctcaccgcgggctgctcggtcatcagccggggcacgctggtgaagtcccagggcaaggggcaggcctatgaagtccaggcggacgaagtccaggtgctgggcttcgtggacgacccggacacgtaccccatccagcccaagcagcacacgctggagttcctgcgcgacgtggcccacctgcgcgtgcgcaccaacacgttcagcgccgtcacgcgcgtgcggcaccgcgccgcccaggccgtccaccgcttcttcgacgaggagggcttcttctgggtcaacacgcccatcatcaccgcgagcgacgcggagggcgccgggcagatgttccgcgtctccacgctggacgcggtgaatccgccgcgcacgtcggacgggaagattgactggcacaaggacttcttcggcaaggaggcgtacctgaccgtctctggccagctcaacgcggaggcctacgccctggctatgtccaaggtgtacacgttcggccccacgttccgggcggagaactccaacaccacgcggcacctggccgagttctggatgatcgagccggaggttgccttcgcggacctcaacgaggacgcgaacctggccgagcgcttcctcaagcatgtcttcaaggcggtgctcaatgactgtgcgccggacctgaagttcttcgaggagcgggtgcagaaaggcgtcatcgagcgcatggagaagttcatcaactccagcttcgagcgcatcgactacaccgaggccgtcgaaatcctgaagaaggccaagaagaagttcgagttcgagcccgagtggggcaaggacctccagacggagcacgagcgctatctcaccgaggagcacgtgggccggccggtggtggtgatgaactacccggaggccatcaagtccttctacatgcgcctgaacgatgacgggaagacggtcgccgccatggacgtgctcgccccgggcattggcgaaatcatcggcggcagccagcgcgaggagcgcctggatgtgctggatcagcgcatccagaagttcggcctgaagccggagagctaccagtggtaccgcgacctgcggcgctacggctccgtgccacacgcgggcttcgggctcggcttcgagcggctcatcgtctacatgtgcggtctgcagaacatccgggacgcgattccctacccgcgcgtgccgggctccgcggcgttctaa

SEQ ID NO: 10336 - protein, 466 aa, Myxococcus xanthus DK 1622
MQVVSVKKALAGGVEEGTKVEVRGWVRTRRDSKAGISFVNVSDGSTFDPIQVVAPNSLPNYEKEILHLTAGCSVISRGTLVKSQGKGQAYEVQADEVQVLGFVDDPDTYPIQPKQHTLEFLRDVAHLRVRTNTFSAVTRVRHRAAQAVHRFFDEEGFFWVNTPIITASDAEGAGQMFRVSTLDAVNPPRTSDGKIDWHKDFFGKEAYLTVSGQLNAEAYALAMSKVYTFGPTFRAENSNTTRHLAEFWMIEPEVAFADLNEDANLAERFLKHVFKAVLNDCAPDLKFFEERVQKGVIERMEKFINSSFERIDYTEAVEILKKAKKKFEFEPEWGKDLQTEHERYLTEEHVGRPVVVMNYPEAIKSFYMRLNDDGKTVAAMDVLAPGIGEIIGGSQREERLDVLDQRIQKFGLKPESYQWYRDLRRYGSVPHAGFGLGFERLIVYMCGLQNIRDAIPYPRVPGSAAF

SEQ ID NO: 10337 - DNA, 1395 bp, Cytophaga hutchinsonii ATCC 33406
  CDS (1)..(1395): transl_table=11
gtgaaaaggataaaaattaaagaattactaagtaattcaagccagtacatagatcagcaagtggtgctaaaaggctgggttagaacgaaacgcgggaataaacacgttgcttttgttgctttaaatgatgggtcaaccatccataccatacaaatcgttcttgatgttgctaaatttaacgaagagcaattaaaagatgtaacaacgggagcatgcatcagcatatccgggaaagtggtaacttctcagggtgccgggcaatccatcgaagtgcagggggatacactggaagtaattggtgttgccgatccggaaacatatccgttgcagaaaaaaggacactccttagagtttttaagagagatcgcacatttaagaccccgtacgaacacattcagctgcgtattacgcctgcgtcatgccatggcttttgccgtgcacagcttcttcaatgaaaaaggatttgtgtatgtacacacgccaatcattaccggatcagatgcagaaggtgccggagctatgttccaggtaacaacccttgatttaaagaatccgtctaaaacaaaagaaggagaagtggatttcacaaaagatttctttggcaaggctaccaaccttaccgtttcaggtcagctggagggtgaattagctgctatggcgctaggggaggtatatacctttggtccgaccttccgggcagagaattcgaacaccacgcgccatctggcggagttctggatgattgaaccggaaatggcgttctatgaaattcaggacaacatggatcttgcagaagagtttttgaaatatctggtaaaatatgcccttgataactgcatagatgacctgaatttcctgaatgaaatgtatgacaaggaattgatcgaacgcttgaaaagcgtggttgaaacacccttcgtacgcttaaattatacggaagctgttgatattctgattgctacaaaacaaaaatttgaatataaggttgagtggggtattgatcttcaatccgagcacgaacggtatctggttgaaaaacacttcaaaaagccggttattttaacaaactatccaaaagcgatcaaagctttctacatgaaagcgaacgaagacggtaaaacagtgcgtgccatggatgttttgttcccgggcattggcgaaattatcggcggttctcagcgggaagacaatttagaaaaattacaggagcgttgcaaagaagtcggaattcatgaaaatgacatctggtggtaccttgaaacgaggaagtttggatctgctccgcatagtggttttggactaggttttgagcgtttgatgctttttgttaccggaatgggaaatatccgcgatgtaattccatttcctcgtactccacaaagtgctgaattttaa

SEQ ID NO: 10338 - protein, 464 aa, Cytophaga hutchinsonii ATCC 33406
MKRIKIKELLSNSSQYIDQQVVLKGWVRTKRGNKHVAFVALNDGSTIHTIQIVLDVAKFNEEQLKDVTTGACISISGKVVTSQGAGQSIEVQGDTLEVIGVADPETYPLQKKGHSLEFLREIAHLRPRTNTFSCVLRLRHAMAFAVHSFFNEKGFVYVHTPIITGSDAEGAGAMFQVTTLDLKNPSKTKEGEVDFTKDFFGKATNLTVSGQLEGELAAMALGEVYTFGPTFRAENSNTTRHLAEFWMIEPEMAFYEIQDNMDLAEEFLKYLVKYALDNCIDDLNFLNEMYDKELIERLKSVVETPFVRLNYTEAVDILIATKQKFEYKVEWGIDLQSEHERYLVEKHFKKPVILTNYPKAIKAFYMKANEDGKTVRAMDVLFPGIGEIIGGSQREDNLEKLQERCKEVGIHENDIWWYLETRKFGSAPHSGFGLGFERLMLFVTGMGNIRDVIPFPRTPQSAEF

SEQ ID NO: 10339 - DNA, 1389 bp, Borrelia afzelii PKo
  CDS (1)..(1389): transl_table=11
atgtttgcaagcattaaagatattttagaaaatccaattttaaacagcaatgttacaataaatggctggattagaactaaaaggagtaatggtaagattggatttatagaaattaatgatggctcaacgcttaaaggaattcaagccgtaataaatgaagaagaaaatcaatttgacgagaaagatctaaaaaacctaacaacaggagcaagcatatcgttaacgggcctattagtggaaagtcctgcaaaagggcaaaattatgaaataaaaacatgtggttttaatgtaatcggagaagcagatccaaaaacttacccattgcaaaaaaaaagacatacttttgaatttttaagagaaatcccccatttaagaatacgaactaatacatttggagctgtagccagggtaagaagtaaaatttcatacaaaattcatgaatatttccaaaaaaatggttttttttatattaatacaccaataattacatcaaatgatggggaaggtgctggagaaatgtttagggtttccacactgaaatttaataaaccaaacaatgaccttggtaatattgattttaaagatgatttttttggcaaagaagcttttctttctgtcactggtcaattgcatggagaagcatatgcaatggctttatctaaaatatatacattcggcccaacatttcgagcagaaaattctaacaccacacgccatgcttcagagttttggatgatagaaccagaaatggctttttacaagcttaacgacaatattaccctagcagaagatctcttaaaatatcttttaagttcaattttaaacgaatgctcacaagatatggattttttagaaaattacattgaaaaaggactaattaaaaaactagaaaacgtaataaattcaaattttgaggttattacctatactaaagcaattgaaattcttgaaagctcaaaaaaaaattttgaaataaaaccttactggggaatagatttgcaaacagagcacgagagatttttaacagaagagacttttaaaaaaccagtagtggtcattgattatccaaaaaatttcaaagcattttacatgaaaataaataaagacaataaaactgtcaaaggaatggatgtacttgttcccaaaattggagagattatagggggaagcgaaagagaggataacttacaaaaattagaaaatagaataaaagaattaaatttaagcattgagcatctaaactggtatcttgatctaagaagatttggttccactcctcattccggttttggacttggacttgaaagatttgtgcaatactcaacaggaatatctaatataagagattcaataccatttccaagaactcctaaaaatctttatttttaa

SEQ ID NO: 10340 - protein, 462 aa, Borrelia afzelii PKo
MFASIKDILENPILNSNVTINGWIRTKRSNGKIGFIEINDGSTLKGIQAVINEEENQFDEKDLKNLTTGASISLTGLLVESPAKGQNYEIKTCGFNVIGEADPKTYPLQKKRHTFEFLREIPHLRIRTNTFGAVARVRSKISYKIHEYFQKNGFFYINTPIITSNDGEGAGEMFRVSTLKFNKPNNDLGNIDFKDDFFGKEAFLSVTGQLHGEAYAMALSKIYTFGPTFRAENSNTTRHASEFWMIEPEMAFYKLNDNITLAEDLLKYLLSSILNECSQDMDFLENYIEKGLIKKLENVINSNFEVITYTKAIEILESSKKNFEIKPYWGIDLQTEHERFLTEETFKKPVVVIDYPKNFKAFYMKINKDNKTVKGMDVLVPKIGEIIGGSEREDNLQKLENRIKELNLSIEHLNWYLDLRRFGSTPHSGFGLGLERFVQYSTGISNIRDSIPFPRTPKNLYF

SEQ ID NO: 10341 - DNA, 1404 bp, Haemophilus somnus 129PT
  CDS (1)..(1404): transl_table=11
atgacaaaaattgcatctgtggctaatattctaaaaggaaaaatcacggtcggtgaaactgtaacggtacgtggttggattcgcactcgccgggattctaaagcaggactatctttcttagctatttacgatggttcttgctttgatcctatccaagctattgtaaataatgatattgaaaactatgaaacggaaattttacgtttaactaccggttgttctgttgttgttactggaaaaattgccgagtctcctgctgaaggacaagctgttgaattacaagccaacaaaattgaagtttccggttgggttgatgatcctgaaacttatccaatgtctgcaaaacgccatagtatcgaatatttacgtgaagtggcacacttgcgtccacgcactaatatcattggtgcagtagctcgtgttcgtcattgcttagctcaagctattcatcgttttttccatgaacaaggtttctactgggtagcaacaccattgatcacagcttctgatactgaaggtgccggtgagatgttccgtgtatcaactttggacctagaaaatctgcctcgcacagataaaggtgcggttgattttagccaagatttttttggtaaagagtcttttctaacggtatcgggtcaattaaatggtgaaagttatgcttgtgcattaagcaaaatctatacttttggtccgacattccgtgcagaaaattcaaatacaacgcgtcatttagctgaattttggatggttgaacctgagattgcttttgcaactttagctgacaatgcaaaattagcagaagatatgctgaaatatgttttccgtgcagtattaaatgaacgtgaagatgacttaaaattctttgaaaagcatgttgataaaaatgtgattactcgcttaaaagatttcatcaattcagactttgctcaaatagactatactgatgcgattgatattctattaaaatccggtaaagcgtttgaatttcctgtatcctgggggattgatttatcttctgagcatgagcgttatttagccgaagaatacttcaaatcgccggttgtagttaaaaactatcctaaagatataaaagctttctatatgcgtttgaatgatgatggtaaaacagtcgctgcaatggatgttctggcccccggaattggtgaaattatcggcggttctcaacgcgaagaacgtttagaagtgcttgacaaacgcatagcagaaatgggactaaaagctgaagattattggtggtatcgtgatttacgccgttatggaacagttccacatgcaggttttggattaggttttgagcgtttaattgtttatgttacaggcgtgcaaaatattcgtgacgtaattccattccctcgcacacctcgtaatgcaaatttctaa

SEQ ID NO: 10342 - protein, 467 aa, Haemophilus somnus 129PT
MTKIASVANILKGKITVGETVTVRGWIRTRRDSKAGLSFLAIYDGSCFDPIQAIVNNDIENYETEILRLTTGCSVVVTGKIAESPAEGQAVELQANKIEVSGWVDDPETYPMSAKRHSIEYLREVAHLRPRTNIIGAVARVRHCLAQAIHRFFHEQGFYWVATPLITASDTEGAGEMFRVSTLDLENLPRTDKGAVDFSQDFFGKESFLTVSGQLNGESYACALSKIYTFGPTFRAENSNTTRHLAEFWMVEPEIAFATLADNAKLAEDMLKYVFRAVLNEREDDLKFFEKHVDKNVITRLKDFINSDFAQIDYTDAIDILLKSGKAFEFPVSWGIDLSSEHERYLAEEYFKSPVVVKNYPKDIKAFYMRLNDDGKTVAAMDVLAPGIGEIIGGSQREERLEVLDKRIAEMGLKAEDYWWYRDLRRYGTVPHAGFGLGFERLIVYVTGVQNIRDVIPFPRTPRNANF

SEQ ID NO: 10343 - DNA, 1392 bp, Trichodesmium erythraeum IMS101
  CDS (1)..(1392): transl_table=11
atgacaaagcaacgaattgcaaaaatattaggaagcggtcaacctgatgccaaagtaacaattcaagggtgggtacgcactaagcgagaattgaaagagtttgcttttgtagaagttaatgacggttcatgtttagctaatttgcaagtagtattaaatcctgatctaccaaattatcaggaaagtttgcagcaaatgaatacaggtgcctcagtagaaatgactggtattttggtagagtccccagcaaaggggcaaagaattgaattaaaggcagaaagtattactgcttatggtgatgccgaccctgaaacatatcctttgcagaaaaaacgtcattcttttgagtttctccgcactattgcacatttgcgaggacgtactaatacttatggagcagtttttcgggtaagaaatacttgtgctaatgccattcatcaattttttcaagaacgaggttttttgtgggttcacactcctattattactgctagtgactgtgaaggtgcgggagaaatgtttactgttactaatttagatttaaagaaaattcctctcacagaaaaacaagatattgattttagtcaagacttttttggaaagtcggcttttctgacagttagtggtcagttagaagcagaaattatggcaactgctttgagtaatgtttatacgtttggtccgacttttagagcagaaaattctaatacttctcggcatttagctgagttttggatgattgaacctgagatggctttttgcgacttggaaggagatatggatttagctgaggaattcttaaaatatatttttaaatctgttttagaaggttgtccggaggatatggaatttttcaataaacggattgataaaacagtttttgaaaccgcggatacaattattaataatagttttgaacggattacttatactgaggcagtttctttattagaaaaggcggataaaaagtttgattacccggtagactggggtttggatttacagtcagaacatgaacgttatttgtgtgaggagttgtttaaaaaacctgttattgtgactgattatcctgcaaaaattaaggctttttatatgcggttaaatgatgacgctaaaacagttagagcaatggatgttttagtgccgaaagtaggagaaattattggtggttctcagagggaagaacgtttagatgttttggagaggcgcatagatgaacaggagatgaataaggaagaattatggtggtatttagatttgcggaggtatggtactgtccctcatgcggggtttggtttgggatttgaaagagtggtacagtttatgacaggaatggggaatattcgagatgtgattccttttccgagggcacctctaactgtggatttttaa

SEQ ID NO: 10344 - protein, 463 aa, Trichodesmium erythraeum IMS101
MTKQRIAKILGSGQPDAKVTIQGWVRTKRELKEFAFVEVNDGSCLANLQVVLNPDLPNYQESLQQMNTGASVEMTGILVESPAKGQRIELKAESITAYGDADPETYPLQKKRHSFEFLRTIAHLRGRTNTYGAVFRVRNTCANAIHQFFQERGFLWVHTPIITASDCEGAGEMFTVTNLDLKKIPLTEKQDIDFSQDFFGKSAFLTVSGQLEAEIMATALSNVYTFGPTFRAENSNTSRHLAEFWMIEPEMAFCDLEGDMDLAEEFLKYIFKSVLEGCPEDMEFFNKRIDKTVFETADTIINNSFERITYTEAVSLLEKADKKFDYPVDWGLDLQSEHERYLCEELFKKPVIVTDYPAKIKAFYMRLNDDAKTVRAMDVLVPKVGEIIGGSQREERLDVLERRIDEQEMNKEELWWYLDLRRYGTVPHAGFGLGFERVVQFMTGMGNIRDVIPFPRAPLTVDF

SEQ ID NO: 10345 - DNA, 1401 bp, Shewanella frigidimarina NCIMB 400
  CDS (1)..(1401): transl_table=11
atgagcattgcatctgtcgcttctgtatttaaaggtgaacacgccgttggttcgcaagtcactgtccgtggctgggtaagaactcgtcgtgattcaaaagcgggtatctctttcttggccgtgtatgacggttcatgtttcgaccctattcaaggtgtcttgcctaatagcctagccaattacaatgacgatgtattgaaattgactgctggctgctctgtcgtaatgacgggtgaagtagttgcctctccaggcgctggtcaagcatttgaattacaagtcactgaaattgtggtcacaggttttgttgacgatccagatacttacccaatgtcggccaaacgccactctattgagcatttacgtgaacttgcccatttacgcccacgtaccaacattattggtgccgtagctcgtgttcgtaactgtttatcgcaagcgattcaccgcttctatcatcaagaaggttttatctgggtatcgaccccgttaattacagcttctgactgtgaaggtgctggcgaaatgttccgtgtgtctactttagacatggaaaatctacctcgcacagctgaaggtaaagtcgattacgataaagatttcttcggtaaagaatcattcttaaccgtgtcaggtcagttaaacgctgaaacgtatgcttgtgcattatctaaagtgtatacctttggcccaacgttccgtgccgaaaactcaaacaccactcgccaccttgcagaattctggatggttgagcctgaagtggcatttgcaacgttagatgatgcggctgagttagcggaaaaaatgttgaaattcgcgtttagcgcagtgcttgaagaacgcatggatgatttaaacttctttaacgaacgtgttgataaaaccgttatcgaacgtttacaagcattcgtaagcagtgattttgctcaagtggattacacagatgcagttgaaatccttaaaaactgtggtaagaagtttgaattcgcagttgaatggggtattgatttacaatctgagcacgaacgctacttagctgaagagcattttaaagcgcctgttgttgttaagaactacccgaaagacattaaagctttctatatgcgcttaaacgatgatggcaagactgttgccgcaatggacgtgttagcaccaggtattggtgaaattatcggtggcgcacagcgtgaagagcgtttagacgtgttagatgcacgtttagctgaaatggatttaagccaagaagattactggtggtatcgtgacctacgtcgttatggcaccgtacctcattcaggttttggtttaggttttgagcgtttagtgtcgtatgtgactggcgttaacaacattcgtgatgttatcccattcccacgcgccccacgctcagccagtttctaa

SEQ ID NO: 10346 - protein, 466 aa, Shewanella frigidimarina NCIMB 400
MSIASVASVFKGEHAVGSQVTVRGWVRTRRDSKAGISFLAVYDGSCFDPIQGVLPNSLANYNDDVLKLTAGCSVVMTGEVVASPGAGQAFELQVTEIVVTGFVDDPDTYPMSAKRHSIEHLRELAHLRPRTNIIGAVARVRNCLSQAIHRFYHQEGFIWVSTPLITASDCEGAGEMFRVSTLDMENLPRTAEGKVDYDKDFFGKESFLTVSGQLNAETYACALSKVYTFGPTFRAENSNTTRHLAEFWMVEPEVAFATLDDAAELAEKMLKFAFSAVLEERMDDLNFFNERVDKTVIERLQAFVSSDFAQVDYTDAVEILKNCGKKFEFAVEWGIDLQSEHERYLAEEHFKAPVVVKNYPKDIKAFYMRLNDDGKTVAAMDVLAPGIGEIIGGAQREERLDVLDARLAEMDLSQEDYWWYRDLRRYGTVPHSGFGLGFERLVSYVTGVNNIRDVIPFPRAPRSASF

SEQ ID NO: 10347 - DNA, 1392 bp, Lactobacillus brevis ATCC 367
  CDS (1)..(1392): transl_table=11
atggtagacgttttagttaaaaatttatttagcgatcggcattttgctgaagatgaagtggtgacattacacggttgggtaaagacggtccgtggatccaagcgggttggttttatcgaattaagtgatgggtcgacgattaagcacgcacaaattgtgatgcaaagtgatctcgagaattatgcggaaatgacgaaattaccattgagttcgacgattaaagttgtggggacagtggtttatacaccggatgccaagcaaccgttggaaattcatgcacaagaagttgtattagaaggggcttcagataacgattatccactgcaaaagaaaaagcattcttacgaatacttgcggacgatggcccatttgcggccacggacgaacacattctatgcggttttccggattcgctcgttggcagcgttcgccattcatcaatatttacaagaacatgggtttacgtacgttaacacgcccattattaccagtagcgatagtgaaggtgctggtgaaatgttccgggtaacgacgttagacatgaacaacttaccgaagactgaagatggccgggtggatgatcacgaggacttctttaaaaaggaaacgaatctgacggttagtgggcaattaccagttgaagcatttgccttagctttacggaacgtgtacacgtttggcccagccttccgggcagaaaactcgcatacatctcggcatgcctctgaattttggatgattgaaccagaaatggcttttgctgacctgcaggacactatcaatgaggctgaaggcttactgaagtatgtggtccaatacctattggatcatgcgcaagacgagttggcttttctagacagtgctgttgatgatgacttgctgaaccgtttgcaccagacttgcgatgaaaagtttgcgcaaatcacttacacacaagcgatcgaagagttgaaaaaagcgccagttgattttgacgtgcccgtttcatggggacttgacttacaagcagaacatgaacgttatttgtgtgaacaagtgtataaacggccaaccttcctgacggattatcctaaggaaattaaggccttttatatgcgagacaatgaagacgggaagacggttgcggccgctgacttgttggttccccgaatcggtgaattaatcggtggcagtcaacgtgaagaacgtcaggcccaattagcccagaagattaaggactataacttgccgcccgaagagtatcaatggtacttggatctacgtaagtatggtgaaacaccacattctggctatggtattggttttgaacggttactgatgtatgtgactggaatggaaaacattcgcgatgtgattccttacccacggacaccgggtaacgctgaattctaa

SEQ ID NO: 10348 - protein, 463 aa, Lactobacillus brevis ATCC 367
MVDVLVKNLFSDRHFAEDEVVTLHGWVKTVRGSKRVGFIELSDGSTIKHAQIVMQSDLENYAEMTKLPLSSTIKVVGTVVYTPDAKQPLEIHAQEVVLEGASDNDYPLQKKKHSYEYLRTMAHLRPRTNTFYAVFRIRSLAAFAIHQYLQEHGFTYVNTPIITSSDSEGAGEMFRVTTLDMNNLPKTEDGRVDDHEDFFKKETNLTVSGQLPVEAFALALRNVYTFGPAFRAENSHTSRHASEFWMIEPEMAFADLQDTINEAEGLLKYVVQYLLDHAQDELAFLDSAVDDDLLNRLHQTCDEKFAQITYTQAIEELKKAPVDFDVPVSWGLDLQAEHERYLCEQVYKRPTFLTDYPKEIKAFYMRDNEDGKTVAAADLLVPRIGELIGGSQREERQAQLAQKIKDYNLPPEEYQWYLDLRKYGETPHSGYGIGFERLLMYVTGMENIRDVIPYPRTPGNAEF

SEQ ID NO: 10349 - DNA, 1386 bp, Buchnera aphidicola str. Cc (Cinara cedri)
  CDS (1)..(1386): transl_table=11
atgcctataacttctatattagacatttatacaaaaaaaaaatatttaaataaagaaattacaattaatggatggattcgaagtaaaagaacttcaaaaataggaatatcttttttaactataactgatggatcatcaattaatactattcaagttattgctaaaaaatctttatataattatgtaacagaaattattaaacttactacaggttgttcagttattatatctggagttttagttttatctccaggaaatttacaaatttatgaaattcaatctaataaaattaaagtaattggttggataaaaaatcctgaaaaatatcctatatcagcaaaaaaacatactatagaacatcttagaaaattttgtcatttacgaccacgtacaaatttaattagtgctatttctagaattagaaatatagtttttcaatctttaaatttatttttatttaacaagcaatatttatgggtatcaactcctattattactagtcttgatacagaaggttctagttctatgtttaaagtatctatgttagataataataaccaatacaccaataataataataaaaaattttttaaaaaagatgtttttttaactgtttctggacaattaacattagaagcttatgcatgtgctttatctaaagtctattctttgggacctatttttagagcagaaaattcaaatactaaaaaacatctaacagaattttggatgttagaagtagaaaaagctttttcaaatattaatgatatctctaaatttgcagaaaaattattaaaattttctattagttatgttttagataattgtatttctgatttaatttttctacaaaaaaaattaaatcgtaacattatttcatatttaaatgattttttatataaagattttattaatattgaatatagcgaagttattaatattttacaaaaaaataaaaattcttcttatgaaaatattaattggggagaagatttatcttcaagtcatgaaaaatatttagtacataaatattttaaatctactgtaatagtaagaaactatccaagattattaaaagctttttatatgcgtatgaatagcgataacaaaactgttgctgcttttgatattttagttcctaacataggagaaataataggaggatcagaaagagaagatagaatcatgtatttagaaaaaaatatgaataaagtaggtttaaattcaaaaaattattcttggtataaagatttaagaaaatatggaactataccacactctggttttggtttgggattagaaagattaattatttttattactggtattaaaaatattagagaatctattccatttccgagaacgattaggcatgcagatttttaa

SEQ ID NO: 10350 - protein, 461 aa, Buchnera aphidicola str. Cc (Cinara cedri)
MPITSILDIYTKKKYLNKEITINGWIRSKRTSKIGISFLTITDGSSINTIQVIAKKSLYNYVTEIIKLTTGCSVIISGVLVLSPGNLQIYEIQSNKIKVIGWIKNPEKYPISAKKHTIEHLRKFCHLRPRTNLISAISRIRNIVFQSLNLFLFNKQYLWVSTPIITSLDTEGSSSMFKVSMLDNNNQYTNNNNKKFFKKDVFLTVSGQLTLEAYACALSKVYSLGPIFRAENSNTKKHLTEFWMLEVEKAFSNINDISKFAEKLLKFSISYVLDNCISDLIFLQKKLNRNIISYLNDFLYKDFINIEYSEVINILQKNKNSSYENINWGEDLSSSHEKYLVHKYFKSTVIVRNYPRLLKAFYMRMNSDNKTVAAFDILVPNIGEIIGGSEREDRIMYLEKNMNKVGLNSKNYSWYKDLRKYGTIPHSGFGLGLERLIIFITGIKNIRESIPFPRTIRHADF

SEQ ID NO: 10351 - DNA, 1395 bp, Pediococcus pentosaceus ATCC 25745
  CDS (1)..(1395): transl_table=11
atggaaaacacattagttaaaacactctactctcaagcagaacatgatgctgacgtagaagtggaagtaactggctggttaaaaaccatccgttcttcaaagaaaattagctttttagaaattaacgatggttcttacatcaagaatgttcaagttatcatggacaacaatgcccttgaaaactctgaagaaattcgtaaggcagcaatctattctacaatcaaagttgtaggtaaagtggctgatacacctaaggctaagcaaccatttgaaattcaagctagttcaatcacaattttaggtagctcaaacagtgactacccattgcaaaagaaggaacatactcctgaattcttgcgggaacaagctcatttacgtcctcggacaaacactttctatgctgttttccggattcgttcattggtttcttttgctgttcatcaattcttacaaagcaacaactttgtttacgttaacacaccgatcatcaccagcagtgatactgaaggtgccggtgaaatgttcaaggtaacaacgctagatttgaacaacttacctaagaacgaagctggggaagtagattcaagcaaggacttcttcaaacaacctaccaacttaaccgttagtggacaattgaatgcagaagcttttgctttggcttttagaaatgtttatacattcggcccagcctttagagctgaaaactcacatactacgcgtcatgcttcagaattctggatgattgaaccagaaatggcctttgctaaccttcaagatattatgaatacttctgaagatttgttgaagtacgtggttaactatcttttggaaaatgctaaagaagaattggaattcttgaacggtgccgttgatccagaattaaaagctcgtttggaagctactaaggatgctgactttgcccgagtttcatacacagaagccatcgacatcttaatgaatgccgatcaagagtttgaaaacccagtcgaatggggcattgatttacaaactgaacacgaaagatacttaagtgaaaaggtatatcaaaaacctgtcttcatcacggattatcctaaggacatcaaggccttctacatgcgtgaaaatgaagaccacaagactgtagctgcagttgaccttttggttcctggtatcggtgaattaatcggtggtagtcaacgtgaagaacgtctcgacaagatcaacgaaaagattgccgaattccatctcgatcctaaggaatacgaatggtacgctgaactaagaaaatacggagaaactgaacattctggtttcggaattggattcgaaagattacttatgtacgtaaccggaatcgaaaacatccgcgatgtaattccattccctcgtacaccaggaaatgctagtttctaa

SEQ ID NO: 10352 - protein, 464 aa, Pediococcus pentosaceus ATCC 25745
MENTLVKTLYSQAEHDADVEVEVTGWLKTIRSSKKISFLEINDGSYIKNVQVIMDNNALENSEEIRKAAIYSTIKVVGKVADTPKAKQPFEIQASSITILGSSNSDYPLQKKEHTPEFLREQAHLRPRTNTFYAVFRIRSLVSFAVHQFLQSNNFVYVNTPIITSSDTEGAGEMFKVTTLDLNNLPKNEAGEVDSSKDFFKQPTNLTVSGQLNAEAFALAFRNVYTFGPAFRAENSHTTRHASEFWMIEPEMAFANLQDIMNTSEDLLKYVVNYLLENAKEELEFLNGAVDPELKARLEATKDADFARVSYTEAIDILMNADQEFENPVEWGIDLQTEHERYLSEKVYQKPVFITDYPKDIKAFYMRENEDHKTVAAVDLLVPGIGELIGGSQREERLDKINEKIAEFHLDPKEYEWYAELRKYGETEHSGFGIGFERLLMYVTGIENIRDVIPFPRTPGNASF

SEQ ID NO: 10353 - DNA, 1386 bp, Solibacter usitatus Ellin6076
  CDS (1)..(1386): transl_table=11
atgattcaaccagacagttacgtacggagcctgctgaaacgctcccccggagaaagcgtcaccgcccggggctgggtcaagacccgccgcgacagcaagaacgtccattttattcagctcaacgacgggtcgtcgccggtcgaccttcaggtcgtgctcgacgccggagtcgtgcccgaagacgtggtcgccaaaatcaccaccggcgcgtgcatcagcgtggaaggcgatctcgtcgcttccatgggcaagggccaggcggtcgaaatcaaggcgcgcgctctcactgtccacggcactgccgaccccgaacactatccgctgcagaagaaaaaacacacgctcgaaacgctacgtgagctcggccacctgcgcacccgctccaacaccttcggcgcggtcttccgcgtacgcaacgccctcgcttgcgccatccacaaattcttccaggatcgcggcttcatgtacgtacacacccccgtgatttcggcgtcggacgccgaaggcgcgggcagtatgttccaggtcaccacgctcgacctgcaatcccccaagccggccgatttcaccggggattttttcggcaagcacacttacctgacggtcagcggacagctggaggccgagatcttcgcccacgccttcgccaacgtctataccttcggccctaccttccgcgccgaaaactcaaacaccccgcgccacctcgccgagttctacatgatcgagcccgagatggccttctgcgatctcaaggacaatcaggatctcgccgaagccttcctcaagagccaggtggaatacgtggtcaacgcctgcggccctgaccttgatttcctcgccaaatggtacgaccccgaactccgcaagacgctcgacggcctcatgaacgcgagcttcgaacgcatcacctacaccgaagccatcgacctgctccagaggtccggccgctcgtttgaattccccacccagtggggttccgacatgcagagcgaacatgagcgctatctcaccgaagaggtcttcaataaaccggtgatcgtcaccgactatccgaaggacatcaaggccttctatatgcgcggcaacgacgacggcaagaccgtggccgccatggacgtgctcgctccgcgcattggagaaatcatcggcggcagccagcgcgaagagcgccacgacgtcctgctgcagcgcatccgcgaaatggccgcccacggcctccgcgaggaggcctactggtggtatctcgacctgcgacgcttcggaggcgtggagcacgccggcttcggcatgggctttgagcgcatgctcatgtacctcaccggcatgaaaaacatccgcgacgtaattcccttcccgcgcactccggggaacgccgagttctag

SEQ ID NO: 10354 - protein, 461 aa, Solibacter usitatus Ellin6076
MIQPDSYVRSLLKRSPGESVTARGWVKTRRDSKNVHFIQLNDGSSPVDLQVVLDAGVVPEDVVAKITTGACISVEGDLVASMGKGQAVEIKARALTVHGTADPEHYPLQKKKHTLETLRELGHLRTRSNTFGAVFRVRNALACAIHKFFQDRGFMYVHTPVISASDAEGAGSMFQVTTLDLQSPKPADFTGDFFGKHTYLTVSGQLEAEIFAHAFANVYTFGPTFRAENSNTPRHLAEFYMIEPEMAFCDLKDNQDLAEAFLKSQVEYVVNACGPDLDFLAKWYDPELRKTLDGLMNASFERITYTEAIDLLQRSGRSFEFPTQWGSDMQSEHERYLTEEVFNKPVIVTDYPKDIKAFYMRGNDDGKTVAAMDVLAPRIGEIIGGSQREERHDVLLQRIREMAAHGLREEAYWWYLDLRRFGGVEHAGFGMGFERMLMYLTGMKNIRDVIPFPRTPGNAEF

SEQ ID NO: 10355 - DNA, 1401 bp, Syntrophobacter fumaroxidans MPOB
  CDS (1)..(1401): transl_table=11
atggcggcaatctcgagagtcatcgatctttttacaagcgatcaggaatacatcggcaagaccgtccgcgctcagggatgggtgcggaccaaacgcgattccaaggcgggcgtgtccttcatcgagctcaacgacggctcctgtcttcgcaatctgcaggtggtcgccgaccagggacacccggagtatcgacaattgctcgaaagcatcaccacaggatgcgccgtcatggtcgaaggctccatcgcttactctccgggaaagggccagacgatcgaactgaaagcggaccgcatcacgctttacggcacggcggacccggccgtctatcccctgcagaagaagcggcattccttcgaattcctccggcagatagggcacctgcggccccgcaccaacaccatcggagccgtgagccgagtccgcaaccgcctcagttacgccatccaccagttctttcaggaccgcggcttctattacatccacacgccgatcatcactgccagtgattgcgaaggcgcgggcgaaatgtttcgggtcaccacgctggacgcgcaaaacgcgccggcgaaagtcccggaagaggtctaccgggcggattttttcggcaaaccggcctttctgacggtgagcggccaactgcaggccgagatctacgctctcgctctgggccgcgtctacacgttcggcccgacgtttcgcgccgagaattcgaacaccagccgacacctcgcggaattctggatggtggaacccgagatggccttttgcgacctggaaggagacctggaaatcgcccaggcgctcatcaggcacctcatcggcgtcgccctgcaggactgcgccgaagacctggatttcttcacccgcttcatcgagccgactctgcgcggcacactggagaccgtggcgttcagtcctttcgaaaccgtgacctataccgaagccgtgcggattctcaaagaatcgggcgaaaacttcgaattccccgtggaatggggaaacgatctgcaggccgagcacgaacgctacctgaccgagaaggttttccgaaagccggcggcggtgatccatttcccccgcgcgctgaaaccgttttacatgagggtcaacgatgatggaaacaccgtggccgccatggacatactggttcccggaacgggggaaatcatcggaggttcccagcgcgaggaacgtccggacattctcgtcgagcagatgcgcctgaagtccgttgcgccggaagactacaaatggtacctggatctgcgggagttcggttccgtgccccacgcgggattcggcatggggctcgagcgccttgtgcagttcgttaccggattgccgaacatccgggaagtcattccgtttcccaggacgcccggccatgcggaattctga

SEQ ID NO: 10356 - protein, 466 aa, Syntrophobacter fumaroxidans MPOB
MAAISRVIDLFTSDQEYIGKTVRAQGWVRTKRDSKAGVSFIELNDGSCLRNLQVVADQGHPEYRQLLESITTGCAVMVEGSIAYSPGKGQTIELKADRITLYGTADPAVYPLQKKRHSFEFLRQIGHLRPRTNTIGAVSRVRNRLSYAIHQFFQDRGFYYIHTPIITASDCEGAGEMFRVTTLDAQNAPAKVPEEVYRADFFGKPAFLTVSGQLQAEIYALALGRVYTFGPTFRAENSNTSRHLAEFWMVEPEMAFCDLEGDLEIAQALIRHLIGVALQDCAEDLDFFTRFIEPTLRGTLETVAFSPFETVTYTEAVRILKESGENFEFPVEWGNDLQAEHERYLTEKVFRKPAAVIHFPRALKPFYMRVNDDGNTVAAMDILVPGTGEIIGGSQREERPDILVEQMRLKSVAPEDYKWYLDLREFGSVPHAGFGMGLERLVQFVTGLPNIREVIPFPRTPGHAEF

SEQ ID NO: 10357 - DNA, 1401 bp, Aeromonas hydrophila subsp. hydrophila ATCC 7966
  CDS (1)..(1401): transl_table=11
atgacgcacgcatccgtagtagatgtgctgaccggtaagtatgcggtcggcaccacccagacagtgaaagggtggatccggacccgccgcgattccaaggcggggatctcatttttggccatctccgatggctcctgtttccatccggtacaggcagtcgtccccaataccctggccaattacgagaatgaagtgctgcgtctgaccactgcctgctccgtggaagtgaccggcgtggttgccgcctctcagggcagcggccaggctttcgaactgcaggcgaccgaggtgaaggtagtcggctgggtcgaagatccggacacctacccgatggccgccaagcgccacagcatcgaatacctgcgcgagcagggccacctgcgcgctcgtaccaacatggtcggtgccgtgacccgggtacgcaactgcctctcccaggccattcaccgcttcttccacgagcagggttatctgtggattgccgcgccgctcatcaccgcctccgacaccgaaggcgccggcgagatgttccgcgtctccaccctggacatggaaaacctgccgcgcacccctgccggcaaggtggactatgacaaggacttcttcggcaaagagaccttcctgaccgtgtccggccagctcaacgtcgaaacctacgcctgcgcgctgtccaaggtctacaccttcgggccgaccttccgcgccgaaaactccaacaccagccgccacctggcggagttctggatggttgagccggaagtggccttcgccgatctggaagacaacgccgccctggccgaagccatgctgaagtatgtcttcaacgccgtgctggccgagcgacgcgacgatctggagttcttcgcccagcacgtggacaaggacgccatcggtcgtctggagcgcttcgtcgcctccgacttcgcccagattgactacaccgacgccatcgaagtgctgaagaactgcggcaagaagttcgagttcccggtctcctggggtatcgacctctcctccgagcacgagcgctacctggccgaagagcacttcaagtcccctgtggtcgtgaagaactacccgaaagacatcaaggccttctacatgcgtctcaacgacgacggcaagaccgtcgccgccatggacgtactggccccgggcatcggcgagatcatcggcggttctcagcgtgaagagcgtctggacgtgctggatgcccgtctggccgagatgggtctgaacaaggaagactactggtggtatcgcgacctgcgccgctacggtaccgtgccgcactccggcttcggtctgggcttcgagcgcctggtggtttacgtgaccggcatgggcaacgtccgcgacgtgatccccttcccgcgcaccccgcgcaccgccgagttctga

SEQ ID NO: 10358 - protein, 466 aa, Aeromonas hydrophila subsp. hydrophila ATCC 7966
MTHASVVDVLTGKYAVGTTQTVKGWIRTRRDSKAGISFLAISDGSCFHPVQAVVPNTLANYENEVLRLTTACSVEVTGVVAASQGSGQAFELQATEVKVVGWVEDPDTYPMAAKRHSIEYLREQGHLRARTNMVGAVTRVRNCLSQAIHRFFHEQGYLWIAAPLITASDTEGAGEMFRVSTLDMENLPRTPAGKVDYDKDFFGKETFLTVSGQLNVETYACALSKVYTFGPTFRAENSNTSRHLAEFWMVEPEVAFADLEDNAALAEAMLKYVFNAVLAERRDDLEFFAQHVDKDAIGRLERFVASDFAQIDYTDAIEVLKNCGKKFEFPVSWGIDLSSEHERYLAEEHFKSPVVVKNYPKDIKAFYMRLNDDGKTVAAMDVLAPGIGEIIGGSQREERLDVLDARLAEMGLNKEDYWWYRDLRRYGTVPHSGFGLGFERLVVYVTGMGNVRDVIPFPRTPRTAEF

SEQ ID NO: 10359 - DNA, 1443 bp, Gramella forsetii KT0803
  CDS (1)..(1443): transl_table=11
atgatacaagcaaaaatcgctgaaatactggaaagcgatcagtttttacaggaacaccatgttaaaggttgggtacgctcttttagaagcaatcgatttatcgcaattaacgatggttcaactataaaaaaccttcagtgtgttatcgattttgaaaataccgatgaagatcttattaaaagaataaatgtaggtgctgcgatttctgtaaaaggcactttaaaggaaagtcagggaagtcagcaacgtgtagaggttgacgtgaccgagctgaaaattcttggtgatgcaaatccggaagaagtaaaacttaccattctttctccgaagaaacatagcctggagaagcttcgggaacaggcgcatttaagggtacgtaccaatacattcggcgccgtaatgcgcgtgagaagtaaattatcttttgccgttcataaatatttccaggagaaaaatttctactatgtaaacacccccataattacagggagtgatgctgaaggtgccggagagatgtttagggtttcagcattagacatgaaaaatcctccaaaaaatgaggatggaagtattaattataaagaagatttcttcggaaaagagaccaatcttactgtttccgggcagttagaagcggaaacttttgcgctcggacttggccaggtttatacttttgggccaacctttagagctgaaaattcaaacacttcacgtcacctggcagaattctggatgatcgagccggaagtagcattttgtgatcttgaccagaacatggatctggctgaagattttataaaatacgttcttagatacgttattgaaaattgtaaagaagatttggaatttctggctgaaagacaggaaagcgaagataaactgaagccgaaagcagaacgtagcgaaatgacacttcttgagaagctaaactttgttttagataataatttcaaaagagtaagttatacagaagctatcgagatcctgaaaaactccaaaccaaacaagaagaagaaattcaattatgtcattgaagaatggggagccgatcttcaaagtgaacacgaaagattccttgttgaaaagcattttaaatgcccggtaatcctttttgattatcctgcaaatattaaggctttctatatgagaatgaatgaagatggaaagactgtaagagcaatggacatccttttccctggaattggggagattgttggtggaagccaacgtgaagaacgtttggacgttctaaaggaaaaaatggccgagctggatatcccggaagaagaactttggtggtatctggatacccgtaagtttggaacctgtgtgcatagtggttttggacttggttttgaaagacttgtacagttcactaccggaatgggtaatattagagatgtaattccttttccacgtacaccacaaaacgcagaattttaa

SEQ ID NO: 10360 - protein, 480 aa, Gramella forsetii KT0803
MIQAKIAEILESDQFLQEHHVKGWVRSFRSNRFIAINDGSTIKNLQCVIDFENTDEDLIKRINVGAAISVKGTLKESQGSQQRVEVDVTELKILGDANPEEVKLTILSPKKHSLEKLREQAHLRVRTNTFGAVMRVRSKLSFAVHKYFQEKNFYYVNTPIITGSDAEGAGEMFRVSALDMKNPPKNEDGSINYKEDFFGKETNLTVSGQLEAETFALGLGQVYTFGPTFRAENSNTSRHLAEFWMIEPEVAFCDLDQNMDLAEDFIKYVLRYVIENCKEDLEFLAERQESEDKLKPKAERSEMTLLEKLNFVLDNNFKRVSYTEAIEILKNSKPNKKKKFNYVIEEWGADLQSEHERFLVEKHFKCPVILFDYPANIKAFYMRMNEDGKTVRAMDILFPGIGEIVGGSQREERLDVLKEKMAELDIPEEELWWYLDTRKFGTCVHSGFGLGFERLVQFTTGMGNIRDVIPFPRTPQNAEF

SEQ ID NO: 10361 - DNA, 1401 bp, Shewanella sp. ANA-3
  CDS (1)..(1401): transl_table=11
atgagcattgcatcggtcgcttctgtatttaaaggtgagcacgcagttggttcgacagtcacagtccgtggctgggtcagaacccgtcgtgactcgaaagctggcatctcttttttagctgtctatgacggctcctgctttaatcctattcaaggtgttgtgccaaatagcttagaaaattacgacaacgaagtgttaaagctgacagctggctgctctgtgatcgtaaccggtgagattgtggaatctcctggcgctggccaagcctacgagctgcaagtcacacacgttgaagtgacgggttgggtcgaagatccagacacttacccaatggcggctaagcgtcactcaatcgagcatttacgcgaactggcccacttacgcccacgtaccaacatcattggtgccgttgcccgcgtacgtaactgtttgtctcaagcgattcaccgtttctaccacgaaaatggtttcgtgtgggtatctacaccgctgatcaccgcatcagactgtgaaggcgcgggtgaaatgttccgtgtctccacactggacatggaaaacctgccacgcaccagcgatggcaaagtagactatgacaaagacttcttcggtaaagaggcattcttaaccgtatcgggccagttgaacggcgaaacctacgcctgtgccctgtcaaaaatctatacctttggcccgacgttccgtgctgaaaactcaaacaccagccgccacttagcggaattctggatggttgagcctgaagtggcgttcgcgaccttaagcgatatcgcaagccttgccgaaggcatgctgaaatacgcctttaacgccgtattagctgaacgtatggacgatttacaattcttcgcccagcacgtggataaaaccgtgattgagcgtctgcagtctttcgtatcgagtgatttcgcccaggtagattacacagatgcagtagacattctgcaaaaatgtggtcgtgagttcgaattcccagtgtcttggggtatcgacttatcctctgagcacgagcgttatctggccgaagagcacttcaaagcccctgtggttgtgaagaactatccaaaagatatcaaagccttctacatgcgccttaacgaagacggtaaaaccgttgccgcgatggacgtgttagccccaggcataggtgaaatcatcggtggttcacaacgtgaagagcgtttagacgtgctggatatgcgtttagaagaaatggatctgaataaagaagattactggtggtatcgcgatctgcgccgttacggcacagtgccacactcaggtttcggtctgggcttcgagcgtttggtgtcttacgtaacgggcgtatcgaacatccgtgacgtgatcccattcccacgcgcgccacgcactgcgaacttctaa

SEQ ID NO: 10362 - protein, 466 aa, Shewanella sp. ANA-3
MSIASVASVFKGEHAVGSTVTVRGWVRTRRDSKAGISFLAVYDGSCFNPIQGVVPNSLENYDNEVLKLTAGCSVIVTGEIVESPGAGQAYELQVTHVEVTGWVEDPDTYPMAAKRHSIEHLRELAHLRPRTNIIGAVARVRNCLSQAIHRFYHENGFVWVSTPLITASDCEGAGEMFRVSTLDMENLPRTSDGKVDYDKDFFGKEAFLTVSGQLNGETYACALSKIYTFGPTFRAENSNTSRHLAEFWMVEPEVAFATLSDIASLAEGMLKYAFNAVLAERMDDLQFFAQHVDKTVIERLQSFVSSDFAQVDYTDAVDILQKCGREFEFPVSWGIDLSSEHERYLAEEHFKAPVVVKNYPKDIKAFYMRLNEDGKTVAAMDVLAPGIGEIIGGSQREERLDVLDMRLEEMDLNKEDYWWYRDLRRYGTVPHSGFGLGFERLVSYVTGVSNIRDVIPFPRAPRTANF

SEQ ID NO: 10363 - DNA, 1392 bp, Clostridium novyi NT
  CDS (1)..(1392): transl_table=11
atggaaacagtattagttaaacaactttacagagaaacagaaaagtttgcaggaaaagaagttaaaataagtggatggataagaacacttagagcttcaaataaatttgggtttatagaagttaatgacggaagtttctttaaaaatattcaagttgtatttggtgctgaacttgaaaactttaaagaaatatcaaaatatgctattagctcaagcataagtgtagaaggggaagttgtaattacagaaggagcaaaacaaccttttgaaattcatgctaaaaaagtagtattagaaggaaaatctgatgctgattatccacttcaaaagaaaagacatacttttgaatatttaagaagcatagctcacttaagaccaagaagtaatgctttttcagcagtatttagagtacgttcattagcagcatatgctatacataagttcttccaagatcaaggatttgtttatgttcatacaccaattatcacaggaagtgactgtgaaggtgcaggagaaatgtttagagtaacaactttagatatggaaaaccctccaaaggatgaaaagggaaatgtagattacaaagaagatttctttggaaaacaagcaaaccttacagtaagtggacagcttgaagctgaaatatacgctttagcatttagaaatgtttatacattcggacctacatttagagcagaaaactctaacacagcaagacacgcatcagaattctggatgatagaacctgaaatggcttttgctgaattaaaggactacatggatgtagcagaacaaatggttaaatatataatcaactatgtaagagaaaatgctccagaagaaatggaattcttcaataagtttattgacaaaggattattagaaagattagacaatgttgtaaactctgattttgctagaataagctacacagaagctgtagaaatccttcaaaaatcaggagcagaatttgaatatcctgttgaatggggaattgatcttcaaacagaacacgaaagatatttaacagaacaaatttataaaaaaccagtattcgtaacagattatccaaaggatattaaagcattctacatgagaatgaatgatgataacaaaactgttgcagcagctgaccttttagttccaggtatcggagaaataattggaggaagccaaagagaagaaagacttgatattcttgaagctagaatggctgaacttggacttgaaaaagaagattactggtggtatttagaacttagaaaatacggagaaactaagcacgctggatatggtcttggatttgaaagaatgataatgtacttaacaggaatgggcaacataagagacgtaataccattcccaagaactccaggagtttctgaattttaa

SEQ ID NO: 10364 - protein, 463 aa, Clostridium novyi NT
METVLVKQLYRETEKFAGKEVKISGWIRTLRASNKFGFIEVNDGSFFKNIQVVFGAELENFKEISKYAISSSISVEGEVVITEGAKQPFEIHAKKVVLEGKSDADYPLQKKRHTFEYLRSIAHLRPRSNAFSAVFRVRSLAAYAIHKFFQDQGFVYVHTPIITGSDCEGAGEMFRVTTLDMENPPKDEKGNVDYKEDFFGKQANLTVSGQLEAEIYALAFRNVYTFGPTFRAENSNTARHASEFWMIEPEMAFAELKDYMDVAEQMVKYIINYVRENAPEEMEFFNKFIDKGLLERLDNVVNSDFARISYTEAVEILQKSGAEFEYPVEWGIDLQTEHERYLTEQIYKKPVFVTDYPKDIKAFYMRMNDDNKTVAAADLLVPGIGEIIGGSQREERLDILEARMAELGLEKEDYWWYLELRKYGETKHAGYGLGFERMIMYLTGMGNIRDVIPFPRTPGVSEF

SEQ ID NO: 10365 - DNA, 1386 bp, Borrelia turicatae 91E135
  CDS (1)..(1386): transl_table=11
atgcataagagcatcaaagaaattttaaataatcctatactagatagtataatcacagtgaaaggatggattcgtacaaaacgcagtaatggtaaaatctcatttgtagaaattaatgacggctcaaatattaaaggaattcaagcgatcattaatgaagaagatcatcaatttgaaaaaaaagaattaaaaaagctcacaacaggtgccagtatatcattaaccggaattttaatcttaagcccagcaaaaggacaaacctatgaaatcaaaacaacaaattttaatataattggagaagcggatcaagaaacatatcttttacaaaagaaaaggcacacctttgaatttttaagagaaatccctcatttaagaattcgtactaacacatttggggctgtggccagaattagaaatcaaatttcttataaaattcatgaatattttcaaaaaaatggatttttatacatacataccccaattattacatcaaatgacggcgagggggccggtgaaatatttcgtgtatctaccttagattttaataacatcacaaacggaaaagaagttgactttaaagatgatttctttggcaaacaagcattccttacagtaactggacaactgcacggcgaagcttatgcaatggctttatcaaaaatatatacatttggaccgacatttagagcagaaaactctaacacaacacgccatgcctcagaattttggatgattgaacctgaaatggcattctttacacttgaagacaatatcaatttagcagaaaattttcttaagtacattttaaaagagactttaaataattgtaatcaagatatagaattttttgataatttcattgaaaaaggcttaatcaaaaaaattgaagatgtaataaactctaactttgaagttattacatatacccaagcaattaaacaacttgaaaatgcaacaaaaacatttgaaataaaaccttactggggaatggatttacaaacagaacatgaaaggtatttaacagaagaaattatcaaaaaacctgccatagttattgattatccaaaagaatttaaagcattttacatgaagatgaatgaagacggcaaaactgttaaaggaatggatattttagttccacgcatcggagaaataattgggggcagtgaaagagaagataatttggataagttgaataaaagaataaaagagctaaatttagaaatagaaactcttaattggtacttagacttaaggagatttggatcaactcctcattctggatttggacttggacttgagagattaatacaatatataacaggaatggccaatattagagatgtcataccatttccaaggactcctaaaactctttatttctaa

SEQ ID NO: 10366 - protein, 461 aa, Borrelia turicatae 91E135
MHKSIKEILNNPILDSIITVKGWIRTKRSNGKISFVEINDGSNIKGIQAIINEEDHQFEKKELKKLTTGASISLTGILILSPAKGQTYEIKTTNFNIIGEADQETYLLQKKRHTFEFLREIPHLRIRTNTFGAVARIRNQISYKIHEYFQKNGFLYIHTPIITSNDGEGAGEIFRVSTLDFNNITNGKEVDFKDDFFGKQAFLTVTGQLHGEAYAMALSKIYTFGPTFRAENSNTTRHASEFWMIEPEMAFFTLEDNINLAENFLKYILKETLNNCNQDIEFFDNFIEKGLIKKIEDVINSNFEVITYTQAIKQLENATKTFEIKPYWGMDLQTEHERYLTEEIIKKPAIVIDYPKEFKAFYMKMNEDGKTVKGMDILVPRIGEIIGGSEREDNLDKLNKRIKELNLEIETLNWYLDLRRFGSTPHSGFGLGLERLIQYITGMANIRDVIPFPRTPKTLYF

SEQ ID NO: 10367 - DNA, 1401 bp, Shewanella sp. W3-18-1
  CDS (1)..(1401): transl_table=11
atgagcattgcatctgtcgcttctgtatttaaaggtgagcacgcggtcggttctaaagtcacagtacgtggctgggtcagaactcgtcgtgattctaaagccggtatttcttttttagctgtctatgacggttcctgctttaatccgatccaaggtgtcgtgcccaatagcctcgaaaattacgacaacgaagtgttaaagctaactgcaggctgctctgtcgtaatgacaggcgacgtggttgaatctcctggcgcaggccaggcatttgagctacaagtgactgaacttgaagtcactggctgggttgatgatccagacacatacccaatggccgctaagcgtcattcgattgagcatcttcgtgagctcgctcacctgcgtccacgcactaacattattggtgctgttgcccgcgttcgtaactgtttatcccaagcgattcaccgtttctaccacgaagaaggctttatttgggtttctacaccacttatcactgcatcagattgcgaaggcgcgggtgaaatgttccgcgtatcgactttagatatggaaaacctgccccgcaccagtgaaggcaaagtcgattacgataaggatttcttcggtaaagaggctttcttaactgtatcagggcaattaaacggtgaaacttacgcctgtgcactgtcaaaaatttatacctttggcccaacattcagagcagaaaactccaatactagccgtcacttagctgagttttggatggttgaacccgaagttgccttcgcgaccttaagcgatatcgcaggtcttgccgaagcgatgctgaaatacgccttcaatgccgtattaaccgagcgtatggatgatttacaattcttcgcacagcacgtagataaaacggttatcgagcgtttacaatcttttgtgtcgagtgattttgcccaagtggactacaccgatgcggttgatatcctgcaaaaatgtggcaaaacctttgaattcccagtttcttggggtattgacctttcttctgagcacgagcgttatttagccgaagaacatttcaaagccccagttgtggtgaagaactatccaaaggacattaaagccttctatatgcgcttaaacgaagacggcaaaaccgttgccgcaatggacgtattagcacccggcattggtgaaattatcgggggttctcaacgtgaagaacgtttagatgtgctggatatgcgtttagccgaaatggatctgaacaaagaagattactggtggtatcgtgaccttcgccgttatggcacagtgccacacgcgggctttggtttaggttttgagcgtttagtgtcttatgtgactggcgtctctaacatccgtgatgtgatccccttcccacgtgcaccacgtacagcaaacttctaa

SEQ ID NO: 10368 - protein, 466 aa, Shewanella sp. W3-18-1
MSIASVASVFKGEHAVGSKVTVRGWVRTRRDSKAGISFLAVYDGSCFNPIQGVVPNSLENYDNEVLKLTAGCSVVMTGDVVESPGAGQAFELQVTELEVTGWVDDPDTYPMAAKRHSIEHLRELAHLRPRTNIIGAVARVRNCLSQAIHRFYHEEGFIWVSTPLITASDCEGAGEMFRVSTLDMENLPRTSEGKVDYDKDFFGKEAFLTVSGQLNGETYACALSKIYTFGPTFRAENSNTSRHLAEFWMVEPEVAFATLSDIAGLAEAMLKYAFNAVLTERMDDLQFFAQHVDKTVIERLQSFVSSDFAQVDYTDAVDILQKCGKTFEFPVSWGIDLSSEHERYLAEEHFKAPVVVKNYPKDIKAFYMRLNEDGKTVAAMDVLAPGIGEIIGGSQREERLDVLDMRLAEMDLNKEDYWWYRDLRRYGTVPHAGFGLGFERLVSYVTGVSNIRDVIPFPRAPRTANF

SEQ ID NO: 10369 - DNA, 1386 bp, Fusobacterium nucleatum subsp. vincentii ATCC 49256
  CDS (1)..(1386): transl_table=11
atgattactgtaagagatatttttagacatggggaggattacctagataaagagatagagctttttggttgggtaagaaagataagagatcaaaagaaatttggttttattgaattaaatgatggttctttctttaaaggagtacaaatagtttttgaagaagggcttgaaaattttgatgaagtttcaaggctttcaatatcttctactattaaagtaaaaggtactcttgttaaatcacaaggtagtggacaagatttagaagttaaagctgataaaatagaaatattccaaaaggctgatttagaatatccattgcaaaataaaagacatacttttgaatatttaagaactaaggcacatttaagagcaagaacaaatactttttcagcagtatttagggtaagatctgtacttgcttatgcaatacataaatttttccaagaaaataactttgtttatgttcacactccaattataactggttctgatgctgagggtgctggagaaatgtttagagttacaactcttgatatgaataaattacctaaaaaagaaaatggagaaattgattttacaaaagatttctttggtaaatcaactaatttaacagtaagtggtcaattaaatgttgaaactttctgtgcagcttttagaaatgtctatacttttggaccaacatttagggcagaatactcaaatactgcaagacatgcctcagagttttggatggtagagcctgaaatagcttttggagatttatcagctaatatggaacttgcagaagctatggtaaaatttgttattaaatatgttatggatacttgtccagaagaaatggaattctttaattcatttattgaaaaaggactatttgataaattaaacaatgtacttaacaatgattttggtagagttacttacacagaagcaatagaaattttagaaaaatcaggaaaaaaatttgaatttcctgttaaatggggaatagatttacaaagtgaacatgaaagatatttagcagaagagtattttaaaaaacctgtctttgtaactgattatccaaaagaaattaaggctttctatatgaaacttaatgaagatggcaagacagttagagctatggacttacttgccccaggaattggagaaattattggtggttctcaaagagaagatagctatgaaattcttttaaatagaatggaagaattagggcttgataaagaaagttatgaattttacttagatttaagaagatttggaagtttccctcactctggatatggattaggttttgaaagaatgatgatgtatttaactggcatgcaaaatattagagatgtaatacctttcccaagaactccaaataatgcagagttttaa

SEQ ID NO: 10370 - protein, 461 aa, Fusobacterium nucleatum subsp. vincentii ATCC 49256
MITVRDIFRHGEDYLDKEIELFGWVRKIRDQKKFGFIELNDGSFFKGVQIVFEEGLENFDEVSRLSISSTIKVKGTLVKSQGSGQDLEVKADKIEIFQKADLEYPLQNKRHTFEYLRTKAHLRARTNTFSAVFRVRSVLAYAIHKFFQENNFVYVHTPIITGSDAEGAGEMFRVTTLDMNKLPKKENGEIDFTKDFFGKSTNLTVSGQLNVETFCAAFRNVYTFGPTFRAEYSNTARHASEFWMVEPEIAFGDLSANMELAEAMVKFVIKYVMDTCPEEMEFFNSFIEKGLFDKLNNVLNNDFGRVTYTEAIEILEKSGKKFEFPVKWGIDLQSEHERYLAEEYFKKPVFVTDYPKEIKAFYMKLNEDGKTVRAMDLLAPGIGEIIGGSQREDSYEILLNRMEELGLDKESYEFYLDLRRFGSFPHSGYGLGFERMMMYLTGMQNIRDVIPFPRTPNNAEF

SEQ ID NO: 10371 - DNA, 1392 bp, Crocosphaera watsonii WH 8501
  CDS (1)..(1392): transl_table=11
atgcaaactaaacgagttagagacatcttacgacacggccaacccgatgaaaccgttaccattcaggggtgggtacgcaccaaacgggaactaaaagatttttcgtttatggaagttaatgacggttcctccctgaatagtttacaggtggttctcgatgaaagcgtccccgactatcaagatgttctcaaactccttaatactgggtcttctgtggaagtttcgggaaccctggtacaatccctcggaaaaggtcaaaaaatcgagttaaaggctgctacagtccaggtatatggcacatctgaccccgaaacctatccccttcagaaaaaacgccactcctttgaatttttacgcactattggacatctgcgatcgcgtaccaatacaataggggcggtgatgcgtgtcagaaatgcttgtgcaaccgctattcataacttttttcaagaaagagattttatgtgggttcatacccctattattactgctagtgactgcgaaggtgcaggggaattattcactgttactaattttgatttaagcaagattcctgtcgataaacaagagaaaatagactacagccaagacttttttggtaaacaagcttatctaactgtaagtggacagttagaagcggaagttatggctatgtcttttcaaaatgtttatacttttggtcctacatttagggcagaaaattctaatacttctcgtcatttagctgagttttggatggtggaaccagaaatggctttttgtgatattgaaggggatcaagatttagcggaagagttcttaaagtacatttttaagtatgtgttagaaacttgtcccgaagatatggaatttttcaacaagcgtattgataagtctgttttggaaacggcggataatatcattaacaatgaatttgaaagaattacttatacaaaggctatagaattactagagaagtgcaataaaaagtttgagtatgctgtggaatggggcattgatttacagtcggaacacgagcgatatctggcagaagaattgtttaaaaaacccttgattgtcacgaattatcctgctgctattaaagccttttatatgcgtttaaatgacaatgagaaaaccgttgccgctatggatgtattagctccgaaaattggggaaattattggcggatcgcaacgggaagaaagactagatgtattagaaagacggattaatgaaatggagataattcctgatgatctatggtggtatttagacctcagaaaatatggaaccgttccccatgcaggatttggtttagggtttgaaagagtggtacaatttatgacaggtatgggtaatattcgtgatgttattcctttccctcgtactcctttaagtgcggaattttaa

SEQ ID NO: 10372 - protein, 463 aa, Crocosphaera watsonii WH 8501
MQTKRVRDILRHGQPDETVTIQGWVRTKRELKDFSFMEVNDGSSLNSLQVVLDESVPDYQDVLKLLNTGSSVEVSGTLVQSLGKGQKIELKAATVQVYGTSDPETYPLQKKRHSFEFLRTIGHLRSRTNTIGAVMRVRNACATAIHNFFQERDFMWVHTPIITASDCEGAGELFTVTNFDLSKIPVDKQEKIDYSQDFFGKQAYLTVSGQLEAEVMAMSFQNVYTFGPTFRAENSNTSRHLAEFWMVEPEMAFCDIEGDQDLAEEFLKYIFKYVLETCPEDMEFFNKRIDKSVLETADNIINNEFERITYTKAIELLEKCNKKFEYAVEWGIDLQSEHERYLAEELFKKPLIVTNYPAAIKAFYMRLNDNEKTVAAMDVLAPKIGEIIGGSQREERLDVLERRINEMEIIPDDLWWYLDLRKYGTVPHAGFGLGFERVVQFMTGMGNIRDVIPFPRTPLSAEF

SEQ ID NO: 10373 - DNA, 1401 bp, Xylella fastidiosa Dixon
  CDS (1)..(1401): transl_table=11
atgacggtggccagtgttgagcaaatgttctccgggaaaattcaggtgggcagtgaagtgacagtccgtggctgggtacgaacccggcgcgattctaaagcgggcctcagttttgtcagtgtcagtgatggttcctgcttcgccgcaattcaggtcgtcactccagcgcatcttccaaattacgaaacagaagtacgcaaactcactacaggttgcgcagtcatcgtgatcggcaccctggcaccctctctgggccaaggtcaacagttcgaaatccaggcccagagcattgaggtcgtcggttgggtcgaggatccggaaacatatccgatccaacccaaacaacattcattggaattccttcgggaggtggcgcacctgcgtccacgcaccaatctgtttggtgcagtcgctcgtatccgccactgtctatcgcaggcggtacaccgtttttttcacgagaatggttattactggatcaccacaccgatcatcaccacttccgacgccgaaggtgccggacaaatgttccgcgtctctacgctggatttagtcaatctaccgcgcacggagaccggtggaatcgacttttcgcatgatttctttggaaaagaaacgttcttgaccgtctccgggcaactcaacgtagaagcctacgcactggcactgagcaaggtgtataccttcggtccgacgttccgagctgagaatagtcacacgccgcgtcaccttgcggaattttggatgattgagccagaaatcgccttcgcggatctggttgaggatgcacgtgtggccgaacagttcctcaaatttcttttcaaaacggtactggaggaacgtgccgacgacttggcattcattaccgaacgggtagagaaaaccacgatcagcaagctggaagggtttatcaagtcaccattcgaacggatcgagtacacagacgccatcaagctgttggaaaagtcggagaaaaagtttgattttccggttgaatggggactggatctacaaaccgagcacgagcgctggttgaccgagaagcacatcggccgcccggtggtggtggtgaactatcccgaacacatcaaagctttttacatgcggctgaacgacgatgggaaaacggtcgcagcgatggatgtgttggcccctggcatcggcgaaattattggcggcagccaacgtgaggagcgcttggaaatgcttgatatacggatggcgcaattcggtatggacccggcacattaccagtggtatagggatttccgccgctacggctcggtgccgcacgcggggttcggcctggggtttgaacgtctcgtggtctacgtctgcgggctgagcaatatccgcgatgcaatcccctacccgcgtgcgccaggcagtgccgagttctga

SEQ ID NO: 10374 - protein, 466 aa, Xylella fastidiosa Dixon
MTVASVEQMFSGKIQVGSEVTVRGWVRTRRDSKAGLSFVSVSDGSCFAAIQVVTPAHLPNYETEVRKLTTGCAVIVIGTLAPSLGQGQQFEIQAQSIEVVGWVEDPETYPIQPKQHSLEFLREVAHLRPRTNLFGAVARIRHCLSQAVHRFFHENGYYWITTPIITTSDAEGAGQMFRVSTLDLVNLPRTETGGIDFSHDFFGKETFLTVSGQLNVEAYALALSKVYTFGPTFRAENSHTPRHLAEFWMIEPEIAFADLVEDARVAEQFLKFLFKTVLEERADDLAFITERVEKTTISKLEGFIKSPFERIEYTDAIKLLEKSEKKFDFPVEWGLDLQTEHERWLTEKHIGRPVVVVNYPEHIKAFYMRLNDDGKTVAAMDVLAPGIGEIIGGSQREERLEMLDIRMAQFGMDPAHYQWYRDFRRYGSVPHAGFGLGFERLVVYVCGLSNIRDAIPYPRAPGSAEF

SEQ ID NO: 10375 - DNA, 1443 bp, Croceibacter atlanticus HTCC2559
  CDS (1)..(1443): transl_table=11
atgaagacacttaaagttgcagacgttttaaaaagcgagcaatatcatcaagaaatagcagttaacggatgggtaaaagcatttagaagcaatagattcttagctttaaatgatggctctacaattaataacctacaatgtgttatagattttgaaaacttgccagaagacatattaaaagaaattaatattggtgcagcggtacgcattaagggtattttagaagaaagtgaaggcgcaggacagcgcgtggaaatacaagtaaaagacataaaaatagaaggtgtagcaaatcctgaagatgttaagcttacaattttatcccctaagcgtcatagcttagaaaaacttagagagcaggcacacttaagagtaagaacaaacactggcgcagcagtaatgagattacgctcaaaactatcatttgctgtacacaagtattttcaagacaacggtttttactatgtaaacacgcctattattacaggaagcgatgcagaaggtgctggagaaatgtttaaagtgactgcaatggatttaaaaaatcctgctaaaaatgaggatggtagcataaactacaaagaagatttcttcggaaaagaaactaacttaactgtttccggtcaattagaagctgaaacttttgcattgggcttaggacaagtttatacatttggcccaacatttagagcagaaaactcaaacacttctagacatttagcagaattttggatgattgagcctgaagtagcattttgtgatcttgcaggcaatatggacttagcagaagatttcataaaatatgtgattggttatgttttagaaaactgtgatgaagatcttgagtttttagaaaacagattggttcaagaagacaaatcaaaacctcaagcagaacgttcagacatgttattaagagacaaactaaagtttgttttagaaaataattttaagcgtgttagttacacagaagctatagatatactaaagagctctaaaccaaataaaaagaaaaagtttaaatatataattgaagaatggggcgcagatttacagtctgagcacgaacgctacttagtagaaaaacactttaaatgccctgtaatcttatttgattatccagctaacattaaagcgttttatatgcgtttaaatgaagatggaaaaacagtaagagctatggacatactttttccaggtattggagaaatagttggcggttcacaacgtgaagagcgtctggatgttctaaaagagaaaatgactgctctagacatacctgaagaagagctttggtggtatttagatacaaggaaatttggcacgtgtgtgcatagtggttttggattagggtttgaacgccttgtgcaatttgctaccggtatgggtaacataagagatgtaattccattccctagaacaccgcttaatgcagagttttaa

SEQ ID NO: 10376 - protein, 480 aa, Croceibacter atlanticus HTCC2559
MKTLKVADVLKSEQYHQEIAVNGWVKAFRSNRFLALNDGSTINNLQCVIDFENLPEDILKEINIGAAVRIKGILEESEGAGQRVEIQVKDIKIEGVANPEDVKLTILSPKRHSLEKLREQAHLRVRTNTGAAVMRLRSKLSFAVHKYFQDNGFYYVNTPIITGSDAEGAGEMFKVTAMDLKNPAKNEDGSINYKEDFFGKETNLTVSGQLEAETFALGLGQVYTFGPTFRAENSNTSRHLAEFWMIEPEVAFCDLAGNMDLAEDFIKYVIGYVLENCDEDLEFLENRLVQEDKSKPQAERSDMLLRDKLKFVLENNFKRVSYTEAIDILKSSKPNKKKKFKYIIEEWGADLQSEHERYLVEKHFKCPVILFDYPANIKAFYMRLNEDGKTVRAMDILFPGIGEIVGGSQREERLDVLKEKMTALDIPEEELWWYLDTRKFGTCVHSGFGLGFERLVQFATGMGNIRDVIPFPRTPLNAEF

SEQ ID NO: 10377 - DNA, 1443 bp, Dokdonia donghaensis MED134
  CDS (1)..(1443): transl_table=11
atgacacatacacctatagtagaattactgagtagtgattctattcatcaagaatttaccgtaaaagggtgggtacgatcttttcgtgcaaaccagtttgtagctcttaatgatggctctacgataaataacctacagtgtgtggttgattttgaaaatacagatcctgcgttacttaaacgtattaccgtaggtgctgcagtggctattactggtaccctagaagaaagtcagggtggaggacaacgcgttgagattaaagtaaaagaagtagagatagaaggtgatgcagatccagaggagcttaaaaaaaccatcttatcgcctaagcgtcacacgctagaaaagctacgtgagcaagcacacctaagagtacgtacaaatacctttggggcgattatgcgtttacgctctaagctctcttttgcaatacacgagtactttaataaaaacggatactaccacgcacacacacctattataactggtagtgatgcagagggtgctggtgagatgtttcgcgtaagcgcactagatccagaaaacccaccacgtaaggaagatgggactatagattatagcaaagacttttttggcaaagagaccaatcttacggtatctggacagctagagggagagacctacgcgctaggtctaggtaagatttacacctttggacctacctttagagcagaaaatagtaatacctcgcgtcaccttgcagagttctggatggtagagccagagatggctttttgtgatcttgatggcaatatggacctcgccgaagattttatcaagtatgtgataagctacgcgctagaaaactgccaagacgaccttgcctttctagaagaaagacagactaaagaagaccagtctaagcctgcggcagagcgtgcggcaatgccactacgtgagaaacttcactttatagtagataacaactttaaacgtgtgagctacacagaggcgatagacatcttacgtaatagtaagcctaataagaagaagaaatttaaataccctataaacgaatggggcgcagatttacagtctgagcacgagcgttttctggtagagaagcactttaagtgccctgtgatcttatttgactacccggcaaatatcaaagctttctatatgcgccttaacgaagatggtaagaccgtacgagcgatggatgtactcttcccaggtataggtgagatggtaggaggatcacaacgtgaggaacgtctggatgtgcttaaagaaaaaatggcagccttagacatctctgaggaggagctttcttggtacctagacacgcgtaagttcggaacgtgtacacatagtggttttggccttggctttgagcgccttgtactctttgtgactggtatgacaaacatacgcgacgtgataccttacccacgttttccgggtcacgcagagttttag

SEQ ID NO: 10378 - protein, 480 aa, Dokdonia donghaensis MED134
MTHTPIVELLSSDSIHQEFTVKGWVRSFRANQFVALNDGSTINNLQCVVDFENTDPALLKRITVGAAVAITGTLEESQGGGQRVEIKVKEVEIEGDADPEELKKTILSPKRHTLEKLREQAHLRVRTNTFGAIMRLRSKLSFAIHEYFNKNGYYHAHTPIITGSDAEGAGEMFRVSALDPENPPRKEDGTIDYSKDFFGKETNLTVSGQLEGETYALGLGKIYTFGPTFRAENSNTSRHLAEFWMVEPEMAFCDLDGNMDLAEDFIKYVISYALENCQDDLAFLEERQTKEDQSKPAAERAAMPLREKLHFIVDNNFKRVSYTEAIDILRNSKPNKKKKFKYPINEWGADLQSEHERFLVEKHFKCPVILFDYPANIKAFYMRLNEDGKTVRAMDVLFPGIGEMVGGSQREERLDVLKEKMAALDISEEELSWYLDTRKFGTCTHSGFGLGFERLVLFVTGMTNIRDVIPYPRFPGHAEF

SEQ ID NO: 10379 - DNA, 1440 bp, Leeuwenhoekiella blandensis MED217
  CDS (1)..(1440): transl_table=11
atgagaaaaacaattgtacacattttaaaagaagagcccaaggggcacgaacttaccgtaaaaggatgggtgaggtcgtttagagccaaccgttttattgcgctaaatgatggttctacgcttaataatttacagtgtgtagttgattttgaaaatacagatcctgagcttttaaaacgtattaccgtaggtgctgcgattgccgtgaccggaaatcttatcgaaagtcaaggtggtggtcaagctgttgaagttgaagctaaggaaattaaaattcttggggatgcagatcctgaagaggtaaagaaaaccatcttgtcgcctaagcgtcatacgttagagaagttgcgcgagcaggcccatttgcgcgtacgtaccaatacctttggagcagtgatgcgtttgcgttcgcaattgagttttgccgtgcatcaatactttcagaaagaaggtttttattatgtaaatactccgattgtaaccggtagtgatgcagaaggtgcgggtgaaatgtttaaagtaacggctttagacatgaaaaatccgccgaaggatgaagacggaaacattgattataaaaaggatttcttcggaaaggaaaccaatttgacggtttctggtcagttagaaggagaaacctatgcgttaggtctgggacagatttacacttttggaccaacctttagagctgaaaattcaaacacgagccgtcaccttgcagaattctggatgatcgagccggaagttgcattttgcgatctggatatgaatatggatctggcggaagactttatcaaatacgtgattcagtttgtgatggataactgccaggatgatctaaagtttttagaaaaccgattgattcaggaagataagagcaagcccgaagcagagcgtgcgccaatgccgttacgtgagaagttgaagtttgttttggagaataactttaagcgcgtgagctacacagaggcaatcgaaattcttaagaattcaaaaccaaataaaaagaaaaagttcaaatatcctattgaagcatggggtgccgacttgcaaagtgagcacgagcgttttcttgtagagaagcacttcaagtgcccggtgatcttatttgactatcctgcaaatatcaaagccttttatatgcgtctcaacgaagacggtaaaaccgtacgcgcgatggatattctcttcccgggaattggtgagatcgttggaggttcgcagcgagaagagcgtttagaagtgttgcaagagaaaatggcagcgctagacatcccagaagaagaactgtggtggtatctagacacccgtcgttttggtagttgtgtgcacagtggttttggtctcggttttgagcgtctggtattattcgcaaccggaatgactaatattagagacgtgataccttatccacgttttcctcaaaacgcagaattctaa

SEQ ID NO: 10380 - protein, 479 aa, Leeuwenhoekiella blandensis MED217
MRKTIVHILKEEPKGHELTVKGWVRSFRANRFIALNDGSTLNNLQCVVDFENTDPELLKRITVGAAIAVTGNLIESQGGGQAVEVEAKEIKILGDADPEEVKKTILSPKRHTLEKLREQAHLRVRTNTFGAVMRLRSQLSFAVHQYFQKEGFYYVNTPIVTGSDAEGAGEMFKVTALDMKNPPKDEDGNIDYKKDFFGKETNLTVSGQLEGETYALGLGQIYTFGPTFRAENSNTSRHLAEFWMIEPEVAFCDLDMNMDLAEDFIKYVIQFVMDNCQDDLKFLENRLIQEDKSKPEAERAPMPLREKLKFVLENNFKRVSYTEAIEILKNSKPNKKKKFKYPIEAWGADLQSEHERFLVEKHFKCPVILFDYPANIKAFYMRLNEDGKTVRAMDILFPGIGEIVGGSQREERLEVLQEKMAALDIPEEELWWYLDTRRFGSCVHSGFGLGFERLVLFATGMTNIRDVIPYPRFPQNAEF

SEQ ID NO: 10381 - DNA, 1398 bp, Congregibacter litoralis KT71
  CDS (1)..(1398): transl_table=11
atgacagcgttttcacgagttttagatttattgcgcaggtcccctgacgaggggggcgaggtggcggtgcgaggctggctgagaagcaagcgtgactccaaggcgggtatctcttttctggccatccacgatgggtcgtcttttgatgcgattcaggcggtggtgcctgcggagctcgagaattacgagagcgagatcctggcgctgaacaccggctgctccgttgaagtgaagggcaacctggtgccgtctcagggcaagggccagagcgtagaaattcaggcgagtgaggttcgggtgctgggttgggtagacgaccccgagacctaccccgtggccaaaaaacgccacacttttgaatacctccgaacccaggctcatctgcgtccccggacaaatacctttggtgctatcacccgcgtgcgacacaccctggccaacgccgtgcacagctacttccatgacaacggcttctattgggtgaacacgcccatcattaccggcagtgactgtgagggcgccggggagctgtttcgcgtcagtactttggacatgagcaatatcccccgcacccccgacggggccgtggactatacccaggacttttttggcggtgatgcctttctcaccgtgagcggtcagttggccgtggaatcttactgcctgtccatgagtaaggtgtacaccttcgggcccaccttccgcgcggaaaacagcaacaccagccgccacctggcggagttctggatgatcgaacccgaggtcgcctttgcggacctcgcagacaatgcagatctggcagagtcactgctcaaatatgtattccgccgcgtattgaatgagtgcgaggacgatcttgctttcttcaaccagcgcatcgacaacacggtgattgaccgtctcaccgccatggtcgaccagaactttgagcgcatggactacagcgatgcgatcaccatcctcaaaaatagcggcaagcagttcgagtttcccgtggagtggggcgttgatttagccagtgagcatgagcgctttctttgtgaggagcacgtagggcgccccgtcgtgctcatgaactatccccgggaaatcaaagcgttttacatgcgtctcaacgatgatgaaaaaaccgtggcggcgatggacgtgttggcgccgggtatcggggaaatcatcggtggcagccagcgcgaggagcgactggatgtactggatgcacggatggattcacagcttcgcgaagaactgtggtggtaccgcgacttacggcgttacggtaccgtgccccactcgggctttggtctgggcttcgagcgccttatcaactatgtcacgggtatggaaaacattcgtgacgctattcccttcccccgcacgccgggtaacgcacacttctag

SEQ ID NO: 10382 - protein, 465 aa, Congregibacter litoralis KT71
MTAFSRVLDLLRRSPDEGGEVAVRGWLRSKRDSKAGISFLAIHDGSSFDAIQAVVPAELENYESEILALNTGCSVEVKGNLVPSQGKGQSVEIQASEVRVLGWVDDPETYPVAKKRHTFEYLRTQAHLRPRTNTFGAITRVRHTLANAVHSYFHDNGFYWVNTPIITGSDCEGAGELFRVSTLDMSNIPRTPDGAVDYTQDFFGGDAFLTVSGQLAVESYCLSMSKVYTFGPTFRAENSNTSRHLAEFWMIEPEVAFADLADNADLAESLLKYVFRRVLNECEDDLAFFNQRIDNTVIDRLTAMVDQNFERMDYSDAITILKNSGKQFEFPVEWGVDLASEHERFLCEEHVGRPVVLMNYPREIKAFYMRLNDDEKTVAAMDVLAPGIGEIIGGSQREERLDVLDARMDSQLREELWWYRDLRRYGTVPHSGFGLGFERLINYVTGMENIRDAIPFPRTPGNAHF

SEQ ID NO: 10383 - DNA, 1434 bp, Flavobacteriales bacterium HTCC2170
  CDS (1)..(1434): transl_table=11
atgaaatcttcaaatgtaaaagaactgctttccaatgctccagaacagcaggaagttgtagtaaatggttgggtcaagacttttagaagcaataggtttattgctctgaatgatgggtctacaataaataatattcaatgtgttgttgactttgaaaatctagaggaagaagttttaaagcaaataaatacaggtgcggcattaaaaatcagtggaatcttggttgaaagtcaaggcagaggacaaagtgtggaaattcaagtcaacgatatccaagttcatggtggtgcagatcctgaagcttatcctatacaacccaaaaagcattctttggagttcttacgtgaaaaagctcatttaagggtaagaacaaacacctttgcggctgtcatgagagtacgttccgctttggcgtttgctatacatcagtattttagacagaatgatttctactactttcatgcgccaatagtaacgggttctgatgcagaaggagccggagaaatgttcagagtaaccactttggatagtaaaaaccctcccctgaatgaagaaggagaggttaattacaaagaagatttctttggaaaagaaaccaacttaaccgtttccgggcagttagaggcagaagcctatgccatgggcttgggtaaagtatatactttcggacctactttcagggcggaaaattcaaatacatccagacatcttgctgagttttggatggtagaaccagaaatggcattctatgatttggatgccaatatggatttagctgaagacttcataaaaaatgtcattgcttatattttggagcattgtaatgaagacctgcaattcctggaaaaaagattactggatgaagaaaaatcaaaaccacaggcagaacggagtgatatgccactaattgaaaaacttaagttcatttgtgataatgaatttaagcgggtgacctataccgaagcaatagacattttaagaaacagcaaacccaacaaaaagaagaaatttaagtatccgatcaacgaatggggagccgacctgcaaagtgaacatgagcgttttctagttgagaagcattttaaatgccctgttatattgttcgattatccggcaaaaataaaggcgttttatatgcgattgaacgaagatggcaaaacggtacgcgccatggacattctttttcctggtattggggaaatcgttggcggatcacaacgtgaagaacgcttggatgttctaaaagaaaaaatagctgacctaggaattgatgaagaagaattgtggtggtaccttgatcttagaaagtttggtaccgccgaacacagcggatttggtttagggtttgaacgtttggtactttttgccacaggcatgggtaatattcgcgatgtaattccgtttccccgaacaccccaaaatgcggagttctaa

SEQ ID NO: 10384 - protein, 477 aa, Flavobacteriales bacterium HTCC2170
MKSSNVKELLSNAPEQQEVVVNGWVKTFRSNRFIALNDGSTINNIQCVVDFENLEEEVLKQINTGAALKISGILVESQGRGQSVEIQVNDIQVHGGADPEAYPIQPKKHSLEFLREKAHLRVRTNTFAAVMRVRSALAFAIHQYFRQNDFYYFHAPIVTGSDAEGAGEMFRVTTLDSKNPPLNEEGEVNYKEDFFGKETNLTVSGQLEAEAYAMGLGKVYTFGPTFRAENSNTSRHLAEFWMVEPEMAFYDLDANMDLAEDFIKNVIAYILEHCNEDLQFLEKRLLDEEKSKPQAERSDMPLIEKLKFICDNEFKRVTYTEAIDILRNSKPNKKKKFKYPINEWGADLQSEHERFLVEKHFKCPVILFDYPAKIKAFYMRLNEDGKTVRAMDILFPGIGEIVGGSQREERLDVLKEKIADLGIDEEELWWYLDLRKFGTAEHSGFGLGFERLVLFATGMGNIRDVIPFPRTPQNAEF

SEQ ID NO: 10385 - DNA, 1434 bp, Polaribacter irgensii 23-P
  CDS (1)..(1434): transl_table=11
atgataaaaaatacagtaaaagaattattaatttctggacaaatattgcaagaggtggttctcaagggatgggttagaacctttagaagtaatcgttttattgctctaaatgatggttcaactattcacaacatacaatgtgtaattgactttgaaaacacttcagaagaaaccttaaaaagaatcacaaccggagctgcagtttgcgtaaaaggaactctgttagaaagtcaaggaaaaggacagtctttagagctacaggttcttgaaatagaaattttaggagattctaatcctgacgaatatccgattcaacccaagaaacatagttttgaattcttaagagaaaatgcgcacttgcgcattcgtacaaacacttttagtgctgtaatgagagtgcgctctaagctctcttttgcagtgcacaaatactttcaagacaatggttttaattacgtaaacacacctattgttacaggctctgatgcggagggtgctggagaaatgtttagagttacttctttcgaagataacaaagcaccagttacagaagatgggaaaatagattataccaaagacttttttggaaaagaaaccaatcttaccgtttcaggacaactagaagcagaagcctatgccatggctctcggaaaggtatacacttttggccctacttttagagcggaaaactcaaatactacgcggcatttagcagaattttggatgatagagcccgaagttgcctttatggacttggatggtaacatggacttagctgaagatttcataaaatcagttttaacatatgttttagaacactgtaaagacgatttagcctttttagatgaacgttttgtgcaagaagaaaaagcaaagccacaactgcaaagaagcgagatgagtctattagaaaaactaaaatttgttgccgacaataattttaaaagggtctcttacacagaagcaatagacattctgagaaactcgaagccaaataaaaagaaaaaatttcaataccctattaacgcatggggagcagatttacaatctgaacatgagcgttttttagttgaaaaacactttaaatgtccagtgatactctttgactacccagccgatattaaagcattttatatgcgtttaaatgaagatggaaaaacagttagagccatggacgttttatttcctggaattggagaaatggttggtggtgcacaacgtgaggaacgctatgatgtattaatagcaaaaatgaaagcgatgcatattgacgagaaagagctttggtggtatttagatttgagaaaatttggaacagccgtgcattctggatttggactaggatttgaaagattggttcaatttaccacagggatgggaaacataagagatgttataccctttccgagaacaccacaaaatgcagatttttaa

SEQ ID NO: 10386 - protein, 477 aa, Polaribacter irgensii 23-P
MIKNTVKELLISGQILQEVVLKGWVRTFRSNRFIALNDGSTIHNIQCVIDFENTSEETLKRITTGAAVCVKGTLLESQGKGQSLELQVLEIEILGDSNPDEYPIQPKKHSFEFLRENAHLRIRTNTFSAVMRVRSKLSFAVHKYFQDNGFNYVNTPIVTGSDAEGAGEMFRVTSFEDNKAPVTEDGKIDYTKDFFGKETNLTVSGQLEAEAYAMALGKVYTFGPTFRAENSNTTRHLAEFWMIEPEVAFMDLDGNMDLAEDFIKSVLTYVLEHCKDDLAFLDERFVQEEKAKPQLQRSEMSLLEKLKFVADNNFKRVSYTEAIDILRNSKPNKKKKFQYPINAWGADLQSEHERFLVEKHFKCPVILFDYPADIKAFYMRLNEDGKTVRAMDVLFPGIGEMVGGAQREERYDVLIAKMKAMHIDEKELWWYLDLRKFGTAVHSGFGLGFERLVQFTTGMGNIRDVIPFPRTPQNADF

SEQ ID NO: 10387 - DNA, 1506 bp, Flavobacteria bacterium BBFL7
  CDS (1)..(1506): transl_table=11
ttggcattccatgtcataaaaattatatttgctgttcttaaaaaactgagaatgcaacatcaaagaattgccacgttattacaagcagaacctagcatgcaggaaataactgtaaaaggttgggtacgtagttttagaaaccagcgatttattgctcttaacgatggctctaccatacataatctacaatgtgttattgaaccagataaccatgatgaagatttattagatcaaattaacgttgccgcagctgttgccgttacaggaactctggttgaaagtgctggtagcggtcaacgtgtagaactgcaagcgactactataaaaatactaggtaccgcagatcgtgaagaagttgctaaaactatcttatcacctaagcgtcataaactagaaacattacgtgaacaagcacatttaagagttcgtacaaatacttttggtgctgtaatgagagtgcgagcagcactatcttttgcggtgcataagtactttcaagaaaacggattttaccaggcacatacacctatcataactggtagtgatgcagaaggtgcaggagaaatgtttcgtctttcaacattagaccctaaaaatccgccattagatgaagaaggtaacatcgattataagcaagacttctttgaaaaagaatctaaccttacagtatcaggacaactagaagctgaaacgtatgcaatgggactaggccaggtttacacgtttggccctacattcagagctgagaattcaaatacttcacgtcatcttgcagaattttggatgattgaacctgaagtggcatttaatgacctagatgccaacatggatctgtctgaagactttattaaatctgtagtaaaatatactattgacaactgtaaagacgacctagagtttttagaaaatagactgatacaggaagacaagagtaaaccacaagctgaacgtagtccaatggaattacgtaaaaaattagagtttattcttaaaaataattttaaacgtgtttcctatactgaagccattgatattttaaagagttctaaacctaataagaaaaagaagttcaagtatcttattgaagaatggggcgcagacttacagagcgaacatgaacgctaccttgttgaaaagcactttgaatgtccagtcatcttatttgactatccggcagatattaaagctttttacatgagattgaatgatccagacagtgaaggtcgtgaaacggtaagagcgatggatattttatttccaggtataggtgaaataataggtggatcacaacgagaagaacgctatgatgtacttaaagagaagatggataccatgggtattcctgaagaagaattatggtggtatctagaaactcgcaaatttggaagtgttacccatagtggttttggactaggatttgaaagactagtgatgtttgttactggtatgagcaatattagagatgtaataccttatccacgcacaccaggtaatgcagagttttaa

SEQ ID NO: 10388 - protein, 501 aa, Flavobacteria bacterium BBFL7
MAFHVIKIIFAVLKKLRMQHQRIATLLQAEPSMQEITVKGWVRSFRNQRFIALNDGSTIHNLQCVIEPDNHDEDLLDQINVAAAVAVTGTLVESAGSGQRVELQATTIKILGTADREEVAKTILSPKRHKLETLREQAHLRVRTNTFGAVMRVRAALSFAVHKYFQENGFYQAHTPIITGSDAEGAGEMFRLSTLDPKNPPLDEEGNIDYKQDFFEKESNLTVSGQLEAETYAMGLGQVYTFGPTFRAENSNTSRHLAEFWMIEPEVAFNDLDANMDLSEDFIKSVVKYTIDNCKDDLEFLENRLIQEDKSKPQAERSPMELRKKLEFILKNNFKRVSYTEAIDILKSSKPNKKKKFKYLIEEWGADLQSEHERYLVEKHFECPVILFDYPADIKAFYMRLNDPDSEGRETVRAMDILFPGIGEIIGGSQREERYDVLKEKMDTMGIPEEELWWYLETRKFGSVTHSGFGLGFERLVMFVTGMSNIRDVIPYPRTPGNAEF

SEQ ID NO: 10389 - DNA, 1401 bp, Psychromonas sp. CNPT3
  CDS (1)..(1401): transl_table=11
atgtcaaaaacagccattgttgatattttcaacagtacattaccgatcggtagtcaagttaccgttaaaggttggatccgtactcgtcgtgattcaaaagcagggatctcttttttagctatctatgatggctcttgttttgatcctatccaagccgttgtacccgctacacttgaaaattatagtaatgatgtattgagcctaacggccggttgtagtgttgaagttactggcgaattagtggaaagcccaggtaaaggccaaagctttgagatccaagcaactaaagttgtggtcgttggctttgtacaagatcctgacacttaccctatgtctgctaaacgtcatagtattgaatatatgcgtgagcatgcacatcttcgtccacgtaccaatatgtttggcgcggtaacccgtgtacgtaactgtttatcacacgcaatccataacttcttttatgagcgtggctttaattggatcagtacccctatcattacaggtagtgactgtgaaggtgccggtgaaatgtttagagtaagcaccctagacttagaaaacttgccaaaaacagctgacggtaaagtagattacaaacaagatttctttggtaaagaaacctttatgacagtatctggtcaattaaatgcagaaacgtatgcctgtgcgctgagtaatgtatatacgtttggtcctactttcagagctgaaaattcacatacgacacgccatcttgcagaattttggatggttgagcctgaaatcgcgtttgctgatcttaatgacgtcgcgcaacttgctgaagatatgcttaaatatgtatttaaagccgtcttagaagagcgtgcggatgacatggccttttttgcacaacgtgtggacaaagaagctatctctcgattagagaacatgatcaactctgactttgtgcgtatggattacagcgaagcgattgaaattttagaaaattgtggtcaagattttgagtaccctgtaaaatggggcgttgatttacaatcagagcatgagcgttaccttgctgaaaagcacgtgggagcgccaatcattttacaaaattatccgaaagacattaaagccttctacatgaaattaaatgcagacggtaaaacagtggctgcaatggatgttatcgcaccgggtattggtgagatcatcggtggtagtcaacgtgaagagaatttagaagcgcttgataaacgccttgctgaaatgggtcttaataaagatgattacagctggtaccgcgacttacgtaagtatggcaccgttcctcatgcaggctttggtttaggttttgaacgtttagtctcttacgtgaccggtgtacaaaatatccgtgatgtaatagccttccctcgcgcgccaggtagtgcagacttttaa

SEQ ID NO: 10390 - protein, 466 aa, Psychromonas sp. CNPT3
MSKTAIVDIFNSTLPIGSQVTVKGWIRTRRDSKAGISFLAIYDGSCFDPIQAVVPATLENYSNDVLSLTAGCSVEVTGELVESPGKGQSFEIQATKVVVVGFVQDPDTYPMSAKRHSIEYMREHAHLRPRTNMFGAVTRVRNCLSHAIHNFFYERGFNWISTPIITGSDCEGAGEMFRVSTLDLENLPKTADGKVDYKQDFFGKETFMTVSGQLNAETYACALSNVYTFGPTFRAENSHTTRHLAEFWMVEPEIAFADLNDVAQLAEDMLKYVFKAVLEERADDMAFFAQRVDKEAISRLENMINSDFVRMDYSEAIEILENCGQDFEYPVKWGVDLQSEHERYLAEKHVGAPIILQNYPKDIKAFYMKLNADGKTVAAMDVIAPGIGEIIGGSQREENLEALDKRLAEMGLNKDDYSWYRDLRKYGTVPHAGFGLGFERLVSYVTGVQNIRDVIAFPRAPGSADF

SEQ ID NO: 10391 - DNA, 1443 bp, Psychroflexus torquis ATCC 700755
  CDS (1)..(1443): transl_table=11
atgataattaaaaaagtagttgagcttctcgaaagcgatcaagttctacaggaatataaagttaatggttgggtgagagcctttaggagtaatcggtttatcgctttaaacgatggatcttgtttagaaaacttacaatgcgtcgtcgattttaaaaacaccgatgatcaagttttaaggaaagtaacaacaggtgctgcgatttctgtttctggtactttaaaagaaagtgagggaaaaggacaaagtgtagaattggaagtgaaatccatcaacattcttggagaagcccatccagaagaagtgaagaaaaccattcttcaacctaaaaagcactcttttgaaaaattaagagagcaagcccatttaagagtaagaacaaatacgtttggtgcgataatgagagtgcgatccaaattatcttttgctgttcaccaatactttaatgataacggtttcttttatgtgaacacgcctatcgttactggtagtgatgctgagggagcaggagaaatgtttaaagtcaccaacttagacttaaaagacccaccaaaaactaaagatggcgaaattgattattcccaagatttttttggaaaagaaaccaatttaacggttagcggccaattggaggctgagacttacgctatgggcttaggtaaagtatacacctttggacccacctttagagcagaaaattccaatacaactagacacctagcggaattctggatgattgaaccagaagtagccttttgtgatttaaaaggcaatatagatttagccgaagatttcattcaacaggtcttgaaatatatcacagagcattgtaagtcagatttagaattcttagaaaacagacttcttgaagaggaaaaatctaagccagagaaagacagatcaccgatgcctctgcgtgaaaaaatagattttgtcctcaaaaataatttcaaaagagtttcctatacagaggctattgatatattaagaaattcgaaacctaacaaaaagaagaaattcagttatatcattaaagaatggggggcagatttacaaagtgagcacgaacgctatctcgtagagaaacattttgaatgtcccgtagtgatttatgattaccccgctgatatcaaagccttttacatgcgactgaatgacgatggtaaaaccgtgagagccatggatgttcttttccccggtattggcgaaattgcaggaggttcacaaagagaagagcgctacgatgttttgctttctaaaatgcgagaaattggaatagatgaaaaagagttgtggtggtatttagacaccagaaaatttggaacttgtgttcactctggctttggactaggctttgagcgccttgtgttgtttgctacaggaatgtcgaacataagagatgtcattccttaccctagaagccctcaaaatgcagaattttaa

SEQ ID NO: 10392 - protein, 480 aa, Psychroflexus torquis ATCC 700755
MIIKKVVELLESDQVLQEYKVNGWVRAFRSNRFIALNDGSCLENLQCVVDFKNTDDQVLRKVTTGAAISVSGTLKESEGKGQSVELEVKSINILGEAHPEEVKKTILQPKKHSFEKLREQAHLRVRTNTFGAIMRVRSKLSFAVHQYFNDNGFFYVNTPIVTGSDAEGAGEMFKVTNLDLKDPPKTKDGEIDYSQDFFGKETNLTVSGQLEAETYAMGLGKVYTFGPTFRAENSNTTRHLAEFWMIEPEVAFCDLKGNIDLAEDFIQQVLKYITEHCKSDLEFLENRLLEEEKSKPEKDRSPMPLREKIDFVLKNNFKRVSYTEAIDILRNSKPNKKKKFSYIIKEWGADLQSEHERYLVEKHFECPVVIYDYPADIKAFYMRLNDDGKTVRAMDVLFPGIGEIAGGSQREERYDVLLSKMREIGIDEKELWWYLDTRKFGTCVHSGFGLGFERLVLFATGMSNIRDVIPYPRSPQNAEF

SEQ ID NO: 10393 - DNA, 1374 bp, Desulfuromonas acetoxidans DSM 684
  CDS (1)..(1374): transl_table=11
atgcgattaaaaaaactgctcgcagccgaagcaccacagcaaaacgttgaagtgcgaggctgggtgcgcaccctgcgtgccagcaaagaggtgtgttttattgagctgaatgacggctcgtgctttgcctcgctgcaactggtggcggatcgcaccgtggacaactttgccgagctggcccacatcggcaccggcgcctgcatcaaggccagcggcaacctggttgattcaccagccaaagggcaacgctgggaactacacgtcagcgaactgaccgtcatcggcaacgccgacccgagctatccgctgcagaaaaaacgccacacgtttgaatacctgcgcagtatcgcccatcttcggccgcgttccaatacctttggcgcggtgtttcggctgcgcaatgcgctctcttacgcggtgcatcaatttttccagcagcgcgactttctctacgtgcacacgccgatcattacggccagcgattgcgaaggtgccggagagctgtttcgtgtgaccacccttgatccggcaaacccaccgaaaaacaacggtcgcatcgactggcagaaggatttcttcggcgcacgcaccggcctgaccgtcagcggccagttgcagggcgaactgtttgccacggcattcagcgacatttacacctttggcccaaccttccgcgcggagaactccaacaccagccgccacgcgtcggagttctggatgattgaaccggagatcgcttttgctaacctggccgacgactgccaattggcggaagactttttacgttatctggtcaaatacgctctggaacactgcgcagaagatctgcaatttttcaatgatcgcattgaaaaaggtttgctcgacaagctgaccgccctggccgatgcgactttcagcaccatgacctataccgaagcgattgagcagctgaaaaacagtggtcaaaactttgaattcccggtggaatggggattggatctgcaatcggagcatgagcgctacctgtgtgagcaggtggtcaacggcccgttgtttgtcaccgactaccccaaggagatcaaggcgttttacatgcgcgccaacgaggatggcaaaaccgtggcagccatggatctgctggtgccgcgcgtcggtgaaatcatcggcggcagccaacgtgaagaacggctcgacgtgctgaccgcccggatggaagagctggacatggcaccggaaagcctcgactggtatctcgacattcgccgctgggggagttgcccgcatgccgggtttggtcttgggtttgagcggctgatcatgtatttgagcggtatggagaatatccgtgatgtgattccgtttccgcgtacgccgggtcatgcggagttttag

SEQ ID NO: 10394 - protein, 457 aa, Desulfuromonas acetoxidans DSM 684
MRLKKLLAAEAPQQNVEVRGWVRTLRASKEVCFIELNDGSCFASLQLVADRTVDNFAELAHIGTGACIKASGNLVDSPAKGQRWELHVSELTVIGNADPSYPLQKKRHTFEYLRSIAHLRPRSNTFGAVFRLRNALSYAVHQFFQQRDFLYVHTPIITASDCEGAGELFRVTTLDPANPPKNNGRIDWQKDFFGARTGLTVSGQLQGELFATAFSDIYTFGPTFRAENSNTSRHASEFWMIEPEIAFANLADDCQLAEDFLRYLVKYALEHCAEDLQFFNDRIEKGLLDKLTALADATFSTMTYTEAIEQLKNSGQNFEFPVEWGLDLQSEHERYLCEQVVNGPLFVTDYPKEIKAFYMRANEDGKTVAAMDLLVPRVGEIIGGSQREERLDVLTARMEELDMAPESLDWYLDIRRWGSCPHAGFGLGFERLIMYLSGMENIRDVIPFPRTPGHAEF

SEQ ID NO: 10395 - DNA, 1410 bp, Stigmatella aurantiaca DW4/3-1
  CDS (1)..(1410): transl_table=11
atgagcgtcatgcaggtggtcagtgtcaagaaggcgctggggaactcgatccccccggattcgaaggtggaggttcgcggctgggtgcgtacccggcgggactcgaaggcgggggtcagcttcatcaacgtcagcgatggctcctgcttcgatccgatccaggtggtcgcgccgaactcgctccccaactacgagaaagaggtgctgcacctcacggcgggctgctccgtcatctgccgtggcacgctcgtgcggtcgcagggcaaagggcaggcctacgaaatccaggcggaggaggtgcaggtggtcggcttcgtggaggacccggacacgtaccccatccagcccaagcagcacacgctggagttcctgcgcgaggtggcgcacctgcgttcgcgcaccaacacgttcggggcgatcagccgggtgcggcacagcgcggcccaggccatccatcgctttttcagcgaggagggcttcttctgggtgaacacgcccatcatcaccgccagcgacaccgagggcgctgggcagctgttccgcgtgtccacactggacgcggtgaatcctccgcgcacggatgctgggaagatcgactggagcaaggacttcttcggcaaggagtcctacctcaccgtctctggccagctcaatgtggagacgtactgctgcgcgctgtcgaaggtgtacacgttcggccccaccttccgcgcggagaactcgaacaccacgcgccacctcgccgagttctggatgatcgagccggaggtcgccttcgcggacctcaacgacaacgcgacgctcgccgagcggttcctcaagtatgtcttcaaggcggtgctcgccgagtgcgggcccgacatgaagttcttcgaggagcgccagcagaagggcgtcatcgagcgcatggagaagttcagcgattcgaccttcgagcggatcgaatacaccgaggccatcgacatcctgaagaaggccaagaagaagttcgattacgcgccggagtggggcaatgacttgcagacggagcacgagcgctacctgacggaggagcacgtgggccgtcccgtggtggtgatgaactacccggagaagatcaagtccttctacatgcgcctgaacgaagacgggaagacggtggcggcgatggacgtgctggcgccgggcattggcgagatcatcggaggcagccagcgcgaggagcgcttgaatgtctttgaccagcgggtggcccagttcggcctgaatcccgagcactaccagtggtaccgagacctgcggcgctatggcacggtgccgcacgcgggcttcggtctcggattcgagcgcctgctggtctacatgtgcggcctccagaacatccgggacgcgattccgttcccgcgtgtgccgggatgggctcagttctga

SEQ ID NO: 10396 - protein, 469 aa, Stigmatella aurantiaca DW4/3-1
MSVMQVVSVKKALGNSIPPDSKVEVRGWVRTRRDSKAGVSFINVSDGSCFDPIQVVAPNSLPNYEKEVLHLTAGCSVICRGTLVRSQGKGQAYEIQAEEVQVVGFVEDPDTYPIQPKQHTLEFLREVAHLRSRTNTFGAISRVRHSAAQAIHRFFSEEGFFWVNTPIITASDTEGAGQLFRVSTLDAVNPPRTDAGKIDWSKDFFGKESYLTVSGQLNVETYCCALSKVYTFGPTFRAENSNTTRHLAEFWMIEPEVAFADLNDNATLAERFLKYVFKAVLAECGPDMKFFEERQQKGVIERMEKFSDSTFERIEYTEAIDILKKAKKKFDYAPEWGNDLQTEHERYLTEEHVGRPVVVMNYPEKIKSFYMRLNEDGKTVAAMDVLAPGIGEIIGGSQREERLNVFDQRVAQFGLNPEHYQWYRDLRRYGTVPHAGFGLGFERLLVYMCGLQNIRDAIPFPRVPGWAQF

SEQ ID NO: 10397 - DNA, 1398 bp, Alteromonadales bacterium TW-7
  CDS (1)..(1398): transl_table=11
atgagccatttagcgatttcagagctattaaaaggcaatgttgcggtagacagccaagtaacaattaaaggctggatccgtactcgccgcgattcaaaagcaggaatatcatttttagccgttcatgacggttcgtgttttgatcctattcaagcggtagttcctaattcactaaataattatgatgaagttactagcttaacagccggttgttctgtatcggttactggtgttttagttcaatctgcgggcaaaggccaatcgtttgaaattcaagcgaatacggtcactgtattaggttgggtagaaaacccagattcatacccaatgtcggcaaaacgccacagcattgaatacttacgtgaacacgctcaccttcgcccacgtactaacatgattggcgcagtaacacgtgtacgtaactgtttagcacaagccattcaccgtttttatcacgagcaaggttactactggatcagcacaccaattatcacagcaagtgactgtgaaggcgctggcgaaatgttccgtgtatctacacttgatatgcaaaacttaccgcgtacagataaaggcgatgttgattacagtgaagacttttttggaaaagaagcattcttaactgtatctggccagttaaacggtgaaacttacgcgtctgcaatgtcaaaaatttatacgtttggccctactttccgtgcagaaaattcaaatacttcacgccacttggccgagttttggatggttgaacctgaagtagcatttgcagatttagaagacattgcaaagcttgctgaaaatatgcttaagtacgtatttaaagcggtacttgaagagcgccgtgacgacatggagttttttgctcaacgtatcgaaaaaactgcgattagccgtttagaagaatttgttgaaaaagactttgcacaagttgattacacagacgcagtagaaattcttaaaaactgcggtaagaaatttgagtttgatgttgaatggggtgtagatttacagtctgagcacgaacgttacctagcagaagaacactttaaagcaccggtagtaattaaaaactacccacgtgatattaaagcattttacatgcgccaaaacgaagacggcaaaactgttgccgctatggacgtagttgcaccgggtattggtgaaatcattggtggttctcaacgtgaagagcgccttgacgtacttgatgcgcgccttgaagaaatgggcttaaacaaagaagattacagctggtaccgcgacctacgtaaatacggtagtgtgccacattcaggctttggtttaggctttgaacgcttagttgcttatgtaacaggtatgggcaatgtacgtgatgtaatcgccttccctcgtacgaaaggcagcgcaacttactaa

SEQ ID NO: 10398 - protein, 465 aa, Alteromonadales bacterium TW-7
MSHLAISELLKGNVAVDSQVTIKGWIRTRRDSKAGISFLAVHDGSCFDPIQAVVPNSLNNYDEVTSLTAGCSVSVTGVLVQSAGKGQSFEIQANTVTVLGWVENPDSYPMSAKRHSIEYLREHAHLRPRTNMIGAVTRVRNCLAQAIHRFYHEQGYYWISTPIITASDCEGAGEMFRVSTLDMQNLPRTDKGDVDYSEDFFGKEAFLTVSGQLNGETYASAMSKIYTFGPTFRAENSNTSRHLAEFWMVEPEVAFADLEDIAKLAENMLKYVFKAVLEERRDDMEFFAQRIEKTAISRLEEFVEKDFAQVDYTDAVEILKNCGKKFEFDVEWGVDLQSEHERYLAEEHFKAPVVIKNYPRDIKAFYMRQNEDGKTVAAMDVVAPGIGEIIGGSQREERLDVLDARLEEMGLNKEDYSWYRDLRKYGSVPHSGFGLGFERLVAYVTGMGNVRDVIAFPRTKGSATY

SEQ ID NO: 10399 - DNA, 1392 bp, Lyngbya sp. PCC 8106
  CDS (1)..(1392): transl_table=11
atggcgacgcgacgtattgcagaaatactcagaagtggtcaaccggatgaagcgctaacggttcaaggttgggtacgaaccaagcgagagttcaaagaatttgcttttgtcgaagttaatgatggttctgcgatggcgaacctacaagtagttcttaatcttgatttagagaactatcaaaatattctcaaacagctaaatacaggcgcgtctgtggaggttgtcggaacgttggtggagtctccagccaaaggacaacgagtggaacttaaagctgagtctgtgattgtttacggtgatgctgaccccgaaacttatgttttgcagaaaaagcgtcactcttttgaattcttacgcactattgctcatttacgagcgcgtactaatacttatggtgccgtttttcgggtgagaaatgcttgttctgcggcggttcatcaattctttcaagaacggggttttttatggattcatactccgattattaccgcgagtgattgtgaaggtgcaggagaaatgtttggggtgacaaatttagacttcaaaaatttaccgttaactgaatcaaaggaagtagattttagtcgagatttctttggaaaaccgacttttttaaccgttagtggtcagttacaagcagaaataatggcgttggcgtttggcaatgtttacacatttgggccgacgtttcgcgctgaaaattctaatacttctcgccatttagctgagttttggatgattgaaccggaaatggcattttgtgatttagaaggcaatatggacttggctgaagatttcttgaaatacatttttaagtttgtcttagaaaaatgcccggaagatatggagtttttcaataagcggattgataaaacggtcttagagacggctgacaatattatcaataatcagtttgaacgtctaacctatacagatgccatcaaactgttagaaaaagccgataaaaagtttgaatttccggtgagttggggattggatttgcagtcagagcatgaacgctatctcgccgaagacttgtttaaaaaacctgtgattgttaccgattatcctaaagatatcaaagcgttttatatgcggttgggggatgacggaaaaaccgttagggcgatggatgtattagctccaaaaattggggaaattattggcggttctcaacgggaagaacgcttagatgttcttgaaaatcgcatgaaagaaatggatgtcaattctgaagaactttggtggtatttggagttgagaaaatatggaactgttcctcatgcgggatttggtttaggctttgaacgagtggttcaatttatgacgggaatggctaatattcgagatgtaattcctttccctagagcgccattaagtattgatttttaa

SEQ ID NO: 10400 - protein, 463 aa, Lyngbya sp. PCC 8106
MATRRIAEILRSGQPDEALTVQGWVRTKREFKEFAFVEVNDGSAMANLQVVLNLDLENYQNILKQLNTGASVEVVGTLVESPAKGQRVELKAESVIVYGDADPETYVLQKKRHSFEFLRTIAHLRARTNTYGAVFRVRNACSAAVHQFFQERGFLWIHTPIITASDCEGAGEMFGVTNLDFKNLPLTESKEVDFSRDFFGKPTFLTVSGQLQAEIMALAFGNVYTFGPTFRAENSNTSRHLAEFWMIEPEMAFCDLEGNMDLAEDFLKYIFKFVLEKCPEDMEFFNKRIDKTVLETADNIINNQFERLTYTDAIKLLEKADKKFEFPVSWGLDLQSEHERYLAEDLFKKPVIVTDYPKDIKAFYMRLGDDGKTVRAMDVLAPKIGEIIGGSQREERLDVLENRMKEMDVNSEELWWYLELRKYGTVPHAGFGLGFERVVQFMTGMANIRDVIPFPRAPLSIDF

SEQ ID NO: 10401 - DNA, 1392 bp, Nodularia spumigena CCY 9414
  CDS (1)..(1392): transl_table=11
atgttaaaccgacgaattgccgaagtcttgcggagtggtgaacctgatgattctctcgttattcaaggctgggtaagaacgaaacgcgagttaaaaggatttgcttttatagaagtcaatgacggttcatcactagctaatttgcaagccgtcatcaatcaggatttgccagattacgaagaaatcatcaaaaaactgaatacaggtgcggctgtagaagtcagtggggtactggtagcttctcaaggtaagggacagcgcattgaattacaagcccaagccgtgaaggtctacggagaggctgatcccgaaacttatcctctgcaaaagaaacgccactcttttgaatttttacgcacaattggacatttgcgatcgcgcactaattcctttggtgcagttttccgagtcagaaacgcctgttctgcggccattcacgaatttttccaacaaagaggctttttatgggtacatacacccataattacagctaacgactgcgaaggcgcaggagaactattcagcgttaccggcttggatttaaaaaacattccccgcacaaaaagcgaagcggtagattacacacaagacttttttggtaaacccacatatttaaccgttagtggacagttagaagcagaagtcatggccatggccttttctaacgtctacaccttcgcccctaccttccgtgcagaaaattctaacacctcccgtcacctcgccgaattttggatggtggagccagaaatggcattttgtgacctagaagggaatatggatttagccgaagcatttctgaaacacgtgtttaaatatgtgttagaaaaatgcccagaagacatggaatttttcaaccaacgcattgataaaaccgtcttagaaacagccgataatattattaataatcaatttgagcgcttaacttatacagaagcagtcaaattattagaaaaagccgatgtcaagtttgaatatccagttaattggggtttagatttgcaatcagaacacgaacgctatttagccgaacacctgtttaaaaaacccgtaattgtcacagattatcccgcccaaatcaaagccttttatatgcgtgtcaacgatgatgaaaaaaccgtccgcgcaatggatattcttgcacctaaaattggcgaaatcataggcggttcgcaaagagaagaacgcctagaagtgttagaacgccgcattttagcccaaggaatgcaaccagaagacttatggtggtatatggatttgcgccgttatgggactgttccccatgctggtttcggcttaggttttgaaagactcgtgcaatttatgacaggtatggcaaatatccgcgatgtcattcccttcccccgcacaccccaaagcgctgaattttag

SEQ ID NO: 10402 - protein, 463 aa, Nodularia spumigena CCY 9414
MLNRRIAEVLRSGEPDDSLVIQGWVRTKRELKGFAFIEVNDGSSLANLQAVINQDLPDYEEIIKKLNTGAAVEVSGVLVASQGKGQRIELQAQAVKVYGEADPETYPLQKKRHSFEFLRTIGHLRSRTNSFGAVFRVRNACSAAIHEFFQQRGFLWVHTPIITANDCEGAGELFSVTGLDLKNIPRTKSEAVDYTQDFFGKPTYLTVSGQLEAEVMAMAFSNVYTFAPTFRAENSNTSRHLAEFWMVEPEMAFCDLEGNMDLAEAFLKHVFKYVLEKCPEDMEFFNQRIDKTVLETADNIINNQFERLTYTEAVKLLEKADVKFEYPVNWGLDLQSEHERYLAEHLFKKPVIVTDYPAQIKAFYMRVNDDEKTVRAMDILAPKIGEIIGGSQREERLEVLERRILAQGMQPEDLWWYMDLRRYGTVPHAGFGLGFERLVQFMTGMANIRDVIPFPRTPQSAEF

SEQ ID NO: 10403 - DNA, 1473 bp, Microscilla marina ATCC 23134
  CDS (1)..(1473): transl_table=11
atggagcaagtcctaacgggtaccaagaaggacagcatcaagcagctgctggcttctaccgaatatgaccgagaggttacggtacggggttgggtgcgtcaccgacgaggcagcaaagaggtgttttttgtacaccttaacgatggttctaccattcaaaacatacagattgtggtcaatgccagtaatttggatagcaatgttttgaatcaaatcaccgtgggtgcttgtcttcaggttaatggtaatttggtggcttctcagggcgccggacaaagctgtgaggtacaagcaagtgatgtggtgattttgggggcagccgatcccgaaaaataccccattcaacctaagaaacactcgatggagtttttgcgtgaaaacgcacacctacgcatgcgcaccaatacctttagtgcagtatttcgtttgcgtcatgcggcggcttatgccattcatcaatacttcaacgaacgcggtttcttttatttacacgcgcctattattacaggttcggatgctgaaggtgccggagagatgtttcaggtaactacgcttcctttagacaatcctcctaaaaacgaagaaggtaagattgactttaaggaagatttctttgggcaacctaccaacctttcggtgtcgggtcagttgcagggcgaacttgcggctatggggcttggtctgatctatacgtttggtcctacgtttcgtgccgaaaattcaaacactacccgtcacctggcggagttttggatgattgagccggaaatggctttttatgagcaggaagacaaccataaccttgccgaagatttcttgaaatacttgattaagtatgtactggaaaactgtcaggacgatcttaaatttttggacgaacgctttaccaaagaaaacaatgggaagcctaccaacgagcgcagcgaaatgggcttattggaaaagcttgaatttgtggctgccaatgactttgcccgggtgagttataccgaggcaatcaacattttactcaactctaaaccgcataaaaagaagaagtttaagtttccggtagaatggggcattgacatgcaatcggagcacgagcgctatttggtagaaaagcacttcaaaaagccagtcattgtatacgactaccctcgcaacatcaaggctttttatatgaagcaaaacgagggcgaagaagaaggcagagaaaccgtgcgcgctatggatatattggtgccaggtattggcgagatcattggtggttcgcaacgtgaagatgatttagagcatttaaaaacccgcatggacgaggtgggcattccccaccacgaactagagtggtatttagacttacgccgatttggttcagctcctcacagtgggtttgggctaggcttcgagcgtttcatcttgtttattactggtatggcaaacatccgcgatgtaataccgtttccacgtactccgggcaatgccagattttaa

SEQ ID NO: 10404 - protein, 490 aa, Microscilla marina ATCC 23134
MEQVLTGTKKDSIKQLLASTEYDREVTVRGWVRHRRGSKEVFFVHLNDGSTIQNIQIVVNASNLDSNVLNQITVGACLQVNGNLVASQGAGQSCEVQASDVVILGAADPEKYPIQPKKHSMEFLRENAHLRMRTNTFSAVFRLRHAAAYAIHQYFNERGFFYLHAPIITGSDAEGAGEMFQVTTLPLDNPPKNEEGKIDFKEDFFGQPTNLSVSGQLQGELAAMGLGLIYTFGPTFRAENSNTTRHLAEFWMIEPEMAFYEQEDNHNLAEDFLKYLIKYVLENCQDDLKFLDERFTKENNGKPTNERSEMGLLEKLEFVAANDFARVSYTEAINILLNSKPHKKKKFKFPVEWGIDMQSEHERYLVEKHFKKPVIVYDYPRNIKAFYMKQNEGEEEGRETVRAMDILVPGIGEIIGGSQREDDLEHLKTRMDEVGIPHHELEWYLDLRRFGSAPHSGFGLGFERFILFITGMANIRDVIPFPRTPGNARF

SEQ ID NO: 10405 - DNA, 1380 bp, Algoriphagus sp. PR1
  CDS (1)..(1380): transl_table=11
atgggctgggttcgtacgaagagaagtaacaaaaatgtttcttttatcgccttaaacgatggatccacgattaccaattaccaaattgtcgcagatccaactattatttcagaggatattctgaaaaaatgtgcaacaggagcttgtctaaaagtgacaggaactgtggtggaatcacaaggtgcaggacaagcttcagagctaaacgccatcagcatccaagttttgggagaagcagatcctgagaaatatccacttcagcctaaaaggcattctttagagtttctaagagaaattgctcacctaagaatgcgtacaaatactttcagcgcggtttttagagtaagacatgcattagccttcgcagttaataaatattttaatgataagggcttcttctacatccatacgcctatcattaccgcttctgatgcagaaggtgcaggagaaacatttaaagtaacgacgctagatttaaaaaaccctcctcttaccaaagatggagacatcgactaccgtgaagatttctttgaaagagaagcgaaccttacggtctcaggacagcttgagggtgaattggctgcaatggctttatcagaaatctatacgttcggacctaccttccgtgcagagaattccaatacagcgagacaccttgctgagttttggatgattgagcctgaaatggctttctatgatgccgaggacaaccaagatcttgctgaagatttcttgaagtacatcattcaatatgcattggataattgcggaagtgatcttgaattcttggacaaaagacttgctgaagaagaaaaaggcaagcctcaggatcagagaagtgaaatgggcttggtagaaaaattaaagtttgtcgcagaaaatgagtttgtgagattgacctatacagaggccatcgacattcttcgtaactctaaaccaaacaaaaagaagaagtttgcttacctaatcgatgaatggggtgctgatttacaatctgagcacgagcggtatttggtagagaaacatttcaaaaagccagttattcttactgattacccaaaagagatcaagtcattctatatgcgtcagaatgatgacggcaaaactgtcgcagccatggatattcttttccctggaattggagaaatcgtgggtggctctcaacgagaagaaagactggatgtcctaactcaacgtatggaagagatgaatatcccacaagatgaaatgtggtggtatttagacaccagaagatttggcgctactcctcatgcaggctttgggctaggttttgagcgaatggtcttattcgttacgggtatgagtaacattcgagatgtcattgcattcccaagaaccccaggtaatgctgagttttaa

SEQ ID NO: 10406 - protein, 459 aa, Algoriphagus sp. PR1
MGWVRTKRSNKNVSFIALNDGSTITNYQIVADPTIISEDILKKCATGACLKVTGTVVESQGAGQASELNAISIQVLGEADPEKYPLQPKRHSLEFLREIAHLRMRTNTFSAVFRVRHALAFAVNKYFNDKGFFYIHTPIITASDAEGAGETFKVTTLDLKNPPLTKDGDIDYREDFFEREANLTVSGQLEGELAAMALSEIYTFGPTFRAENSNTARHLAEFWMIEPEMAFYDAEDNQDLAEDFLKYIIQYALDNCGSDLEFLDKRLAEEEKGKPQDQRSEMGLVEKLKFVAENEFVRLTYTEAIDILRNSKPNKKKKFAYLIDEWGADLQSEHERYLVEKHFKKPVILTDYPKEIKSFYMRQNDDGKTVAAMDILFPGIGEIVGGSQREERLDVLTQRMEEMNIPQDEMWWYLDTRRFGATPHAGFGLGFERMVLFVTGMSNIRDVIAFPRTPGNAEF

SEQ ID NO: 10407 - DNA, 1401 bp, Vibrionales bacterium SWAT-3
  CDS (1)..(1401): transl_table=11
atgacttacgcgcctgtaaaagacgtacttggcggcaagctagcggtagacagtgaagtaactgttcgcggctggatccgttcacgtcgtgattccaaagccggaatctctttccttgccatatatgacggctcttgtttcgacccgattcaggccgtggtccctaataatcttaataattacgaaaacgaagtactaaagctaacgactggctgctctgttgaagtaacaggtaagattgttgagtctccagcgaaaggtcaagattttgagcttgctgcaactgactttaaagttgttggttgggttgaagacgcagaaacatacccaatggcgaaaactcgtcactctatcgaataccttcgtgaagtagctcacctacgtccacgtacaaacgtaatcggtgcagtagcgcgtgttcgtaactgcctatctcaagcgatccaccgcttctaccacgagcaaggttacttctgggtatctgctccgctgatcactgcttctgatgcagaaggtgcaggtgaaatgttccgcgtttctacgctagacatggaaaacctacctcgcacagaaaaaggcgatgttgactacaacgaagatttcttcggtaaagagacattcctaacagtatctggccaactaaacggtgaagcttacgcttgtgcactaagcaaagtttacacgttcggtcctacgttccgtgctgaaaactcaaacacaagccgccacctagctgagttctggatggttgaacctgaagtcgctttcgcggatctagaagatatcgctaagctatctgaagacatgcttaagtttgtattcaaagccgtactagaagagtgtcgtgacgaccttgagttcttcgctcaacgtatcgacaaagaagcaatcactcgcttagagcagtttgtaacttctgatttcgcacaagtagactacactgacgcaatccagattcttctagattcaggtcgtgagttcgagttcccggttgaatggggtatcgatatgtcttctgagcacgagcgtttcctagcagaagaacacttcaaagcgccagtaatcgttaagaactacccgaaaaacatcaaagcattctacatgcgtgcgaacgatgacggtaagacggtagcggcaatggacgtactagcaccaggcatcggcgaaatcatcggtggttctcaacgtgaagagcgtttagacatcctagacgagcgtatgcgcgaagtaggcatcgaccctgagcacatgaactggtaccgcgatctacgtaaatacggcacagtgcctcacgctggtttcggcctaggcttcgagcgtctagtatcttacgtaacaggtatgggcaacgtacgtgacgttatcccattcccacgtactcctcgctctgcgaacttctaa

SEQ ID NO: 10408 - protein, 466 aa, Vibrionales bacterium SWAT-3
MTYAPVKDVLGGKLAVDSEVTVRGWIRSRRDSKAGISFLAIYDGSCFDPIQAVVPNNLNNYENEVLKLTTGCSVEVTGKIVESPAKGQDFELAATDFKVVGWVEDAETYPMAKTRHSIEYLREVAHLRPRTNVIGAVARVRNCLSQAIHRFYHEQGYFWVSAPLITASDAEGAGEMFRVSTLDMENLPRTEKGDVDYNEDFFGKETFLTVSGQLNGEAYACALSKVYTFGPTFRAENSNTSRHLAEFWMVEPEVAFADLEDIAKLSEDMLKFVFKAVLEECRDDLEFFAQRIDKEAITRLEQFVTSDFAQVDYTDAIQILLDSGREFEFPVEWGIDMSSEHERFLAEEHFKAPVIVKNYPKNIKAFYMRANDDGKTVAAMDVLAPGIGEIIGGSQREERLDILDERMREVGIDPEHMNWYRDLRKYGTVPHAGFGLGFERLVSYVTGMGNVRDVIPFPRTPRSANF

SEQ ID NO: 10409 - DNA, 1392 bp, Planctomyces maris DSM 8797
  CDS (1)..(1392): transl_table=11
atgattcgaacaaaaataaagtcggctctgcatacttctcaaccgggagaaacaatcaaagtttgtggctgggttcgtacgagacgagattccaaaagtggattttcttttgttgaattgaatgacggcagttgtatggccaatctacagattgtacttgatcaaaatgtaccgaactatgaaaaattgataaaagatctcaccacgggtagcagcctctcggtgacaggaaaggtgatagagtcaccaggcaaaaaccagagaattgaaatacatgcagaggctttcgatctatacggttctgcagatgccgaaacgtatccgctacagaaaaagcgtcatagtttcgaatttttgagagaaattgctcatttgcgtccacgcacaaatacttttggagcaattactagagtcagaaatgaggcagcaaccgccattcatcgtttctttcagtcgcggggttttatctatatccagactccaatcattacgaccagtgattgtgaaggagcaggcgaaatgtttcaggtaacaactcttaatttagatcgactggctcaagtccagacagagatcgatttttcacaggacttttttggaaaacgggcatctctgacagtctctggacaattggaggcagaaatctttgcgacatccattggagactgttacacgtttggtcctacttttcgcgctgagaactcaaatacgactcgacatctcgccgaattctggatgattgagcccgaaatgcctttctatgatttacaggataatatggcgctagcagagagttttgtgagagacgttatcagtgatgttctggagaattgcgccgaggatatggtattcttcaatcaaaggatcgacaaaacaactcttgagaccttgcgaaatattaccgaaaacgaatttattcgcatctcgtatacagaagcgattgagatagtaaagtccagtgggaaaaaatttgattttcctattgaatggggcagtgatatgcagtctgagcatgaacggttcctgacggaagaacactttaagcagcctgtgattgtatataattatcctaagacaattaaaccattttatatgcgttgcaacgatgatggcaaaacagtgtgtgcaatggatgtgctcgtaccgggagttggagaaatcatcggcggtagtcagcgggaagaacgctatgatatcctgatagacagaatgaaagaaggtggcctgaatccggaagattactggtggtacacagatctaagaaagtatggaaccgtaccacattcaggatttgggttgggatttgagcgactcattcaactgattacttcaatgacaaatatcagagattgcataccgtttcccagaactccgaaaaatgcggagttttaa

SEQ ID NO: 10410 - protein, 463 aa, Planctomyces maris DSM 8797
MIRTKIKSALHTSQPGETIKVCGWVRTRRDSKSGFSFVELNDGSCMANLQIVLDQNVPNYEKLIKDLTTGSSLSVTGKVIESPGKNQRIEIHAEAFDLYGSADAETYPLQKKRHSFEFLREIAHLRPRTNTFGAITRVRNEAATAIHRFFQSRGFIYIQTPIITTSDCEGAGEMFQVTTLNLDRLAQVQTEIDFSQDFFGKRASLTVSGQLEAEIFATSIGDCYTFGPTFRAENSNTTRHLAEFWMIEPEMPFYDLQDNMALAESFVRDVISDVLENCAEDMVFFNQRIDKTTLETLRNITENEFIRISYTEAIEIVKSSGKKFDFPIEWGSDMQSEHERFLTEEHFKQPVIVYNYPKTIKPFYMRCNDDGKTVCAMDVLVPGVGEIIGGSQREERYDILIDRMKEGGLNPEDYWWYTDLRKYGTVPHSGFGLGFERLIQLITSMTNIRDCIPFPRTPKNAEF

SEQ ID NO: 10411 - DNA, 1380 bp, Lentisphaera araneosa HTCC2155
  CDS (1)..(1380): transl_table=11
atgcttttaattaaagaattggataaaagtaaagtcggtgaatcaattagtttagctggttggctaagaactaaacgagattctaagggtggcttttcttttttagaaattaatgatggttcatcttttaaagggattcaggtaattgcagatcaaaatttagataattatgatgatgtgaaatcactccacaccggagcttcattaaagcttacgggaaaacttgtagaatcaccgggtaaaggtcaatcttttgagctccaagcggagtccatattaatttatggaaatacggatcaatcttaccttttacagaagggaagaattaattttgaaactctgagggagtcagcacatttacgttgccgaacgaatagcattggtgcagttatgcgcgtgcgcaatcaattgagcaaagcgacacatgacttctttcaaaaccgtcattttttaaatttacatacacctattataacagcttccgattgtgaaggtgctggccagatgttccaagtcacgactttagatatggataagccaccaaaaaatgacttaaacaaagtagattataagaaagatttttttggtaaaaagactcatcttacggtaagtggtcaactcaatggagaaacttatgcttgtggcttgggcagaatttatacttttggacccacttttagagcggaaaattcgaatacttctcggcatttaagtgagttctggatggtggaacccgaggcggctttttttgaactcgaagaaaatgcggacttagcaagagattaccttaagtattgtttcaagagtgttttagaaacgagtgcagatgatttagaattctttgatcaaagaattgagaagggaatcatcactaagttagaaactttatctgatgcagaatttactagaattacttatactgaagcggttaaacttttagagaagacggataaaaaattcgagtttccagtaaaatggggaatagaccttcagagtgaacacgaacgttatttgactgaagaaatttttaaacaacctgtgattgtgactgattatccaaaagatattaaagccttttacatgaagctcaatgatgatgagaaaactgtacgtgcgctggatgtattatgtccgcaaattggtgaaattattggcgggagtcagcgagaagaaaatttagatttacttttaaatcgaatgaaaactctagatttaaatccagaagactactcttggtatctagatttgcgtcgttatggctcggttcctcactcaggttttggtttaggttttgaaagactggttcaattttgtacaggaatgagcaatattcgtgatgtcattccctttccgcgcacgcccaaaaatgccaaattttaa

SEQ ID NO: 10412 - protein, 459 aa, Lentisphaera araneosa HTCC2155
MLLIKELDKSKVGESISLAGWLRTKRDSKGGFSFLEINDGSSFKGIQVIADQNLDNYDDVKSLHTGASLKLTGKLVESPGKGQSFELQAESILIYGNTDQSYLLQKGRINFETLRESAHLRCRTNSIGAVMRVRNQLSKATHDFFQNRHFLNLHTPIITASDCEGAGQMFQVTTLDMDKPPKNDLNKVDYKKDFFGKKTHLTVSGQLNGETYACGLGRIYTFGPTFRAENSNTSRHLSEFWMVEPEAAFFELEENADLARDYLKYCFKSVLETSADDLEFFDQRIEKGIITKLETLSDAEFTRITYTEAVKLLEKTDKKFEFPVKWGIDLQSEHERYLTEEIFKQPVIVTDYPKDIKAFYMKLNDDEKTVRALDVLCPQIGEIIGGSQREENLDLLLNRMKTLDLNPEDYSWYLDLRRYGSVPHSGFGLGFERLVQFCTGMSNIRDVIPFPRTPKNAKF

SEQ ID NO: 10413 - DNA, 1449 bp, Pedobacter sp. BAL39
  CDS (1)..(1449): transl_table=11
atgataaaaagagaaaaaataaaaagcctgctggagaccgaagagttcaacagagcagttagagttatgggttgggtacggactttccgcaacaaccagtttatcgctataaatgatggttcctgcatgggtaacatccagattgttgttgattttaatcaaactcctgaggaactattgaaaagaatcactaccggcgcagccattgcggttaccggcgagatcgttgaatctgtaggtaaaggccagcgtgttgacattaaagcaacggagattgagatccttggcgacagtgatccagagaaattccctttgcagccaaaaaaacacagcctggaatttctgcgtgagattgcacacctgcgtttccgcacgaatactttcaatgcagtatttaagatccgtcatgccctggcctttgccatccataaattttacaacgaaagaggttttgtatacatgcatactccggtgatcacggcatcagatgccgagggtgctggtgaaatgttcaaagttactacacttgacttcgacaacccgccacgtactgacgatggaaaagtagacttctctgaggatttcttcgccagagctaccaacctcaccgtatccggacaactggagggcgagctggccgctatggcttttggccagatttacaccttcggacctaccttcagggctgaaaattcaaacaccacaaggcacctggcagaattctggatgattgagccggaaatagcatttgccgacctggaagacaacatgcaactggcagaagacatgatgaagtttgtaatcagctatgcattggaaaactgtaaggaagagattgacttcctcaacaacaggttactggaagaagaaaaatcaaaacctcaaaatgagcgtagtgagctttccctaattgaaaaacttaacttctgcctggacaacgactttgagcgcctgacttatacagaggctattgctattttaagatcatcaaaaccgaatcaaaagaaacagtttaaatacctgattgacgaatggggagcagacttgcaatctgaacacgagcgttacctggtagaaaaacactttaaaaaaccagtgatcctgacagattaccctgcggacatcaaatcattctacatgcgtcagaacgaacctgattcccaaggtagaaaaaccgttgccgcgatggacattctgttccctggtattggcgaaatgattggcggttcgcagcgtgaagagcgtcttgacaagctgactacaagaatggaggagctgaacatccctcaggacgagctgtggtggtatctggataccagaagattcggatcggcaccacacgccggattcggactaggcttcgagcgtttaatcctgtttgttaccggcatgaccaacatcagagatgttattgccttcccgcgtttccctagaaacgcagagttttaa

SEQ ID NO: 10414 - protein, 482 aa, Pedobacter sp. BAL39
MIKREKIKSLLETEEFNRAVRVMGWVRTFRNNQFIAINDGSCMGNIQIVVDFNQTPEELLKRITTGAAIAVTGEIVESVGKGQRVDIKATEIEILGDSDPEKFPLQPKKHSLEFLREIAHLRFRTNTFNAVFKIRHALAFAIHKFYNERGFVYMHTPVITASDAEGAGEMFKVTTLDFDNPPRTDDGKVDFSEDFFARATNLTVSGQLEGELAAMAFGQIYTFGPTFRAENSNTTRHLAEFWMIEPEIAFADLEDNMQLAEDMMKFVISYALENCKEEIDFLNNRLLEEEKSKPQNERSELSLIEKLNFCLDNDFERLTYTEAIAILRSSKPNQKKQFKYLIDEWGADLQSEHERYLVEKHFKKPVILTDYPADIKSFYMRQNEPDSQGRKTVAAMDILFPGIGEMIGGSQREERLDKLTTRMEELNIPQDELWWYLDTRRFGSAPHAGFGLGFERLILFVTGMTNIRDVIAFPRFPRNAEF

SEQ ID NO: 10415 - DNA, 1401 bp, Moritella sp. PE36
  CDS (1)..(1401): transl_table=11
atgacgcatacgtcagttaaagatatttttgccggtaaattcccggtaggcagcacagttacaacgaaaggctggatccgcacacgccgtgattctaaagctggtatctcttttctagctgtttacgatggttcgtgtttcgatcctatccaagcagttgtgagcaaagatttaccgaactactcagacgacgtattaagtcttactgcaggttgttcagttgaaatcacaggtacagtagttgaatcacctggtaaaggtcaagcattcgaaatccaagcaacagaagttattgtgcttggtttagtagaagaccctgatacttaccctatgtcagcaaaacgccacagcatcgaataccttcgtgaacacgctcaccttcgtggccgtactaacgtaatgggtgcggttatgcgtgttcgtaactgtttatcacaagctattcaccgcttttaccatgaaaatggttataactggttaagcacgccaattatcacagcaagtgactgtgaaggtgcgggcgaaatgttccgtgtaagcacactggatatgaataacctgcctttaactgataaaggcgaagttgattacaaccaagatttcttcggtaaagaagcattcttaactgtatcgggtcaattaaatgctgaaacttatgcttgtgcaataggtaaagtatatacgttcggcccaactttccgtgcagaaaattcaaacacaacacgtcaccttgcagaattctggatggttgaacctgaaattgcatttgctgatttagacgatgctgcaaaattagctgaagatatgcttaagtattgctttaaagctgtactagaagagcgtatggatgatatgcaattctttgcacaacgtatcgataaagacgctattactcgcttagaaagctttgtagattctgactttgctcaaattgattatactgacgcaattaagatcttagaagaatgtggtaaagaattcgaattcccagtttcttggggtatcgatatgtcttctgagcacgaacgttaccttgctgaagtacacttcaaagcacctgttgttgttaaaaactacccgaaagatatcaaatctttctacatgcgtatgaatgatgacggtaaaacagttgcagcaatggacgtacttgcaccaggcatcggtgaaatcatcggtggtagccaacgtgaagagcgtttagatatgcttgataaacgtatggaagaaatgggcctaaacaaagaagattactggtggtaccgtgatctacgccgttttgggacagtgccacattctggtttcggtctaggtttcgaacgtttagtgtcttatgtaactggtatgcaaaatatccgtgacgtaattccttacccacgtgcgccacgtacagcggaattctaa

SEQ ID NO: 10416 - protein, 466 aa, Moritella sp. PE36
MTHTSVKDIFAGKFPVGSTVTTKGWIRTRRDSKAGISFLAVYDGSCFDPIQAVVSKDLPNYSDDVLSLTAGCSVEITGTVVESPGKGQAFEIQATEVIVLGLVEDPDTYPMSAKRHSIEYLREHAHLRGRTNVMGAVMRVRNCLSQAIHRFYHENGYNWLSTPIITASDCEGAGEMFRVSTLDMNNLPLTDKGEVDYNQDFFGKEAFLTVSGQLNAETYACAIGKVYTFGPTFRAENSNTTRHLAEFWMVEPEIAFADLDDAAKLAEDMLKYCFKAVLEERMDDMQFFAQRIDKDAITRLESFVDSDFAQIDYTDAIKILEECGKEFEFPVSWGIDMSSEHERYLAEVHFKAPVVVKNYPKDIKSFYMRMNDDGKTVAAMDVLAPGIGEIIGGSQREERLDMLDKRMEEMGLNKEDYWWYRDLRRFGTVPHSGFGLGFERLVSYVTGMQNIRDVIPYPRAPRTAEF

SEQ ID NO: 10417 - DNA, 1404 bp, Plesiocystis pacifica SIR-1
  CDS (1)..(1404): transl_table=11
atgcagtcgccgcgaaccaagatcgcccaagcgctccaggccgagatccccgccgacggcgcgctcaacctgcgcgtcaagggctgggcccgcacggtccgctcgggcaagaaggtgaccttcatcagcctcaacgacggctccagcttcggctccctgcaggtcgtcgtgccccccgaggtcgacgactacgaggccatcacccacctgaccacgggctcggcgctgagcgtcgagggcgagctgatcgagtccccggccaagggccagcgcgtcgagctcaaggccaccaaggtcgagatcgtcggcaaggccgacccgagctacccgctgcaaaagaagcgccacggcttcgagttcctccgcgagcaggcccacctgcgcgtgcgcaccaacaccttcggggcggtgttccgcgtgcgctcggccctcgcccagtccgtccaccgcttcttcggcgagcgcggcttctactacatccacaccccgatcatcacggccagcgacaccgagggcgccggcgagatgttccgcgtcaccaccttgcccgtcggcgacccgccccgggacgacgagggggccgtcgacgacaagcaggacttcttcgccaagccgaccttcctgaccgtctccggccagctcaacggcgagaccttcgccctcggcctgtccgacatctacaccttcggcccgaccttccgcgccgagaactccaacaccagccgccacgcctcggagttttggatgatcgagccggagatggcctggcacgatctcgacgacgactgccagctcgccgaagacttcgtcaaggcgatgttgaagacggccctcgaggactgcgccgaggacctcgcgttcttcgacaagcgcatcgacaagggcctcatcgagcggctcaccaaggtcgccgaggccgacttcgcgcgcatcacctacaccgaggccgtcgagctgctcgagaagtccggcaagagcttcgagttccccgtggagtggggcaagaacctccaggccgagcacgagcgctacatcaccgaggagatcctcgggcgcccgaccttcgtggtcgactaccccaaggagatcaaggccttctacatgcgccgcaacgacgacgggaagaccgtcgcggccatggacctgctcgtgcccaagatcggcgagctgatcggcggctcccaacgcgaggagcgcctcgacgtgctcgagagcatcttcgccagcgacccgcacctgagcgtcgaggactacgactggtacctcgacacccgccgcttcggcacggccccgcacgccggcttcggcctcggcttcgagcggctggtgatgtacgcgacgggcatggagaacatccgcgacgtgatccctttcccgcgtacaccgcggacctgcgagttctga

SEQ ID NO: 10418 - protein, 467 aa, Plesiocystis pacifica SIR-1
MQSPRTKIAQALQAEIPADGALNLRVKGWARTVRSGKKVTFISLNDGSSFGSLQVVVPPEVDDYEAITHLTTGSALSVEGELIESPAKGQRVELKATKVEIVGKADPSYPLQKKRHGFEFLREQAHLRVRTNTFGAVFRVRSALAQSVHRFFGERGFYYIHTPIITASDTEGAGEMFRVTTLPVGDPPRDDEGAVDDKQDFFAKPTFLTVSGQLNGETFALGLSDIYTFGPTFRAENSNTSRHASEFWMIEPEMAWHDLDDDCQLAEDFVKAMLKTALEDCAEDLAFFDKRIDKGLIERLTKVAEADFARITYTEAVELLEKSGKSFEFPVEWGKNLQAEHERYITEEILGRPTFVVDYPKEIKAFYMRRNDDGKTVAAMDLLVPKIGELIGGSQREERLDVLESIFASDPHLSVEDYDWYLDTRRFGTAPHAGFGLGFERLVMYATGMENIRDVIPFPRTPRTCEF

SEQ ID NO: 10419 - DNA, 1392 bp, Ruminococcus obeum ATCC 29174
  CDS (1)..(1392): transl_table=11
atgaagctcacaactgtaaaagaaatttataaaaacagagaagaatacctgaatagggaagtaactgtaggaggatgggtacgaagcgtacgtggttccaaggcatttggttttatcgtacttcatgatggtactttttttgagacactgcaggttgtatatcacgacaatatgccgaattttgccgagatcagcaagctgaatgtaggcgctgctattatcgtcaggggaactctggttccgacaccggaagcaaaacagccgtttgaaattcaggctgatgaagtacaggtagaaggcgcatctgcaccggattatccgcttcagaagaaacgtcatactctggaatacctgagaaccatgacacatttgagaccgagaacaaacactttccaggcggtatttcgtgtacgttccctttgtgcatacgcgatccacaaattcttccaggaaagaggtttcgtatatgtacacacaccgctgatcacaggaagtgactgcgagggtgcgggagagatgttccaggttactacactggatatgaagaatcctccgctgaatgaagacggtactgtagattacagtcaggatttcttcggcaaagagactaatcttacagtaagtggtcagctgaacggtgagacttatgcacaggcattccgtaatatttatacattcggaccgactttccgtgcagagaactccaatacaacacgtcatgctgctgagttctggatgatcgagccggaatgtgcatttgccgatctgaatgacaatatggatcttgcagaggacatgctgaaatacgtgatccgttatgtgctggagaatgctccggaggagatgaacttcttcaattcctttatcgacaaaggacttctggatcgcctgaaccatgtagtggattctgagtttggtcatgtgacttatacagaagcaattgaacttctggagaaaaacaatgacaaattcgattacaaagtattctggggatgcgaccttcagacagagcatgagcgttatctgacagaagaaatcttcaagaaacctgtatttgtgacagattatccgaaggagatcaaggcattctacatgaaacagaacgaggatggcaagacagttgctgccatggactgtctggtacctggaatcggtgaaatcattggtggaagccagagagaggatgattacgataagctgaaagcacgtatggatgagctgggactgaaagcagaagactatcagttctatatggatctccgtaaatatggttccacacgtcattcaggatttggactgggatttgaacgctgcgtaatgtatctgacaggtatgggcaatatccgtgacgtaattccattcccaagaacagttaacaactgcgatttataa

SEQ ID NO: 10420 - protein, 463 aa, Ruminococcus obeum ATCC 29174
MKLTTVKEIYKNREEYLNREVTVGGWVRSVRGSKAFGFIVLHDGTFFETLQVVYHDNMPNFAEISKLNVGAAIIVRGTLVPTPEAKQPFEIQADEVQVEGASAPDYPLQKKRHTLEYLRTMTHLRPRTNTFQAVFRVRSLCAYAIHKFFQERGFVYVHTPLITGSDCEGAGEMFQVTTLDMKNPPLNEDGTVDYSQDFFGKETNLTVSGQLNGETYAQAFRNIYTFGPTFRAENSNTTRHAAEFWMIEPECAFADLNDNMDLAEDMLKYVIRYVLENAPEEMNFFNSFIDKGLLDRLNHVVDSEFGHVTYTEAIELLEKNNDKFDYKVFWGCDLQTEHERYLTEEIFKKPVFVTDYPKEIKAFYMKQNEDGKTVAAMDCLVPGIGEIIGGSQREDDYDKLKARMDELGLKAEDYQFYMDLRKYGSTRHSGFGLGFERCVMYLTGMGNIRDVIPFPRTVNNCDL

SEQ ID NO: 10421 - DNA, 1392 bp, Ruminococcus torques ATCC 27756
  CDS (1)..(1392): transl_table=11
atggaattgacaacgattcgggaattatttaaagacagagaatcatatcttggcaaaaaagtaacgataggaggctgggttcgtagtctcagagattcaaagacatttggtttcattgtagtaaatgacggttcttattttgagccgcttcagattgtatatcatgatgagatggagaactttgcggaagtttctaaactgaacgtcggagctgcgattattgtgaaaggaacgcttgtcgctactccgcaggcaaaacagccgtttgagattcaggcggatgaagtgcagatcgagggagcgtcggcttcggattatccgctgcagaagaaacgtcatacgtttgagtatttgagaacgatttctcatctgcgtccgagaacgaatacatttcaggctgtattccgtgtgcgttctctggcagcgtatgcgattcataagttctttcaggagagagggtttgtgtatgtacatacgccgctgatcacaggaagcgactgtgaaggcgcgggcgagatgtttcgtgttacgactcttgatatggatcagatcccgaagaatgaggatggtacagtagattatacaaaagatttcttcggaaaagagacgagccttacggtaagcggtcagttgaacggagagacatatgcgcaggcgtttagaagtatttatacattcggcccgacattccgcgcggagaattcaaacacaacccgtcatgcggcagagttttggatgatcgaaccggagattgcgtttgcagatcttgaagacgacatggatctggcagagtctatgctgaaatatgtcatcaattatgttcttgaaaacgcgccggaagagatgaatttctttaattctttcgttgataaaggacttctggagagactgaataatgttgcgaattctgatttcgcccgtgttacttacacagaggcgatcgagatactggagaagaacaacgataagtttgagtataaggtttcctggggatgtgatcttcagacagagcatgaacgttatttgacagagcaggtgtataagcgtcctgtatttgttacagattacccgaaagaaatcaaagcgttttacatgaaacaaaatgatgacggcaagacggttgcggcagttgattgtcttgttccgggtatcggggaaatcatcggaggaagtcagagagaagacgactatgagaaactcctggcccgcatgaacgaacttggtcttgatgaaaaagattatggcttttatcttgatcttagaaaatacggttctacgcgtcatgcaggtttcggattaggatttgaaagatgcgtgatgtatttgacgggaatgtcgaatatccgtgatgtgattccgttcccgagaacagtaaataactgtgaactgtaa

SEQ ID NO: 10422 - protein, 463 aa, Ruminococcus torques ATCC 27756
MELTTIRELFKDRESYLGKKVTIGGWVRSLRDSKTFGFIVVNDGSYFEPLQIVYHDEMENFAEVSKLNVGAAIIVKGTLVATPQAKQPFEIQADEVQIEGASASDYPLQKKRHTFEYLRTISHLRPRTNTFQAVFRVRSLAAYAIHKFFQERGFVYVHTPLITGSDCEGAGEMFRVTTLDMDQIPKNEDGTVDYTKDFFGKETSLTVSGQLNGETYAQAFRSIYTFGPTFRAENSNTTRHAAEFWMIEPEIAFADLEDDMDLAESMLKYVINYVLENAPEEMNFFNSFVDKGLLERLNNVANSDFARVTYTEAIEILEKNNDKFEYKVSWGCDLQTEHERYLTEQVYKRPVFVTDYPKEIKAFYMKQNDDGKTVAAVDCLVPGIGEIIGGSQREDDYEKLLARMNELGLDEKDYGFYLDLRKYGSTRHAGFGLGFERCVMYLTGMSNIRDVIPFPRTVNNCEL

SEQ ID NO: 10423 - DNA, 1419 bp, Vibrio harveyi HY01
  CDS (1)..(1419): transl_table=11
atggagaatattgaaaacatgacttacgcgcctgtatcagacgttttgaaaggtcagctagcagtagacagtgaagtaactgttcgtggctggatccgttcacgtcgtgattccaaagctggaatctctttccttgccatttatgacggctcttgtttcgacccgattcaggccgtggtccctaataatcttaataattacgacgacgaagttcttaagctaactacaggctgttctgttgaagtaactggtaagattgttgagtctccagcgaaaggtcaagacttcgagctagcagcaactaacgtaaaagtagttggctgggttgaagatgctgacacttacccaatggcaaaaactcgtcactctatcgagtacctacgtgaagtagcgcacctacgtccgcgcacaaacgtaatcggtgcagtagcacgtgtacgtaactgtctatctcaagcgatccaccgcttctaccacgagcaaggttacttctgggtatctgcgccactgatcactgcgtcagatgctgaaggtgctggtgaaatgttccgcgtttctacgctagacatggaaaacctacctcgcacagaagaaggcaaagtagactacaacgaagatttcttcggtaaagaaacgttcctaacggtatctggtcagcttaacggtgaagcttacgcttgtgcactaagcaaagtttacacattcggccctactttccgtgctgaaaactcaaacactagccgccacctagcagaattctggatggttgagcctgaagtagcattcgcggatctaaacgatattgcgaaactatctgaagacatgcttaagtacgtgtttaaagcagcactagaagagtgtcgtgatgacctagagttcttcgctcaacgtatcgacaaagaagcaatcactcgtcttgagaaattcgtttcttctgatttcgctcaagtagactacactgacgcaatccaaatccttcttgattctggtcgtgagttcgaattccctgttgagtggggtatcgacatgtcttctgagcacgagcgtttccttgctgaagaacacttcaaagcgcctgtaatcgttaagaactacccgaaagacatcaaagcattctacatgcgtctaaatgacgatggtaaaacggtagctgcaatggacgttcttgcacctggcatcggcgaaatcatcggtggttctcaacgtgaagagcgtctagacattctagatgagcgtatgcgtgaaatcggcatcgatccagagcacatgaactggtaccgcgacctacgtcgttacggcacagtgccacacgcaggcttcggtctaggcttcgagcgtctagtttcttacgtaacaggtatgggcaacgttcgtgacgtgatcccattcccacgtacacctcgctctgcgaacttctaa

SEQ ID NO: 10424 - protein, 472 aa, Vibrio harveyi HY01
MENIENMTYAPVSDVLKGQLAVDSEVTVRGWIRSRRDSKAGISFLAIYDGSCFDPIQAVVPNNLNNYDDEVLKLTTGCSVEVTGKIVESPAKGQDFELAATNVKVVGWVEDADTYPMAKTRHSIEYLREVAHLRPRTNVIGAVARVRNCLSQAIHRFYHEQGYFWVSAPLITASDAEGAGEMFRVSTLDMENLPRTEEGKVDYNEDFFGKETFLTVSGQLNGEAYACALSKVYTFGPTFRAENSNTSRHLAEFWMVEPEVAFADLNDIAKLSEDMLKYVFKAALEECRDDLEFFAQRIDKEAITRLEKFVSSDFAQVDYTDAIQILLDSGREFEFPVEWGIDMSSEHERFLAEEHFKAPVIVKNYPKDIKAFYMRLNDDGKTVAAMDVLAPGIGEIIGGSQREERLDILDERMREIGIDPEHMNWYRDLRRYGTVPHAGFGLGFERLVSYVTGMGNVRDVIPFPRTPRSANF

SEQ ID NO: 10425 - DNA, 1392 bp, Dorea longicatena DSM 13814
  CDS (1)..(1392): transl_table=11
atggaattgacaacaattagagaattatataaaaacagtgattcttacatggatcagaaagtaaccatcggtggatgggtaagaagtatccgcggatccaaagcatttggattcatcgtggtaaatgacggaacattctttgagcctttacaggttgtatatcacgacaagatggacaactttgcagagatctccaagttaaatgtaggtgcagcagtaatcgttacaggtacactggtagcaacacctcaggcaaagcagccattcgagatccaggcagatactgtagaagtagaaggagcatccgcaccggattacccacttcagaagaagcgtcacagctttgaatatttgagaacaattgcacatttaagacctagaacaaatacattccaggcagtattccgtgtacgttccctgacagcatatgcgattcataagttcttccaggagagaggttttgtatatgtgcatacaccactgatcacaggaagtgattgtgagggtgcaggagagatgttccaggtaacgactatggatctgaataacgtaccgaagaatgaagacggaagcgtagattattccaaagatttcttcggaaaagagacaagccttactgtaagcggacagttaaatggtgagacttacgcacaggcattccgcaatatttatacattcggaccgacattccgtgcagagaactctaacacaacacgtcatgcggcagagttctggatgatcgagcctgagatggcatttgcagatctggatgacgatatgttcgttgcggaagcaatgttaaaatacgtcatcaactatgtgcttgagaatgcaccggaagagatgaacttcttcaattcattcgtagacaagggacttctggagagattgcacaacgtagtatcttctgatttcgcaagagtgacatatacagaggctgtagaacttcttgagaaacacaatgataaattcgaatacaaagtaacatggggaacagaccttcagacagagcacgaaagatacctgacagaagaagtcttcaaacgtccggtattcgtaacagattatccgaaggagatcaaagcattctacatgaagctgaacgacgatggcaagaccgttgcggcagtagactgtctggtacctggaatcggtgagatcatcggaggaagccagagagaggatgactacgataagctgaaagcaagaatggatgaactgggactgaaagaagaagactacaagttctacatggatcttcgtaaatatggttctacaagacatgccggattcggacttggattcgaaagatgcgtcatgtatctgacaggaatgggcaatatccgtgacgtaattccattcccaagaactgtcaacaactgtgaactgtaa

SEQ ID NO: 10426 - protein, 463 aa, Dorea longicatena DSM 13814
MELTTIRELYKNSDSYMDQKVTIGGWVRSIRGSKAFGFIVVNDGTFFEPLQVVYHDKMDNFAEISKLNVGAAVIVTGTLVATPQAKQPFEIQADTVEVEGASAPDYPLQKKRHSFEYLRTIAHLRPRTNTFQAVFRVRSLTAYAIHKFFQERGFVYVHTPLITGSDCEGAGEMFQVTTMDLNNVPKNEDGSVDYSKDFFGKETSLTVSGQLNGETYAQAFRNIYTFGPTFRAENSNTTRHAAEFWMIEPEMAFADLDDDMFVAEAMLKYVINYVLENAPEEMNFFNSFVDKGLLERLHNVVSSDFARVTYTEAVELLEKHNDKFEYKVTWGTDLQTEHERYLTEEVFKRPVFVTDYPKEIKAFYMKLNDDGKTVAAVDCLVPGIGEIIGGSQREDDYDKLKARMDELGLKEEDYKFYMDLRKYGSTRHAGFGLGFERCVMYLTGMGNIRDVIPFPRTVNNCEL

SEQ ID NO: 10427 - DNA, 1392 bp, Eubacterium ventriosum ATCC 27560
  CDS (1)..(1392): transl_table=11
atgaatttaattgagattaaggatttgtatgaaaacaaagaaaattttatagataaagaaatcgaggttggcggctgggttcgtagcattagagattcaaagacttttggatttattgtcttaaatgatggaacttgctttaaaccattacaggttgtttacagcgataagcttgataactttggcgaagtttctaagacaaatattggtgctgcattaatagtaaagggtaagcttgtggcaactcctaatgctaagcagccttttgaaattcaggcagatgaagtatatgtggaaggtgaaagtacaccggattatccattacagaagaagcgacacagctttgaataccttagaactatttcacatttaagacctagaacaaatacattccaggcagttttcagagtgcgctcactttgtgcttacgcaattcacaaatttttccaggagcagggatttgtttatgtgcacacaccacttataacaggaagcgactgtgaaggcgcaggagaaatgtttcaggttacaacaatggacttaaataatgtgccaaaaacagaagaaggaaaagtagattatacagaagacttctttggaaaaccaactaacttaacagtttcaggtcagttaaatggcgaaacttatgcaatggcatttaagaagatttatacatttgggccaacattcagagccgaaaattctaacacaacaagacacgcagcagaattttggatgattgaacctgaaatagcttttgcagaccttgcagatgacatggaacttgcagaagcaatgataaaatacgtaataaagtatgttttggaaaacgcaccggaagaaatgaatttctttaacagctttgttgacaaaggattattagatagattaaatcacgtaataaattcagaatttggtcgtgttacttatacagaggcaattaaattattggaagaacacaatgataagtttgaatacaaagtaagctggggtgtagatcttcagacagaacatgaacgttaccttacagagcagatttttaaacgccctgtatttgtaacagattatccaaaggaaataaaagcattctatatgaagctaaacaaagatggaaaaacagttgctgcaatggactgtttagttcctggaatcggtgaaatcataggtggaagtcagagagaagaaaattatgaagtattaactaagagaatggaagaattaggacttaacgaaaaagactaccagttctatcttgaccttagaaaatatggaacagcaagacatgccggttttggattaggatttgaaagaatgataatgtatttaacaggtatgggaaatattcgtgacgtaatcccattcccaagaactgtaaataactgcgaattgtaa

SEQ ID NO: 10428 - protein, 463 aa, Eubacterium ventriosum ATCC 27560
MNLIEIKDLYENKENFIDKEIEVGGWVRSIRDSKTFGFIVLNDGTCFKPLQVVYSDKLDNFGEVSKTNIGAALIVKGKLVATPNAKQPFEIQADEVYVEGESTPDYPLQKKRHSFEYLRTISHLRPRTNTFQAVFRVRSLCAYAIHKFFQEQGFVYVHTPLITGSDCEGAGEMFQVTTMDLNNVPKTEEGKVDYTEDFFGKPTNLTVSGQLNGETYAMAFKKIYTFGPTFRAENSNTTRHAAEFWMIEPEIAFADLADDMELAEAMIKYVIKYVLENAPEEMNFFNSFVDKGLLDRLNHVINSEFGRVTYTEAIKLLEEHNDKFEYKVSWGVDLQTEHERYLTEQIFKRPVFVTDYPKEIKAFYMKLNKDGKTVAAMDCLVPGIGEIIGGSQREENYEVLTKRMEELGLNEKDYQFYLDLRKYGTARHAGFGLGFERMIMYLTGMGNIRDVIPFPRTVNNCEL

SEQ ID NO: 10429 - DNA, 1392 bp, Clostridium bolteae ATCC BAA-613
  CDS (1)..(1392): transl_table=11
atggatctgattaccgtaagagaactttacaaacatccggaggaatatctggacaaggagataaatgtggggggctgggtccgcagtctccgtgattccaaagcattcggcttcatcgttgtcagtgatggaagctttttcgaaacattgcagattgtatatcacgacacccttcccaactttgcagaagtttctaaattaagcgtaggcacagccatccttgtaaagggaaccctggtaagtacgccccaggccaagcagccctttgaaattcaggccgcagaggtaactgtggagggcacctcctcaccggattatccacttcagaaaaagcgccactctcttgaatacctgcgcaccatctcccatctgcgtgccagaaccaataccttccaggctgtattccgtgtgcgctccctggttgcatacgctattcaccagtatttccaggagagggattttgtgtatgttcacacgcctctgattacaggcagcgactgtgagggagccggagaaatgttccaggtaaccaccatggacttaaacaatatcccaaagacggaggagggaaaggtggatttcagccaggactttttcggcaaggccaccaacctgaccgttagcggacagctgaatgccgagacctatgccatggctttccgcaacgtatataccttcggccccaccttccgcgccgagaattccaataccacccgccatgctgcggagttctggatgattgaaccagagatggcctttgctgacctggatgacgatatgtgtctggcagaaggcatgcttaaatatatcatccgttttgtcctggagcatgcgcctgaggagatgaacttcttcaaccagtttgtggacaaaggccttctggaccgccttcacaatgtgttaaattccgagtttggccgcgttacctacaccgaggccgtaaagatactggaagaacacaacgatgaatttgactacaaggtctcctggggatgcgacctgcagacagagcatgaacgctatctgacagagcaggtatttaagaagcccgtattcgtaaccgattatccgaaggagatcaaagccttctatatgaagatgaatcctgacaataaaaccgttgcagccgtggactgcctggttcccggtatcggtgaaatcatcggcggcagccagagggaggacgactacggcaggctggtagccagaatggatgaactaggccttaagaaggaggactatgacttctatctggacttgaggaagtacggatccacgcgtcacgcaggctttggccttggtttcgagcgctgcgtcatgtatctgaccggaatgtccaacatccgcgacgtaatccccttcccaagaacagtaaacaactgcgaattataa

SEQ ID NO: 10430 - protein, 463 aa, Clostridium bolteae ATCC BAA-613
MDLITVRELYKHPEEYLDKEINVGGWVRSLRDSKAFGFIVVSDGSFFETLQIVYHDTLPNFAEVSKLSVGTAILVKGTLVSTPQAKQPFEIQAAEVTVEGTSSPDYPLQKKRHSLEYLRTISHLRARTNTFQAVFRVRSLVAYAIHQYFQERDFVYVHTPLITGSDCEGAGEMFQVTTMDLNNIPKTEEGKVDFSQDFFGKATNLTVSGQLNAETYAMAFRNVYTFGPTFRAENSNTTRHAAEFWMIEPEMAFADLDDDMCLAEGMLKYIIRFVLEHAPEEMNFFNQFVDKGLLDRLHNVLNSEFGRVTYTEAVKILEEHNDEFDYKVSWGCDLQTEHERYLTEQVFKKPVFVTDYPKEIKAFYMKMNPDNKTVAAVDCLVPGIGEIIGGSQREDDYGRLVARMDELGLKKEDYDFYLDLRKYGSTRHAGFGLGFERCVMYLTGMSNIRDVIPFPRTVNNCEL

SEQ ID NO: 10431 - DNA, 1389 bp, Faecalibacterium prausnitzii M21/2
  CDS (1)..(1389): transl_table=11
atggaacgtaccgagatcctttcgctgttcaagaacaccccggcagacggcaccgagatcaccgtctgcggctgggcaaagaacatccgcgactccaagaacattggcttcatcgccctgtcggacggcggctgcttcaagaccctgcaggtcgtgctggaagccggtaagctggcaaactacgatgaagtcatccacaccggtctgtacagcagcctgcgcatcaagggcaagctggtgctcaccccgcaggcaaagcagccctttgagctgaacgccgagagcgtggagattttgggcgactgccccgccgacgaataccccctgcagaaaaagaagatgagcatggagtatctgcgcaccatgcccaccctgcgcccccgcaccaacaccttcaacgctgctttccgcgtgcgcagcgtggctgcctacgccatccacaagttcttccaggagaacggctttgtctacgcccactctccgctgatcaccgcctccgactgcgagggcgccggcgagatgttccgcgtgaccacgctggatctggacaatgtgcccaagaccgaggacggcgctgtggattacagcaaggacttctttgaaaagccggtcaacctgaccgtttccggccagctggaggccgaggccatggctatggcctttggcaaggtgtacaccttcggccccaccttccgcgccgagaagagctttaccacccgccacgctgcggagttctggatgatcgagccggagatggccttctgcgatctgaacggctacatggacaacgccgaggctatgatcaagtacgtcatccgctatgtgctggacaactgcccggacgagatggccttcttcaaccagttcatcgacaagggtcttgtcgagcgtctggagctggtggcaaacagcgagttcgcccgcatcagctacaccgaggccattgagatcctgaaaaagaacaacaagaagttccagtaccccgtggagtggggtgtggatatccagaccgagcacgagcgctacctgaccgaggtggtgtacaaaaagccggtctttgtcaccgactaccccaaggagatcaagagcttctacatgaagcagaacgccgacggcaagaccgtggctgcagcagatatgctggtgcccggcatcggcgagctgatcggcggcagccagcgtgaagaggactacggcaagctggtggcacgcatggacgagctgggcatggacaagaccaactacgagtggtacctgaacctgcgcaagttcggcggcgtggagcacgcaggctacggcttgggctttgagcgtatgatcatgtacctcaccggcatccagaacatccgtgacgtgctgcccttcccccgcaccgcatacggcttctga

SEQ ID NO: 10432 - protein, 462 aa, Faecalibacterium prausnitzii M21/2
MERTEILSLFKNTPADGTEITVCGWAKNIRDSKNIGFIALSDGGCFKTLQVVLEAGKLANYDEVIHTGLYSSLRIKGKLVLTPQAKQPFELNAESVEILGDCPADEYPLQKKKMSMEYLRTMPTLRPRTNTFNAAFRVRSVAAYAIHKFFQENGFVYAHSPLITASDCEGAGEMFRVTTLDLDNVPKTEDGAVDYSKDFFEKPVNLTVSGQLEAEAMAMAFGKVYTFGPTFRAEKSFTTRHAAEFWMIEPEMAFCDLNGYMDNAEAMIKYVIRYVLDNCPDEMAFFNQFIDKGLVERLELVANSEFARISYTEAIEILKKNNKKFQYPVEWGVDIQTEHERYLTEVVYKKPVFVTDYPKEIKSFYMKQNADGKTVAAADMLVPGIGELIGGSQREEDYGKLVARMDELGMDKTNYEWYLNLRKFGGVEHAGYGLGFERMIMYLTGIQNIRDVLPFPRTAYGF

SEQ ID NO: 10433 - DNA, 1386 bp, Parvimonas micra ATCC 33270
  CDS (1)..(1386): transl_table=11
atgtttttactaaaagatatttttgcaaatgaaaaaaattttattgacaaagaagttgaagtggcaggttggataaaaaatagtcgttttaataataatattggttttatagagcttaatgatggaacaactttcagaagtattcaaattgtagttgaatcaaaactagataattttcaaactatatcaaaattactattaccttccgcaattatagttaaaggtaaagttgttaaaagtttaggtggaaaacaaaattttgaaattaatgcctctgaaatagtagttgaaggagagtccactgataagtatcctcttcaaaagaaaagacacacatttgaatttttgagaacaatccaacatctaagaccaagagcaaatacatttaatgctgtttttagagttagatcaattttaagctatgctctacacaaattctttttcgaaagaggatttgtttatgcacacacaccaattataactgcaagtgatgcagaaggtgctggcgaaatgtttagagtgacaaatttagatatagacaatctacctagaacaaataatggagaagttgatttcactcaagactttttttctaaaccaacaaatttaactgttagtggtcaattagaaggtgaagcatttgcaatggcatatagaaatatctatacatttggaccaacatttagagctgaaaattcaaatactacaagacatgctgctgaattttggatgattgaaccagaaatagcttttgctgatttaaaagatgttattaaattatcagaagatatggttaaatatattattaaattcgttttagaaaatgctcctgatgaaatgaagttttttaatgattttatagataatggattactcgaaagactaaattctgttgttaattcagaatttaaggttatgacatatactgaagcaatagaaatattaaaatcatccaaagaaaatttcaaatacccggttgaatggggagttgatttgaaaacagaacatgaaagatatatctgtgaaaaaatcgtaaagggtcctgtttttttaacagattatccaaaagaaataaaagcattctatatgagattaaacgatgataataaaactgttgcagcaacagatatgttagttccaggtataggagaactaataggaggaagtcaaagagaagaaagacttgaaatattagaacaaaaaatgaaagattcaaatatgaatattgatgattattcttggtatttagacttaagaagatttggtggaacaaaacatggaggttatggattaggatttgaaagaatgttaatgtatttaacaggaatgcaaaatataagagatgtattaccattcccaagaacagtaggattatgtgaattttaa

SEQ ID NO: 10434 - protein, 461 aa, Parvimonas micra ATCC 33270
MFLLKDIFANEKNFIDKEVEVAGWIKNSRFNNNIGFIELNDGTTFRSIQIVVESKLDNFQTISKLLLPSAIIVKGKVVKSLGGKQNFEINASEIVVEGESTDKYPLQKKRHTFEFLRTIQHLRPRANTFNAVFRVRSILSYALHKFFFERGFVYAHTPIITASDAEGAGEMFRVTNLDIDNLPRTNNGEVDFTQDFFSKPTNLTVSGQLEGEAFAMAYRNIYTFGPTFRAENSNTTRHAAEFWMIEPEIAFADLKDVIKLSEDMVKYIIKFVLENAPDEMKFFNDFIDNGLLERLNSVVNSEFKVMTYTEAIEILKSSKENFKYPVEWGVDLKTEHERYICEKIVKGPVFLTDYPKEIKAFYMRLNDDNKTVAATDMLVPGIGELIGGSQREERLEILEQKMKDSNMNIDDYSWYLDLRRFGGTKHGGYGLGFERMLMYLTGMQNIRDVLPFPRTVGLCEF

SEQ ID NO: 10435 - DNA, 1443 bp, Kordia algicida OT-1
  CDS (1)..(1443): transl_table=11
atgaaatcatacacagtcgctgaattattacattcagaaacattactacaggaagttactgtaaaaggttgggtacgaacgtttagagcaaatcgttttattgctttaaatgacggatcgaccataaaaaatattcaatgtgttgttgattttgaaaataccaatgaagatattttaaaacgtattggtacaggtgctgctgttgctattaaaggagaattgattgaaagtcaaggaaaagggcaaaaagtagaagttcaggtaaaagacattacaattttaggtgatgctgatccggaagaagtatcaaaaacaattcttcaacagaaaagacatacattagaaaaactacgtgaacaagcacatttgcgtacacgtacaaatacatttagcgctgtaatgcgtttgcgttcgtcattatcatttgccattcacaaatattttaatgataacggattttattatatgcatgcgccaatcattacaggaagtgatgcagaaggtgctggagaaatgtttcgtgttacgacattagatcctaaaaatccaccactaaacgaagaaggaaatgtagattatacacaagatttctttggaaaggaaacaaatttaaccgtttctggacagttggaagccgaaacctatgcaatgtcacttggaaaagtgtatacgtttggaccgacatttagagccgaaaactcaaacacatcacgtcacttggcagaattttggatgattgaaccagaagttgcgttcatggatttggatggaaatatggacttggcagaagactttatgaaatctgtattaagttacgtgttggaacacaatgcggacgatttggcatttttagaaaatcgtttgattcaagaagataaaaccaaaccgcaagcggaacgtagcgaaatgactttgacagagaagttgcgttttgtgattgacaataactttaaacgtgtaagctatacggaagcgattgatattttacgcaattctaagccaaataagaagaagaagtttaagtacatcatcaacgaatggggcgcagatttacaaagtgaacacgaacgtttcttagtagaaaagcactttaaatgtcctgtaattttatttgattatcctgcaaatatcaaagcgttttacatgcgtttgaacgaagatgaaaaaacagttcgcgctatggatattttatttccaggtattggagaaattgtcggtggatcgcaacgtgaagaacgtttggacgtattgaaagaaaaaatggctgccttagatattccagaagaagaactttggtggtacttagaacttcgtaaatacggaactgcagtacattctggtttcggacttggttttgagcgtttggtaatgtttgctacaggaatgagcaatattagagacgtaattccttacccaagaactccgcaaaatgcagaattttaa

SEQ ID NO: 10436 - protein, 480 aa, Kordia algicida OT-1
MKSYTVAELLHSETLLQEVTVKGWVRTFRANRFIALNDGSTIKNIQCVVDFENTNEDILKRIGTGAAVAIKGELIESQGKGQKVEVQVKDITILGDADPEEVSKTILQQKRHTLEKLREQAHLRTRTNTFSAVMRLRSSLSFAIHKYFNDNGFYYMHAPIITGSDAEGAGEMFRVTTLDPKNPPLNEEGNVDYTQDFFGKETNLTVSGQLEAETYAMSLGKVYTFGPTFRAENSNTSRHLAEFWMIEPEVAFMDLDGNMDLAEDFMKSVLSYVLEHNADDLAFLENRLIQEDKTKPQAERSEMTLTEKLRFVIDNNFKRVSYTEAIDILRNSKPNKKKKFKYIINEWGADLQSEHERFLVEKHFKCPVILFDYPANIKAFYMRLNEDEKTVRAMDILFPGIGEIVGGSQREERLDVLKEKMAALDIPEEELWWYLELRKYGTAVHSGFGLGFERLVMFATGMSNIRDVIPYPRTPQNAEF

SEQ ID NO: 10437 - DNA, 1398 bp, Clostridium bartlettii DSM 16795
  CDS (1)..(1398): transl_table=11
atgcaaaaggaattcatagaaattaaacaactttatagaaataaagaacaatacatagataagacagttaaagtcgctggatggataagaacatctagaatgtctaaaaactttggatttatagaattaaacgacggtagtttcttcaaaaacatgcaaattgttatagatgaaaaactagaaaacttcaaagaaattggtaaattaccaataagtacttctttattaatagaaggtacattagtggctactcaaaatgcaaaacaaccagttgaaatacaagctacaaaaatagtagtagaaggtgaatctgataattcatacccactacaaaagaaaagacatacagttgaatacttaagaacaatagctcacttaagacctagaagtaacctgttctcagcagctttcagagttagaagtgttgctgcatatgctatacataaattcttccaagatagaaacttcgtatatgctcattctccaataataacaggaagtgactgcgaaggtgctggagaaatgtttagattaacaactctagatttaaatgatgttccaaaaactgaagatggaaaagtagattattcacaagacttcttcggtaaagaagctaacttaacagttagtggacaattaaacgctgaaataatggctttagcattcagaaatgtatatacattcggaccaactttcagagccgaaaactcatacacaggtagacatgcttctgaattctggatgatagaacctgaaatagcatttgctgacttagaagacaatatggaacttgctgaagatatgataaaatacataatcaactatgtacttgaaaactgtccagaagaaatggaattcttcaacagctttgtagataaaggattattagaaagattacacaaaatagtaaattcagaatttataagaataacttatactaaagctatagaattattattagaatcaggacaaaaattcgaatatccagttgaatggggatgcgatttacaaactgagcatgaaagatacataactgaacaaatattcaacgctccagtatttgtaactgattatccaaaagaaataaaagcattctacatgagaatgaacgaagatggaaaaactgttagagctatggacttattagttccaggagttggagaaataatcggtggttctcaaagagaagaaagatacgatttattaatggatagaataaaagaatgtggattaaatgaagaagattactggtggtatttagaacttagaaaatacggtacagctacacattcaggatttggtcttggatttgaaagaataataatgtacttaactggtatatctaacataagagacgtaataccattcccaagaactcctaaaaacgctgaattctag

SEQ ID NO: 10438 - protein, 465 aa, Clostridium bartlettii DSM 16795
MQKEFIEIKQLYRNKEQYIDKTVKVAGWIRTSRMSKNFGFIELNDGSFFKNMQIVIDEKLENFKEIGKLPISTSLLIEGTLVATQNAKQPVEIQATKIVVEGESDNSYPLQKKRHTVEYLRTIAHLRPRSNLFSAAFRVRSVAAYAIHKFFQDRNFVYAHSPIITGSDCEGAGEMFRLTTLDLNDVPKTEDGKVDYSQDFFGKEANLTVSGQLNAEIMALAFRNVYTFGPTFRAENSYTGRHASEFWMIEPEIAFADLEDNMELAEDMIKYIINYVLENCPEEMEFFNSFVDKGLLERLHKIVNSEFIRITYTKAIELLLESGQKFEYPVEWGCDLQTEHERYITEQIFNAPVFVTDYPKEIKAFYMRMNEDGKTVRAMDLLVPGVGEIIGGSQREERYDLLMDRIKECGLNEEDYWWYLELRKYGTATHSGFGLGFERIIMYLTGISNIRDVIPFPRTPKNAEF
